United States Patent Application Publication US 2006/0134663 A1 - sequence listing, part 27

SEQ ID NO: 39342 - DNA, 356 bp, Homo Sapiens
ggtatcgagtgatccctcgggtgatgatgtgcacctaaagtgtgacgacagcctatgggaaaccaagggaagggtcacctgtagaggtcggacattcggttttgctttaagaaactattagatcctaagcgactgtgttgtggctgagttaaaaatgtgcctgtttacttgcagagcttcttccattaggtgaacaatctgttgtgattttaatgtgtaagacctttggtaatgtgaggaattgattagatagtgcagcccagtctctagaggatcagatctgtgggattggttggggtggttgggcaaagtccatggtgagttaagaaatgactttggaagtgactctaatgttt

SEQ ID NO: 39343 - DNA, 468 bp, Homo Sapiens
atcgcttgggtgcatgcatgtgtgcaatcgctaccctaccctaccagccacgtgctttggtaaccatgtgacactgggcaagtcatggagccctgtgtgggcctctggaacgaagcagggtgagaaactccggtgcatagagttgttgtaagactgaggtgaggttctgtgtacccagcgcccaccagagcctgtcacagtgggagctgagtcacaagggactctgcttgctggtggtgtggttagtgccacctgctaggcttggccaggcaagaacgtcagtcaaggttaggtattcttgcatgatggtgcctacaccagctggcagcagaaacctgacgcaactccatagctgcaaatggagatccagggaaggctccacggaccatagagggctgtgtcgggagcagtgagtctgacattcctaatgacctaggacaatgacgtgtgtgttcaccacatgcatgc

SEQ ID NO: 39344 - DNA, 412 bp, Homo Sapiens
gcaatgcatgtgttgtctatgggccatgcatgtactgggaggtttaaataattctttagctgtgtgtttgctaatcagtgttagacattcttcatttatttcctgcaataatttatgaacatttcatttctccatcagccttacttgccttacttgccttcccatctttacattacagttatatttagtatttttattaatattaataaacactgctatagtacagtgactgtaaaatcgtttactgcatagtaaagcagtgaactattataattcatttctcatacagccttttgtttttcctggagtttctaattgtatttattttcttcttacaatgtcttgctcataataattctgtttcccctctcccctcgataaagctcaccataacagctcatctataaagtcc

SEQ ID NO: 39345 - DNA, 464 bp, Homo Sapiens
tgatgtgtgacttaaacgctgagaagccttcatatagtgcctgcacacactctattgtgaggtagtttctccaattcaaatacatatcctagaacggttaaagggagctttcatctcttctgctgctgtgatcccaaaccaaaggtaaacatgtgctggcaagctaccccaggtggcgatgaaaagtggccctaacctttcctccacacccatcctcagtcccactccttcatctttaccgcccctcttgtacagagcctaaaccacagctcaacttactgacttatctgaacccttcctcctcctagagtaatagacaataagggaatgactccactcaacatcccccgagttccttgaaatgtgcccaggaactaccaagcatgaatctagtgcacggttaaatcggcagaaagggacagctgggactacttcaggcatgtcctctgaccctaacaactgtg

SEQ ID NO: 39346 - DNA, 482 bp, Homo Sapiens
atgcatgtagcagggacagtaagttggtgacatgtttttctattaagacgatgtattagtctgtagtcacactgctataaaggagtcccccagactgggtagtttataacggacaagaggtttaattgactcacagtttggcatggctggggagagctcaggaaacttacagtcatggcggaaggggaagcaaacacgtccctcttcacatggcagcaggaagcagaagtgctgagccaaaaggggaaaagccccttacaaaagcatcagaacttgggaaaactcactcactatcaccgagaacatcagcatggaggtaacttcccccatgattcaatcaactcccactcagaccctcccatgacacattgggattatgggaacaacaagatgcgatttgggtggggacacaggcacaaccatatcagattatattttgcatcaatatccatatactatatttcgatactttatctcgtcac

SEQ ID NO: 39347 - DNA, 376 bp, Homo Sapiens
atattattgtgtgtacgccctgacttggagcagacgggcagtggagctcttgaagtggggcataggcgagagtgccccacaggccttcagcctctcctggtcaactggctccaagcagcattttaaacccacaggtgtacaacagcttctgttcccactgtctgagggacatggacagatctcgagggctcagcaggagaaggtctgaggtccaagggtggcagagggaccaggtggaggaccgccacttctccagccaatctcgggccactcagttccaggctgggcagccacagtgcccctcaaggccagtgtcccagccaggcctatgaaccacttcctcctgaggggactccccgaccttgcattggtctac

SEQ ID NO: 39348 - DNA, 353 bp, Homo Sapiens
tgtgtctgtgtatgagggagggaaggggagtgattcaagaactgattaagaggaacagccccagcacacagtgcagataggtaacgcaaaagtgtgttgctattgtgtaatctatagcaagggaaatgctggagtgtttcgttgtctggttttgttttctggaagtagcttccagcaagattgggaaaaaagacaagcctaattattccaaagtacacactgattattccctggctttgtgtagctgtgtattttccttttaaaaataaaagcaccatttagatgtcagacttttaggtaacttcaaagtttatccagtcagtcagagtgtgtctcctggggcacctggagac

SEQ ID NO: 39349 - DNA, 410 bp, Homo Sapiens
cgggtgatgacatgtggaggtgagggtaggagagcggtccgttgctttccaggtttccagaattcttgcccatctcccccaggcagaagtccccatggcacctccccagcttatttcccacaaggagtgggggactttaaaagaatgtatctctgatacttactgatattaactttgcctatgttttccctttcccaggttccttctccttggataactatgtgcaattgacaatgtagttattatcacctctgttctaggcagtgataagctcctacctggtctccctaaccccagactcttttgttccaatccacctcctccctgatgaaagatccatctttctttttgttttttgaggtggagtcttgctcttgtcgcccaggctgtagtacaatggcacaatctca

SEQ ID NO: 39350 - DNA, 457 bp, Homo Sapiens
cttatgtgttgctgttaatgcaggtgtgagagtgggaggaggaggagcaggctggcagaaggcaggcacaagtgcaggtctgggcgggagtcttgcagcgttcttgggctggccacacctggtggggcaagggaggtggaggatcctgccctagagcttggtctcctctgtctgaggtcaggttccccagtggtggggctccagagggaaattcttgtgcaagcagtttctcaggggccatgtgctgaggggaatggggagcaggaacagcctagaagctgagtgaggatgtggtctcagctggagaggaggctgatcgcatgggagctctgcagcagggatggcaatgccggggaggtggtcccgcctgaggccaggcccagctctttgcagccccatattaactacattggctgctggggagcctgagtgacgggggaagggggcagccagggag

SEQ ID NO: 39351 - DNA, 388 bp, Homo Sapiens
taactaaagtaaaagaggaagaaaatagaagcaaacgctcttgagctcagttccaaggaatggagcccttgcggttgtgcccaatgccccacacacttctcctcgagctgtggctgggcccgatctatggccactttgtgcgaccctcagaggcgccccttcctcaagacctttgactgccacctgctggaattttgtagtactgcagatttgagatgtcccctatgtgaatggttgcaccctcaaacgtggtggccaccggcagtgcacaacatgcaagatctttccaaccagattttgctgacaccctcctcctaccagaatggagactcacaagccgtccttctgtccctccaggagcacctgggacaggggtttgttggccggg

SEQ ID NO: 39352 - DNA, 639 bp, Homo Sapiens
tgcctagtcacctataggatccccctgggttcgagttccttgttttttatggaccgagagaaaagacagaattgaaagagactgagggctaaagcgagaggggtctgtggaagacacctgttggcggagagcggtccacgcaaacatggtcatttttaagaaaactaagataagtgctttggaaagaaaatttgctaacaaaatttgctgttaaatggctttgaagtgcttttaggttcactcttctttggcagacactgttgactgggtaactccacacctttttcccacccttttcttcctgatctgcttctgctacagatgctggaaagctaagtgcatgaattcccaagctgtcttcgtggctggatatgtctatgacccacttctgactaaagagtagctaaaaatctgatggggaagggggcagtctgagaaaaattgctttcctgatatagtggacagatgtacttcagctttttcctgccttgaatatagatgttatacccagaggtgcagcaaccattttgtgatcatgaggctacaagccaacattgaagactaatagaatggaaagagagacaatgcttgggtcttttgcggaatcacggagcaacattgatgttggaatgtctccct

SEQ ID NO: 39353 - DNA, 391 bp, Homo Sapiens
actccatctcagaaaataccagactcaaaagaaaagaagaagcgagccgtataggtctccttacgagcatcgtattgaggctgctccgagttcctgctggtctccggagcagtccagacagtggaaagggcgatttgttctaaaagtctgattttacaatccaggatacctgatatggaagatgatatgcaatgtcacaggagaaggtgcatttccctagacattgagacaggtcagggtggggaatgatactttaatattgaaccgaacacgtgactcttctacaaaatgtctgaattaacagcccttcctttggacgatgacctccagacaatccaagtagttattgtcctctttgtactctttcctgtgctgtccaggaacacctgtg

SEQ ID NO: 39354 - DNA, 411 bp, Homo Sapiens
gcgcctgggaagtagcgaggaccagataaattgtaaatgtacccagcccagtgctgacacatagtaactcggtggcagttgcaggccaggggaacagttgttaactcatcaccagaggggccagaactgggcagggggaaaggtgtcctgagtgggagatccaggtcttggggtgctccgactctggatctctgggaagaggaatccccaactctgcttcccaagtagctagaaactgacttaggagggggacagcgtatagggaacactgaaatgctgctgtaaacgatggctggagttagcctcatctgaactctgtgtttgagggtacacactctgaagtcagatgatacggattcagatctgcctcttttatatactatgggacaagtgacttcacttctctgtgcc

SEQ ID NO: 39355 - DNA, 484 bp, Homo Sapiens
caaccaacacccaaaatctagagcaataatgttctagaaggattatgagcacattacagaaaaatgaggaaaagtctccatcaagcgggaaccactaccgagagcatgacttttctgccaagaaaggaggtcttttctggacctccaacccacagttcactgtggttcctagtcattttgtttttgccagtggcctatcttttgcttctgttccctctctcccagaacctaaaatattatgaatttgccgattgtttttaggaggtgcttaataattatttgtagatggctgattaatggaagggacagtggttaaatacgtagctgtggagactcagatctaatacaggtctgggtttcacaatttacttgctcaccacaagctacatgacttctctgagcctcatttttctcataccttaattaaagagagaatatgtactacttcctagagttactgtgagagttaaacaagctaattctt

SEQ ID NO: 39356 - DNA, 598 bp, Homo Sapiens
tactctagaggatcgtcacactgggttcgagttcagaaaaggtggtattgcagatggatgggagtggtgcaggcactttgttttcacatggcttctttccccaagcagtaagccccttccaacattgccaaaacatcctgcagtttttaccagggttcctgcgctgagggcagagctgagtgcagatcaaaggagaaagagaaagaagttggaggttttgttgtaatgtaagacagtttcatcagcctatggatttaaaagtccaggctgacttacctcttcctttcctatagattgctcaggaaatatggttattctagtacgtgctaagcatcgttgtaaaaagtaagcccacagcctaaaatactttgaatgtcttagacaaatgtccaatgtttgctacggttttggattatcaaggccactccttacctctatgagtagccaagggtagtgctctaagctgtgagctagcttctctcagagatgcccacaaacataaacaccccttttcaaagtaagctgctatggactcataggactggaaaatacttcagagagtaatccctccattttattaaagagaatactgaaacct

SEQ ID NO: 39357 - DNA, 609 bp, Homo Sapiens
gcgcaggtgactctagagcgatcttcacactgggttcgagttcaaggttgaggagtagtctggggacatcagctcttaatatttttcaagttttggagcaagtggttctaggttctgagtgaagtgaaacagaatctctaggggcatgtggtaaagataatcccatactatgtactgcgtagagttaaagagaagaggcgagagcatgaagataaaccagtacaatcagtcgttcacataccactaactacaatgatactcccatttgcttcctgtgaaagtagttactaataatcactgatgtcgctttttaatttcatacatcctttaactgtcttcatataggtattgaaagagtcaacataaaagccacatccattttctaattttgaacaatagttagagaaacctaatatcttctcatattttggtcttgcttctgtctcatgagttcccaaaatagatatattatctgaatgaagagttcatgggcaaatgtcacacttttctaggtttggctaattatatttctgcttttgcttagaataagattcattttcctattctgctaataaaccacgtgatggcaaaatgccttattctgagacc

SEQ ID NO: 39358 - DNA, 496 bp, Homo Sapiens
gtcgagtctgcgcacgatggctggcatgctcattctcagctctatctcatcatgctaggctagttctcatgctagggagagggtgtatgactaccggatctgttatagggccagtgacagatcccaggacttatggtgttgatgatgttctttcccttctctcctgagtaaattcagggcccaggtcatctctgtgctgggctccagggctggcagcccgggccagtctccctgcctgagaagcgtgattcactgacaggtggcatccgcgaagatgagtcgagagccggctgcggaacctccatagcactctgcaggtgaaaatcccaggagtccttgggatctgcaagtgaaaaagaccgaatctgccctcgggactgggaggagacagagagtaaacaaacgggcagcggacaggtaaataccgaaggtgtgagcaggacatcccggacacacggatggcgaagatgaacagaggaggggggcagaaccactc

SEQ ID NO: 39359 - DNA, 452 bp, Homo Sapiens
ttgttccaaagatcttccctgaggacataatgacatagcactataattaatggcatgcagtggtaccagatcagaaatataaatctcagtcccagccttattcctggcttaagtcttatgggattctttctggaaatcaaaaattctacccagagtatgtctagtactcttccttctcttcatactggaataaaagtgtcctaagatactttttctacatgttagaccttctaaaattaaaaccatcttaaaaatgatagcaaaagaatcttccagctgttagaaaaaaggaggaagttaagcatttatcagtggttgtcattgttggcacacacacaaactgtggttgaattttaagtctggatccttaattatggcttaatgtttatacattaaggtttcactatgatgcagcactgaaataaacagttgtgtaatagaagattgcatat

SEQ ID NO: 39360 - DNA, 607 bp, Homo Sapiens
ttcacactgggtcgagtcagtggcacgatcttggtctctgcaactccatcttccaagctcaagcaatcctcctaaagtgctgggattactgctatgagccacctcactagacctaattctcacttacaaaatgagatacgtataacaaaaaaatgaagagaacatctctttaaatgaggtctcaacttatttcctatcatacacatatgcttagggagtaggttaaaaatcatttaagattctcaactcttgttttgaaaaacacttaattaaccttgttaaatatcaaactttacgaccataatcataaccttaagggaaagagcgtcttttcctttggcccatttgctcacggcaggcaatcttcttagtgctgagtgttttccttcagcctaaatgctaaaaattcaggacacagtcattaatagggatgacagcggtagcatttcatttatgaatattcatgaagtgaaatccatagcattaattacattaatttacatacctgaatacaagtgagccataagtgataactaagccttaaaaaaatgttgctaaccatatattgtatgtttccttttaaatgttattaataagggtgaagtga

SEQ ID NO: 39361 - DNA, 521 bp, Homo Sapiens
ctagaggaccctctagtaatgcatacagcctatacacatcctctcatatacttaaatcatctctagattacttataatacctaatacgatataaatgctatgtaaatagtggttatactctattgtttggggaataacaactaaaaaaagtctgtatatgttcagtatagacacaaccatccatattttttagccaaatatttttgatccacagatggctgaatccacagatgtgaaacacacagatacaaaagatcacctgtatgtgaaactgcacgtgatccaagtcaccattatttccccacaggtggcctgcaaataacctgtcatgtgagctcaacagagaatctgtttctagcaatcacaagtgcctaaccaatagtaagaagcagaacagccccctaagaggaatgcagtttaggaagctggctacgaacctgaagagaatcctctttgttttgatgatgttgtgcaaaccagcttgtgatatcatggaacttttagaactcgaacccagtgtg

SEQ ID NO: 39362 - DNA, 545 bp, Homo Sapiens
ctcacacgggtccgagtcaaagctaaactgatcactctccttacaagcttatctttcaaagccctgagaatggcactaccatctactcagttgctagtagatctaaacaatatgatatgatatatactgtctaatgcagaaggagatggagacgaccaaaccatatagcctaaaattagaattgacataaactaggaactattatcacgtgacatgtatctcggtgactattttgcgaaacaaaagagtaaactataatcatacctagaagaacctaacctaaaacaaaacgatacacaagagttaacagcaagaagaacggaaagaaatgaaactaaaaagaaatactagcataataattcatttaaccagtattatgtgtcagacacaaagttaagtaagtggtccaaggtacaataattaagtagaaagttagggtttcagtatcatacacagtcgtaatcaaagcaaaaagatattatattgaccaaaaggcttgtttataataattagggatgctctacactgaagataaaaccatcctg

SEQ ID NO: 39363 - DNA, 563 bp, Homo Sapiens
tagaggatccttacactgggttcgagttcaaaatgtcttagattttgacactaggccaagtcattatctctgtaacaggaaacattgtaagcttgattgcctgttcctgaagtgacttgcaatgaacccctcaatatcaggcatcagagtgcctctcttcatgggtagtgagaaaggcagtgccctattctgcagactaggctgctgggcaaaggggagaatttggtggtggtgaagggaatcaaggagggtttctgtcataagaaaccagtgtggtttacctttgccaggcgtctgagttcctgatgatgttcctgcagttatccttttccttatgatttaaaagtctttagcagccaccgcactcagcctacttaatgctaccaataattaatggaacatgtatgcttgaagtgaacataaccacagccatgacatcctttgcttttaataaaagctggtttagctactactccctcagctgaggaattacagagtcactccctaatctttgtgatgggatgatcacttcaggtcagaaaccaaataaagtcatgtagtat

SEQ ID NO: 39364 - DNA, 476 bp, Homo Sapiens
gtactctaccggatcttcacactgggtcgagtcaagggattagctgtggaatcatctattgctaaaccttctttgttgccccaaatacactcagaaagcctacatatcttcaccttgggttatatgctcttagtagaccagtaccttcaacaagtgagattcctagacagcatgagcaacataaggggagtggtaatattttactccattttcacagaaatatcttcagccatatgtccacaagagcaggattccattcaaaataggcaaagagcaagagtctcgtattagtctaaagtaaaaacaggaaaatattaaacacgggtccttacaaaaaagaatcttgtctttgagccttagaacaaaaggttgttgcggatcagcagggatactggaacagttaaagggatatcaggggaattgaagggatgttattacaaggagcacttttagaaacactcttccttgaaggcccg

SEQ ID NO: 39365 - DNA, 498 bp, Homo Sapiens
gactagaggatctccacactgggttcgagtccacatagcctggtgtcacgtaccgagttaccatctactcacacatgctaggtacttacatctctcacaggcttgtcttccttactaaagtcataagctcttccgagtttataacaataaggacaatatttatcattgtattccaaatgctaaagcttatagtctatggggataaaacaataatcaaataattgctctatgaaagtgtgagataaatgatctgagggagagaaacaaacttttgtgagagcacatagcaaaggactctgacttgccaaaggagttcagaaaatacatcctcaagatttaagctgatacttgaaggctgagcaggcatgaactaggggaagggggttggtagggaatagtatttcatttagagaagacatcaatgcaaaggacctgtggcaggaggaagagaaagctgagaagctggaacacagggggcaagggaggaaagttacacaa

SEQ ID NO: 39366 - DNA, 443 bp, Homo Sapiens
cactgggtcgacgtcagtctaaaattgtgtcacgactttgaagaagtggctttctcaatggtacatgcttaaactaattgaacgaataggctatttctgccttgttagaaatgtaagtcttctttttctatccacgggcaggaatttagtcatattatcctttgtctttgctgtgactaattatctttcttccttgcagagccccagaactcggaggtggttccaactagttgattaggaataacaatatcacatggaaaatggcaagccccagccctcccctgacagcattagcaaaatctcatcctgagttttgctcttttagccctaaactgtacgtgaggtgggagcccccaaattaaacaaaactagctcgaatcttattgcttagtggcaccttcctgtggctttgccagacataaccttgggcagcaggagctgtg

SEQ ID NO: 39367 - DNA, 379 bp, Homo Sapiens
gagtccccccattgagatatatatgttgttccacatactgctacacgtttgtgcccaggttttcctctgcttaaaacacccctctcatctttatccatctggagaactcctgttaatttttcaatactaaacaaaagtgtcaccatttcagtcaagctttcctcgatctctccagatggaactgatcatcttcacacaatttggtgtatttactcatttacatatttgccttcccaactagtcctttaattccttgatggcacagatgtcttattcctttttctatatctagcacttaagcacggtcttgagagagtacatgggtcatgtactggacagatctcccagacaaaaaatcaacaaagaaacatcagacttg

SEQ ID NO: 39368 - DNA, 470 bp, Homo Sapiens
ggcggtgtgaacactgggttcgagttccttaaggagtcgtgaactggcctctacttctctatcctagtgtaaacttatctgaccaccaaggtatatagcttgatgaccaacaaataatgtacccattgccccagagtacctttcttctgagcatacgactccagcattcagggatcggctagctagcatctcagtccacactctgagctgtgcagcagttgtgccctggtgctaattctcactctgtccctttgattctgggccagggggtcccttggtggtagctgccttctggtcaggaatgtgggtgaatggtcgacccaatagttgtcactttcgggttgggcccttagagatcaggaaggaagtgtttgttagaagcaagggctttgggagtccttgggagttccgtaacctttgaatctgtaaagtaacctgtaccctagtaaattagaataatttctctctgg

SEQ ID NO: 39369 - DNA, 597 bp, Homo Sapiens
taacctcctgtctgggctaagtcagcctcaggcccaccaggtcaaacaggctcatccccagccttcttaccaaggagactgtatgggataactcaagaacccttcttcacctatttcattcacctgtagaagataggtctctaaatgaaggcacaaagtctctaatgtagctcagccccagactcttaaaagattctcatcacccctgctaacacacattcttaacccctgattgcaccacagcctgttggccaccactgagtgcattacatgacatgtcaaccagggaaaagtagacacagaagacttcacacagttctgggagttagaacttgcaggggatcctcccctctgccaaatggctctattgagcctccagcaatcattaaaatctcagttaggcccagtttcaccaatctggtaaatgcaaccaatactaaacctgctgacaaggaggccacgtacagtacccacctaggataagcagatttcaggcttgtgcagcccgggcccatgttcactgagacactcttctcttcctcactgacggatgtacttcgaaaactcaactcgctcacccaggacccttcagggggg

SEQ ID NO: 39370 - DNA, 558 bp, Homo Sapiens
acactggttcgagttccatcagtttccctagccttgggccataacccaatgtgctttaagaacgcatctgttagtatcttagcagtgtcacttgtggatagtaatgtcactatcccacaagcgacactactctcgttcagtattacttaatgggacaaaaaacaaagcaaattatataacaacgactgacctgacctcctgcagcaaacaggccatgacagataatcaaattccactaaactttacgttcacctattttaactattaagagacgaaactgaggtcctttgcaatatcctcccctttccgagaactgattatttttaaagtattgtcacaggctatacttgcaagcagctttttaaatgcaattccaacatcagcacgttggggcactgacttgtatttttggcagattaaagtaacaaattttattcgaaattcttctattcagaaaaataaaagcagggggaaggtattctgcttggatttcccaaacagacaaagttctttgactttgaggacctacagaagacatttgcagaaatggtgttttgc

SEQ ID NO: 39371 - DNA, 573 bp, Homo Sapiens
gcagtatcacctgctttgctcccaaagtgcagtgtgagccactgcactttggactgttacagcagtcttatagtttttcttcagcagtgtataatagacctttctcaatttctacattgagagctgtatcatcttccaagattgtgttgtatagtattccattgttccaaagtaacataatttaaccattccccctagtgttgtatattcaggtgtatttttcatagagtgggttcagaaaagtccaaaatgaagtgtgcagatttggatacaagtcatgtgatcataaatgatttgagtttctctctccttaattaagtctctatataatttgaatttcaaagtttgtcttttagtaatgcagttgattacttcagaagcggagaagaattgtataacttttcttgactgatctgagtaagctttattttgttcccatttccacagaacggacttactttagcttcaaattgtagagttgtttagttaactgcttgtgagaagattagatattatttctccttgtaatcgtttataaggaaaactaaaatactgtagtagtatgtaacagag

SEQ ID NO: 39372 - DNA, 610 bp, Homo Sapiens
cgaggtcagtcacctgggatatggttgacaagacttaggcaggacatcaggctcccacacattagtgtttagggcagaattctgatcttggtggtatgtggagtagaaagcaggaaaatgaaatcattccatcccccggaaaagcccacaaagcctagcttctaaagtggcacagctatttctagacccctcccactataaggggatactaattcaactcctgccttgcccaaggactggagatgagagcatcagtgacaattgcaggagagaactgaggaaatcaaaggtcaggatttagctgctgattcacttattcattgaacaaatacacgaagatcctcatcagaatgctgaaggatgggcatccagcaaaatatccttcatggattttaacgtctaataagttttaattctataacattttattacacagggcatggaatggtcatttggttcagttatttgaaaccaattaaactgtatttatttcaagctcagtccaaacttgccacactcttgaaacacagatgtcattataaacttcatttagaagagggaaaacaacaatgcacccttaactgcctcataccccactctctgcaatccg

SEQ ID NO: 39373 - DNA, 656 bp, Homo Sapiens
tgaggaccgcacactgggtcgagttcgtgaccaaatactcaaagacagacagtcaaaaaggatgaactgtttctgcgctagtgaaccagtgtgtttctgaatgcccactgggaaaagcaaaacccctgtatgagagtttcttgagatcagaactgagactgtgtcaggccccggggtaggcaataggaatacatctctgatgatgaacactttgcccattcaaacaggaaaacacctcatagcacaacctgcattccaagctttcattatgtatgcgggaataggtcatttccaaaaccacttccctgcatacctctctacacaaactcagcagaagctggacacaaacaagaaggtccaaggaacacttaaggaactcaatgccctgccccacccaacaacagccaattaatgttgcacagcctgttttagtcttggagggctattctgtatctattgcaatgactcaattctgccactttattgcaaaagcagtcacagacaatatataaacaaataggtgtggctatgtgccaataaaacgttatttatgaaaacagacattatttacgaaaagaggaggtggacaggatttggccatgagccacagcatgctggctcctgctttactacaaatagatcccttggaaatcgag

SEQ ID NO: 39374 - DNA, 388 bp, Homo Sapiens
ctggtgctgcatgtgttatgtatgtagtatgatacatttcataataaaatttaaaatcagtaatagtgtccttggtcgttggaacagtataaaagggagtatggggagaagtgagtcttccttctacaacagacccctgtccattgtgcgagcagcaggtgcttgcgaaaccatccagagactttctgtactttcttgtggctcttggcacagatgggctcatgatccctgctttgctctgagccttcctttgctccatctgatatgaggtggaggcttggctagtcgcagcatgctgagctgtccccgttgccagtggtcttgaagtcagtgcgatcatgtaccataaatgagcttcctggtcttctgttgatggacctttcatgtg

SEQ ID NO: 39375 - DNA, 406 bp, Homo Sapiens
gcgcctagaggatcctcactggtcgagttcacataatctagtttttggttccacataatttgggaggtggggggagcaagtcaaggggacacaaatatgtccaaaatcaaatcacaggttactataactacaaaaaatgttcagattactgcttttgtgtaatgaaaaggtagaatagtaatttatgtcctttaaaactactagctattttattttaaaagcatatatcaaggtgatttaatagcactattaaaaaacctaaaaattgatatatatttatagacttaacataaaaaataacccataacaaatacatctagatgaaacaaattattggcctagaaacaacacagcatttctggaaaggaattatcaagagcagaatgaggaaagcataagggaatct

SEQ ID NO: 39376 - DNA, 479 bp, Homo Sapiens
ttgtgatctagaggatccctcacactgggtcgagttcagagtgagccactaccacgtggagaatgggaaagtggagaagttagtgcaagacaggagcttaattcccaatgacagagtgatcatttggggctgttctttaagaagaagatcagtgcctccctcaatttaagcaggggttccaagggtttcctaggaagtctagaaaacacacacagatcccaacaagaatggacactgatgggtgaggacagctgctccctgaggagatggccactgggcactgttggcacatcattctgggaaatttcagtttagagcttattagaagagacccagacactaaaggtcaaaggcgggacatgaggagcacagggagagggatgtctattggcattcagagatctgttatactgtcaactaaaccgctctctgaatttgagcattatggtcatacattatgagaggaaaaagatcaacac

SEQ ID NO: 39377 - DNA, 377 bp, Homo Sapiens
gctaaactgggttcgagttcagtcatggtagcatgtctaattgatgatagtcatctatattttcttaaatgttttcattgcaatgtcttaattgacatcttgtccagtaacatctatattgaaccttaagggagatgtcatagttagtttttcccaccttttttatagtaaattttatgtttttggcatctgcacaggtgtctatgtacttcttgatcaaacagtggaatcttttagtcattgatatttctgtcagtaacctgtgggcacagcagaacccatccagagacccataagttcctaatttcaccctaacgggtctttaattgaacctcactgtggcaaattaagtagttcagcgtggcagggagactggg

SEQ ID NO: 39378 - DNA, 420 bp, Homo Sapiens
gacgttaacgggatcgagtccaaaacttctggttacaatgcccttgggtctagtaatttcttcactgcaccctagaccaaaagaaatacctaacaagttggacatctgaaaacacccagcttgactgagatataatttatatacaattaaatgtacatatttaaagtgtaaaatttgatatttaacatatgcatatatctgtgaaacaatcatataatcagataatgaacatactcatcatcccaaaagtttctcagcagccttctgaaaatacaataaacatgaattggctgattggaggtagagatgggtagaactggggaggggtgaagtaggaaaaagattaactttttaaaatgctttcgtatttgtttcatttgttatcacataagcatgtatttcttttataatttaaaaaca

SEQ ID NO: 39379 - DNA, 419 bp, Homo Sapiens
aaagagttagattcctagggagatagatttctagaagtgagcctggctgaccaaagggtaaatgcaaatgttattttgctacatattgtcaaattctcctaatacagtcatagtattttgcgttcccaccagctatgtaatgtaagcacagtatcttccccctacaaccttttcaataagacatgttgtcaaactttattttttgccactccgatagacaagatacgataactaaatgtagttttcatttgcatctctctttttatgcatgactgagtatcttttcatattaaaggagcctttacaagtgtagctgttctgacaggtttgatattttaaaatacgaaccttcaataacattttcccaagataacagggctatgaaatcctcttaaaatctgagtatttaaaactctcca

SEQ ID NO: 39380 - DNA, 389 bp, Homo Sapiens
ttgcggcgcctttcctaaaatagaaattgatggtgttatcccatgcttaaagcgatcaacggattcccaccatttttattccaaacatctcaatgtttgattttaaatgtcctttcgtggcaaaataaaattaggtggctctatgtcattttctagatcacttttttgaaatattctggtccaggaaatctaaaagtgtagaaactattgcctcagctggcagatcttcacagctctgagggaacaccatttgtgatgggaatcacctttaaatgaggcatccaaaatactgggactggggggcagttcagatatacctgcctctggggtcacacagggcattttaaatgatcccggtctccctttcttggggaaagggcaccgcaaaa

SEQ ID NO: 39381 - DNA, 485 bp, Homo Sapiens
catacattatagcttgtaaataggtgtcactttttctacttttaagaggaaaggtatcctgtaaaccaagcaatctattcacctgttagctagttatcactgaatcattttgagccccacagccaagattcctagatggcatttggagaaaagaccactcttgaatttccgaataggttgccctttattgttgaggccagacagtgtcttctgtggtcctttcttgaagcaaggttgcttacagacctactctcttggtcccctggagcagtgacttcctcagtcctttggtctttgcctccttaacagtaactggtggctttgccctggttaagagctcttgctgacttccacttgtccttccagtatgggcagtcaggtaactacatggaactggcttggcattgcatggaggagtgcggccaggggactgagagagcttgtcaccagagccttcctgtgttgtgtcaccccacactggtaac

SEQ ID NO: 39382 - DNA, 466 bp, Homo Sapiens
tgagtagaatgggcagccctaccacttcctcttattccagctatatgcttgggctgtggtcttccatatgagctgtgattccagctaaagcctgtgagctgcttgaggattctgtattgagacaggcaggggtagggcacaaatgccactctcccaacacccctagggcatctgcagacctgggtggagcaggctggaggaagacactgtcccaggtttttctgtggacaggtactgtgagctttgctgtcatatagcacctgggggttaaggtctgccaagcacaatgggggcagggcaatgtcctagagaaatcttctaagcttttcacttgtcacactagctgacatctggttcttcccaagtgtcatgcacaggtctttgtgagcagaagtgtccccccacaggttatgtccctcttaggaatacccgtttaaactcagctaactgggctgggacagggtct

SEQ ID NO: 39383 - DNA, 400 bp, Homo Sapiens
atgtctataactgaaacagcccagcctaaagaccaggcttgtaggcattcgcctttctgtaaaagggactataaaactccacccactggtccaggaacttgcgtgtgcaatttgtcctctctccaggatcttggacagagagatggggtatagggcatagtaaatgatgtgcaggataggaaaaccctagacctgcatcacacaaagggtgtatggtacaaacttttatactctatcttgtaccagaaacctcaaataaagagcataaatactggcctaggataatagaaatctttcaggctctagcaggaacaaacataaagtccttacctacacaaagccctaactcttccactaaccagccacaccagatgcccgggggccaaggaggaggactctt

SEQ ID NO: 39384 - DNA, 537 bp, Homo Sapiens
tagacacagcagacagaggtgggctagacaaggacagatggaaatttggtgtctactggtcgccccaggcaggaatgactcagaaggaagcctggcgtcctggttccatgccacagggaaaggcaactgggtcgaaataggccttggtctccagcactatcagtgacccagggaggtgacaggctggagcaagtgcagggcaggcaggggaggggacgccggccacagcgcactccacggcgaattgtctttatgggcccctcctcggaagaaccccggtctatctgtcagtctgtgacagggccacctcaacttgccaccgaggacaccaaaactctccacagaaccctctgcccctctgggaaaccccactgtgctccaggacactcaaaaggaaaggatccctggacaagaggtcctgcccaggaaaatcaggcaaattttggtcaacgaccagcacagggtgcacaagggaagagcagtggctgaaactcagaggtccagcatcagcgacgccctttggagcccagggaacac

SEQ ID NO: 39385 - DNA, 511 bp, Homo Sapiens
gagttattttgcggcgccctttccaaacctgcagttaagttagagatgcctcctataaggtgaggaaaatcatgcctctacatcttctcatgcttcctaagcaggcttaaggtttcgttttgtgccctttgtgtaggtgacagtgtgttcatttggcgtgtaggtaagctttgcagacattgtgtgttctatataaagtttcttttatgctcaatagaaggcccttaccttgtcataaaagtgtacagcataaatcagaatatctctttggcaactggttgaagggcccatttaacactggaacaagtataactggctgtgattcatctactatgtcgacatatttgaagtgcatttaccctcactttatcctttctggaacttatatttctttcacgtggtatatttcttttggaggtatggcttcttcgcggcatttgtagaaaactagcaaaatatgagctttgagttaccccggatccagaagccacatgtgcagactagactttgt

SEQ ID NO: 39386 - DNA, 537 bp, Homo Sapiens
taagtattaactgaggacatcttgaggaccagtgtgaggagtctgtgactccagacatgtggagctccttgacaggggtttcaaacatagagttatgatacttttaccggggtgctagctatggaaatggagacaaatgatcagagacataaaagatttcggggaaaggatcagccaaatgcactgacttctgtgtgaaagactaggggagaaaaactaaagctcattgaaggatctaagcatgtaggattagaagagggttatgccattaacagaaataagagattcgaggtaaaaggcaaattttccaggacagcgataaggagttctgtttcagagagtgaatttgagatgatagttgaatggaaatgcacagcagacaacacgaaatgtgagacatcggggttggagatagagatcagcaaaactgatgagtcaagtgtaggaatgcaactgatctttgatatggataaaaatcaagggctaaatatgaaatcttggggaattttctgcattttggaaaagggcaccgaaaaa

SEQ ID NO: 39387 - DNA, 473 bp, Homo Sapiens
gcgtatgccaccccttcccaaagtgactgccaaatcagcattctgtcaccccacagtgcttcctaccttgccaggcaaccaccccctcttcctgaactgccttttaggaaaatgaaaagtagataccttttctggaaaagagtaggggcagcaggccttagaaaaacacacaattacattggtcactgtggctcagtgtgaaacggttgcccacatggtacctagtgaccacaagacaccataaggcctaggtctgggcttctttaggaactggttcttaccctgctgtgggccccagtttccagagaggtaaaatgtggtctttggagcagacagtttttctagtcctaatatcctgggagttctttctcccaagatctagggtcttcctggacccatttgaggatgttagctgggctctgagtaggtggcagtgcactttcaggatggcatgggctttatgctttagtcag

SEQ ID NO: 39388 - DNA, 467 bp, Homo Sapiens
cgatttgggagaacgactctctcttcagagctgtcagacagggacgttaaggtctgccaaagctgtctgctgccattttttctgatatgccctgcccagagaggttggatctagagaggcagtaggccttgcttgagatgtggtggactccacccatttcgagcttccaggcctctttgtttacactgtcagcacaaaaccgcctcctcaagcctcagcaattgcggatacccctccacctgccaagctgcaagctcatggcaggtcaatctcagactgctgcgctagcagtgagcaaggctccgttggcttgggacctgctcagccaggcacgggaggatatttcccggtctgccgattgcaaagacttggggaaaagcgcagtatttaggcaggagtgtaccactcctccaggtacagactgtcacgacttcccttggctaggaaagggcaccgcaaaagggtcc

SEQ ID NO: 39389 - DNA, 353 bp, Homo Sapiens
gtattcagcagggtcacctccaacggagagtcagctagcttcagtgggtcataggtggtggcatcaggaaagacccgcccatcacatactcttcgcattactccttagtgacagacttgaacccaggaggctccctaacaatgtgactgcaacctgggcgggtggctagagagtggagcctctcgagcaggttaggcaaagagcttagagggaagatctcaagcagttttagaggcttaacaggaccccgggtggagctccccacgggacagtgggggcctaaaggctctgagaccttgagtgccggtgtagggacggaagcaagggtggggatcccaggggggagtaccagc

SEQ ID NO: 39390 - DNA, 370 bp, Homo Sapiens
ttatagcattattcctctcttcacatcaggtcatgtggagagctgccaccattccatataggtagataacctgtgctcattgtccataggacaaccagagcttccaggaatgggtgtggccaaggcgctgggtcccagcacttcagtggccgttgataacagaggcaagctttcgactgaacccctttaggctccttcattcctgccagctcacccttacctctccagtagtaaatgggcttgtgcctttgcctgctctgggtgagagtcccagagcacagtagcccatcacacctgtgttgcagctgtcactattccctggatacagaaagaaacaaaggccaaagttagggtgctaatgggtggggat

SEQ ID NO: 39391 - DNA, 447 bp, Homo Sapiens
tatagaggatctgcccctggtatacccatcccacagacacttgacctgaaatagggggcaacagagaccaggaacagggagcagctgacagcagggatttgaggtcaagagaggtcctggctttagcgactgattggtccgcactcaccactgtgtttggagtgtaccagagggcaagtcaggaagacccgagatgcagtcaggtttgagcaacagtcgggtcattgaaggtgaacggagttggacgaagggcaggctcactgggctgaatgagggcagagagccttggcggctcgggtagggcgtaccacgctctcgcccgggcatgttgtagatacatcctggaaaagagatgctctctgagatacatactgtagccctatttggcatgagactttctggcaccttttagtactaattaattgccaggcgtggggataccagggg

SEQ ID NO: 39392 - DNA, 391 bp, Homo Sapiens
cggtatcccaccctgcacaaggccgttgggtgatgtcccctcctgtgtccatgtgttctcattgttcagctcccacttatgagcttttcttttagtcctttaaatgaaatgaattaaaacattaaatataaaatatgctattaatttgataagcgcatgggattcttagccctttaaaagacaagaataaattgcagatgaccttggttagtaagaaaaatgtcttcaaaaagtgatactgctccacaccttcaaccatcaaattaccctttacacttaacatgtgagaccccaaggatgagcaaacttccacagaggagagagtgagttataactgttttaaacatgtggtcagagcaccctcaggtatttggggtggggataccagggg

SEQ ID NO: 39393 - DNA, 422 bp, Homo Sapiens
tcctgagtctcctttcagacctgggtgctcaggcccatcttccccagctatgtctcagacccagttactagaataactgtctctcttggtagaacttaggcataatgggcactgagaagggtgaccatgtccccacccacctgctgccatcccctgacttcaccagtgggtcagcaacaaggcagggtgctgtatggcagatctggggctcagctctccacctttcactgagcaaaatgccattcagattgagcgtgcgaagccccatggcagtggacactgtacatcagagtcccgtgggatgctgttaaaagtccagatacccacattccagcaccactcccattgagggcacgagctgctgggctaggcaacggactgctggcaattaccctccacagacccagcaaatttgaaacaga

SEQ ID NO: 39394 - DNA, 405 bp, Homo Sapiens
ataagatcctgtcccaccacagtggcctgctataatcttaaacctttcccgctactctgatctgacctgaagaatcccagaatcacaaggcactacaagttgtgacttaagaataatagtgatttaggaccttctgaatcacaaaatcaaaagaacattgaatattcagatggagtattcttatagttttactttattgaacttagaaaatactttcataggctcagcctaaatcctggtgcttctcatcctaacctgtttcataatgactaagttccttagtccctaaattctcctacattggggtttctctgttacatagcctttaagctgaagaggaaacaatacagatgctcctcggcttacaatggggttatgtcccaataaacccactgtaaatcgaaa

SEQ ID NO: 39395 - DNA, 388 bp, Homo Sapiens
atagactctagccctggacaagtgcttcctgtgggtagctcacttccaggagaaagtgagatgaaaatgggagggcgctgcaggccagtcccagctcccaaactccccagtcagatcagtccctacatcctataggaggaaatacgtgaggggtcagagacaggccaggacagtggagcttctccatgtggaaggaaacatcaggagtaaagcaaaagcatttctctaactccttcagcctgtatattactggagttcaagactaaggccacagtattgaaatgaatgtgtggatctgaaaagggagatgcacctgtcaaactgggaaggaagaatgtttgaaaatagaaaaatacactgacctgggcttgggtggggataccaggga

SEQ ID NO: 39396 - DNA, 448 bp, Homo Sapiens
ccgtgttccttttgcttgatttaatgaaaggctgacataactaggtttgattttagtataagaaaaagaatctcctgaagtcacaaaagggaggttaaacataagagacaactatccagatggttcatcctcgcaggtctaataattctaactcatccttaaaacattgctaacctgattatcatggctgatgtaagcaaagtacttaatggagttgtgtttttgcagagaagcaaaatgttatcaacaagtgtcatttgaggtccttttcccaaaaacaccagagtatgaggttataggctgcctggagggcggagatattttatcacagagttaagggtggagaaatggggcgaagaaattgataggttttccaaatcttgccttgccttctggtgtcagatgataatagtttatgcacactgctgcagggtggggataccaggcg

SEQ ID NO: 39397 - DNA, 494 bp, Homo Sapiens
tgaaacagcctccagataactttgcttacatctcattggctagaacatcacctcgtggctgcaggtggctggaaaatctcatctttattctgggtggccatgtgcagctaattagtactgctactgtttatagagtttgggcaagaaccggctgtctgtgccatgtgtggtagacgagaccagcagtccccactcacttggaactgagagtctgggggaaggatagtgacaatttaaacagatacttacagtgacaaggcctctgagaggtctgcaaaggtgtgccctgcgagtaaacaggaaggacacctaaatcagactggtggggtgggggaggggatgaggacacgttgcctagagactaagcaagaatctctctggactgaggaaatgggcagggtattgaagcaaaggctcggaggcaaagggggcaggtagtcgggtgatggcggagcatatgaggaacagaaagtagaccagggaagccagaggga

SEQ ID NO: 39398 - DNA, 494 bp, Homo Sapiens
aagttttccagcaaaatcagtctttgtgtagcattaattcatccagctaatatttattaaaatgtcgcttcgtgccattcatttgactgaacttagaggatctaactagtaagagagatgtacccctaccctctgagagcctacagctcagtgatacatgcagaaatgtatagaggtgattgtcacccagcgcagcaagttgctgtgagaggggaagtgcaggacgctaggagaagcctgagggagattctgaccccaaactagagatggtcagggaaagcttcccaggggaagtgataggtcaggtgagacttgagagaaataaaggaggtggccaggccaaggtttgggggtagagtgcagtgctggtggtccctgccaggggacagatatttgcatgtagccagagtctggcatggtcataggtactgcataaatgtatgtcagatgaacaaatgcgaagccctggtggtaaagagttgatggggtggcga

SEQ ID NO: 39399 - DNA, 489 bp, Homo Sapiens
atacatctgtaaaatgaaccatttctactaactagtaacacatgccacagtgactttgcactcattaagtgctgtgttgtatactgcaatttaatttggtgctgtttatatcttatttcctcaagtcaacaggactctttctaaaaaagtcagaaactgttttactcatgtcccttcacaacacttagtggtcatttccacaaaatgctagctcaacagatacttgattgattgattaattgatgaacctctccatttctcagggagcctctaaacagttatcaacaagagtatgtttaattccagtctctgtctatatggtcttaggtgaggtgtttggcagtttgtcatctataaaataaagggatagcaccgaatagctcctaagttccttccagtgcaatttctgaatctcattagacaaaacaaaagccaaagacagcaatacctctattcacgttagccttgtactttttctggaggaaaggc

SEQ ID NO: 39400 - DNA, 437 bp, Homo Sapiens
ggccgttttacatggagtggctgattgaaggtatttctacatactgacttgaaagtactttcctttcattaaaggttcttctacatattgacctgaaagacaggttcctccatcagtcctcctgtcatcctaattgtgactctagctgacttttatttccatttctgcatggttgtcttaatactacttgtatatattatgttctctctaggccttcttttctaagccatttctcaaattttatttgcagtccactggtaatccacctagctacttaagaaaaataaaatattagccctcttttggtttgaacaattaagtattacctactagaaacctctaagagatttattaaaacttgctaaaatttggcacttagtacattcaacacagtaagtctgtactagagacttgctcttgggtggggataccagggg

SEQ ID NO: 39401 - DNA, 377 bp, Homo Sapiens
tagttttcatttggggctggatcattctttgctgtggagctgtctgtgcactgtaggttgtttagccacacccctgttctccactcactgggtaccagtggtatctactcctcttttgtccagttatgacaccaaaaatgttttcagatattgccaatatccctggtgaggcaaaattaccctcagttgagagtcactgtcataaacctactgccactgctttctacattttatttcacaaacttttttgggtactttctgataagaagaacctatgagacactttggacgagtagggaaggtgggctccaagttctttatttgttatgtacttggttgagtgaagcacacagttttcatttctaggggtggggata

SEQ ID NO: 39402 - DNA, 390 bp, Homo Sapiens
tcacgggcaggctgctggggatggaaccccacaaagcccgccgagaattggcagccggagggcaagaagcctgacgtgatgatgtgatgcaatgtcatgatgccacattgtgtggggtggtcagtggggccagccactccagagccctccaacaggtagcatggctgaaagttgtctgctgggtttagtgacaaagagcttgttgttaaccctcagccgaatgttggagatgacgtcagactgaagtggggagaagcggaggtgaggacgacgacggtggcaaagtggagggaagaccattcaagaagcttgaccagggaggtggggagaaatgggtagcagctagaggatgacagttttgtttcgtctaaggggtggggataccagggg

SEQ ID NO: 39403 - DNA, 430 bp, Homo Sapiens
gcgtatcctgtctctccactttgtgaacatttccatcattgctggccacatctgtattcacatcactgcctaaacgtacatggtatggcgctgaagtgccaacttcagagaccttgtttctgggctgtagaacactgatttagggagaacacccaaacctcctaagcctatactagtgccaaaggaagtgaaacctctttaggccagtctccctcttaccatctccctcactgccatacactgaaaagggaaagatccttaggactgagcaagactaagattacgagcttctaccatactgtttaatttgtataagacacacatattaaatgcctattgtatacatgacattctatgctggacactgtggggatccccaatctgttccttcaagggactcatgattaatggggggtggggataccagggg

SEQ ID NO: 39404 - DNA, 379 bp, Homo Sapiens
cagaggatcgccccggtatcccacccccagcaaaactaagctattagcaaattccctccttttctaacattttccttcgtaatttacagtaaggtcagtctcacaaaacaccagcgtttaaatgaagcttctgctatcttggcactgaagaaatgtactcaaggcaggtggagtagacaaggaacatgaactaggttatgaatccctgctttgcggtgtcagaaaccaagccataggaaatagaagcgtgtatagattaaataataccgtgctgtgccaccagaagcacactgctgccaaggagaagagaaagcacctataagataacggaacaaagagaaacaagggagggtacaagggagttctcattcaataactc

SEQ ID NO: 39405 - DNA, 352 bp, Homo Sapiens
cccggtattcccaccccatagcaggaactggtactacaacaccactagtgcttgatgtccagacctaagaccagtttctagcccaactctcagaaacatcttggtgtgctcaaaggatactcctatcctctggtccaagcttccacccagttgtagattgtctgcaagcaccttgagtcatccatatctactttctacttgtatgcctccagtgacagggagctcactacctaacagagcaagttatttcaacaccactcggctatactcctttcaggagacaatccttcacctggctgactgcagttaccatatgccgtcgggcggggataccagggggggtaccgagctc

SEQ ID NO: 39406 - DNA, 368 bp, Homo Sapiens
gaggagctatccccaccctagtatgctttcactctgtatgtttgtcataattttctgtcttgttaggtaggctggattttacatgcaccacagatgttactgaatgcgcctatccatagacagacacctacttatttgcaactagaaggcactgcacctaggttctgggactataagaacaaataagacattggttctgccctcatgacatctcctggcctgctatgaagacagagagggaaacagacactccacactcgagagacgcagagctcagcacaactgacctactcgggaaagcaagagcgctgccgcagagcgaggggaggaccatggcgacgagcagctgctctcctgccccaacactg

SEQ ID NO: 39407 - DNA, 364 bp, Homo Sapiens
agaggatcgctatacacatcatatattgttaatattttgagattcatccatgttattgtgtaaatcagtaatacattcttttttattgctgagtagtagtcctttttgtttcttacatctgttgttttactgaggaaaccataatcaatagaaaattgcaagctgtaagccagtttgttgattacagtattcagtttacctcagatccaggtggtatcaggactataccaccgcacccggctgggattacaggcgtgagccaccgcgcccggccaccttaaattctttacaaaaacacttgccatgtggtagacctgtagtcagagcatgcataatgcttcaagccgcaacgacacccgtaggc

SEQ ID NO: 39408 - DNA, 376 bp, Homo Sapiens
tgtaaagagaatccaaaatgctaacaaatagagttacaaatgaacataagactgaaaacatttgactactcatcaccctctctggaaacacttctaaaagatatactcagtgagggaaaactgaatctaaagggaagaagtaaaattcaagaagcaatggggagcaaaagaccataagcatcctggtaattctcatcactgaatgtaagaggaaaaaaatttttggatgggggttaaaaaggagcataaataaaaggaagatgtgaggaagatgaaagttaaagtgtttaaggttcaggaaaaggaaactgatattatgggattcagacaatcaaataggcaatgtttaaaagatgggggtggggataccaggggc

SEQ ID NO: 39409 - DNA, 417 bp, Homo Sapiens
gactcttttcacactcagctggatatccttgtgtaggtagggtactgtcatttacagtggccctgtcaggaattctgggcttggatcaaaaagccaggaaggacattttatgcctctgtcagttccacataggagtctgtaggctgcaaacatccttcctgtcctgatgagaattcatcatctttatgaacctgtctttgactcttccagcctggtcctctgttgatgctttctctcttgataccatgtttactcctttcctttgtccctctctctgccacttcctgtgcttggtaaacaactttgtacctgggattgagttgtctgaaagagagattgactctaccacttcattcactcagtgccctgggaggtctgccacatgccaggtaccagtatggggagcacagcacagca

SEQ ID NO: 39410 - DNA, 381 bp, Homo Sapiens
tagaggatccgcccctggtatccccaccccgcacaaaggaagtagagaccaagatctgggctttaattttatttttaattgtaaaaagatttcaaataagccaccatttgaactgggaagggaaactagggatggtcttgggggaaaatgtcattctctctaagaaagggaccccggggatgtgggtcgttttgagggtcctagaagttgaccccaattctcacctctcctgctgcactgcaggattgcccagggtaggtctagtcccctaggttcttcagaccactccaggtcaggttaggttgggtggctgccagtggtcttccactactgttccatgtctagggaggggatacccggggggagtacgagcccgaaatt

SEQ ID NO: 39411 - DNA, 433 bp, Homo Sapiens
ccacccccacgggagttatagtgctctttgagatctgccatccgtggatagctcaactgtcaatagctcagtggactctttgccttttcttgtgaggcaactgccttccaccagcaaggacaaagggccagtgtgacagccttttgtatctgcacttgtggatcccaagctcttatccacgcgtccaggtaaaactgaggttacacaaactgaattgaaggatggtgaatgcaggggatttactggctgtttgaaagtagttctcagcaggagggggaactgaaaaggggatgggactggtaggtaatcttcccttgaagtccagctgtctccagccagactcttctctgaagttatgccgtcaagccattcctctgaagtcaagccacttctctctgacatctagccgtagtctcgtctaccagtctcgtcc

SEQ ID NO: 39412 - DNA, 461 bp, Homo Sapiens
tatatgtgggattacatggcgtgaacaccacaaccagcagtctgtgcttctcaacttacatgcatctctgaaacacctctcagagccaaagtcacgaactcccctgatgtgaactgccacccacagtgcctagtgtagaccccagggatgggtgtggagataaacaggccagattctaggtaccaggagatgcccaggaagccataaggagtgggtgtgtctatgtcgggagagagagacttaccctcccattgccttggatcctccccctaccccttccatccccacattccaggtcaggcccagggcttgcggaacagcacttgtcctgaagcagctgcaggcaaggagcctgtaaactctaccatccatcaaagtgtttaggcacatccttgtatcctctctgctactcaggcactaattaaataccttcagcctttcaccaggatggggataacagg

SEQ ID NO: 39413 - DNA, 381 bp, Homo Sapiens
gccgtatcggtatcccacctccaactccattctgatggacaggtgtcccatggccacgttgttaaactattttgaataatatctcagatgtaagaaaatgccacttcttttaacctctctcttgattcagaatagatgcttgttataggtctagcactgtgctaagtagtataggaaaaacagaggaaatgagaaatggcttggctcttaatgatatagttgaagatgttaaattagcatacatttcaaagtcaagctaattaagttctaagtgggtctgacaaatacagttctgggtaggctggaattagcaagaaagagaagcatgcactggctgaggtttacgatgactaaggtttagttgggtggggataccagggg

SEQ ID NO: 39414 - DNA, 405 bp, Homo Sapiens
agttgattgcactttgtcacaggcgccctaatgcaccaaccatgtatcctttacctcctgctccagatactcacgttgacatctacggagcctttcttttaaaactttgcttcacacacaggagcctttgtgattacgtaaaatcaacttctttctactagttactggatcaacttccaagatctttatactgtgtgacaacatacgtacggccgcgtattgttactttgtccttgggactcacctttggagtttcgggttccaacacgtctagcactcacgactataatgtcgacggtgttaaccccctttacggtacgcacttacctagccctttaaagatttgtagcacacatgaactaaattactgctctccgtaggccattcacttctccacgggtatac

SEQ ID NO: 39415 - DNA, 452 bp, Homo Sapiens
tgtaagagggcacttgtgtcccactgatggtagatacacctgcatccttgttccagttggccaggcagtgggatagtgtggctgaagcctagtattctcactttcctaggcactcagtttctgagaagacatacttcctgaaagtccacacagcttacttacccccaggcagctgttagtagcagtttgttttcagcccaatttcggcctcagtcccttatcttaggtgggccacttttatttttgtttctataggatctgaaacctaggccttcactggttccttctgaaaccagagcctagcagccctataccttctgcccactctctgttacatatttctgtttcatggtgatgctggtcttttttagttaggtaggtctttaaaatgtcttctccaggattttgcctgttgttgctttgtatttgaaacagggtggggataccagggg

SEQ ID NO: 39416 - DNA, 351 bp, Homo Sapiens
tgatctagaggatcgtcccctggtatcccacccgtgggactatagggattacactacacccagctaattttaaaaatttgtagtagagatgagggctcattatgttgctgaggctggtttcaaatgcctgggctcaagcaatcctcttgtgcttgacctcccagactgctggaattacagatgtgagccaccatgcctgatcccagggctttttaaagtcctattttctctgcttttcagcctatggaggctccagtcatgctgtgggatgagtccagcctccctgagataccaggggctgaaagttgcaacatgactgtgaacgtcacgagttctagatggggtagaaac

SEQ ID NO: 39417 - DNA, 466 bp, Homo Sapiens
tttacagtccactatcatttcatgtgtgcaaacgtggggaaccatatttctaggtagataatcactggtcttttctacatccggcaagtggacacctctgaagcagctggaatgggcctaggtgggagggactttgtctttactaccacgtggagccggcacatagtggggactcacagctcttcatggcatcgatgaatcgtgtcccgattagctgttggtggtgtgccatctgcggctctgttcctggtgagttctgctgcgatcctgtggctcagcacgtggtaggtcctcagtgaggctgtgatgagcgtgggggcgtctggtgccttgggtgcacatccctggctgtcctccatggtgtctctctgtgcccagcatctggagggtcggctcgcagcgctggccccccgactcggtgctgtccgatgaggaaaccagcttgggtgggcataccaggggggac

SEQ ID NO: 39418 - DNA, 363 bp, Homo Sapiens
gctatgatgaggaacgtcactgtttctgactgattcacatgggaatgaatgaatatgaataagacttagaactgctcacagtttgggcagcacaaggaacatgtgtgtaatgctttctgggttacaaagcattctgtacacatatctcttaattttcctaataatcctacagaggaaactattatttttaaccttcttttcattgaagaagcaataactcaaagtgattaaggtcatactgtgaaactgttggtctgagactcagtcctgacccctcaacttcatgttctctgctttttccatctcctgtaagttactgccttcatattcagatgtatacaattctccataaactatcctcat

SEQ ID NO: 39419 - DNA, 420 bp, Homo Sapiens
atttccttggttgtactttcatgcaaggttggtacaggagacagagctggcttagtcctgaatcttctgtttccttctcggtgcttcagtgtcctcatcttttaacagctctttttctttccactgctttcactgggcagtctcccttcttaaagtgacagattcacagggatccatccagcatttgaaacaggattctcaacctctttgtagggtagaagtcatcttgctgggatccaactcacagggtggtgatggacatgaactcagcagctatgtgaaagttctcatcccaggtcccacacatcccaggggaggtgttacagtcaacatgagtttccttgactatagtaacagacacttgagaggctgaggcaggcggatcattagcatcatatgattctggtgacagaggttgaa

SEQ ID NO: 39420 - DNA, 420 bp, Homo Sapiens
tgaggctcaggagcacgaaggagtaggtcaggaagggcctctcgtacccactcagagtttgagttttattttgaaggtaacatggcgtcgcattaagcaatgttgaaagaattaccctatgaaattgtacttcaaaactaaagtaccaaatacatgatcccgagttattaataaattccttattttaaagtgtaaatatttgaaacagtatctgagaccacatgcaattgttaaatactgtcaactagttgtatacaagattgtagcgttctgtaatccctaggacagtgtttgattgaccggggaccctcaagagagcatggagagtgtggggtgtgcctggataggccccctttgcaggcagtcttttgagagtctcaccatcgaatggcctcctagggcgtgagtgacgttcctcat

SEQ ID NO: 39421 - DNA, 540 bp, Homo Sapiens
tctagcggatccttttcagtcgtcaatctcagaatctattcaattacaattcaatttccaacagacaaccacttaccatgtctctttagaaaacagtacacacagctaacaggaaaatcagccaacaaaaggatgccaaagaaaattcatccaatagttgccccaaataattggtttttgaattatgaacctccattacactgagtgtcagcaagagatgtattatttctttgagggaaagggaacaagcagacattggcataagagatgccacagcagtttccaggcttctaccacagaggtcctttattacgcaattaagcaagcagcacctgagatgcgggccaggttctgaaaaagagttggttccagcatgtttcctactttgaatcacagcctcaaacaaaagaaatgaacgccaaagagattagaaaatgtaaggctcacatctccagagtaaactctacttgctgacaagaccaattctaaaaacagaaaagtaactgagtcttaaagtatctttgactttcggttacagtc

SEQ ID NO: 39422 - DNA, 447 bp, Homo Sapiens
gctggcatctagaggatcccagctggaggtcaggaagggaatgctggtggggacggtgtagcaacctccaaggagataagtaatagctgcagcgtgggctggtatgggctggtgactgaggagtaccaggtcctggaaacctacacaggacaatcagagcagcgcagcaggtgcacggtgccgagtgaggagcgagtgcaagagctgtccactctttacagaagcttgtcagtgaaagaaagagaagagggactggggaaacatggagtcttcttactaacagaaaactcagcttgtgggggagggaagaagtctgtgggagggaggcagggagggaacctgcctcagagggaggaggagagagctgacttgggagtgtacgtggaaaaggtactctcgccttgttctggatgaggaacgtcactctctcaaggagaaagtgctctc

SEQ ID NO: 39423 - DNA, 393 bp, Homo Sapiens
tcccccagtggactaggataacaagcatcgtccaaatttctaattggcttgaatcactgttcctataatctccagctgccttctttcctccagctgcttattttctccaactagcatttcacaattccttcctacgttcgttcactgaatacattcaggctgaagaccaagtatctgctacaatgctgctgctacaacactgagcaagacttgggcgggttatggacacactccactaagtgctatgaaaggagtggagtgggctggccatgggaagggtggcaatgtgggctaagtggtagaatttcttaccaaccatttaacttctttctagtcccatattcccactgtcttaaattcgtgagtttatataagtggtctatactaccggga

SEQ ID NO: 39424 - DNA, 420 bp, Homo Sapiens
atgaggaagtcctatgtgccaggccgtctgaatcctgggctcaagcgtcgctgtctgggctcccaaagtgtagattacagggtgagcatggacgtggctgtaatatgatttgatgaggttaggcatgatgtcagaattctattcaaatctggtctgccctggagctccaagcccatctccctagatgtgttctccacatcacctcttgggtttggacaggtaccccaaacacaaccctaaagagaaccacagtacttcattcagtgttccctatcacaggactggcgtcaccactcaacccctccttggaaacctgggtgccatctttgattcctagtttggcttttcctctctatatccagagtcgccaatcctactcctggcttcctgtcacatataccctcttttctccacctgcac

SEQ ID NO: 39425 - DNA, 444 bp, Homo Sapiens
agttagcatcccacctgtgcaggcatacaggttcataaaataaatccaactaccccattatttctccttctttactttcatctcataggaaaagcatgacccaccacatgatcagtttaagtggaggcacattatccaaaaatcagataccatttaaatgcaatttttgattgacagaataaggtgatttatatcaggaattctatagggcaatactataaatgaaagccattaaagacatttcagcttagaagccactaactagatgtataacctcactcaagccatcataaccttggcatggcttctgcaactcccccaggaaaagagagttccgtttgtgcagagattgcaaatacacggcaatggggggctgctactccactctgagcagtcactactaactgatcagagatggaaacagaaagggcacctgaggtgaaa

SEQ ID NO: 39426 - DNA, 402 bp, Homo Sapiens
cggcgagtgaatggctgataaattataaataacaaaacattgtggtaaaagagtcaaagaaaaaatgaagtaattgtgcaaggttaatatgaacagcagaaggaatgtaaaaatgtaaagtggtcttctaattcttatgtaagctttgtcatagttattaaaaagacggtatcatattagaaagcccccacccactttcccaatgctgtatacattatacaaatccgtgacaaatgtattaccatttccaaatacctctctgttcattaatttacacttgcatagaaagggaagaagaaaacaataatatatggttattataaaaacaaaatatccatttctctttggatagtcagtgttttactctttcagtagaacacacagtcagcactcaacaaaaat

SEQ ID NO: 39427 - DNA, 423 bp, Homo Sapiens
tggcgagtgcatggctgcattgagggtctaacagtggcaggtcccagcggcagatgaaaggcgttccacccagatgtcagtgaagaaccctggagtagaacacatctcagcacacctccagtgagtgagcagaagctgcagtccctgtcccgggctttgcagagtggggagaaggtgaggtgcgctcagggtccctaatcaaagcccagcccatgtgcaagaaacgggaaagaacctgccttgtgacatcaaaggctgacatcaaaggctgcagggtcgaccacactgaagacccccactctgctctcttgtgggtcactgcagctgcctggaattaggggtgtctcaccaaacctagctccccctccagaatgagcaatcactgggagagggtacacagtacactgtgctcacctgcctgac

SEQ ID NO: 39428 - DNA, 354 bp, Homo Sapiens
ctctagaggatcctggcgtagtgcaatggctggagaggaaggctggggagggccacgtgggtattaccaagaaacccctgattcctgccgcagaggtctggtgcgatggggcctttgggagagcactgagctgggggccacaaggagattccatccccattctgttgtctgcacgttcactggtgcgataaaaaccaaagatgaatctcaggcaggcctgggggcttgtctcctgagagcacctgcaccccggcccccaggcagggctgggtctcagcccggcttcttgctggggactctgtggggcgggagctgcactgggccccccctggctccctgcactccggccgggta

SEQ ID NO: 39429 - DNA, 359 bp, Homo Sapiens
ccggcgaggtgaatggctaccgggaggggtgaacggattgggacaattttgcaatatattatatagcccatactgctaatcaaatcaaagtttatagatctaacggaagcgtacgatttctgatttccttgatgaaacacttatcttttcagctttactgatgcccagtctctttttgataggctgggggaaagtcagagaaaccagaaatgggaaaaggttgaagtgagatcttgaaagggataggtaattattaacaattagctattgcatgcattgtataatttcagatgtacccggctcatctccttttataggacgctgaagcccaaagcagcacagtgtatcacccacattcc

SEQ ID NO: 39430 - DNA, 353 bp, Homo Sapiens
atacccttaagccctcagtcactgaggactatgaaaatgcagagaattgaggaggagaggaagatttttttggaagagggttttgcatgtgtgtttccacagtttcagggtgggaggtgggagcaggagtgctactgtctaaactcaagccaatgcagggtgccttcaaaggcctccctcagagcttgagatacgttggcttcagttggtgatcactgcagagtagggatgtccatttccttaaaggaaccacactgatccaaaacagtatattctaccagaactgaacagaccggcatcagtatactgtattttacaattcctgggccattccaccctgaataacacaatat

SEQ ID NO: 39431 - DNA, 400 bp, Homo Sapiens
tcacatcagagaacataagatatgaattactgaggcatacaaatggagctacatttacatcttgtacaaataggaaagtttctaatagcttattaacaaaatcattctgaaacctttacacaaatcagcctactttaaataaaaaggttagaaacattatgataactatgtacaaagtatatatctgtatacgctaacattctaaataaaggtatctttgaaaatttactattatcacagtcattagtcaccatactctataatgagcaaagaaagaatatgagaactcttgggctcagtacagtgtaaatatgttccaaaatgctatacacattttgcctggaaagatttaaaaaatcccacataatcacataaaccactggactgacttttaaaaact

SEQ ID NO: 39432 - DNA, 611 bp, Homo Sapiens
ttgctctacaggcgtacttcctaaattggcttcactgttcagactgaagagccacggtagccaaagtgatgagcggagttagaaccgagcagtcgggagagatcttgtccctcgtaggaaagtgggcatcgctgaggccctgagcatcccaggaggccgattgcacagagacctctggtcgctgaccccagtctgcctccacatccctggaatagcccatcatgggcccttcacccttggcaggtggaaaccattctttctgctgcggccggtgtgcccccatttcatggcattgggggacaacaggattctctgtctgggtcccactgtactcaagtccttgggaagatgcccacccctgcttgggacttgagactccagagactggagcggctgtgggccactgggtctggcccctttttccctgggggcggcggtggaatgggggttacgcagccagccagcatctgggagcccggcgagagcggttcaggtgttctccgaagccgccgcgtacggtgtgacctttagacaattctgtcctcacaggatggacgtggtaaaggtcgcgggcagttggtgggccaagagcgaaggaatcattttgaata

SEQ ID NO: 39433 - DNA, 415 bp, Homo Sapiens
tctagaggatctccgtcgaccttctgctctgggcccgtccgtgtgggccagctgctgtgctttcttctatgtaagtaaattaagatggtttaggaagaggagaactcctccttgatttttacctaacaaagatatttctcactaacatgttggcactaacagcagctcaacgccatctgaacacataacatactgaatcctaactataaaccaccttcatgctcttgagaagggggacaaggtatagtatttttttgccataggataacatttaggtgctgttttgtttggagagtggtagagaaatagaatagcctctagaacatttcagcaatctgaggaacccccatcgtgggatcttgcttataatactccactatgtaagacaaaggctggtgagagcagaagctcgacg

SEQ ID NO: 39434 - DNA, 548 bp, Homo Sapiens
aggatcctgttgacttctgctctgacacagcaggaatgatgggtggggtggtaacaccactagggcaccgtaactagggcacctacgatcccagaactccccgggtactttccacacctgctccctccccctacttcagttctctcctgtctcttaggaggcgagactcacactggtcatcaccaaccctcctcctcacactggtcaccaccaactctcctcccgctgtgctccaaaatcagcttcccagagcccagactaagcttgcagctcccctgaagcaggtgctgaagcctctggaggctctctcctgctaaaaggggagagcctagactctccagtatcaactcagctctctcatggcctcgccaccttctactatgccactatgtcatccagatccactggtaattccccagagcctcgtgtctctgtgcctctgcctagactgctgatcatgtcatcctctgcccacccaagctttgcaagctcctacatagcctccagcctctcaggggcatcctgtctctgtgggggctccccactcc

SEQ ID NO: 39435 - DNA, 406 bp, Homo Sapiens
ggtactagagacccacacgtataagttggatctaaatccaactttagattggtccttttttttaaagattgaatctctagaagttattttttttctataagcactctctggtctctgaaaatattttctggtttggtccagagttaatagttaggcagataaatctgatataatattctgccattacccaaattggaacttcagtaattgagaaatgagcaaataaagtctaaaaataaaagaacaaattatctttagtggaccaggttgaaagagagattgtatacagttggaggagggtaggatatgaaagacttcatggaataggttggtatccaaagtgaagcatgagggattattgggatggacttccatgtgcagagagtaggagagcagaaggtcgacg

SEQ ID NO: 39436 - DNA, 565 bp, Homo Sapiens
tctagaggatcttgcgtcgaccttctgctctacagtaaatctagcaattgacagaggaaatagaaaggggaataaggctggtggagggaaacggagggagcacgcagtcctgctggtgagtggacacagttgtgcccccttgagaccagagaaacctcctgagggcagagggccttggagaccaatgtgaatgactgaggcaggttgtataggatatccaagaaccagggaggaaggaagggaaagggaggtttggatgcaataaccagcatcaaacgggggagcctccaggcaatggccaaaggccagaagctgagtctaaaatgctgattggggacagcaccgagaaggtcacccctagggagatcccagaccctaggatacctttcccgtaaaatccatccaggatttcagagtggtctgaacgtgaagctttatccacatgtacctccagcaaggccctcacagttgggaaccagggaaagagcagggaaaaagaaatgagaagacttggggttgagtgcgtggagcttgcccctcacctgctgtgaggtgcagagggggc

SEQ ID NO: 39437 - DNA, 517 bp, Homo Sapiens
atgctctggaaaagcaatgcctttgtctgtgaaagaccatgaggcacaaaggtagcattttcctctcaaagtgatgcaagctttttcttggccccttcgccagacctgtggagtactgggcctaccgtgctcaaccccttgtgggagggagcacatgaatgagtgagtgcgggatccagccagctgctccaggcactgacacaggagcaagctccttgaggggaatgcatgcagcacccaggtaagggtgtccatgaccctgaagccccagaggggctgttacagtgctcctttatttccaccgtctgcagatggtggcatgttagcagctcagttggccccttgcctcgctgcaccggggcatgccactggtgaggggcaaagggccagtttgacagccttttctgggtacctgtacttggtgggccctgagctcttgtccagtgtccaagaagaatgaggtcacgcagatgattgaaggatggtgaaggtggagaattttcctgagcaatgaaaa

SEQ ID NO: 39438 - DNA, 361 bp, Homo Sapiens
ctctgctctgcgtcgaccttctgctctgcgtcgaccttctagctactaggctgacctgtctgatcttcactttccgaacttcattggcctggaattcaggtagtacagtatgtggtggatgaagccaactaccgcctgtaagctacaggatagaaaagagactactactaagtgacaagaagcaggactgaatgcctttgggggaaaggcggatggagtccttgctccttttccccaaaccccatggggctcaccgccattgctatggccatcccaggcttctgttgactgtgtccattgggagaaggaaaaccagtggggtcttaagaagtgattttcttggtcagagcagaaagtcgag

SEQ ID NO: 39439 - DNA, 471 bp, Homo Sapiens
atctacaggatccttttcaaatagggacattaaagggaagagggggttgtgttgctcacgttgaaatgaggcagaagttaagggacagagatttctgtttaatacaagatctttctaatgtttagaactgcagctaattccactgttcgatttgtgaaatagtgagaggcctaccactcaaaatccagttgataagaggctagagaatggatgaatatctgttatccttgcctgcacttacaggacttgcctagttcctagctctgagtaggtgcccaacaagtgtttcataaaagaaaaaaggctcaactggattatctttgggatgccctccaactctgaaatggaaggacaggggatgcttctactttcaagctaggataaggcttgattgaaaagatgttcttgaggatgcccatccatctagttgagatggctggataaataccttcctgatacagagcagaaggt

SEQ ID NO: 39440 - DNA, 400 bp, Homo Sapiens
cgtgactctacaggatctctgcgtcgacttttgctctagaggctgcagtggcagtcaacgaggagctttgaatgacatgcccagatgtttggaccttatcctgaggataataagatgccactgaagcatttgatataagggaatagaatgattaaatttatgtgtttagaaaagccactctataggtcacaaaagagattagagagaggcaagggtagaaattagagatatcagtgaagaaagtattggattaagcagagcaagagatgatgggggccttgtatgggtagaatagagagaagtatatggactccagaaattttcagaaatagaatccataggacatattaaacaatatgaaacaatatctaaacagatgtggaggatgagagcagaaggt

SEQ ID NO: 39441 - DNA, 408 bp, Homo Sapiens
accttctgctctgagattgagaaggctgtctatcttgccagcttcggtgaggaggaggtggcatagggctctgccttgtgagagttggagcagcagttcgtcagatggcacgcaagaacagtgcagatacagttcactatcaggctgtgccaggaagcagtcagaacaagacagaaccgcagggggcgcgggaaagggcctccctgtcacccctggaagggtcaggcgtccacggagggtccggcaggaacgagaaaaattaagtcagatacgggtgtaaagacgcaaaaatctcctttaaggtaaacaggaaggagaactgtccgttgagaagaataagtacaggaatccaattgtaagagcagaagtccccatacgggttgcagggcaaaagattgttacagtgta

SEQ ID NO: 39442 - DNA, 468 bp, Homo Sapiens
tccgcctcggctcccaaaatactggggttataggcatgaaccactatgccaggccaagatctagtgactttggatacggaccaccacggaacagttcctcttccatgtgggtgtgggggcatgaaggactgttttcaggaggatcaaagtcacctctaccccagcatgggaagtcccagaaacttgagttccaggtaaggtagtgcagaaaaaagcaggttcatgagccagtgctgtctctctctgtgcaagggggaaagagcccctctgaggcctccacacacagtcagcaggacacaggacacagaggtcagcctgttgtggccactgtgaaatgtcccgttggagttgacaggagcctgctctgacctcagtcctcctcctccaaacaggtgaccctgtaatgctctggttaaaaagcaagccagctggactgtgttatcctttagtgtgggaaaaatgctctta

SEQ ID NO: 39443 - DNA, 425 bp, Homo Sapiens
cgactctacaggatcttgaggcacagtcctctctgtaaagcaggagctctacaaactcagatgcctgcagccaccacccagtaacgcaaacagtggagcaggccaggcgaaagagaaactctgtcaccctctctggctgcctttggttttcccacgtttgatagagaagaaggttccagaaacatgtgtcagcaaggaagaaaaccatcccgaggtgtgctaagaacatgtcaggggtctcatggcaggggcagattggacaatgcagaagccccgtctagcccagtggtcacttgccttgtgggactacagacctggaagggcctcaagagaagctggaaaatctggatttgtatgtcagatcacctgattttcacattttaggctcaaaaaaatactatgcaggacaaacaaaggcccacctg

SEQ ID NO: 39444 - DNA, 613 bp, Homo Sapiens
atcttctgctctcatgataggtgtactgggatgattacccttaacctaccaaaggaactatgttctccaattagaattggttttatttagagtaaaggaatgattttggtgacagcaacatcaaagaatggatctgcagcaaagtcatgaggatctgataagctttatgattgattaacaacaggttaaaatcaaagaacagatttcatgtgtactgtgtttttagatgtatagagcaacttagctgaaaaattacccagaacttttattctataggtcttcaggtttcagttttaatttaacatatatacattgatttagtcatgtatcattcagacattattgaacacctattgtgcagatattaggcttaggcttataactggcaaatctctacttcctgtctcctttcctcctggatacatcatagatagagatgctgcagcctgaaactccagattatatcattttccaccactgattttgcagaggtaatgcatgctcctttattctgccgaagcaactagttgagagagatataaatactgctcagttgatcagctgtatcagtgctattaccaaagagaatcagagcagaaggcgagcgggtacg

SEQ ID NO: 39445 - DNA, 494 bp, Homo Sapiens
tataaacagagaaagggtcttgctatagttgcccagactggtctcaaactatatgacctcaagtgatctgcctgcctcggacccccaaagtgcgagggattacaggtgtgagccaccgcacccagccaggtagtcatgcaactttggcgtacctatttctaagacaaatatgtactcatgtaaatgtattcaagtgtgtacccatggctcacacaagctgcccaattatgatatctccttatagcaggaacagggtccagacaattccttttaggctgacctaggactgaacttaatcccagactgactcagcttctctgataacatagtttgaaattctgatatccctccagaggatgttactaacaagtagcttagtgtgaagtacgaatcacaaagaaatggaccaaagtggacctggagaggaccaaacgctcacgtaaacaacattaatttagcacacatggataccgcgctcggattcggaatcctag

SEQ ID NO: 39446 - DNA, 468 bp, Homo Sapiens
cttgaggatccccgcgccgaccttctgctctaaattggcttctttctaatacctttaacttctacattggtgaaccatccagggctttagactcctacctacttctatgtctacctcatctttagtcctttacttcagctccaccatatccagattacgttctggatctagtcaccagaaattctatgcactctgaactcttgatttctagcgtcccactttgtaaccactgctaccacccgctatattgtgttgtcaagtattgtgttgtcaactgctggcacagttctttgacctcatcactttattatctatagctccttctggcttcatgatcatttattcattctttcagcaggtgtttattaaagttcctgttaagtgctggcattgtgctatgtgcctgggatacactgatggctaagagacatattctctgctttcatagatcctatatcctgagaaagg

SEQ ID NO: 39447 - DNA, 403 bp, Homo Sapiens
tagaggatcccagggtgctccatcccccgtagcagttgatcaaaattgtatcaactccaaatctgtgtacttctcaaacccatcttctcctctccagccctgactttcactgctttcttacacatattcatcatctcacattgagcctatcatgaccggttcctgctatccagccacaaatctatgactcaatgagctgccatagcaaaccagggaaatctggccatttacacccctgcttaaaatttttcaacagttccccatcagcgagaagcatatgctctaagccttcatagagtatacttggcttttcatggctgggcccccaagctacccctttatagtccttgattcccacgccttatgctttatatgctattgacatggaaaggcttgcccttgc

SEQ ID NO: 39448 - DNA, 387 bp, Homo Sapiens
cctttctcctgttccaaaccccaacccatcatattccttagaacaaagggtcttttctgccaaggagggaccagaggtcagggatggctgtggaggctgagggtcccttggaatctctgtggtgggcaggtggagtggggagtgtgcagagcgactatttctttgttctgaggaatggagaggtggctggctttgtgtgcaggactaggagtgcagtggagaggagagctgggggaagcccaggagggagctgagagggctgacggtgttggaggagagtggaagaatggggggtcctccctggttgcctgacgcttctgcggacatagacaaaaattctaggggtcgtgaaggttaaggaagagagttgcagggggatgaagcacc

SEQ ID NO: 39449 - DNA, 376 bp, Homo Sapiens
ctctagaggatctatgctcatccccctgccagaacagtctgtttgctgctatggctaggcggctgggctaagccagctgtgaccaagacacagagtctcagaatcctggggctcccttcagcagggggcaggcacagagaacagaaacggcttatgagaaggtgcaaagagggatacagggaacacagaggcagggcggggatgggggctcactgggaggcagcctccaggctcagcaggacaggggtggaagtgagcccatgaacgcttgtgggactgcattccaggcagagggaacagctggtgccaccagggcagagggacagggcagagggatggagggcctcacacacccctggggggatggagcacccat

SEQ ID NO: 39450 - DNA, 359 bp, Homo Sapiens
tcccagcagggttttcatcacggggccgtcttcctctctctccgtctatctccttagagagtctatatactagttactctcaggacatcagtggcaggcttactgtgcctcaaagacacggctcctccttctttatttattttgttgtgctgataagaaaaaatggaccactgccctctgaactttgcttgtatttcccccaatttctcttgtactctcagcctccatgtggaaggcaaacggggcacttgtttccctagacacaaaatcagcatcctcatccaagcaggactgatggctggagagctgctcctcagagcggtttaggttcagcgggaggggggggatggagcacccat

SEQ ID NO: 39451 - DNA, 374 bp, Homo Sapiens
ctatgaaaccagtagaatatcttcaacacacacccaagtttatcctgagcaagtctaacaactacctttacatagaggacggtgactcaattcatcgggcatacattattatagctttaatttattactttttagctatttattaattttagtgtcaagtaaagccttgcgcatcaatacttcgggacacatatacttttactttccctttgacccagttaaaactgaactaacaatactttatccaaagaaagaagatacacactgactaacagatttatttatatcaaagacttctatagagctacaaaaccaactctttccacagggggtcaaaattgactgaaatccattcaagtggttccacaaaatac

SEQ ID NO: 39452 - DNA, 381 bp, Homo Sapiens
ctgtggtcgctctgaggatcccccggaagactggcctcttgagggatatgaagcccgccaggtcctttgcgttttaagctgtggctcgtggtgttctggcgagaggagatcaccgaagggtcaaaacagcatctcaccccttgacctctggaactttcacttcgaagattcccaagtttgattgacttagactatggaacagtttatactgtcgtgcattgttgaaatcattacaggaatcagacagcaattagtgtaatttaacaagctagttgtggtcagagaaaccaagaatcagcgagagccctgcccaaaccattctcatcccaaggtgacagtgagcaatctcaagtctgagctccctgaggagcaactccagag

SEQ ID NO: 39453 - DNA, 396 bp, Homo Sapiens
aagattggacctctccggaagataggacctctccggaagataggacctctctgagcagaatatgaaggttatttgaaagtcactcaaaggactgggactgggattgctgctactgcctggaggcgatgaaataactgcattttcatcttatttcatatacttaaaggttctctgccaccttgctttcttcttctagctttatgtccagtcctccgcaagacttagtatatggtagtctaagtctcactgtaaataaagtatttgtaactgggaggagtaagagtcaactatgcttttgtttactagttatgtctctggcttttatctttcttgtattaacttggacccaaaagatctccactgcactacgctgctgccaactgcaattaccagtgc

SEQ ID NO: 39454 - DNA, 413 bp, Homo Sapiens
atccccggaagatcggacgctcaatatagtctgaggcaccttagcaacaattattatgaaattgtcatctaagcgtgtcttcatgcttatagtcgttcttcacacatattgtgtaccctgctatgctgctagcttctactatcttaaattctatggttattaactgttcacgcagacatgggttctctcctatgatatttgccagtcactaaaaactagtgacaatactgtggaactataaggcatgaaatgattggctcatttacttgcttacagtaggtaggccttaattctattaactctttgtgtcacttaacagctttaactgtggagaaaattggcatgatcctgttaaatgtaaggtgagtttgtctgacatttcaatttttagatcatggcacacttctcagact

SEQ ID NO: 39455 - DNA, 378 bp, Homo Sapiens
cggaagatggactctgcggtcaaagcaagtgtgttttgagaataaagatggaaacaataattatataaaagatagtaatttaataaacttttgaatgatgacaacaccaatacctacaaataagtcatatatcaaaaacaaagaatttcatgaagattctaagctatatataaaaaacaccaaaatagcatgcatcaaacagtttttggaataaatattgctagtatctcaaaaactaaagagaaaaattatcagtacaaaggatggaccttgtactacaaaggaggtgaagcaacaacttcctctaaactaactaatgttaaatttttcatgctatccacattcataacttaagtccacatgcaaaagaaacaagct

SEQ ID NO: 39456 - DNA, 392 bp, Homo Sapiens
ggatccccgtatacagcgcacactgccttaaaaggatcatgccactgataaaatctgagattgagacatcatgaagaaatgcccttggataggaatctgaaggggaaaaacacttaccagttccaagaaatgtttactctctggtttataacccaaagcaatgagtctttaggtgtccggaatcagttttcttaacaaaggagatctgattctttcttacatttctgtaatgttcttctttgcctctgatgatgatgcagactaacacttgaattttagatcaggaagacaaatacacagcttcagaaaattctactggagctaatatagtagtgtggtctagaaaggatcagaagtctccttttaatctagggcaaaggaaaagaatcctt

SEQ ID NO: 39457 - DNA, 364 bp, Homo Sapiens
ggttcgtgccggtcaggatgctgtgatgccaatgggaggcccagggctcaggagatggctgagccgtggatcttcctccatggctctgccatttccagtgctctgggggtcgcggttgtggcccgtctcctgtccccgcaagaacctacaacactttgggccggtcagatgcagcggcatccttctggaaagactgtgcggaagagaggaaggaatggacagctgtgtcagtacatagtcgtcgagagggagaatgatcatggacgaaatgcccatgatgggtgtgcattgattcttgcacagccttgcctttcttccaagtcatactcacttccaacctggaccctaaaaggccgggccaagt

SEQ ID NO: 39458 - DNA, 380 bp, Homo Sapiens
tctcgaggatcccggaaagataggacctctcaacctgtattatcttcctatgctactgtaacaaattacaatgaactacgtggttcaaaacaacacacaattcgttatcttatggttctgcaggtcataaatctaaaatggatttcactggaccaaaaccaaagtgttggcaggagtgcatcggtttctggagactaaaaagatgaattttctgccatttgcactttacagaggctgtctatatttcttgattagtgattcccgtctatcttcaaagccagcattaaccagttaggtctttctcgcattgcattactctaacactaactcttctacttcccttttaagcatatcaatgatccttgtaattacattataag

SEQ ID NO: 39459 - DNA, 434 bp, Homo Sapiens
ccggtagattggacctctcctggtcctctaatgactaataaaatgtggctttcattgcgaagtctttacactgattctcctggccaggtctgtcctcaaccaaatcacttccttattcaagtgcgtgtaaacagcctcctcctggctgcatacttctgtctaccctctggctcctgacattgtggttcacatgaagtttttggtcttttaaatacccattggaagacgctcaaaaaggctcagaaaactgttccttgattttggtctgcttcattttttgggaaagcaaaacaagtcccagcaccacatgcttctctactgctgcctttatttatttattaaaaaacatccaacacactacccaaagaattttcaagtgtctccttccacttttaccatctaccactgccaaaatctaaccactagcagagtaa

SEQ ID NO: 39460 - DNA, 376 bp, Homo Sapiens
gctcggactctttcattgttggtggaacttcctccattttcatttcttttaaaacagtccctttatgagattcttaactgttcagaatagtactgcaatataactgttagggtaaaatttctattgtgtttaaaatacgtttgtggttgtcccatgaagaggaagcagttgagggtctagtacagttctagtcttatcttattgtcttctgacatttttctcctgaattaaagatcctgtccttagaatttaggtaataatttcattgttaatttgtgaggggaaatagaatactctgcttgactcctcatattgaatgtgattcttactcatatggttttagaccatcagtttacctgggaagaagtatctttaa

SEQ ID NO: 39461 - DNA, 439 bp, Homo Sapiens
tatatgatgagacagagaagaatctgggatggctccaagatgtgtgacccaatgttgtgaaggatagaggtccaatcttcccggaagattggacctctagacacacaggagaaggctgggggtttttctaggggagagacaagacacgcagatgttccacagggtggaggggtgtttcagatggagcaggtgtgtgtgcaaggcccaggatgtgcaggagtgcaaggatgagtgagtggttgctgcctggaggcctgggatggtggccttgggtcacttcccctgagtcccagaccaaatctccagatgttcccaacagcccatcaaagagcaggtactgaagagggggctgaggagctccttatgtccacttaagtggagggacagagacacagtacaagagaagggaacagagacaggaacacacaaaggcagacac

SEQ ID NO: 39462 - DNA, 382 bp, Homo Sapiens
aaagtaaagtacagtattccataaagttaacttatataataaattacttatcgacactctaaggtcaaataaagttaagtccaatgacatgtcacgtaatctgggttctagattccaactcaactactttgtaatgtaatactgaataagctgcttaatttccctgtctcaggttcatcattttataagaatgaggaggtttgactagatgatccctcgggtatgctgcagctcaaaaaatggaacggaagaaatacattttaaattcatcttattaatagagcgaaattaaactatcagcagaaactgattattttttccacttatttacaaagctgatatattctgcaactgtccctaagatgtttaccagttggctttt

SEQ ID NO: 39463 - DNA, 416 bp, Homo Sapiens
ccggtaagattggactctaatgtatggctttatactaacacaggatcatgtaagtccctaccgttaagactggctgctggctttttctctcaagccaaccagaaggctttccattggacagaaataacctgggttgtaactgtcccctttctactaaaaatgagcttctgggtgcggtggtgttcactgggtctttacaggacaactgctctgatcctgtagggtcagcccttaactattctagactgttgaatgtcaggtctcagcaatcagcaatttggctactgacccaaatgccggagaaacaaggctggggggaaaatatacaggtatcaaaataatgaagccatacttctttcttttttggtggggagggagttttggtaaggcaacatgtatattactctctgaaaacc

SEQ ID NO: 39464 - DNA, 432 bp, Homo Sapiens
tgggaatacaagaaatgaatcacacgtgctccatgccctgagcttgcttcatatagcagcaaagaccaatttatatgaaaataattttaagtctgtgagaaacgcaggcagtgagaattatatggagggtagagaggtgacagtaataaggaggtgattaattctctggtggtggtggtagacacataagcatttaaataatgttaatgttttgaaactgtgacagtttttaacccattaactgttgtggtaggcttactttcgcttgtccagagaaaatggagatgaagattatttgaatacagtgtgcttgtgactctgtagaaacttgtctttgatagacatctatgtaagctgaattaagcagagggcaaatctctgtcatttgttcctctatgttcatgtcgtataatcaggtgtcatttcaatcat

SEQ ID NO: 39465 - DNA, 421 bp, Homo Sapiens
cccctgtcttgtctgccatctgagccagcgtttgcattgctgtacagaaacctcccacggacacatcagcttctccaggcctctctcgtcccgcagaaacccttatagacatcaacagtgtccctccccgcaggatccccctctccccaaatctagctctcctggggcccctgcctgctgtttgcaaaggccgtctgttccataacctttccaggcagctgcagcccgtcggcagagtggtaacagcagctgccatttcgtgccagacacttggcaccgcattatctcagcgaacaaagctcaatgcccctgtctgggcagcgaggggtggggggactgagatgccaggacataaagtggtggaaggcaggattcgaatccaatgctgccttgtttcaaaccagggctataaaccaggacg

SEQ ID NO: 39466 - DNA, 371 bp, Homo Sapiens
ctgcttgtcctgcccgtaaagtgggaatagcatcatctgctttgttagttacataaggtatgcaaagtccctagcaagaggtctagtgacaagcatccagtaagtgcacactgaatgtccattgctttccttctttcagttctgtgaatttgcaagtaatatttcagagaagttaagaggtgattggtgagtcctttgatgagcatgtccttggaattcattttttcttttatcttcataaaggatttgttttattagcatctccaattcccctgagataaattactcatgcataaagtggtttttgagagcacttaaagttcatttcagtattaatttacagcatatttaatcagtggggactgttacca

SEQ ID NO: 39467 - DNA, 391 bp, Homo Sapiens
ctgtcctcctggacagagagtaggtttgctattcctgaaatgtaatccctccttcagcgctgcacaaaaggcccatgtctgctcgctgggacctgatagttcgcctttgtacggatgaaaaaaaccaaacactgagcctggtctgagcggggctgtttgttgaggctcctgatgcagagaagggagcagtgtctgcacagggggtctggatcgcacccgacaccatccaggtgcctgcgtgtgctggtcccgccgtcaggacttcccctcgtgaggagctgggtaccactgttatcctgcctgctggtctgagggtccgagcgtgattgggggcagagacaagagttccagggcgagcctcagttctgggaccaccattgaccagtagagc

SEQ ID NO: 39468 - DNA, 452 bp, Homo Sapiens
tctagaggataccctgcttgtcctgcctctggaaattttgaacagaatgatcagtgaagaataattacaatgatatatcatttattaattcatttcacaagtatctactaaagctgcaacataccaggcccaatgtgagtaccaaggattcaatgacaaataatttgtagcccctcgtctatggacatttgtttgtatgtagtcaggaatcataacacagtgggtaacccggtaatcactccatgcctggagatgacatgggaaggacacgtcttctccaccaaaaaaagtgaggcttccccaggaggtaatgtataaactgagacctaaagatgactatgagctagcaaaagtgaagaccagtgaagaaaatcaaaagcggcagcacgggtaaaatcctagacaggatacgatatgggatatttagaaatctgaaaacagtttagtggctt

SEQ ID NO: 39469 - DNA, 378 bp, Homo Sapiens
aacccgctgtctgactctgctacgcactcctgcatgtttacacatgttaatcttatgacgtcatttatacgtcattatctgtgtacttaactgttcttcctaccaacgtttattaagtacctatgatatctcaagggtatgtactaggcacttcacatgttattttatttaatttaattcctacaacagccctgtgagataggtattaccatccccatttcacagatcaggaatttgatgctgacagaagttaattaacttctcaaagtagcatccttactaaatggcatcactcattcaacaaattttattccaatccatgtctgctagattcctaacccatgggcttttcaatatagactggggaacccctttgag

SEQ ID NO: 39470 - DNA, 367 bp, Homo Sapiens
atgagccaccacctggccagcatctcaatttttaataaataactaaaaaataacttgtttgaacaggtatatcttggccagcaatgctggactgggttcctttgaggtgagggaaactcttggacatgggacctagtgggggcctctgcttgcctccctgctgggttaacagtacagctggcccagccagtcttgaaaccttaccctgcaacaaaaacttgacacctccaggctggtaattctggaggtgtcttctctgccaagtcggtgactccccaacccgctattatggctggactctgctcttgcagtcttagtgtacaccctggttcttcaagggcagcaagcaggacaagcaggggtaccg

SEQ ID NO: 39471 - DNA, 354 bp, Homo Sapiens
ctgcttgtcctgcctctggtaaacatacaaaactgtatcttgccctcagttatagatacttttaccaatgcagaaagttggcatggagctagaaatgtctaaagcttggccatgagcctacaaaatattataccagaaacatatttttgaaaccagtggttattattcttagtttaaaattatctattttaaggaaaattgatttttaatttgttagatagttactgtgaaatgctcttctgtgtcggcataaagcttggtgagcaataattttgcttctctcttgcagctattctgtactgtctttttaagtcctcctccaacatatagagttcaaggtctcagtatttctca

SEQ ID NO: 39472 - DNA, 419 bp, Homo Sapiens
gtcgtctaaggtccccctgcttgtctgcctctgctgagagagcagatcgcacctcagcagccagctttctgccttctagtcacgcctcgtcatattaggggttagcacgaggggtcttcttgttttttgtagtggggggtgtctcactgttgttgcccaggacggttctctaactcttgtcctcaagtgatcctcctgcctgtagctctgaaatgacagcatttacgggtgtgagctggcacacccagcaggttcttaccctttataatgaccacacaaaattctcctggagttcctgggggagattgtctctttgaaatcagaatctttcccatgacagcttgagcatatccttcaggctctttctggattggaggcagaagaaattgcagctcggtgaccacgaaggcagcaaagag

SEQ ID NO: 39473 - DNA, 433 bp, Homo Sapiens
tgcgttgtctgcctctgctgcttgtcctgcctctgtctttatttggcacaatcccaccatcccccgccaggcccatgtcagatggtggctcctcctgatcccctgttctctttgatggggacagtgggttcctccactgaggccgtggcatctaacctgtgctggcggcacatgtgcgcgtgtcctggcacctagcccagttgcatcctctgccagccagcaggctccctacaggcaggggctctgactcaccagactacactccctaagaaatcagcagaggctgggcacatgagaactcagaagcttttcgaagcctttaacctttactctcccaagcaattgccaagatacccctataaggaatttcctcacccttttataaatgaggaaaaggaaccagcttagcaacccgggagccaaagaccaccac

SEQ ID NO: 39474 - DNA, 374 bp, Homo Sapiens
cttgtcctgcctctgttgctacactaaaccaacattactggtgactgcggtaatcagctcacttcgttctgctccttgctctaagaattgcctggactagcactaacagtgctgacctatggaagatcgtgtgagccacttaagcaactgcgaaagttctagtggccatattaaaaaagcaaaaagaaacaggtgaagttaattttcttattttacttggcctcatatagcaattatcatttcaatatgtaatcaatacattaaaaattatcagggagacattttatattctctgtttcatactaagacttccaaatctggtgtgcatgactatactctgcttgtcctgcctctgttgactactttgtttactg

SEQ ID NO: 39475 - DNA, 371 bp, Homo Sapiens
ctgcatgacacgccccttctagtttggagctatcaaaacatttaataaatttgtattcaagttgttgatcaaatcttgaagacaactcggaattaattcctgatggaattaatacattaatatacactttttgtatgtcattgttctactggctccaaacttatatttaatgattacctgatctggcatttattcattgtgaccataagaatatctggagatgtgctttctaatactgtgccaaaattaagttacattctgtctatgcatagtaaccttataaaaaatattatgtcggtttgacctaagatgttactaatgaatctatgctggcttctactactcattgctttcttatgagaggggttaag

SEQ ID NO: 39476 - DNA, 405 bp, Homo Sapiens
tgcttgtcctgcctctgctgttggtctatctcaaaaagccacatatgttaatattctaccatcaaatccagtatctcacctcttgctcaaatgtaaatgccactgatgcatttatttgttctgtcaaagaatattgtcttggggcaaccacggggtcctcacatacagagactttaagaatggaaaaataaaatgcaatagtttggttcaccaccccttaaccaggacaaaagaaaacaaacttcagcatgactgacatcagagaacactcagcccttcctcaccacataaactcccatacttcttgccatgagagtttctggcaaggaagcagagtatctatgatttattccataagcaaggtaagtccaaaggaagggaaaataattacaccaaaagcatttc

SEQ ID NO: 39477 - DNA, 390 bp, Homo Sapiens
tccccctggttgtcctgcctctgtaggttcttgagatccacccgtgagcaaaactgacaacaagtcctgcccccactggagagtatcttccagtgttagtgtgacagacaagaaacaacttgtaagatgaatgcacagtgtgttctgagtgatgatgccatggggaacaatggaccaggatgaggagactggtgagtgaggggctgggcggtggcatgcagtggtggggcagctgtcactttacacagatatggccaggaagacctcctggaggaggtggcctttgagtccagaattcaggttgatgatgagggcgtgaggcttcggctgagagaagagtgagcagggagctgtgaatggtccaggcagggaagggagctgaagtgattc

SEQ ID NO: 39478 - DNA, 418 bp, Homo Sapiens
tagagggaagcgtctttggaccctcaggactcctggcgtagacttatctcctcttctgaggtgcaaatgcacattctacttgcgaacccaggctctctcccatgtcaatttcagaaggcagtcaaagcaaacatttcttttctaattgtgtcacctttccctgttaaacaacctcctaatcctaaacttgctggtgcgaggaggcctcattcctctttggcccttctgtccatctagggtgaagggtaaatgctccctcacacctctcggtggggggtcaacccaacacaggtccttttcccttctccgtgtgggcccctgtgcttccctctcttcctgacctggcacagcaggctcctacagccttggtgtctcctgttcgtgcatctttggtgtgaccccacacgatgtgccttct

SEQ ID NO: 39479 - DNA, 380 bp, Homo Sapiens
agcgccagagagagagaaagggtactaagatatttcttggcgtttgggtgagattagactgaaagcttttactaccaaatgagatcaagaatacaggaagtgttggtatagggggaagacgatgagtgcagtttggcatattctgaatccaaggtaactgagagagatccaaaaccaggtgtctggcagctagtttgtaaatacacagatggctgaggctcaggagtgtagcctgggctggaagcactgaaagagatttgggagtcatctcatgaatgctaaaaccaaggaggctgaagaagagtagtaagtgaaggacaaaattctatgaagtgccaatgtttaataggcaggaggtggaagagggccaatgacagaga

SEQ ID NO: 39480 - DNA, 389 bp, Homo Sapiens
gtcttggggacacggttgtttgtcctgtacgaagagaaagatataggttctaaatgcgaactgtgacaggatacagagcctgtgcgtgggaatcagatctgtggcaggattggggagacagctgctgaagttcagagagaggctgggcaagcctccagtgatatgaagaggaaaaggtcttttcaatatttggccacgtcttgatggtgaccctctagatcagaaacacattgcctcatggatcaggaaaacatgccaggacatttttttagagataaaacatgagagctttcagcacagtgtggacttatacatgtagatatatatgtccctgtgcacatagggctcactgtgcttgcagtgcgtgaaatgggaaatatttcaatgga

SEQ ID NO: 39481 - DNA, 433 bp, Homo Sapiens
cgagttaggaagtagggtgcccctagcgcctcccaggatgaaggctttatcaatgaattactaaatgattgtcacgaagtcttcaacaatggtcatttgtaattcaccctctcttcctatatgtgtggtccttcaaggccgctttttcctgttgttacactagtgagagggaaccgaacgggctcatattcagcttaaggcacaagcgaaccccgtttgccttcaaccctgagacccgcctccccagcttggcagttagggtggcccttaaggtctcatttggcatcaaggagagatttccagtctgccaagttttcacagtgagtgaatcattgtctgagaaaatgacctctgaatatacatatataggactattcagaagggctatgcagcaagattcagaggaaagactattaaaattccagtgtacacc

SEQ ID NO: 39482 - DNA, 441 bp, Homo Sapiens
ttggtcctatgggccgagggggagatagcagggagagaggtgtggctcaacaaatcctaggctgcctcttcaaaggccaattgtttccccgctgtaaaccagcgaggtgaaatctcaagttcagaagaggagacaggcatttgtgagtgaggccagggcggggagcagaggggtgggatcctgggaatcgtttctctggttgcagggaactcccggtgttgtagccacaggccagggttttccgccctgtgctatttgcagaggcaaaacccggacctcctgagggaggggtgaggacttgtttggaaggagcattttcaaagacaagtcattctcagaagagtttgcttggtagcattgttaatgatagaacaaactagaaacaatcaaataacagtagagtaggtagataaaccgagatatagtcccacagtgcaaagc

SEQ ID NO: 39483 - DNA, 374 bp, Homo Sapiens
gcatccagagatcgaagaaaagcctgctggtttaaaggtaacctctaggtgtagcactacgacgcaggaatgaagagaatacagacctggaaacaatgccaaacctaaatctagactcatgttagacctgtcagtaagttacctagcatctctctaagaataatccgcatccaggtataactatggagaaaacggaatgaggggcatactctataagccaaaggctggctaaaaatcacctttgtaaaagaatcaataattctgaatatgcatttacaacatgtatttacttcagtaagagctcttttagaaaccattaaggacggtaagaatatctgtacacacagtcatgatatagaaggaaattcagacaa

SEQ ID NO: 39484 - DNA, 382 bp, Homo Sapiens
attatacacatgcagtgactcctgctgtgctgacgtggggatcccacgtcctggatcccctatgctctatctgcctcttctgcctgctttgcttctagggcaccgcctgcttggtcttggtctggctgggcttctgagtttctcctgggagtgaaactttgacatctaagccaaagggacatgacctggctaggatgagggccagcatagccctaaggagtattgcccaccacctgtaacacccctctgaatctgagcactctctccaagagggagtgactcagagagggccaggctgccttccatgtagagcagtacctgccccaggaaccgctgggcccattccacacagaggcaggacatgcaccttcataaatgacca

SEQ ID NO: 39485 - DNA, 395 bp, Homo Sapiens
ctgctttgccctgtgggatcccttattatgccacatctgctctgaatttcaaatgtgataaacagagtgtgaggtgtcggtggcagatggctcatgaccagcagcgacacggcattcaagcctgccttgttccctgggaagcgatattttcatgttgatttgctctgtgtcctgcaaagatgagacaaatcacctgctcgtaaattcaggcaaaatggagaccaccaggagctgagaggggccatggcttgattcctttaggagtgagaagagaagaagatctgagaggctttcctcatctgcagtacagggaccagtcagtcacttagcattatgtcaaactgagaaagatgaatcagccctaggcatcccatactgacatcagagccactgtg

SEQ ID NO: 39486 - DNA, 386 bp, Homo Sapiens
gatcccctcttgcattgtgggactgcttgtcctgcctctgcagtgtgacatcccacctccccagatgggagaatctgataggactagttggatactcccaagagagaccatctctgttgggtggaccatttcacagtcatttgccatctaagagtggctgccctagggcctgatccatattcctggttcaatcacttgtattcagggtgatggagacatggataaaatagggacaaagaacagcagttaaggactgtggatgtggcatacacatagaacatcacagcctcctttcccacgtattttccacaatacatctccagatacccgataattcccatacacgatgaaaccatccgtaactatgatcccacagtgcaaagcag

SEQ ID NO: 39487 - DNA, 424 bp, Homo Sapiens
ctgagggaccgtcttgtcctctcaaacgtgtcttcctgtgaacactgctgtctgggtccggactgctctagcagaaatgctatcactgtgtcatgaaagttatacttaactagggttaggccagaccaatactcagtgtcatttctacagactcagagtgctataattttagctattcccttttatttctgatgtcattttgttcataggtttctagaccaactggggagattcccgttaaaaagtatgtatactgaaacatagatattagatcatctagtttccaaaattgtgtaataggatttaggcatcaagtatgtgaacagtttatattctgtcatagtacatatctatttttggtatcatttcatttgtttccccttaagaaataaaagctatagtctccagttatctacactgaaac

SEQ ID NO: 39488 - DNA, 382 bp, Homo Sapiens
cagagatgtctctcagcccaattcaaagaagtaagatataaggtaggctttgaacaaaaaacactgtcagagttggccattcttctccaagggtcctgatcagaaactatcaggattgaaacaccaatgtctaattctcctcagaacacaacattcctccctttactgcttggataggacagggcctccagggtcatctgggatgctcttctttctaaaatgcagaaggaagaatgaatgacagaatgagagcaagaggtggcctggggctttacttttggcaagatgagtttagtcaagagagctccagcaagttggagtggagaagaggggagaaggcccatctcttctgatacgcagtgtatttggtgtagtggactta

SEQ ID NO: 39489 - DNA, 403 bp, Homo Sapiens
cgtggcatgtctgatgtgccatgtacgtgtctatgtttgggcagtcggtgctggtggtccttgtgcccatcgtctgcgatctggatccgtggcaggcgaattggtgtcgggccatgcctctgggtgcatggccggtatctcagccaaggttggcatatggagataggggaggtggaatgggacggagctgtctgatgtctacctgcgtgcatattctcaggcctgattgagaggcgggtctctgctcagagaggactgaatttagactggatctggaggcatgatactccagtgaagagctgttgcgttcttgccttttcagctgacagtgctggctcaggtgataggcctcctgtccccctcaagtccctagtgccgcttcattcctcctcctttgggcccc

SEQ ID NO: 39490 - DNA, 363 bp, Homo Sapiens
tgtcttctcagccctatggggcggggagagggctggcagattgaatcagtcaccaatggccaatgaatttaatcaatcatgcctaggtaattaaacctccataagtcccttctaccctacagggttctgtaaacacgtggaggtcccgggagagtgaagcactcagggcatggaaactctgggggtaccctcctccacccccgctcaatacccttccctgggcatctcttccatctggctgttcctgaattgcatcctttataataagccagtaaatgtccgtcaagtattttcccgagttctgtgagctattccagtaaattatggaaactgaggagggggtcatgagaacacccgattttt

SEQ ID NO: 39491 - DNA, 402 bp, Homo Sapiens
gttgccaaacactactgccatgcactaattcttgatatgttaaaagtctacatataaataagatcataccactgcgctttaaagctaagtgattcttacatttacattcattgcaagacagtgtaatgcaacagttaagaacacagtgctatctaacgcgggagagcacaacaaaggcagtcaaagacagctcccattttccctctgtcaaattaaaatgacacgccccttcctctcggggaaaaagcccaggtcagctgctgtgatcacacgtgattcttcagggctggagaccattcagtgccaggaaccaagtaaagggatagtgcagaatacagatcaaggcctggcactgctggtcagcttgccacgctatataaaaattagcatcaagcttccaag

SEQ ID NO: 39492 - DNA, 371 bp, Homo Sapiens
tagggagcctgcatgcttgtggatctggtccgtcgttatggtacgtctatgtcgtgggatactccctggcggaagcattgctcagtaaattgctgataaatgacttccatctggaatatacttggtcagcaatttaggaagccatgcagatttattttcaagaaactcaaactacttttcagacccattacccttgtgccaactaagtaaaatcccccctgctcctattctttgggagtcctgaaccgtagcataaaggaattcacaaaacacttgcaggaattaataattgcattctcgctcttattatgcaaagccttattagggcagagaaattaaggtttccataaattacagttccagaaggtccg

SEQ ID NO: 39493 - DNA, 365 bp, Homo Sapiens
cacattcctttccaaatttcttcttgcccatgcaccatttcctcttttatgattgtaacaaatagccctcatcctaattggtgaattggaagaaatgactctgagaataattaactctttgttaattgtaaatttggaaaggcatggaaagagacctttttcagcctatgcaggaatttaatctagcacttataagtacaaaatggctttcgtttagtgtgtattttaaaagcgatgtccaaactggtgagtagatgccaatttcttaatattcaaaaaatataatattaaaagcctttctccattatcaatatagtggaaattctttgcaatataatccccaagatttctgactttctacatac

SEQ ID NO: 39494 - DNA, 421 bp, Homo Sapiens
acggttacattcctctctgtatgcatcaacccctcatttcagagatggatttgagactgacctcccatttccttggctgcagcagcacccgattaaagccttcttccctggcttttgtcttatctcagtgattggctttctgtgcagtgaacagcaggacccagaccaaacccctggtgctttggtaacaattacatcttaaccaaatacatatattttttcagttttgagtcacactttggtcttcactttaaattgattcatggtaagttgcttttttgtgcttccagtcttcttttggttggtcttgctgagtgccttctctagatttgggctgtcattcaagcctcttcatttacaatgttcattaaaaattcagtaccatacctgtcccactcccaaccattttttaattcctgat

SEQ ID NO: 39495 - DNA, 436 bp, Homo Sapiens
caccatcgagaaagtctgtcatacccgggatcttccacgaaggggtcccgtagcctgagcagagaatgcagcagagaaggcacctgagccggccagggctgtgtcaaaaagcagcagagacctggcccttcaacagcagaagtgtgtcctcccacagtcctgggggctgacgtcagagccatgtccgcagggcgggctccttctggcaccatgctccctggctctttggcggtcatctttcccccactcttcccatcatcatccctctacttgtctctgtccacatttcctcttcttgtattgggctagggcctaatataagaccctagcgaccctcattttaatttagttacctttacaaagatgctacctccaaataagatcacactgaggacctggggctaggacttcagcagatgaattttgtgggagggac

SEQ ID NO: 39496 - DNA, 409 bp, Homo Sapiens
cctcaggacagaattaattgctttcttatctgtctgaagtttggcactgtttccatctaatagctcaatgcctgtctgtctccctgttctttcacttgttcacccaacatgcattgtagtgccagcatacagttagtgacccccaaagacctcaagggtctccaggaggtctgacaggaccctttgcctgtgtcagtctttgttaaatgtggggatttggaattgagccatttcagggtcaagtctggagttaggggagctaaagggggttgattctgtgcgtaccccttgtcccaatcagcccctgagtcccaggtggtttccaaccttctcttgttttggctgatgggagctggggcagtgggagggtctggctgcccatctgcctgagcttcccagtgtctaggat

SEQ ID NO: 39497 - DNA, 480 bp, Homo Sapiens
ctgtacccaaacacattgttagtaatgcttcatttaatcctgcaacaatccgtgaaaaatatgccattattgcatccattttgtaaatgaggaaactgaggcccagagaagttaagaaacttgcccaaagtcacacagcttgttagtggcagacccaggactgaaatcgaagcctttgggctctagagatgctcaaccgattcacattcacagtcctcactatttgcaaactacagctgggtgcagggggtattaaaaatgcaagtgatcaccaccattcaaacacttgtaattacaggaggagctaagacccatgtgcataagatgccactcctttcttcataagggccatataatagtaacagtaataatagtaataatggcaacggttactaattcttgagcacttataatgcactgagtactgtgtggagcatattacataaattaacttatgcagttttcatgaccaccttgtaa

SEQ ID NO: 39498 - DNA, 361 bp, Homo Sapiens
tgctgggattacaggcatgagccaccacgcccggcccaggactcttgtcttcttgaacacgtggctttcacagttcctcttttcattgccattctgtcccacaggaaaagggaaggacacagagaagcacacatactgaggttttaaccagccaggtcctgatggcacgtgttatgtccacccatgcctcccagggagactgggcagccatggcccagctgcagccctaactgaagaagaagggagccgtgatttgggtgggctgggcccagtgcctgcactcaccttccatttaatggaagggtctgtagtgtttcaccatcatctctaccctgtgacctccctctgtttcttgtgtcat

SEQ ID NO: 39499 - DNA, 455 bp, Homo Sapiens
ctaccgccacctgttcccaaacacaaagtgggaaacaatgaactatttttgtctaattgatttcatatactttaatttctttccttaaagtaactgacagttgactaaggtatcattactttatattagcaacattctctctatacttcttagctaattcctccactaatctgagctacaaataatatgggatatcatccattgccagacactgttagacactaagtgccaatttatgtccctgtgtccttacaaatatctcaaggcagggaaaggtggctcgaatctgacctgtattatggcttccagtaacctttccaggtgactgctacgctgaattattggcctccctttgcttcctacagtgtcaccactgcattcactttgtcatactacaatggtctgtccatgtgccctcttccctacttagctccacaacagcaggacccatgtct

SEQ ID NO: 39500 - DNA, 406 bp, Homo Sapiens
tggtagagacagaaaaacagagcctttccctcagcgagctctctgagctacaggagagacagacacaagctcatatttatctgccataacatcactggggcgagggaacctgggggcagggttccaggaggaggtggttcttgagctgagacttgaatgacaagggcagccaagcagcaggaggcctgccaggcgaggggtcctcttaggtactgtccttggtcagaccagtttctacagccaaaggccagccctgcctcctgcaagggaggacaggcggtgatggccaggaaggcccagattctggccgaggcccaggatgccattgggcactgagctctgtccttagctcatggcatccctcagccctacttcccaagtgatccctccattgccagctcatggc

SEQ ID NO: 39501 - DNA, 457 bp, Homo Sapiens
gaggcagctccctcaaagaccaatctgtttctattaaaagtgctcggccatgtgacttaaaagttgtgaacaagacaatattttcttattcatcaggtctcgaacaggtagaacaatgtgtgtaaaactaaagattatcctgcttaaaaattttgttttattttataaagttaaaattaaatgcagccagtggaagtatcagaatggacagggaatagcaactcttacttcttcccccttgttagacatccttcttttttcctaaaggaagaagatcctaacagtgcaatggatcaagagagacgaaagtctttactaaaaccaaaattattgagactgcagagagaccattgaaaaagcctcaaaagaccaggaacgtgtgtaaccatctctttgaatggccagaaaagggaccatatgatgctcagaggtatcattcagagttaggattgatctg

SEQ ID NO: 39502 - DNA, 428 bp, Homo Sapiens
acgagtcgctctccagtgagctttgtcaggagggatcatataaggaagttgggtgggatagcgatgagatgagtagtatagtgggcccctgatgctagtccctggaacaatgccagttcatgacatattaaaaatgataaagacaacagagtacatttttcataaagctaaatttattttctattatgagattatgcccttctcaaatttttaatactaaaatatccttccttatatgaaattatagtaatagtagatgatgttctttttattgttctcacttggcaaaatataaagttggtaagcctatgttctcaagtctcaaaatatttttcaaattgtaaatcacaaattctagaaactattgggctgataggtaatggataataagtgttccacaaagaagtaacagagtgacttccagatat

SEQ ID NO: 39503 - DNA, 401 bp, Homo Sapiens
tatgaacttcaatctccccagatgaatgtttgttaactttaattatgtttgtttttcccaagaagtactactttttctgtctcttatcagtgttaaacatctcctctcagtttgaaaatcagtagatcaacctggttaaagataactttttgccagataaatgagttacacaactctccttaccatccttctgtttctctacatcctcacaatcatttgtactgaatgcaacagaggaaggagtgttattgctttgtgatgattccgtggttgattattaacttcacaggtgatgttgggaggtagcaaaaatggagaaaagaagaaaatcaattatatagatatcagagttgtaatgtggttctttcaataagaaaccacagaagagaactgttgtactg

SEQ ID NO: 39504 - DNA, 364 bp, Homo Sapiens
gtcccaaagtatctatggaatttaagggattatataatatggattattatctgtgaaatgttttttgacaaagacaaaaatataattcagtaactaagagtggaatccacagctagtacactagggatacccaagaggacaaatattctcttagagtgacagccttttggaagatcccttttcagctgactcttgtataactcactgtgaaaaagagaaagagcaaaatttccaaaaggcagaaagcagagacatttttcttaaccatcaggtgttggggtcgggctcaccgaagggtattcgacagcttctccctctcccacctcacccactgagcactttgcagcagtacggtgtcctggta

SEQ ID NO: 39505 - DNA, 403 bp, Homo Sapiens
acgtcaccctaccttcaggcatcgctctacttccttagataagcctctgctcgggttaagatgttctgtctccgctgcccccactctgcaggctttctcctcccgctggctggtgcagagaatgggggagccattaggagccacagacactgagctattctacatggaattctttttattgtttgatctatttcacatgtacaaagctttgaccttccagttctaagaattcctacttagaactggtaggttctaagaactcctacttagaactggtaggttctaagaacctccctggaccgattctggcacatgtctcttctgaactcacagagcttgtgccttaacaatttagagtcaactgactttgctgtcctctctaatgtgttaagtttcagtccgt

SEQ ID NO: 39506 - DNA, 388 bp, Homo Sapiens
gactcatcgtcttgtgcccggctcttccattttgtacctcacccgtttttcccacatttcttttcccgtgcttagtgtccataatatggattccaagtatcagaatctggtgattagaatgtctaagattcttccctagaattttgtggttatttttttactgctacgttgtttgactagtctccctcccctgcaataggtcagtgactttccttctatctaaacttctgaaaattttccagagacttcaactgtgagacagtttgggtccttttagcaagaatatatacctacagcagagccttttgattaaggtttgaaaaactactctaatttctctctataaatatatttatattctgcatatatacccagacacacaggaaac

SEQ ID NO: 39507 - DNA, 400 bp, Homo Sapiens
gggtgagctccgggggcacgtgggtcctccctgcgccgggctgagcggcttcctggggcactgcgggttgttgcaggtatcccttctcccgttttctctggcctccgcatggcctttggtaaggctgtgcacaagctgggggctctatgctatcggtcaccacctaattgcagagcctggcttggtggtcctggagaggaggaggaaataaggctcccagtgggaggctcatggtaccagagtcctgtccactgactccagtgtcctgtccactgactccagttctctctgcacttggccactgtcctgccctctgggacaccctcaatgtgaggaggcagctggtgggtcttaggtgggctgaggagaaaagcagtcactgcagtacccgcacagaggg

SEQ ID NO: 39508 - DNA, 384 bp, Homo Sapiens
cctacatcagcaccagctccttttgttgtaaaatccataaggtcattaaacaaatattgactacagaaatgtacaaatcctatccaaaatagattagtgacaacaacaaaaaaatcttgatcaagtcaaatttatttatcgggcacctactgtgtgcaagatttagtgtgtcccatcaggaaacggcactcccaataaagaaaagcattaatatggtaatttacttaaaacagggtgcctgttttggacaccttgtttgggatcccgcaaagtaacctgttctttattcatgcaatgagttttactgcagcaggtgatgttttctttttaaaacctggtgtatcaatctgaggatctaaagatcctctacaccaacaaaaaaat

SEQ ID NO: 39509 - DNA, 434 bp, Homo Sapiens
tcctgtttgagagagaacagcgcccgaactgctttcaggatgtatcgcttcaactgctggcaccgaagcaggtccaggtccactatgtcctgcaaaggcctgtttagtcgattatctttattttgtgctttatctaacttcgcttccagacgaggttcacccaactgagcccagtccagacagcatggagctctagtgcaagggccaggttgttcacacttaaacggccacggacaggagagctggacgaggacacacgaagctgtcagcagtgtggccacatatgactaaccaaatggaaacgttctgaaacgtcatcaataactatggagcttaatcctagaaatgccacacatacccgtaagcctttttatagctgagaataatcattttttaaaatgacattaaaggcaggatagagatttacacatata

SEQ ID NO: 39510 - DNA, 717 bp, Homo Sapiens
cagggagagagaactggactgaatattctgagtctgaaataaaagatgcagagctatcatctcttcaaaggaggggctgtagctgtagctcaacagttaggccccacttgaagggagaggcagaattgtactcacccagattggaaaatgaaagccagatgggtagaggtgccctcagttagcacctgtcccatctcgggccctccaactcctcccagtcccactccagtgcagccagctggctccaaggtagaaacccatgagcactcagggagcagtgtgccttcagctgcagcagaagcagcccggaggataaaatgagaaccagctgcacacgggccctttaactcccaagccccacccctgggcttggcctgccttgccctgccgggaagtgatccccaaggcagggtgagagttccccatctgaggcgtttgttgcagctacctgcacttctagatgtgagtacattgtactagccccccaaaccccaaatcaggggcagatctttgtatcccttgaggctctctttagtcctgtcttgctttgaagggccttgcttctgctggggcagggaaaacatgtctgaatcagagtggggaaggaggatgggtggtggcttgcttttggaggtttcactttccatagtgggagtctcgggtttgaagtaaggagattaaacaaacggtcccaccctcagtaccactcatcgatcg

SEQ ID NO: 39511 - DNA, 397 bp, Homo Sapiens
acggggggcacaggtgacttcgcaggcgacgcttgtgcatcttccatctgtgtgcgctgctgtgatgtcaaatccaaaaagcaccctccagaaagcactttccagaaaccacctccagaaactgtcaactctgcgggccacacgaattgcctggggtgattggggcttctgtgagagcgcgaatgctctgagcagagaggagaggctggtctggtcagctccggctgcttgtaacaccaccacagattcggtggccttcagcaagttattgtctcatcttcctggaggctggacgttcgagatcaaggttttggccggaataatttagattgttagtgctggaagaaacttgaagaccaccctctccaaagcctctttttacagatgaggaagctgc

SEQ ID NO: 39512 - DNA, 393 bp, Homo Sapiens
acctagaggatcggaggtatgctgacaggtcaacagtagtagggatggagctggggagcaaattcagggctgtgagtccctcctcttaatgatcatgcttgtgattttagggatacttactgttacttattgctggtacattttccagtttgcatttggcttttgttcatggtgtcgttttatacaagagctttaactttttgtatgggagaactaagttgtatttattagtgtaatgcctcaaacataacagattctcaaatctatgtgttgaacaaatgagaatgaacccatcagcagtctgttgatggtgatgaccttttatgtagtgtaatatgtatctccttttaaagggattcccagggcttcataaatgagttactctttggtttt

SEQ ID NO: 39513 - DNA, 637 bp, Homo Sapiens
gtaggtatgctgcacaaggaaactggggagatagacgtggctgtgtatggctggtgtcacctcagattttacctcttgagaccaaggtgcctggtttctgtccccagtagttttattgtcttggtctgtaccatccacgtccttcccatcccctctttttgtcctctctcctctcaccttaaaggtttttcattttcagtttattgatttagttctaccctgtggtgggattcatgatgtgttactttaatgttagttgaggcttgctttccctactagactgtaagtgctgtgaaaacagagcatatccgttttgttgaaaaatgtatgctttgggtagcaccatgcctggcacataaaataattcaatgaatttttgagcaatgagtgatgggaggcctggaagagctaatggtgaaaagcatagagctgaattatatacagaggagctttctagtgcaggacagaatagaggtgtagagctttagtccttgctctttctgcagcttgtaagcatcatgactttgggtaagtcaggctcttttttcctcaactggaaaatggggctcatgtgaaatgacttggtgtagctcacagggtatggctaggatcaccggtaccacttactgtgcagtga

SEQ ID NO: 39514 - DNA, 402 bp, Homo Sapiens
cgaggtatgctgcaacagggctaacccagtggcttcaggctccagaccagctgccacagcctgatcatgaggctagcactcacagacccagggttcaggcttatcctagtagactccagtgatggaccagcctccatggacccaagttctaggactacacttgtggatccaggtttcagactggcccctaaagccccaggacccaggctagactttgcagacctgacccccaggccagcacctgcacactcagcctccaggccaacacaagtggacccaggctctagccagactcctaagctctaggctttcagccagcctcagtggcttcagataccaggccagcaaccatgatcctacactccagacaagctgccatagatcgtgattccacacctgccc

SEQ ID NO: 39515 - DNA, 413 bp, Homo Sapiens
tctagcggatctttaggagagacggagtgcttcaggtccctgtatgtagtttccttctgtggtgggaggctttgagcccagagactgagaaggactggggtggggactttatggtaaagtcggttggtttcaggcagtgggtcctaattatgttttcctagattacttacagaactgactaagattgcaaaattattcagggtgtgattttgaaacaggtgctgaatgagtaggaaagacctagaaggctgcttgacttacttaagccagacccttttgttctctagagaagcataatttttctcatgcagaatgatgggagagggtttcaagatttacgaggcttcacagggagtctggctgtgttgttcactgtccactgtgtatgtgtagagtccttactggaatgcctc

SEQ ID NO: 39516 - DNA, 444 bp, Homo Sapiens
gcaggacgttacgccggcctcaggtatggggacgtagatgggggacagtgtggcaaagtgacccttgtctataccctcctccttctccaagcccagtctcaggggccgggaggagaggtgccccggggtgggcaggggccagactgcagatggcgatggggagccgggggcagattaggaatgaggggcttgggagctcccacggcccagattctaactcagcaggtcagaaaagaaatgcccatgctggagcccttgtggaagtggagggccgtgaggtgaggaggggagcagcccccactgctgagcaaacctgggtccgggaccaggcggatccagggccaccctcccttcctcagccccctgccccctttggcccaccctagtggtccttggcccccttctggattggcggctgcctcacgtgactggtcccactcccac

SEQ ID NO: 39517 - DNA, 384 bp, Homo Sapiens
ctctctacctaggctcgctcactactcatggagttgtaataactagcatttcataatttccagtgtccagcattctaagcatttaccaatgtgttcatttaccaaggttgtcttctcacaacaactttatgaggttgtataaatatcatccccattttacaggtgaggaaactgaagcacagagcggtaaataccttgacctaggccacacagccggtaggcagtaacagctaggacctgagtccaggtagtgtggctccaaagtctgcaccatttaccaccaagctgtaagaaaagtgctcatccacagaacaccagatcatccccaaattctctactccaaagggcatgagggtgccaatgaatgctccaccatctaaaata

SEQ ID NO: 39518 - DNA, 555 bp, Homo Sapiens
ctagaggatcccgtcaccaggaccagatcgaatgccataaggacctacatctctcctcttaattatttctgttgttgtgatttcagtttcggatgtttctatggtgatttaattcaatagtattaataaccaactgaaatactcagagactaaaaaggtacatctggtgctttcaaaaagagacacacgtggaataaacttttggaaacacctgacttaattaacaggatcactaacatctagcaggatcactgctagactgcaacaatactgagcttcttcctcgctgcaaattcctaaacgaaacaaaatgctgctgggtatagctgagctcctggtggcaatactcaatcaaaataataaaaagcctaggacagaagcagcaagcacaggcctccagaagtcttagtttaaatttttaattaaacaatcataaatatcttttaaaaaatgtagactggttcacacataagtgactcactttataatctgaaccttcccttctggcccctgggattttatagcatgtgccaaacttcaacaaagctgtatgtg

SEQ ID NO: 39519 - DNA, 663 bp, Homo Sapiens
tacaggacagatcgatttaaccgtgggtatgtttggatccattagaaagagagaaaaaaagtaaaaggcattttgtcaacattacctttgaccatggactaggcactaaataataacaggaaattgttatttttgttacatgtgaaaagcattgctgttatgtgagacaatggtccatttttgatcttaatagaaacacactgtgctattcagtagtaaaatggggtttgttttaaaacagtaagtagttcaaaaccaagaaagaagggtgggagagaacgctggtgacagaggagccgagtcgagggttccaaaggctaactgcgccctcacttgtcactatggaaagttcttttgaaacaagtgagaggctctgcagaggggccgagtgtggcagaacatgcagcgagtgacatgaacactcagaggtgggaaaagccgtcacatagggagcccgctgggcacacgtgccacagatgagaggcgctgacgcagacgtcgcctagctgggatgagacaaaagcaacgccagtgtcggagtctgagtaaaggcatgtgcaccggaaacgtggagataccgagagaaaagtccaggaaagccgtgtcccacggggattggatccctggatctgtttacacctacgggagggaagagaggcaaca

SEQ ID NO: 39520 - DNA, 527 bp, Homo Sapiens
ttcaccaggacagatcgacatgaatggagccatcacacttgggacctgccctctttaggacaggggcccaaccccaactcaagatttgcacagatcagaacaacgctgacttcttacgaggaaacacagtttaatttctgcttttcccatataaaagtagggagcagccagttagtgcaacaggtccctttctgggaaagcaaagaacggagatgggatctacccgccgtggcatcttcatgcacttcttaggcacaattcgcatttgcggaaaagctcggagttgccttcatcgcctctgagccacccaccgccctgtctcagtgggccgcatggccaccctcacgctgcttcccgagcctcctcagggctgcctggcggcaccggccggaacagcacagccatattctcgtgtccaggtgcacgtgcctggccctcaccactgtgtggactcaggtcggctccactctcccgccccggttatttctgtgcatttttagcatttgtgtcacctcggggtgactgtg

SEQ ID NO: 39521 - DNA, 452 bp, Homo Sapiens
agaaagagcgtgggccctggacaaggacatgagccccaggaagggagagccagcctgggccactggacatcctgcagaggatggcctgcaggggcaaggtgacttcacagggcttaacctccagctgagcagggctgaagcagcaaacttaagtgactagtggagtgcagagaatgcacacactccgccatggcaagttcagtcacctgttccccacagtgcctctcaagagccccacaacagccctcattatagaaagtcagctttggatatctgcccggctagaggcaatcacacccgactgtacctcttctccctccaccgcaagtctcagccagcaagaggaaggaaaagctggccaagtagacaaagaaagtggaccacattcccatccctgggtgcagataatcagcctcaagcccaggatggacagggagcaagagttttactta

SEQ ID NO: 39522 - DNA, 409 bp, Homo Sapiens
tttacattatttgaacaaagaacatgtttagtttcacacttaaggtttacttacttacagattttcttcaatttacattgaacaaaataatacagtatcaagtttagcctgggtgaggggacatgttttggcatcttttccctagagtagtagttttggttcaagttaatttttgaaaaatagcttttgtatggaacagtataaatgggcttatagttcagatactgagcaaatacacaatactactttttactaacaggcacataaaggaaatgacaactattcgtgggctcaaaaaactgcatattttaactaattttcaaaatttacaaatcagtatctcagagaagttaaagaaaatggaaaggaacaaagcccttttagaataattaatatacattgccttgct

SEQ ID NO: 39523 - DNA, 378 bp, Homo Sapiens
accagcaaatactttttattgagcatacaggtattacgctgggtctttacatatctcctccaaataagtgagtccaaatggcaggtaactcgaaaggtgagaaattcaagtcagctttgaaagacacattgcatttaaaggaaaaacggtattcgcagatgataatacaggatggagtggatcagaaaacacactgaggctactgatcattcccatttgccaactcactgcagttggcaagaaaactctgtgactccatgagatgggaaattacaccagcagtcaaggtagcaaggtaatagtttcggctaagttttgctgcataacaaactgcctcaaatagtggtttatatctctaacgtgggcaaggtgggtgat

SEQ ID NO: 39524 - DNA, 379 bp, Homo Sapiens
gtacaatttccattttaattttccccagagaatagcctgtcctcagtccttaagaacttaggtccctaaattggcctttgttggggaacttgggcaacaaccggaagtccaaatccgggttggggttttccgtcccttgggggctcaacaaattggatcccagaaaatttggcggtaatttgcaaaactcacagagtaatggagttccaaatagctttgggaacccacatggatttcaaacaccctcgttacaaaaatgccccgaaatgttgggccccccaatatgttccgaatgcggatttcctaaaggcctttgccttggggcacaaatgggacacattgtgtccagcaaaaaggcagacattgcccgggccctttt

SEQ ID NO: 39525 - DNA, 376 bp, Homo Sapiens
gaaaggaagaagtaaaagcacagagcaccacgaagtcgagacggaaaaggaaacaccacagccccacccccacagaacaggaaagaaaaagggacagggaggacaggtcagcgggggaagagggccagggcggaaatcggggcgaggtggacacccgacccccgcacattatgccgaagcgaacaaagacacattcaggagcctattacagaaacaaagtcggggaccctcaagtacacaaagggaaaggaaggaagcaagtctggactttaaaacccagagaaagaagctgacaacacttgaaaagctgctggagaaacatcagagtccagggccctgatcactgattgcagcacgagtagaaaccccacgcttt

SEQ ID NO: 39526 - DNA, 435 bp, Homo Sapiens
tgggttttatttgtttatttcctcaaaagcagggatcaggagttgcttgggagaggggcagttgggagctgctgggggctgagccaaggtcacctgtcccctgacccctttccagtctagggctaaaaatgacctgaaatcgtctggtgtgccttggacatggccaatttcaaccacagtgcttgcaccccatgtgccaagaaacccggttttcccagcacctcctcctgccctactcttcagtattaattggggtgtgctgggagaagggatattccacatcacacctcccactctctgcagccagggaaacggatcctagcgcccagtttccaggacctgaaatctagtgtgttccaatcaggtgcactgatggggccgctcctgcagctcagggggctgcagatggggagggacctccaggttacaagaatc

SEQ ID NO: 39527 - DNA, 350 bp, Homo Sapiens
tatgttggaaatagtaacaatggccatttaaagaggccatttcatttggttcctgggatgcctctgcacctctttcctgctttatttctcctcttggtaatgggcaaacatctcctcaataaaaaggttagcctgtccccattgaaatctcttagcatgaggactgcagccaagccctatggctcaatttcaagtccccttttaaatggaaaccatttgataccttttgctcatggatcctgaaatctttgaatatgctgaaagaaagcggggagttctgactcagagatttaaccctctgtctacacaaacattggtgactactctactagaaaacaaacaaaaagagc

SEQ ID NO: 39528 - DNA, 516 bp, Homo Sapiens
tacaaaagcaatgattcttaggcaacttgtcaaaagacgtcatttcagttttgaggcaagtactgggttattatattaaattgtgagaataggttaatttagctatcacaatgagtatttgtattaatacgttcttacaatgctaataaagacatagctgagactgggtaatttataaaggaaagaggtttaattgactcacagttcagcgtggcttgggatgcttcaggaaacatacagtcatggtggaagtggaagcaaacacatccttcctcacatggagaaggacagcaaggagaaatgctgagcaaaaggggggaaaggaccttataaaaccatcagaccctggttgtgagaattcactatcacaagaccagcatgcgggtaaacacccccatgattaaattagctcccactgggtcccttctgggacacatggggattatgggaactacaattcaagatgagatttaggtggggatgcagccaaatcacgtcagtattattcctaaaaat

SEQ ID NO: 39529 - DNA, 442 bp, Homo Sapiens
tttatgaaatatttattgagcacccactatgagccagaagctgtacttaggagaagagtcaacagtttcaggagtgatgagtgtccccaaggagaagggcagggaggtaggactgcagtgggcagagccagagaggcttcctgcgagacgtgacttgaggtagagagttgaagaagactctgagttactccaaggaagtggagaagcaagaaagcgtgccaggcagagggaacagcacctgctggagcactcatgggaaggagggtggggtgagaaactggagaaagccccatggatgaagcagagacagaaagagctgccggggggaggcggcaccccatgaggagctgggttttcacttcaaatgcaagcaggagaaactcaggggaatttttcttttaaacaccttaattaaggtgtcatttaaataacacaatatcta

SEQ ID NO: 39530 - DNA, 362 bp, Homo Sapiens
cttttgaatatatctgatttttattacatatgtatatacacatgcatacacaaacacacatattctgaagtgaaacccttaaaaagaaagactgagtattaaggttaaaattaaactatacaaatccaccatccatctcctaaataagcctaaagaacacaagtagctaaagtatgggtatatatgctaatcatagagagaaaagcaataacaatagaaatgtggtcctgaaaataggcttgtgaagataaatctacttcattctacccaaaccctttaagatacacattcattgtaagaatttaccaagcatctgccatgttttaagcatattaagtacaggatcataattaggtacagtt

SEQ ID NO: 39531 - DNA, 399 bp, Homo Sapiens
atgaagtcttatgaaaaaagttatactaatttacagtgtgacttttgttacttccaagtgtcttccaagcctgctacatgagatttcagataccaaattaatcattttttctctctctctaattatagctagctattgattagaacctaaaggtcaatatggcaccacataaaatacagcaggtctatttccctctgaacaacgattctaggagaattcactggagagcctttaacaatattaatgttcagagtaaaacattatctacatttggatttctctctacaaaacatgaccttaactaaaacagctctaataaaaatgactattgccctctaatctttaatacaattaaattaaattaatgtccagactacagataaagtaggcccaactgaa

SEQ ID NO: 39532 - DNA, 407 bp, Homo Sapiens
aaaagcatgggcaggttatatcggaaaaaaagaggagaataatttggcacctgtggaggtgatgtcattaccagccatgggtctgaactgtccctggaatgcagcttgcagcttgaatctctgagcccacccaacgctgttgaacataaaacacactcatatttgactggctctgcttaggaagccctgtacttacaacttatcagctttaaactttttatagaacatagcatcaaatattgtcaaggatcatccttggaaggccaaactttacagctctaaacctttatttaatatctggcaggcctgtgaacgacttgttctgcctgcctatctatagacagtccctgcttcatgataggttgtattccaaaagcctgattttgagtcaccagcttgaaaaaaga

SEQ ID NO: 39533 - DNA, 391 bp, Homo Sapiens
ttttaataaattttttaaaaagtaaaacattgaaaattcaataatagctatcagattagtttttttaacctcctcaaccagagtaattcccttaagacctattatccctaaatgttttagtttcatgaaatattttaaggtagacggatcttaaattcccaatgtcaagaatttgggatcaaggaactagaagatcttgcaacaattttattgtgttgtgtgttttcctacttttagagttctaattaagtgcaaaatactagctgttacagcaaaagataaatgtcactttaccagtatttatactattaaaaatatcacaaagcaatttgatttatgaattgtatttgacttctagttagactcagtttctattttgggtaaaaatatg

SEQ ID NO: 39534 - DNA, 406 bp, Homo Sapiens
cctgagagagtctcactctgtcgccaggctggagtgcagtggtacaatatatataaacaaaaaaataaagttttaaaacacaacaatcaattctaaacatctgttttggctgatttgtagggttttcttctactttaaagctgtgggtttcatataaatttaatgatcttaatgaatctaacttaatgaatctaaccttggtgctgatgagtcaagaaagggatgagataaccacaatatatcaaagacacaaaagggacaattctaatcccatctaatgaaattgggaagccaaagatcaagaataacgtctaattttacatctaattaaacacataagtttactgaatataataatatacataggaaagaaaaagagtttcacagcgatagtttatattaaaga

SEQ ID NO: 39535 - DNA, 350 bp, Homo Sapiens
aaagaagaagagtgaagcactctggaccaatctagttaaagtctcgaatgtgattccctaacagctgtcatcagtgcagagagcagccagcaggtgctggtaccactgtgactctcatggggtgtgctcctgggtcatgcttgtgacatcttataaaagtagcaaatgccagccccgtacaacggcttcccaggtatcgcctacacctgcgacacacaggtgaggaggcggcacccatcagcattctcacaggagtccccaccatccagtcccattcctgcttagctgcagacaactaaccagctaataactactctattagttaggagttgactactgggcctaccgac

SEQ ID NO: 39536 - DNA, 366 bp, Homo Sapiens
aaacatattttgatatcttgtaaagagaacccaagaagtaagagagactacaatgatgcaaatggtattttcctattcttaataatttagataaaaaagatgatttaagaagaaattttttcctacaaagctgtcttctatattcatgggaagaggtatacaattcaaaatctactgcttcagttatacagaaaaacaacaccctgaaattgtattttacatatgtctctgatccagatcaatgggagtaccatccaaagcatgactatggaaacaagaactagggatctatgttatataatcttgcctttttagagtagaggctcacctatgagaggtgtttgtttaggtagagggtaaatcaat

SEQ ID NO: 39537 - DNA, 421 bp, Homo Sapiens
atctcaagagaattctaattttatattttcatttaacctttcagtgtttctgtagaattaacatttcctatttcacttcttggttcacagttttcaagagtgctatttaaggaaactaggacaatattcacagcattattctttgataactgctacttacaagacacaaaaaagaatcagtaggacaaaggtttattcccaactgaatgaaattcagctcgacacccacaacttcattacatatgaaattaacttcattatttgatttgtcctaggtaaaatgcacatatttaatgcctacatctccagttaatgtccaagtgtgcagggattattacctgtcccagacataaaatcctccactattgattttaaagtgagaggattaaactgtagcatatgtatgaactgcttcacttgt

SEQ ID NO: 39538 - DNA, 452 bp, Homo Sapiens
atttggacattgcctgtgcattttggccatgccaccatgcatttaggaagtcagaaggcctatgttactcttctaaaatgctttaaattttaaccacctatctatatagttaataagagattagctgctattagtcacctgtaaaatgtccccatgatatatataccagaacaccagaaagtgctaaactttcttccttaaagcctaggattataatatggtttcagtatgaatatccattgaatgtttatgcatgttcctgtgtgtgcccatcgatatatcaacacctgaggaaataaacataatatccacagtctactgattctttatattatcatattaaagagagatggaggcttatgatgtgattttataaaaatctgggggaggtcagagctgcagctgcttagcatagttggcaagttagaagacaatacccacatactgaagct

SEQ ID NO: 39539 - DNA, 467 bp, Homo Sapiens
agacttccaattttttgagaacttatttcactatccaaggcaattgtcagctagatagccctaaatttgcatactaaagaaacacctctaacgtgaaacacagatagcaaaaatttacatatcaaaatacagagagagaaagtctggttgtgttagaggaagattaaaaatgtatgccaagtcaaacataaaattataaaaatctaccaaaggattttataatgggacccattttatttaaataagtagttctaaatttagtctttaagttttaactgtaccactgagctctcagaggagcccacactgaatgctgggtctccaaaaagagagagatatcatgggactatgccatgtcatgcctttacagtgtacttttctttacagtgtactttttttgtacttttccttacagtgtactttgttttaaagaaatacagttgtatttctttacatgtctgaactgc

SEQ ID NO: 39540 - DNA, 417 bp, Homo Sapiens
gttgagggggttcctggctctttttatgctttcaggtttcttaggaaagttgttaactgtgtacttgtaccccaaggcaattactgtgaaggggtatcttttaagcactagaactatttctcgaattaatttgctttttatattgttaactgctgttggcctcccttcacatctagagcaacccttttttttcttatagcaagagggaaaatgggtgatttcctttccttactctaaacaaatcctgaaaaactagtttatcaaattagggtccagttctaagctgagaccttttccatttgactcaaagcaagctgttcagaggagaaaggagtaaggcctagagaagttgggtactatggtttctagttccagcctgccactaatttcctggcctgagatttcaggtgagtcaaa

SEQ ID NO: 39541 - DNA, 385 bp, Homo Sapiens
tatgcttgggatttcattttcgacatattgcaaaatttatactgtggtcagaattattcaggtgtatctcctgaacttggaactacttactactttaccctaaattttaataaacttaaccttcaggatagctcccaacacactctacatgaactacctcaaaaaaattagccaattattataaactttcttaactttgttgaaggactttgtctttttctactgtaatttttactttatctttctcattgatagcataaaaaactcataaaatttaagacttcatgcctttctttgagaaattaagacatattttaatgaccaaaatagattaaatcatttggaagtaagtatttaaaaacatacaacaacactaatatatttg

SEQ ID NO: 39542 - DNA, 379 bp, Homo Sapiens
ctcgtatgcagcttgtaccacaaacaagccaccatgtgacatcaacaacacccagacttttccattctctgctcaacaagacaagtctactgatgttgccttaggatgttgcggcaattaggagttgtcatgagaatttctaaatgcttttgctcagtttctggtcttcctgctttacctttctactgaccagtggcagacagttcatggactgtcttaagcttcactccaggaattaggctggaagactaggaagtggccgtccaatattaagacagtctagtgtgtatatgtgagagccatcgctccagtttaaaacactctaaagaagtatatctgggtaggcccttagcagacctgggctctagttcagactttc

SEQ ID NO: 39543 - DNA, 405 bp, Homo Sapiens
tgggtacatagtaggtgtatatgtccaacattctataagagtgaaaatactcaactccaaacgattcattcactcaacaaacatttgttaaccttgactataccagctaggtgttggggacaatggtgagaaacaggatacagtccttgctctcatttcacggaatgtaaaattataaatggaaatatacgctctgaaggaaaaggacagaggttattgagtatattacaaagacccctgagcaatatctgggcaaaaagtataattatcctataacagcagcaacaatagcagcaacagatattatgcggggccctaaccaaagcacattatatatacataccttcattttatcctcactacaacctttgagataggaactattattatcccgatttcatagat

SEQ ID NO: 39544 - DNA, 396 bp, Homo Sapiens
tgcctaggccaggagtactacgaaggatctgtagttagataagtaggaagaacccgggtaggggctatttcacatagagagaatttgatatttcatgccttctttcatgtggcctccttctctcatttattttaaaagtaatatggctatcaccccctctatccatgtaggaattagtaatttatacatttagtcagctggtacccaagatctaagactctgcaggattccccaccttcaaacaagtgaagcgcttaaggctagcaaaggggtggcttttgcaaaaggccaaactattttactcagcagattgagattatgcaattcagatgagtctcatagaaaacataatacaaatcataaaaatgttatctcgtttcaaactcagaaataaaa

SEQ ID NO: 39545 - DNA, 377 bp, Homo Sapiens
aaacagtaagggactgcaattttctattctttttctaatatccttatttagcaaaattaaaagttggcgatgatgtgttgctttcccagacttttatttgaaatgtgactgctttgtaaaactccagagtcaaggactcataggcaggaggatgtcataaattaacaggaaaggatgagaaatctccactccactccctcctccctcccttgatcactcattccctctcttccattcattaaccacccactacatgccatgccctaaggaagcagctatctaagaagtccctgcctgcaggggctttacagaccaggaggaaggcaacccatagagccaggatcctgataaccactgctgactgcccctctgcctag

SEQ ID NO: 39546 - DNA, 392 bp, Homo Sapiens
ggtaatctgggtataagatttcaagctttcctatggaagtccaggagctgaagaattatactctcttcttacttcttctgacagtcactgtgacctttagagggccatttaaatggccagctcatttccatcttagattacaaaacttccaactaccacatgctgagcatcctaagcccaacactcacatcagccacagtaatcatcagttccatgaaaggcccatatatttcctagtgaagtgaaattcttgatggaggtatgatggcaaataacagtgttcactttcacttctccgaaaacaaaatacagtaggctagactgtgagttcctataagagagccccagagacggcacacccagctcgccattggggaaaagagcagtgggga

SEQ ID NO: 39547 - DNA, 362 bp, Homo Sapiens
ggcaacagatacaagacaaactaaaacaggttaatccaattaatgtgttttgggtgcaaatcccagtttggtattatcaaaggcatattttcacatttaactatattatcatttcagggattacttaattttcattttcatttctatttcatcctttcttttctggcagggaagcctaagctcatttgtaaaatttttctgtcctctgagcatacaattatattttatccagaacagaagtgcaccaaaagagctgaaagttaaaagaaatgttcagtagatgagacctataatactggttctgattaattaatataatcactctattaattatctatgtttaaaattcaaatttatctatg

SEQ ID NO: 39548 - DNA, 382 bp, Homo Sapiens
caatgacaaagttttattaaataccaatactggctaggcacaattagacacattattatctcatttgctgtatctggtatcaaacaacaaagcctgaaagattaccatagattttgatggcctcattaacataattaatccgtagtgacattccctggataataaatacagttttatgtccgtgtgtcttctgtgtcttccaagttgctacagggctctatttgatctgagaaactgactgctgtttacatccaggtatgcaatgtgacattagaattgaagcagaaaggaagcaaaacaaaacagggttcatgaggaaaataatcttctaagaactaacatggcctggaggtaaaatgcaaatatatccggtaataagaag

SEQ ID NO: 39549 - DNA, 486 bp, Homo Sapiens
taaacaaaagttctttgggttcatgaatgattttaagagtgtaaagaaatcctgaaaccacaacatttgaaaactactgctctaggatcactccctgcctgtccacgcttcatactgccaccatctttccaatcttcacattgatcataacactccccatccatggcatactttcgtgtgtagtacagggtcctcagtgatctatcctgcctaactttagagttttatgtcataccactcccttctgtgcagggtgatgtccacccataatgaattgcttgtcattgctcccaaactctccatgctctttcttgtctctgcatctgcacacatgccacccccaccccacctgctcaatgtgtctctactgatgtgtcttcctaccaatcctttcccaaccactaccaccataagaccccaatcaaattccaactagcctacaaaacctactccaatatcacttcctcagggaaatttctccaaaca

SEQ ID NO: 39550 - DNA, 495 bp, Homo Sapiens
acaaaaaaatctacaaacttcctgaaagaccttgagctcaaaaaataatttatccagcacaaacttgttctctgaagcaaaaatgaagttcatatccataacaactaaccagaaagagttgtattgtgtcatacagtacaataaagcccctaaagctatgttttgaaagacaggttttttcctaagaatctattcaaattaaaatctagtaataacaataggtaatttctaaggtaataatggtggtggcagtggtgttggtagtagcagtaataacgattttaaaattagcattttacagaagggaagcagaaggttagagaggatcaataactttccaaaggttactcatgtaagtaaatagtaaatcttgatctgctgactccagagtataagcttttaacggctaagataatgactgaaacacttagagtttcatatgttccatcaaaacaaaagaaaatgggctcaactgattctaccacttcatctgat

SEQ ID NO: 39551 - DNA, 484 bp, Homo Sapiens
aacttcccagtgattttccaagtgtaatttcgtgtttcccccgtttgtttcaccctggaactcattccccacaacaaatactctataacaccaccatgtgcctctggtgttctaaagagacaacaatttagtgaatacctgaatacattctgtctcctactagaggacagagactcagccatgaatgcagagacacaagactagattttgtttttatttgtgtcactcagtaagactccttttgctttgcatataggaactgagaacatattggttgaatgaataagcttcatacttgattaaataggatgtaaatggccacagacggaatgtcaatttggatgaagcactcacaagtacccaattgggtagcatccctatcacaaagttaggccaaagagcagtctaagcagcagcatctggcaaatgacatcaaaatgcccgtagctggttcctcctcagtttactgctaaagtaggagaaa

SEQ ID NO: 39552 - DNA, 425 bp, Homo Sapiens
gagcgaggtctgaattttctctaaatattttgcagtctgtagcacagtgctaggagacagtaaaagtaacagccaaggtgttgcatgcaaaatcaagtatctagcttgttttaagcagactaaacttaagtaggaatttccaatgaataaagcagattagggagaagcacaaaatatgtaatagcttttattttatatcacctttttctttccaatttcaatgtagcattcaatatacaatagtgaattttctgcaacttcgaatataatttcatgatgttgagaatgagtcattattgaaagagctctgtatcaggtttctgtgtggagcagattatttcctcatagaagataatcttcttagattcaaagagaaatatagcacgtactatgaagggtttcgggaaaggagaggtatttcttgg

SEQ ID NO: 39553 - DNA, 397 bp, Homo Sapiens
cgtaaatcccaaagcacaggcctccagtgtggggaaggacagtttctctgtgtgccttgtggagtctctgggacagatggacagggtttgctcagggtccagatggcagggttgtgggtacaggaaatgactggggccatgatcctgggggcctcttactccagtgcccacccctgctcccattcatgccatggcccctcccggaggcagcgggggaggaggtacctgaggctgaacagcgctgcgggtcgccccaccaagctcaggaggatggccagctgcttctggcccaggcagcactgggtcagcctggagacagaggtcagtcactgaggtggctctggcagggtgccccacccctctgctgtcctcacgggctgggtgggtcactcacgtg

SEQ ID NO: 39554 - DNA, 389 bp, Homo Sapiens
gttcacgccattctcctgcctcagcctccattcatgctggttcttcctggtaacctagtcacctcccaagggcctcaccttctaatgccttcacactgggggttaggatttcaaaatatggattttgagctgacacagacattcagacgatagtatctgctgactaacttttcattcatttgataaaatacagttcacataactcagcttcccgaagtcccttggggatctctctcagtgaagctctacatgtttctttcatagtattttctgttgaagacagggatcatgccacattcatcattgtggcacgaagtccaaggcaaagtgtccaggatgtaatgagtaatgaatacatatttgccctataaccagcttatacatgatga

SEQ ID NO: 39555 - DNA, 416 bp, Homo Sapiens
ttgcttacatgggcatccttcagcttttaataatctgaaaaactctatttacccattgtcaatgtgtataaattaatctgagtcaattttatacaataaaaggtgaacttttatgcatgaaacaataatttaacaaaaaatgtacctgaagaagaatgttcattacaaatataggaaacataaatattaccaaatattggcaagcactaaaatgttcagaaatataagtctattacagttatagctctctcaagcaaaaaaacagcagagaaaaacttagtttaccttaggggctatttatttacttagggatttgttaaaaggtcgaatggggtcacacagaatactaagaagagctgttcacccaggcctcactaagaactcttcttcattcagtagctgtatagtaacatgac

SEQ ID NO: 39556 - DNA, 418 bp, Homo Sapiens
gtctttcacaaagcaaaatttttaattttaatgaagtaaagattatcaattatttcgtctatggttcatgcctttggtgttgcaactaagaagtcatcgccaaacagaaggtcatctacattttctcccatgttatcctctaagttttacagttttgctgtaaactgttcctttgctaataagaacagttgctgtaagtctgttcttttgctaatatcacactttcttgattactgtagctttatagtatgccttgaagaaaggtagtgtcaatcctgtgactttgttgttctcaatcaatattgagttggctattctgggtctttttgcctctccatataaactttaaaatgtttgtcaatacccacaaaacaacttactgggatttggattgggactgcattgaatctatagacga

SEQ ID NO: 39557 - DNA, 358 bp, Homo Sapiens
gttagttctttaaaaagcaaaatacaaagcatacttagcatacaatttccaggttctgaagtgcaataaatgtgcaatgtgggaaatacatcaaatgagaatggatttttacaatttgacttcataagaagaatatataaaagtaacatgtcagaaaaagctctaagaacatgacctcgttggaaaacaaccgttttcctcaagtgagtcaagtgccagatgacgcagcagctggtgcttctctcctgtgtgcttccacaggaccggcctctgtggtttgctgtttcccactgtcattagctgaatgcatgtctccttcactacgtggtgatactgcaggaacaggcaccctgtgtga

SEQ ID NO: 39558 - DNA, 355 bp, Homo Sapiens
atctgcattttttgatacaatgtattcctgacccacaggagccacatgggacaaattccaccatgacaggtgcaacagtgaatctaatcttccaaatttatacactatttggtatttgatattttttgtcttacttgaaatttcaagaaaacatttaagatatgcaccaactctcagccaggcatgatgctaactgtcaggaatataggtgtgaacaagacacaacagctgtgtgcacccgctcacagctgagggaaagaagagcaggccggcgggagagggcaggaatgagaggagcccagtaggaagcgagtgatatctggtgatcttacatctctgactcacgatgtactag

SEQ ID NO: 39559 - DNA, 386 bp, Homo Sapiens
taagtgaaagttatctctgagatattcttcagtgttgcttctccatttctcaactccatctcagatgctgcaagtcttcttagaatattcagttatcaaatatatttaaaccaccacacaaataagcctaacactattttgaattattaaaggccatatcactggaggaattagattcccaatcctaacaacttggcattaggggcattatggaatttaacccctcaatttccccaacccaggaatttaattggaaaggtatccggttcaatggaaactttaaccatggctcggaaatcggcccaggtggaatttcctggatcggaacccggaaagctttgaattccatttttaaaggtccactttggggtaaccgggggttccag

SEQ ID NO: 39560 - DNA, 446 bp, Homo Sapiens
cagacaaggtcattggcctccttggttttcctcgctctctctgcaatccccccttctcttctccttccccgttttttccacaggccaccatccctgacactcttgccataaggttcctgtttaccactcagctcctgcaatttccatgtcctctatcttctctttactaatccccatctccccaaccctctctacacatcattaccacctcatctcctactttgtcaaaaaaagtacagagtatgaacctcacaggaaaagccctctgaaatcgacctgctggttagggaatgagaagaggtagagccaggcaaggcactccttctgggtacatagggaaagaaattaaagctgctacaactagacagtcagaagttgctcagaagtggtagtcctaaatgttcttaagggagctactctggtttggttatggtttgtctgtcccc

SEQ ID NO: 39561 - DNA, 386 bp, Homo Sapiens
aattttaaaacagttgtttaatgaaaaaaggaaggttagggactagagaatttttgaaacaataattatgataggaatatcagtaacaaaatgtttctgaagctataaatgtaagctaaaaatataaacatcattgactaaatccagtctttgattagaactagttttttctctattaaggctcttattttctactagcactaacttgtactcaacccttagtacatattctctcactttttagtaaccattgttatgataaattgaaaagccattcaaataaaattttgtgtgaattaatctgtttgccagagtgaaaagagtagtaacaataggtaaacagaacacttgtggctctaagtcagggacttaaagtggtgcgctta

SEQ ID NO: 39562 - DNA, 433 bp, Homo Sapiens
ttttttggccagggagatttaggtgctgactttaaaacaatgaaaaaacaatttgccctaatggagcttgagggcaataacaaataggctatggtaagtaaatgccatgaaaagggtactacagtagaaggtgctatacatgcaatcaacccagcctgggaggtagagaatcaggaaatgcttcccaaagaaatgccatttaaactgaatctgatctgaaggatgagtaattgtgatacatacacatatgctggtgggaaggggtggggggtgtggcaagaaagacatgaagtataagagtattttgaatagaggaaatatgagcaaagcccagaatccagagagctgataacatactcagggaactaaaactaacttactgtggctgaagagcaaagtatgaattgagaagtactgagagagaccaaagagg

SEQ ID NO: 39563 - DNA, 470 bp, Homo Sapiens
gactaaaattagtagcattcatatgaacacattttaaaaggttatctattgctctcattctgtataagcagagaaaaaaatacttggaatgatgttcatttactatgcttaaaattttcattgaggtgtaatatacaaatcagaaaattcacttcttatgattgtacaagttaacaatttttagtaaatttacaaggttgtttgatcataataacaaccaattttagaacatttctatcactctgaaaataaccctcatgttcacttaccatctctattcccactccagtgctgggcaaccactaatttactttctgtctctgtagatttgccttttctggacatttcgtacaaatagaatcacctcatatgtggtctttgtatctggcttcttttctttagtataatgtttttgaactcatccgtgttgcagcaagtcagtaatttattcccttttattacggaagtcc

SEQ ID NO: 39564 - DNA, 418 bp, Homo Sapiens
ccaattcagaaaacactaaatcatgtaaaaatcttggaagaggagatacagattctgacctaataagatgctactgctctgattccaccatcagaatacctttaggttggcaccacttgcaatgtattagtgcagcaaactgcacgaatcccctcattagatccagggcccctgagagtagaaaggggagtggggcagtaaatggccagggaacaggagacagtgggctggagggtgtcccaggttctaaccccagctgggccttcagagccctggtgtggtctgggctaacctctcaatccttttccaagtcttaagtttccttccaactcactgtgattcttccagagaattacacagggcaggtgaaattatttcctagaaaatgcccatggagtacagaggttctcactgaact

SEQ ID NO: 39565 - DNA, 472 bp, Homo Sapiens
agtgtatgtatttaaagtgtacaaaacgatgttttcctatatagagtgaaatggtgttttgagatcttaaatgtgaaatcttgtcatatttctgctgtggttattttcttattttttcaaaagtagaaatgctttcatattctcacaagggaaccacttaagacaaatgtcaaattttccatgaatgtgggaaatagtcgattacatgaggggaaaggatgtttgcggatgaggcaaacattccatcatatgggctaagtcaaactgtgacgtccttaaaactatcctctgccatgttcctttctaccttccaaggtttaggaggaatttctccccattagaacaggtcagacatggacaaaatgccatgttttctaaaggagatattctacagaaactgagaaactggttaatttacataatgcatttttgggtatcctgagttattttcattaaacgtactggcaagatc

SEQ ID NO: 39566 - DNA, 402 bp, Homo Sapiens
agcaaagcactaagggcacagtggaaaaataagaggttggaggaaggatagaagtgaaagagcaattaagagagaaaaggaggaaaggactattataaatacataactaccacatgatgatttatttttgaacatgtaccttttaaaaaatagattttacttcttagttttagaggttgttagaaaaactgagtgtagtatacaaatttcccatagaacactttaccccccaaatatgcagagcctcccccgctatcaaaatcccacaccagagtggcatatttgttaggactgatgaatctacattggggtatcattatcacccaaagtctataacttacattagggttcactcttgttgtactttctatggggtttgaaaaatgtataatggcatgtatc

SEQ ID NO: 39567 - DNA, 433 bp, Homo Sapiens
tgtaaatattttactagcttatattttataaatagacttgaaaagagcgatttgcccaaggctactggcagagattagtaagtgttccttccttcattttcccctttttccttttagaaacagaataatacccttttcttgctaagtgtgaacaggactctcgattgctgtggcagtgactgcatttcccagatgccccgaggcgtgtggctgtgcgactatattcttgaaaatggctgtgagtaaaggtgacgtgtgcagctgggttctgcaaaaggaagctactcgccctccttgtcctctttctcctttcctgctagctttgaaatggtgaagactgtaatcaccaccttggactcaaaggtgaacaccagatgttgatgaagctaccagctcactggttctatctgctagcttgataggcaaggggagg

SEQ ID NO: 39568 - DNA, 436 bp, Homo Sapiens
aaaaactatttaagtaggcacccaccccattcccacccatgaccaaaaatgcaaaataagtacatcccttaggtgtataccttcccttttgcttagggcaacagttaagataaactaatacacgtatatgattttaagagttaaaaactcatcacccataatcaataaggatgctaaggaatggcaataccttgaagctttttttaaaattaaaaaccaaagctttagatggtaaactacacttacagaaacacaaaccaaaatctttatgcccttgctttgtacgtgaaagttctattttaaatacttgtttgaaaaactcattatacagttcattcagtactatggtgataacaggagtaaagatgttcacttccattagacaatgaactaatctacttagagaggactattatagcgactctcttctcatata

SEQ ID NO: 39569 - DNA, 457 bp, Homo Sapiens
agacaaggtctcctctgttgccaggttggagtggcacagtcttggctcactgcagctttgacatcccaggctcaaacgatcttccacctcagcctccgaagtagcagaaaccacaggtgcatgccttcatgcccaactaatttttatattttttgtagagataggagcttactacgttgcccaggctggtctcttttgttttggacacatccatctggggtgcagaagctgcagcatccacaagagcagccagggcatccgcagcagtgttgtaacgggaggctggcaggcttggcttattgaagggcccccagcaggcagtggctgtaaataaaaccaaatcacagctctgtgaagggaagaccatttgctgggaatgtggtggggagatggaaggacaaactgcaacaacaacaaaaaaagccttcatggcatgggcagaaaagcatgactatac

SEQ ID NO: 39570 - DNA, 417 bp, Homo Sapiens
tgtgtattttccaaatttcccacactgaaatatacattagttattcaattagattacaattatttaaaaataaaaatggggctgataccagtaattatttggaagagtgtagtaagcatgtctatatttgatgatatcattttggttatctccaagtgaggtcaaaagcctgttgttgcatttgggtggtttgaggatcagcaatgggaatgtgaaatcgtctctttccaggcatggattacaacaatgggttcatgcatggctcctagttgataccatcttttcccaggcctagttcaattaacatacaaatggatacacctcttgtatcacatgcaagatgtaagaactgtttgtcaggtgataaagcaaaggaaaccataaacacacagctttgaaagtacagatttcgatggc

SEQ ID NO: 39571 - DNA, 444 bp, Homo Sapiens
caaaaactaagtagtcttcctgtttgtagcctgtacccttcaaatttagtcttgacattgcctccatagtaattttactagaataaatatctgaccatttcaggcattcaatgccttactgatgcctgaagagaaagtcccagttcttttgtaagacccataggggtcaccatgatcttgtttatgcctttctcttcagtttcatctcttacttctcccacttcatgctcccagacttaaaacatgagtaaatttgcattttccaaaatgtgtcaatagtttatcaggcctctgtcagcatagtacgcacttgtcgaatggccaaatgaatgaacaaatgagtcaaaagagatttaataaagaaatttcttaaagatattggttactttgctaattaatcctccctagtcataatctcctctgaggatgagtactatgtctgtc

SEQ ID NO: 39572 - DNA, 428 bp, Homo Sapiens
tagttcttatttacagttctgcccagattctttaaagtcctcctttatacttgttggtatgtccacttcagtatttttaacatacaagttgcagctatgggttgaaaaagcaagtcttctaatctcccttttttaagccaacaatccacccttacatataagagaaataatataaatttttttctattttagaataaagtgctaaaataagttgtcaataaaatttttaaaattaggagttttcccaaaagtttttacaagcaagttttacaagtagtacttacttcttatattttctcaaaggttccaggaaaatgctgggatttcaaaataaggatttattagacagtaatgaagtgtacaaaaagatgatagcagttataactgaagaaacctagtaagagcacagaagtactaagaacaaactg

SEQ ID NO: 39573 - DNA, 406 bp, Homo Sapiens
aatagaaatgtagtcttgcttattggccgcgtggactcaaactcctggcctcaagcgatcttcctgcctcagctacccaaatgctgggattacaggtgtgagtcactgcacctggcccaggtttccttttaatcttgttaagttccaaaagcaggagtggtcttggcaaacatagagcttcactctttcaggcattgtgtaattgagctaagagacaatgtcatctccggctctgagcctattttaaggtgttaatgtaacccatctattcatttctttactctcagctgttatttctccttttctcaatttgtcatttattcttacccaaacttttccacctccagaagggacatgaggttcattcagtgcgctggtccagatcactggtagcaatgctagtctg

SEQ ID NO: 39574 - DNA, 365 bp, Homo Sapiens
ttttttttgaaggtcaatcatttctttactgttctctctccccaaccagaatgtgctcagggtccattcctcgcatatgtgtggcttagagtctgcccagagtggggcccagggtgatttctggagacgatgagacatggtctgttgttagcatgggcctgagcacagtgccctgcagcttcaggcacaccccgagtcctctcccaccccacctcccaccaccaggcatggctgacccaggaggcagcaatgtctgctagggcctccagggaacagagctccccagccagccagtcacagacaccaccgaggcaggaacatccaagctccatggccagcccagtgactgactctcggcagccagc

SEQ ID NO: 39575 - DNA, 523 bp, Homo Sapiens
cctgataaaccgtgattaaaaaaattttttttattgaagaacagcatacataaagacacaccagttttaagtgcacaacccagttctcacaaagtagacacacttgagtttccaccaccaggtgaagagataaagccttattagcacctcaaaagatcctccccttgtgccccttttcccattacccaccctcctccccaaaggtaaccactatcctgacaccataggttagtttttgcctgtttttgaacttcacaaaaatggaatcatacagtctgcattcttttatgtctggctcctttcgctcaacatcatgtttgtgagattcatccaggttgcctgtagcagcagttcattcattttcgttgcagtgtagtcccattgcatgcatacacaacaatttatttatccattctactgatgatggacatgtgggtggtatccagtttggggctgacttagggtcgccaggttttccattggccaatgggggagggcacaaaaggctgggtgaagattctgg

SEQ ID NO: 39576 - DNA, 500 bp, Homo Sapiens
gttgtcaatgaggatatttattggggtttcatgagtgaggtaggtgatttttgaggcaggctttgcaagatagggaactgcttgggattgggtagaggttttgatattataattttggattggagggaccagtggaccaagggtcttgaagtgcgctgtgatgagcaagctattttaatttgttcactgtcttatctttagggaaaaggatgttctggagcaagtaactaagttatttttgcttactctcaatattgttaaacatagggacaaaaaaattatgcataacacagaataggaaaatacatatggtaggcgctctgaagcctagataaagaaaaataaaagacatccttcagctgctggggtgggatgatactgaaggcagaaggccttggctaccaataccctacaaggatttcctcagctgctgatagtggacttacttaacataagtcctatggcagattatatttttcaagaggccataacaatattgc

SEQ ID NO: 39577 - DNA, 399 bp, Homo Sapiens
gagtgaactaccgcacccagccagttttcagtgtttcagtctcgtacagtcatgcgcagcataatgatgttctggtcaatgatggacagcatatatgatggtggtcccataagattataacagctgaaaaattcctaacacctagtgacatggtagccgtcctaatgttgtagcacaatgcattactcttgtgtttgtggtgattctggtgtaaacaaacctacttcgctactagtcgttatagaagagcaaaggcagaggacacacacgtcacaattttagaactatgaaggtacagtggtggagacactgtggtactggcatacagatacacatatagatgtagcagctggttgtccaggctgggtggggtgctgcccccatgcctataatcccagc

SEQ ID NO: 39578 - DNA, 394 bp, Homo Sapiens
tccgtttctagcggctttatttttgacatacacgacctcagacacaagcggggcgggcagcgcctaggtgtacagaaaggagcgggctcggaccgagcaccccctcccccgcacgcaaggtccaaagcaaacgcaactgcggcgggacacacgggcaggcctcgggcggtggagacaggcttagcttccaggaaagagcagcagagagcgattcccagaacgcgagggcttacagttccccgagaagcaaaagaaccaggtccttcccagggttctccattattttttcctcattaaaatatattttaagtcagcacaaacataaccaaattgtacagctttaaagttcaaagcagtctgcatctagggaacgtgcatgtggtcaggagtgagc

SEQ ID NO: 39579 - DNA, 356 bp, Homo Sapiens
gcaagacaagcattattttaatataaatgttctgagacataccaataaggttggcaggtatatacatatactgatgcaaatgtaatttcactggacaagtaggcaaacatctaagcagtttatcccaaccccctccagcagacacaaccaagtttcaaaatttcaattttaaaattaaaaagataaggttaaatacacaagatcaatttatgtagtatatattcaccctcagaacgtgctgaagatgttttgtgtagttctgttgcacagagggttctttccctgagggcacataaggagctctcaaactgttaataggtctctattttgtaacaaaatagcaattttaaaatctt

SEQ ID NO: 39580 - DNA, 412 bp, Homo Sapiens
aagtccccaggggggttttattttttcttttaaaaaccctgttctgggggtcccttggccctttttgcccgtatgccaaaaaaccgggcttttgaacgggccaaacggagactagggaagggtttaaaattcttctctccccaagggagaacccgagctttccccttctaaaaaactttccggaggggaataaccggtccgtgaagacggggtggcaattttcatttttccagaaaaaatttccccctttttgggggccaagggttcctggggaaaaggatgattttgaaggggaactccttaagccgttgcaatttggcctaaagggaccccgtggaatttttccgcctcccgggatccaaaaaaattttaatgtcccgggccaccttttttgaaaaccgggccaccctga

SEQ ID NO: 39581 - DNA, 483 bp, Homo Sapiens
ttcacgagtccagaccagcgtcggctcacgatgccggagtcatccagcctcccgcccctgccccagccgccgccacttcggggccttggatgcctgttccgtttagcctgtttgttttacagagttccctttccgagttcgttttgccgaagttcgttttaccgaaatctggatgatgctgggggtcgggagatgcggctagctttagttggccctgacccccgcccccaagctcgtgtctgtcacttcgttttgaagttcgttttgccgaaatctggataaagccagggtggggcggaggcgggctagcttcatttggctctgacccccgaccccagggtcgtatcttcatttgactcagttgatttcactgaaatgtgaataatgcaaagtgactgatgtctggatgatgcttgggtggggcggagtgggctagctccatttagccccgccccaaggctatgtttatcttcgtttgaccga

SEQ ID NO: 39582 - DNA, 455 bp, Homo Sapiens
aaacattctttcttagcatattttaaaatacaggagaggaacttgcaatcaataggtgtattagtgccagccttcatttaaatttcattcgacctgaaaggcaaatgtcaagcggtaacattcatactgaagactgtatttgcaaaagcacaagaaatccgtaagtcgtttacagcaatgccttttacaagtcacaagatggagatgtagcttcattaaaactgtctgctggatgggaatcatgggtttgcaaggctgtatctgtgggcacatttctctccccccacttccttcaacaggccacagcaatacaatcagtatgtaaaatccagcatatttatttcatcaactctctgcttcccgcttgtaatcaatgtcctttaaggaggtcaggggtcttacaagccctataaaaacaagtcaccaagccaagcatggtagagcatgcctacagt

SEQ ID NO: 39583 - DNA, 471 bp, Homo Sapiens
agttacagaaaccacagttgagaatttcacagtaatcaacccactggcacgtctgttatgaggtcttcatcatcccacaaacgcgttgttccgccttgatcttgtgaggcgctggccactcttcttgtggagttctcaccggctcagagggtcagtgtgagtgagccgatgtgtgccgcacacccaggatgtctacaggactgggggctggaaaattgagtgacatctcttgccctggcacctgtggcaggtagttctgggtaaccaacaggaatccctcaggctgtggggctggacgggagactgcagcctcctgactgagtgtgcaggtgggagacgccgccgagtcacttgttggaacgtggcccgaaacaaactgcgggttttgctgggccctccctgttgctactggaagaatcctgtcacatggataagcaccccgcccctcacggccccaggacatcgggtgcc

SEQ ID NO: 39584 - DNA, 433 bp, Homo Sapiens
ttattttggcatcagtcatttgtaaaaatggccattctatttattaaagtccagaaagagaatttcaaacctcaggttgattcatggactgtttaaatatacataaacctatacaaagcatttatggtgctttggtacctcagtttctcccttttcagaaatagtaataaattaccacccatatttactttatggattttatatgtcaaaaatgttctgtgtaaagtaggtgtttaatctttattgttacttactgctcttttaccagttgttattagtatttctctacacttatagatgtggccggcacctgctggtacctaactctgcaagtatctgattcaattcattgaagaagatacaatgcagcaaagacttatggatgtctagtatatgccaggcatattattccactgagtagctgaggcccatg

SEQ ID NO: 39585 - DNA, 410 bp, Homo Sapiens
gcacttgattctttattggagggtcctcggatgaccatataatttactgcccaaaccaggcctctgagagtgggaaaaaaggaacaattcattattccactgggacaacatggtaaaccagatgtcacatttgggacaaaatggagctgctggtcactttatctgttgtccattggccaatttcagagtcaaagaaggcagccatcactatgcatctcctttctccatcatttttgggagctgccaataactttgagaacaagcccagcaaaatctcaacctgggtgagagccagcaactcgcccgcaccatctagaagtccagaaactcaatgaacatggaccccctccccaccctcgcatctcctccccaaaccagaaaagagtcagactctggtcctagctcttggc

SEQ ID NO: 39586 - DNA, 351 bp, Homo Sapiens
ttaaattaaaaacatgactcaggcttgggagtttcatttacagttagaaacatgaaatgtaaggaattcagtgaatatacaaactatttaaatacaattttggaaacatttcacaactagtgcttactgtattacagatgaaatttaaattacgtagcaatgagtcataatttgaggttcttgttagcccatgacgttcatcttgtagaacttttgattgttctctttgtaatcaaccattctttacctttttaagttggccttttaaattttcatgctttatgtaaaactcaatttattagcaaaatcattttatttactcgcagattagcaaagagttaactgttttgc

SEQ ID NO: 39587 - DNA, 380 bp, Homo Sapiens
gtgagcatggggctgtattttaatacaagaaagacattgctctagaacatggctcgcctttgcttcagggcctagcagtttattttagccataagggtaagggagcaggtcagaaatgacttttagtgtaatcctatctgtaattaaaaatacaaatgctgtcataagatcaaatgttatcaaaaatcagtatttaaaattaaatttacccccaaatttctttcaaaaaagttgtaatgttctttttcagtgaagcctttgcactgctagagctgaagaatgtgatcaatcggcttgttgaataatcccgcacagtaggtattccgctgaagccaactctagctgggggctcgagagcgaaagacacagatggggccctg

SEQ ID NO: 39588 - DNA, 400 bp, Homo Sapiens
aagggctcttagcaaaactgtcagcattgccaagttcttcagctacactaatgattatgttcttttccttctttttgttaaaacctgtaccaagaaaatatctgccatcattttatacaagctatacaacgatccatgtatcattattcttttaatgtcaggaaggtacattttgtgggataggtggttaacttatcattaaaccatacaacacaaaaaaatatctactccacccggtaacaaagtatacccctttgcattctttcatctttccctctctagggtaagcatgcaaatcattaaccacatgacaaatatcccagtatagtatttatgcagagttccggcctgcactgaggaaagatatggtgaactgaaccagcatgattcaatagcaaat

SEQ ID NO: 39589 - DNA, 376 bp, Homo Sapiens
ttaattcttataattttattctcgtgcaaatctgaatttggaaaagaaaaaacagagttctgtatttgtatttttgtaggcaaaattccaggatctggttcagtaaagttttcacatcagctttgtcagatctcaattgagctgcagcctctggagcaagtgggatgccctgcctgtccattcatggttgcctaagccataggaaagcagaaacactttttctcttccatcctaggttcagtgtctggtaccctacaaattaaactgatcacagacaagttaacaagaagaataacaattaattatgtacatacacatggaaaattcacaaagaaatgtgatgcaaagaggcaataggatttggggtgtatatctt

SEQ ID NO: 39590 - DNA, 451 bp, Homo Sapiens
gactgcccactccaccacagagtgtgagagggctggaccccagtgccactttcggccacccctgggccacacggcacccctatccctgggacagggactgcagggtcacaccctcaaacaaccacgcctcagccatactcgcgccacactttccaagcctgtcccagaccagggacaagcccctagtagggttccgggaggagactagaactagagaggtgggacaccaagcatgggcacccctgcaacctcggccacccccagcatggcaccatgcccctgagcaccgccagcttggaaaggcatcggatggagacgggcgcttttcgacgagatacccgccacttgctctgggatcccggagagggtgggcaagcgtggaccagggaaggaggcccccaggggtgttgggagggagtttgagagggaggaagtaagagagacggatgga

SEQ ID NO: 39591 - DNA, 437 bp, Homo Sapiens
tttctatgtaattacaaagacaatctttattattaaaatgaatattataagttatagccataaataaattccaagtgcaacattttcacagtatcttgggagtaaaatcaaaaggtgacataaaatgtaagttgcgcaagagttccacagatgcaccctctcagaccaaggcagcttggtctgttgctcctggggcagatggcttctctttgtggaattaccagctaacagaattggctgcttaactgagtgacaatgaaaacatataaaccatttgaatataataataataacaatatttttacatagaaatcactacatacaaagtttttcttattggaatacttacgcatttttgaatcaaaattcaacaactttatataggaaatgtggaattatttatcttgaagtatacattactatggttgagggtgttt

SEQ ID NO: 39592 - DNA, 449 bp, Homo Sapiens
acacaaaagtaaggccaaggccacagtgaaggtaaacaccccccaccccaacgaagcaaggatggaaaaccagcccaacgctgctatcagaaccacagtacgctaccagaatatcgggaatgaggctgagcacgggacagagtggctccaccagtaataagtcaaggtcacaagacaccacatctcttcaggcaggtgcaaaaatccccatggccaccgagaaagatctcatgaccgtgtcgacaaggatgcctaaaactcagggcttttggaggtttgagacagctggggaattgacggggtttccaagctctctgaaagggcatgagaatgctgaagggggacgtggtaccttcaccccctatgaagtttaggcgatcgatggaagcgaattccgtagaggaagagtcaaaggtccttcctccgatgcaaagagacgtgacacgtga

SEQ ID NO: 39593 - DNA, 407 bp, Homo Sapiens
gaactgggaccagaactctagcccccaaatctaaactttaagtcaaacttctttgttccacccatttgtctacacttttctttcccacacttccccactctcccaccacccacccccttgtcttgctcatgccgggcggtaggcacaagaagagctcactgttgtgaaatccaggaattcacatttgcagacgggcaggggagggctgttcaagtcgcaagactcctcattttttcttttctgggaaagcctttcatgaagtcttggatgcgaaatggaggagtggtgggggatgtggaaaagaacccaggggcagggggctgtagggggcgaccgagtttagggaagcatgagaaacccgggaaaatggggagctgggtttatattaaggtcctggtccttgctaa

SEQ ID NO: 39594 - DNA, 468 bp, Homo Sapiens
agacatttttgaattttaattagttagcaacacttataaattaagtttcacataaaacccaggatttctggattttcctgagaaacgaagacatctcagaaactgggtgctcattctcctagagaaatgggttggatttgggtatcaaattctcctttcagatgaacttaatgctcacttatccatcgtagtaacttccaccatttgtttaggctcagcttgcataagataatttattttctctcgccagtctaggcatctgggtttaagaccccttctctagatacattactcactgcactatcacactatgaattttcaggcatccgtgctttgacttccactttgcctagaaagtcctttgctatctccaaaagtactcctactcccctaaggcactgcttcaattcctttcattagcttcttctgaccactctctcaaccgtgtcacgcagcactgtggtaata

SEQ ID NO: 39595 - DNA, 415 bp, Homo Sapiens
gaattatattttctaattgacacaaaagatgtgaaaataagtaacatacaatgataatggatgggaagctttcacgattggaaagatgtcaatgttccacaaaataagtgatacatttcatgtaatttccatccaaataccagtggaattttcttttatgtgataaaagtagcctaagattaactttgaaaattaaatgaaaattgtgtaaaagaataatgagaaaagatttgctatgctgtatcattataaaaatattatgccaaggttcaacaactaaatctacagaatttgtacgaaaataaatccacagagaaaccaaaaacttgaacacagattctaatatagataagaatttcaaatatgataaagatgatgtttcaatcagttaaataaatggagctgggacatttgg

SEQ ID NO: 39596 - DNA, 397 bp, Homo Sapiens
agctttattgactattaccaactttcagtatggttcaaataattaaatactgcaactgggacattaaaaatacaagctaatttaccaaaataattgtattctgaatattatgtacaatattatacattttacattacataatgggtttttatacataaaggtaagatttctgattattggaaatacaaagtacaactgaacaaaacattcctatgcgtacatacacaatcactcaactggaacaatcaaaaccatctatgagtgtggttattaaaaaataaaattacgttcatacaatggtagaaaatgaaatgtttttattaatttgattattaatacaaaaccacacatatatgaattatataacctagtgttatatatttaaaaatctttatgc

SEQ ID NO: 39597 - DNA, 445 bp, Homo Sapiens
gtcttcgtattttccatttctcaaaaaacattctagggtaatttcctagctttagcttccaatcctatttaaatttatatttcagttatcatatttttagttttcaagagatagttcttgttcttacaatattcctcttctacagcattctatatactgctgttgagtaggataccttctattatctccctggggctcccaactgtttgaaagtaatctgtttacagaaaacttgcatacttgtaccagcactgtctgtttcctcagtccctttggttctgctgctcaggttggtccttatgatcatcgttaactgcctgttcatatagaagagcaagactggaagctgtgtgtgagggcaggagctgtctaacagaggtgtctccgtcggatcactaggtactgagccagttcttttgtaggggatcccagattttagtgtttc

SEQ ID NO: 39598 - DNA, 396 bp, Homo Sapiens
agacagtttcgcttttgtagcccaggctggaattgtcaggactgtaatagagtttcagttaccaaggagaaatgttgatttacagaaggggtcagccaactttttctgtaaagggccagctagtaaatattttggacttaaccagccatatggtcttctataatcattcaactctgccattgtagcacaaaagcggccatggacaatatgtaaacaagtgaatgttgctctattccaataaaactttatttacaaaataagacagcaagccagatttgacgcgtgggttgtaatttatcaatctattctctatagtgatggctgtcacactctatatgtacatcagaatcacctatggaactagtttaaaaggtaggttcctaggctccagctacc

SEQ ID NO: 39599 - DNA, 372 bp, Homo Sapiens
ataaaattcatttacaggaggttattcacatgtacttgtcaaatttactcctgataattcacaaaaacatacaactcaacaaactgtgcacaataaatccaaggcaaattatatacaaagaaacaaaacaagcttttaagtagcacatattcatttgaaataactaatattgaaagaagacagggaactttcttttaatgccatggcaaagacgaagcgaagagccacacttcacaccttgtaaaaagaatagccctgttcaacaacgctgcgctgacagccacatcaacaggggccacggtgaacataggaaatggctttggcaaatacttgtaccaactggaacgagtgaagtttcaaaagtaatgtgag

SEQ ID NO: 39600 - DNA, 421 bp, Homo Sapiens
ttgagaaaacagattccagggctttcattgtggtcatttagatacccatctggtggccaccaagcagcacttgccaagaaaaaccataaaaagtacctcccttcagatttggcttggaaactatttccccggaaatccccccaccccacccgacaaggaaaataaaagctgattaccaatctaagaggggtgtgagtattcgttccctgaaaaacatgactttaatcttaatgaacagaaagaccacggatattagtgcggatcgtttgcagattcttaattgtatcttttcaaagcaaaagatgtcctccagattgcaactctagaagactggtctcttctgttggctaattgtttccatctccagccaagacacaaaattattactaatgaccatctctgggtatccagggaagaggat

SEQ ID NO: 39601 - DNA, 464 bp, Homo Sapiens
ttttttttctgagtcttccttttaatgtttatctacggctaaaggtagcttttcataacagatgtaaatatttgttctacttacccacaatgataccaagatgttacaacaaacaccattttcaccaggcgtcccctcatctctggccctttttatttaagggagtcacagatgtgcctactaggaatcacattacactgaaacttccaaggtgagtggtaatacacaaatgtcaggtacacttctggacagctcaagtggagccaaaattttggagcaacaattctgtaagtatcagccacagcagcccatggcaggctgtcaccagaaagggtaacgttcatgctttcttggttacagtaacacatcagggggatatcttctaacactgtcagttaaatgacaggggttatacaaaaccatagatgtttccaacaggcagggactgtagaggtcaatgaaga

SEQ ID NO: 39602 - DNA, 431 bp, Homo Sapiens
acaaaagttaattcttatctaattcacttaatccaattctgacttatgcccaagtaaaaaataatgtttgtatccactagaatattttactggcttcgcatcattattgtatgtacataatcctgactgcactactgttgtgaattttcagcgcacgtcaccatcaagggccataatgaggcctgtgaaacagcagtgtcaggaaacagaggccagccctcttaacactaaaacaatgtctgaaagtcaacaggtcctccctcccacccctcttgcaatgtgataatgtattgtttaaggagaagaggaactggtttgaccaatttgaaaatggagttgactggtgtctttagcatgatggggatgtggcctatataggattccagatatgatttgaaagttgggaactgacatgagaaaaggaagtgaaa

SEQ ID NO: 39603 - DNA, 385 bp, Homo Sapiens
gggtgtgataggtagtaagcatgctggaaacagtgtctcaaggtgtggggtgtatggtgggtatatttgggaagtagtcattttctctcaaactggaaagcagatgggtgtgttcagacaagatctggaagctgtggcatggcagacaaagggagatgggacccctttggcactggaggaagaggcttgaatcttcttggagcactaaaagttccaaaagacctaagcagaaaatgcttccgaagaggaggatctgtatggcaagatgactgtaatcaggctcataaaagtaagaccttacataaatacaagtgagggggaagacatttcatgtaggaggaatggctcaagcaaaaataccaaggcgggaaattgcgtggtgcgt

SEQ ID NO: 39604 - DNA, 384 bp, Homo Sapiens
attgttattccaagtcattcagtttaattttcacagaagtaatccttcttttgtattcatatttcataatttaacatatttagtccatgcatttaattacaataacaagtaagataaattatgttacacaattgactggcaagagttgtgcacaagcatggttgagagcattcagcgtgatgtggatgctggtcatcaagcttttcacagggaactgggaggatccatctgaagactcaggtaagtggaaatcagataagggagctttgactgagttattaactccattttccagacgaggctattgaagcttagaaagttaattgtccatttttaaatgaatgactcatataagaaaggctctaacagaaatacaggaaagag

SEQ ID NO: 39605 - DNA, 367 bp, Homo Sapiens
aacctaagcacctggttcttcttgacaactgcacattctgctacatgctgtgatgaccaggagaatcatttaaatttttatttggaggactcacttccaacttggaacacaagctgcaaaggaattccctaccagcatgccagcacatcatttggaagttcaaggtattcttgctcaacagctgcacacacattaaaagtccctggggtacatggcgcctgctgcctggggttggactctgtcgccggggattccagaaattagagtagaattcacagctctgcctctccacctgctgtgaggtcttcaagttacaactccgccgcctatcagggacctccgtgattagtaagggagaaattgtcat

SEQ ID NO: 39606 - DNA, 430 bp, Homo Sapiens
tttattgtacagaataaaaatgttttattgaatacactgtgcttatgcgttacgtacaggctcagcttccttccagggctagatacctcttcaggattagagacaagtgaaaccccaacactgctgagccctgaatgtggaaagagcccagctggtatctcgttcaccattgtttttctctcctccacataggttcagagttccagtattgtaaccaagtattgtggcctattttccgtagttcaagtgagcagaatactgaggcctttcacgtgaaataggtagctaccctgtatttgaagagttggccacttgctagtggtcagaatagtaaggagcccacttctgtgccctggcagagatacagtgccagctacttaaagaagagtagaatttagagacaaaaggtaatctggtcccatatttttca

SEQ ID NO: 39607 - DNA, 369 bp, Homo Sapiens
ccctcaaaaagggtttaaaatacaactgagttttgagtcacgatagacatatcggtaggctttcaggtagcgagcgcgggcaacggggcatccaggcctctaggaaccgcagcgacgaagggcagctaccagcagggtccggccataaaagctgacgctgtctcagatctccccctaggaagactcatcgacataatccggggaatagcacacaacagctttgcagatggactgagcaaccagcataaatctggtgcacgtgaacagcacgcatgacacggacaccgatgaagacacccgcaaaacgctacttgcagagaaaaagaacagggtccatcagccagtactgtagcgtgccagcgacaatca

SEQ ID NO: 39608 - DNA, 455 bp, Homo Sapiens
cctaaagtgctatcagaggctctaaacatattcaatgggtccgacccaaaagacttataaataggtatataggttgctaatctattcctaatgcttttgcttaaaaattgggatttgcatctttcacaacattcctttgggagcatggttttaaatttggtccctgatagtaagcatctcggaaattgcggatttcggggatttcacttaggaaatttggtgggagttcctccctttgattggggggttaaaaaggaacccggagaggtcttgggtaatccagaagttggtgggccggaattgggttttccggggaactggggggctccaaattggtagccacatgtcattggtttccaaagacagtttacgggcattttactcccaggaggccggcaaaactgttcccagtgcggtccatttgctcctgaaaaggttcccccggggggagataa

SEQ ID NO: 39609 - DNA, 413 bp, Homo Sapiens
gtttttcatcttacatagtttcctttattgtatcaagtatacaaaaacattattatctactataatcatgatgctatatattagattcacgaaccttatttataactaaaagtttgtaccctttaaacaacatcttccattttccctacctcttggctctggtatccacctttgtactccctgcgtctaggagttcaaccttttagattcctcatacacgtgagacaaataagaaatatttgtctgtatcttcctattcttcctatttttagtaagtcccctgttaatgctcatgctgctcccccagacccatcatcagtagcactcaggtggagaaagcaggcacagcactgagtcactcaacccaacactcttaccacaatacggatgcttatggtccaaagtgaaaacca

SEQ ID NO: 39610 - DNA, 372 bp, Homo Sapiens
caatttccaggacactttattgtaatttccactttacatattaatttaatattttagtctaggcagaaatgtttatacttatacaacagtagtccaatcctctaatctcacaaaatgaaaaggagcagttttaaaagaacatcaattcaggtatttatgatatgggggacaaggggcacttgtcttagctggaaaaggggctgatgcctttcagtacgagtttcactgaaattttttctgtattatttttcttgttgatgctaagtactcaaataaaagcaattgcactttttctcattctgccctctcttggtctttacattctgtctagcatttaacgcaaaaagtcagtttacattcagtttacacatt

SEQ ID NO: 39611 - DNA, 410 bp, Homo Sapiens
ttcatgctaattgggtgctttatttggatctgaaggcagtggcttactgcatcctggcatgcaaatgatgtcccctgaggacacgatgggcaatgaatttgtcctgcaggtccctgtgagaggccttttctcttctgtagcttcctaagcagaagctatggatgatccacagacagaaggtggtcatctctaacctgtcctgtgacaaagcatgctggtcagccagtggatgcccccatcggttccatgccagtggctgcaccgggacccctgcttgcagcagcagggaacccggaggagagaagatcagtttccaagataatttaggttcagtctttcttcaaaccagccattgtcctctgctctagatctgacaccgatgattaatgcgcctcgtatttgagtaattc

SEQ ID NO: 39612 - DNA, 385 bp, Homo Sapiens
tttttagagtacaggagtttacagctttattggacactcacttgtttcccctcagccacaaagagaaaaagacccaaacaaaagtccctacattttcttgtataacttaaaatacattatatcattactacatatttatacttcaataaatcttaatctataaagcacattttttataattgttatcagaaaacctataaacaagctccattctgcctcacttttccaccagctggccttgcatttattactatgctttttaataggctcatgcaaaatctcaccttccagttttaaacttgatccaagcaccagatataaccaaaatctctgaactaggaaatatttgtattcacatgggtcattttccacacaatgatgccca

SEQ ID NO: 39613 - DNA, 352 bp, Homo Sapiens
caagggaccccccaaggaatttcttgaaccacaggaaggatgaccctgcagagagtccataccaggccacaaagaagtgcagatgctcgtgcctaagagaaactctggttagccccccaaggggtcccccagggacttgcccccggaagtaggtatcgaagaacaggggccctggcccggtgattcaggcaaatagttccaggtgccaaaaaggccagagggcccattcgaagatgttctcaggaaaaaaaggccccacgggtacttgaagccgcgccatcccaaggaggtccacttctcccgcaaaagggccttcctgcgggggtaaagggttaaactgattccggggaag

SEQ ID NO: 39614 - DNA, 361 bp, Homo Sapiens
attctgaccaaagcatttattttcattccatttacataggaggtggcattgtagaaaataaaaactttctcaaagagatatgaattaaagaaaagttagagtaaggtgaatacttatttaaacatacctttagagtgagggtaagcccccttcccaacccaaaatgaactgaatgagagagaaaaagaggtccagagtagtttgtggagcgatgtttccatctctaatgccactcagctcaggagcaggcttcagacactgcctttatctttacagaaagccatgggaagggaaatgtctgaggtagagctcagcgttgggcatcatatggctaatcactcagaggtcactaatcactctc

SEQ ID NO: 39615 - DNA, 430 bp, Homo Sapiens
tccattgaacaaatatttattgaagactgagtctgttgttctagagctgggacatcattttccccctctcttctactgccaggatcctgcctctctggccttgggacactccaagacagtgggagaggacagtctgtctagtaatcctactcagggatctcgcctgggcctgggagagatggcggagagtctgaggacttcgaaggtgggaaggagacctcctggcgagcctggcagaagctctgctaaacgatgtggcctcatgctccttgtttcctgctgggtcccgacttcagctcttccttccaccagccagtctggagcttagccgtgttgtgtcacctcgttctcctgggctctcttcctgctcctgcctgtgattccagcctgtggttatgtcctgctaccttcccctgcctggcttaggtcc

SEQ ID NO: 39616 - DNA, 420 bp, Homo Sapiens
gggccaggaagaaagaagcttcttcccctcctgggaagagggcagagatccgagcaccagcggagtcttgcaaagtgaaggtctgggctgtcccggcccaactgggcacgagactaaacttcctaaagaccacgcaggcaggaactccggggcctgccccatcctgcgctaagacattcaggcttgttctgagacgccgcatggtgggctcctttcctttgcgggccctccgccctccggggtcttggaactggtgtttggggtctgtctttctaaccgaccaacaaaggcaggctgggtgcctgggccggcttccacctgcccgaggtgcttcccggcccgctgggcaaggacgggggcgctcgggcagggtctgagggagacctgggatgggcggggactgtaagggcaacaggtgac

SEQ ID NO: 39617 - DNA, 418 bp, Homo Sapiens
tctccatgaaagacgtgtactggtccatgaagtgcatggttgccgcaagtacgtagcgtccgacaaactgcaggatctcttgaatctgactgttcgggttcaccttcatgtcctcataggagatgtagagatcaaggtgggtgcggctcagatctcactagtgctgtatgtggtggtaacagtatcggtatgacaatacctcgacgatgaacttctttaggaagctggtccatgttctaagctcagggtgcaccttgatcacgttgcagaaatggtcgtaggaaactggcacatgccttgtgttgaaggcaacatagagcacgttgacttgcgatataagatagttctggggatgagagcaagccggatatatagtctttatgagtcatggaggcggtatgtgcttaaaagtctcaac

SEQ ID NO: 39618 - DNA, 351 bp, Homo Sapiens
tgtggtagatgttcacagcggtgacatgatttaaattgcataatcgagtcccaagaggagcccacccaaagcaaaaatcaaatttagccatcatcataagatgatgcatccacagactacaccttaacctcatacagacatcaatattgagtatttggaagggctcgttcgtggcaaaagaagtacatacctcagactgattccgcagtttactatttggacaatgggtgtggatttaattgctacaccttgcgtgtgaggcataatagagcacaattaccgtgccatcctgccctattctgtaggatactgatagaggggtaaccagaggttaagaccacttggagaagc

SEQ ID NO: 39619 - DNA, 450 bp, Homo Sapiens
ttctattgatgttattttattgcgtcgtaaataaggagtaggtaaaacattttgtgctttaataagtgaggcacagcttaaaagttttaaacagcaatataaaaatacagtacagtgcataaataaataatatatctccacttctagtcgaattttgaaaccctcagtgtaaattataacttcacttgaatgggaggcacaaggtacatgtgctaatgttctgtaaatccagaaaatcatatcacataagattcaataaggaattaaagaaatcaaattaatcacacttgtgttaactaaataagaataggtcagatacctgtttccaagttatgctgggtatataaaaagcttctctgcaatcatagaaaagtttgaaaaggttcattgatgaaagcaccttgcatttcagatgaacttcaatattttgggggctttttatataagagc

SEQ ID NO: 39620 - DNA, 363 bp, Homo Sapiens
ggcaggtgtccatatgtgcatgcagggcataattcgctctagcgcacaaatcctggtaggcatcatggcgaccgcacgttttctgtatgagacgcaggtactgcgatgtgtggagccggttgtaggctgtctggagcagctcgtctatgtgagttaccaaatgtgtgctgaatactggctcgaatcgtttcttcgaagggacaagctgcgtagactggggatcggtacaaatgactgttcatgttcactagcgttacttctaggaatggggtatgaacaggaagcggggacagaatggtgtagaagtgttcgacagcacatagaagtgttccgatgcagatgagtatcattgggagcatctgg

SEQ ID NO: 39621 - DNA, 390 bp, Homo Sapiens
agctccgcgcacaagacagaggagaccgcagtgaaggggctcagcagacaggggttccccaacccaaacccagtcttcgtcctcgtcgcacttccgacttgccacagactgcttccctctccctgaatcaatggtttagagtgaacaaagtatgaggacgcttctcttttctgtgccttccaggcttgccttaccagaccgcctttgactttttcctttttgtgtttgatttacagcgttccaagccaacaaaactgtggatttggccccaaactctaccagcggggtgaccttacactttcttctcctcagtttgcaacttctgtaaaatgagaaaaaccctaaggggatcgctgggaagctttaattagataattttgagtggaatga

SEQ ID NO: 39622 - DNA, 361 bp, Homo Sapiens
atgctatttactttgcgcagaaaacaagcggggatatagccagagagcagtcgggagttggcaagaggcacacatgaccctaggcatttggtggaaagtaagaggagcaaaggaatgacttgggccaattacacgactgcgaggcgagctctaccaacagggctgcagggagcttgggttccgtacaagttcaaagggagcggtacgacctccacttcggtgtaggcctaactaacatgtacccctagaagttttggatcggaggccaccagttggctgagcagaacacaagggaggggcacatctgggccaacagtgaacgaaggcattgccctaccgacagccttacattggccaaggg

SEQ ID NO: 39623 - DNA, 389 bp, Homo Sapiens
tgcttcagctgttgtttattggcatacaggtagggtctatagcaacaagcctggggggtgcttcgtattaccggaaaaatcgaaagaggagggtgggagtttttcctccagaccaccctgattggagtttggggacaggtcaaacctgaaaagccctaaaaacctaaaaaaccaattaaggccaaggccaggatccgccttcaatggaacaaaaccccagtccccaaaggccccaaaacttctcgcggcttttttcttacccaacaccagtgtggggagtcctcggggcccccatttttttcaaaaaaactggaagattccacaacaaaaaagaaactgacacccttcttccttcttgccccaggggcctccagtccaaaattccccct

SEQ ID NO: 39624 - DNA, 382 bp, Homo Sapiens
gctttttgtttttatccaacgcttttattgtaagaatctgttccttgtgttttcagagagaaccaatcattttctcatattccaaattatcatcttgtttgctactaattaaatgaattttgtctcaaatccaaacaaattttgggaataagcaagtctatcatcattttgaaacattggctacagcaccaggcctgctatgacctcatggtttaagggacacaggacatcatttccttcttagcataaaatccctcaaggtaattttctggtattgccccatgccccctgggaattggctcccatcttcatagaagacaaaacgtgtaagagaacaagactaatatgctagagtctccaagagcacctctacatttggagg

SEQ ID NO: 39625 - DNA, 414 bp, Homo Sapiens
gagcagccactgcccgcagcgaccgcagctgcttgaatctcagaagccagagctggagctctacctagccagctctctctgcgctttcagggtcctctcaggctcctcttccaccttgggctggattcacactgggaggaaggaggcaaagtgccgcgtatgacccggatgcaagagtctttcccagctgaaggcagcggcctgagcggtctatttcctgggatgccggcgttcagtaatgccagctccgactggggccggagggcgggcaggcctagagtatcctggagacctgtagcccacgggccaggggagaggcagcgacctcccgggctccactggatctggccggaaaaggttgcatttcctgagactagcatgaggctcacacttgggggctagcacccaggccgg

SEQ ID NO: 39626 - DNA, 460 bp, Homo Sapiens
tctggagacagagaaaggtttattccatttggccaaagcaagaagacaagacagcaagatttctcaaatccccttgacaaagagataaggagagggtttttatgcagctgacgagtcagggaaggggagttttggggaatggagggaaagtccgtgtgtcttccgtgtcagctaacactttgagcagccagacctccgggtgtcagcacctggtcgcagcactttcaaggcattcactccgtctgcaaacatttctcatgaccctcatgttatctcctcccgtttgacaaagaaacagtagatcagcagtttataatgatgctgtgggaacaagaaataatgggtacaaagcgagtggttcacaggtgccagccagagagggcccgatcagaacgttcattatttcagtcactcactgaaacatgctgagtgctgaactcccaaggggccccgttactca

SEQ ID NO: 39627 - DNA, 472 bp, Homo Sapiens
cccaaggcaatactgtcaggaaatgggcaagctgggctatgaagacaaatatcctgatttaaaaaaacaaggttaaccctacacaaggttctgtccattgggttttgagttctggtcccacaagacagatgtccagcagctggctctatggggttccaaattttaacataattatgggaagactcccatcaataccctttaactcataaattacctataattatctaagagctgtatctccccaggattaaaaactccaagagttctgataattagtcttcaaatacgaaggtaccatggaaagaaagaaaataaagttccccttctcccttgggtcccctgagaattctaaagatggtgaaattttttacaaattgatcttttccctgttgtatttcattaatatataaataatttaagatagacacttataccttgcatcagaaactttaaaactctaataatgagtgct

SEQ ID NO: 39628 - DNA, 373 bp, Homo Sapiens
aaaataattgctttactgagatataactcacacatcctgaaacccaccctgtaaaaacacgattaacagagttgtgagctaccaccaccgtaatgcaagggcacgcctattcccccgaaaaagaaaccccggcccgcgccgcgcccccgcccatgcacccagccccgggagcccagtcgggttcatgctctgcgtggcctgtgcgggcgccccgcagtggggtccacaccacgctcctccgaagccacggtttcccaagcgcggtctccaggtccgtccgtccgcagccgacctcgcactcccctgcgttcgaggctgcggacttcggcggcaggacggacggcgcctctgcttctcattccgcccagggcca

SEQ ID NO: 39629 - DNA, 447 bp, Homo Sapiens
caaaaaaacttttagtttcaggggtaaatgtgcaggtttgttacacaagtaaactcatgtcatgggagtttgttgtacagattatttcatcacccaggtattaagcccattacccaatagttattttagggggtgtttgtatatttgcacagtcattttgctttcattctagacactggatgatattttgtctagagtaggacatagattaattatgtagatttaaaaaattgtgattattaacttggactttgaatacaactcatagtatatgggacttgtggtttttatacttgttattgcatcttttatttttagtttcttcagcgtaactacaaacttagatgttctttaatcactatctcctgactgacttgttttcggtgtttttcacagctaaaccatgcctatcaatggaatcttcttctcaattagcctttacatgac

SEQ ID NO: 39630 - DNA, 448 bp, Homo Sapiens
ttgaaatgacctttaatagaaactctccggtttctgacgatctgtccctctattcagaggcatccaggacaggttaacccagtgtagtgtatggtacctgtcaatcccctccccaaagtcaattatggtatcgagttgtgcacatatgcctcgtctgtctctcaagaagtgctctgaagtcgctgtcaccatggggtctatgatgtgctctcaggacgtaccatggagtcagtattcacagacttcggggcgacccttggggtttttgtcatagggtcttaaccctaaagcttgagcagaagtccctgtttgaaaccctgtgaccggaaaaaactcttgccatggttgttcaccagaacggtcttttcggtcagtttgggaagaccccggttggatcatttctcgcccctgtgagagagttggaaaaggaggaccttggtttttcagg

SEQ ID NO: 39631 - DNA, 421 bp, Homo Sapiens
tttgaaataacacactagcatttattgagcagctacccatgtcaggccttgcgctacaagaactttccattttcatttcctttcacccctaggaggtagggattctttgcctccagcacacacagcagcctgggccaatcaagcctctaggattctctaggaacagaagctcaacagtgacaaaccatgtctgtggctgagcccagaagtcgctggcctgtgttgggtgtgaatggatgttaggtgcctcgagtcagcgacagagaccaacggcaagggtagggatctcagagtgcattgttagagcctcggggtctgggctggtgacttcgtgtgggtccccctgggacacaggctctgccttctgcccccacccatagaggcctcaagcccttctggcttccagagggaaaagtagagg

SEQ ID NO: 39632 - DNA, 350 bp, Homo Sapiens
atagataataattgtatatatttatggggtacaggcgacattttgatacatacatacaatgtgtaatgattaagtcatggtaattgagatattcgtcaccctaaacatttaccatttctttgtgttaggaatattccaaatcttctcttctggctattttgaaatgcacaataaattgctgttaactatagttgtcctactatgctatcaaacaataccacgtattccttctattttaacgtatcttcgtacctattaaccaacctctcttcatctctccctacccccttcccagtctctggtgaccaccattctactctacctctatgagatcaaatttttttagcttc

SEQ ID NO: 39633 - DNA, 389 bp, Homo Sapiens
gttttgttttgttttttggggggtataaacttggagagctactgtatttcttgaatacgagatgccatcaaatgtaaaactcagtattattttatgctttactaaggaagagagaaaaaattgtcaattaaacaatgacacacctttgattatatgtctgggtttcttttttgttaagtctgaaaaatgtttgtattgaaataaatcaaacaattttgtagctgcacatctctcacttcctgttaggtgggtggaccgccttaccaccaccatcctccagtcactgtgtctcaaacctgatgccttcctgcccctaaatgtttcttcatccccactccaggcagcaagtcttgccttttccactcgagctgctacctgctgcaagatgt

SEQ ID NO: 39634 - DNA, 377 bp, Homo Sapiens
tgggccttgaaaagtttatttacccattcccccagggggtttcacaaagcccaactgggggaattggctgggaaaggggggtttttgggggaaaaataacctttcctggaagggggacccggggtgaatttaaaacccccccaaggtaaggcccccaaatctggaaaaagcgggaacccggaaaaaattcttttggaaccccccaggcccaaaaaggagttcttttcgggggcctcaaggaaaaagttcccccccgggcccagcttggggacaaaccccccgggggtgaccgaaagggtttttaggcaatttcaaaaaggggggccccctttttgtgaaagccccccggcaacgataaggtttacccaaaggttccc

SEQ ID NO: 39635 - DNA, 398 bp, Homo Sapiens
aactgtaactgtgtttaagctttagtttcctttctaagtagatatatgtggaatgcaaggccagcaaccaactcacaaatactgatcaagacgggggagggatctaaaggaatgtgagtacgtcctgccaggaaagaagtttgctgcttctgaaatattttcgtcttcgccactggcaggattgatcgattgcagttagcgaagaattttctgtgcaaactgtccaagcatctgcttctgtacttctgtacaactgttgctcaaattcactcttcttttcgaatcaccatcacataattggcagccaatggcatgggttctggtcacatggtgccgatggtaggtgagcagacagaagttgtcagtgaacagagacggcgctcagtctggggcgagcg

SEQ ID NO: 39636 - DNA, 374 bp, Homo Sapiens
catctttagaatatgtgatttattttttacaggcccatgaagtgatagatgtgattatgcattttaaagcacctaattgtgtcgatttccattttttccctggctactcataacactgtttgcctgatgcctcatcatttaaaaaaactatgaatcttatccaactcataaaatgattaccaagccaaacataagggatatgaagccaaactaaaaaaagtcacagtaaattgtttcagaaactaagctgttttgttaggttgaagagctaataaactaagtctgggttggcaaacattttctatcaagagtcagacagcaaatattttaggctttgcaggccacataaagtctcagccacatattatttgttt

SEQ ID NO: 39637 - DNA, 420 bp, Homo Sapiens
gctctagagggggtagagggggtgctatttaaaggtagaagaatgcaaggaagtaaaactttttttctccatttggttgtttggcgacccatttggggaattcaaggaggcatgcaggaggaaatcaggttttacaacggagaaatcccagaaattctgtaaaatggggtcccggctgcccccatgtcccggtgggaggcgccttggtatttaggggttaaaggcgtaatttatggtccaattaaaaggggggttaaaaaactttatttttctcccaaaggtggattcggcgccgggaggtccccttaaaatgaccttccctctccgcatcaccaacatttgggataaaaaaaggccaggggtggggtattggagttaggaaaagtccaaagggggttgcttaggaattaccaaaaattt

SEQ ID NO: 39638 - DNA, 457 bp, Homo Sapiens
cttaaaccaacatacatttattctgtgagcaatctattatttaaatcaaaacggtatgagagccggccctgggcaggcaagctgataaacctgtcacataagcaggcctctgagctctccctgaaactcctgttggagaaatgccaagctctccagtcccttgcgccctgctgactccctgcccaccactggccctaagccagcccacaaactctcaattgtcactgagagattcctaccaggatggtgtgcgaggacccgagctggtgttccaggcaatctctgggagaatccaggcggcagagatagtttcagtctctctgcctcttggacagaagcacacgatgcagtagcggacgcagagcctgaaacggatcaagcggagaaggttggcctcattgccatgcaggtgtttagagccttcacgaccaccagcaaggctgtcgagggcagggca

SEQ ID NO: 39639 - DNA, 459 bp, Homo Sapiens
aaataaatctataaagtaaaacactgttacaaggggaaaagaaagccccactttatgtatttggttgcccatggttttaggagcatctaatctaatttcaactgaactcctaatgaactagtcatgcacagatgagtctgcttcagcccctgtctcctccattccaggggcttctggaaatgggcctcttctacatacagtttaaagcagagctggggtggactgttagaggtaggttacaggaggaataaagacccatcttcagaggaggtctcagcaccacgacatgggagcacctctcaggacaaacgataacttgagcggcattaacgctgaaacgaagcaccccttgcagcgtctgtcgctggtgcctgcagatggcctgcgctgcacttgggtcatgccgcacccaacaggagtcagaaggtgactcgccactatggccgtctactcacatgc

SEQ ID NO: 39640 - DNA, 884 bp, Homo Sapiens
agaagtgaaacaagagatgaacggaatgttgcttgaaagaaggaactctcaaagttcctcagccctaatctaaacacaaattgcacttagaggttactggggggagggtgcggtcgtgagggttcacatttgtccagcaatggtgcaacactgggttgagtgaaaggtagagacagtgacctccactacaccccgagactctcacccccgagtatgtagtggaagccctaccagtccactcccatcccctacaatagcatgactgatgaggccggctatataggtcctgagtctgtggaagtcactgcgcggccagtcccccgtcacgtcacgaccgtgcaggcgcctttcgagcaagacgcagctggcgggaaaggagacgtcccctcatcccgagatggtgacccgggcagggggcgccccctgtccttaagttcccgcgtcttctattccgtcctgtccgttgccgtcaagtacccggatcgatcaacgctacgggaagatgtcttgtagttagtaaggcttggcagcacgcgagagggtgtgttggcctgttcccgggggttctttccacacgtggtgagaggacccttgtgccgtgaggcccccgcgttaatctgcaagctgtgctgtcctccgtcggacgcgggatcttcccctgtctaagatgtcttctgtggcgtctcgaggcagagctgcagccgggctcgcccatgtccgcaggccgggggcgggatcaagcgcggggctgggggtcaacgagcacttcctcctcccagccggggatccggggcttctccaggattctccgtggcgaggattccgggtgggggtggggaatcccgcggcggttccgccccgccaggcaggggcgttggcgactg

SEQ ID NO: 39641 - DNA, 1021 bp, Homo Sapiens
cactggactggcagagggagcttgggagggcttttgctgatgccacttgttcttcttgccataaagagtctgtgtccctggaggctgaggaaggaaccagaagttgcactttccaacatggatcgcctgctaattttccaagacagctcagcccctgccagcgtcccctccctcctttgggctgagggcccaggaacccagcctcaaagttcagcttgcttcctccagcacgcacatttggaaattgaaatttcccacattatcaccacacaaaagccaggttgtatttttgttctcttcaaaatatgccaaaggaatttttcctaccccttgaactttctccaaaaataagtagaaaaagtcaagaccattttgccctgtaagctgagaatagaaaaatcaacatgcagggtgccatttccaggatgttacgaaacagcgaacatgtgaatccgtctcaacaccatttggcaactttggggatacagtagatgatatttctcacccacaaactcctcactgagtttatacttaacatttggctatatatatatagtaaaaaaagcacaaagagattactgacacacaggtacagaagccttgataaatcaccaccacctgagattacaaatgcaggagtcagaaaaactgaccaccagcgacaataaacacatgcaaatatccgggataaacttagtaaaacgaaaacaagatattggcccacgatacatgaacccttgacacgcataacaaggctagcaagcccaacggaagggacaggggacagaaataaatgcccgagatagacgacaatgagcgaaactggcgaccagcaacccacggataatagcatcccccacacaggccaccatgggagactaagaaaaaaagactcaccgagaaatcagcccagtacacacagaaaaggtcagacgaaacaaggaatgggaaaaccaccaggcacacctgatagcggccggccgcacgagaacccagaaatgccggaacaagtgagagccac

SEQ ID NO: 39642 - DNA, 821 bp, Homo Sapiens
gtgccgcgctgtcgcccaggtatctggggtctctggtgtctgagtgtctcattgtcggcgcgaacacaattgctccagccacaggcgaggcctggcaaggtgtgggcgcatctggggcaggtcttgagaggtccagcgccgggtggtgcggacagaggcggggcaccgcggcgctcgccgccgcctccccgcaggtgatcatcctcctgcaggtgtcctcgggtctcaggtggctgcgtgtctgcgccatggttgacattctgggcgagcggcacctggtgacctgtaagggcgcgacggtggaggccgaggcggcgctgcagaacaaggtggtggcactgtacttcgcggcggccggtgcgcgccgagccgcgattcacgccgctgctctgcgacttctatacggcgctggtggccgagcgcggggccgcgccttcgaagtggtcttcgtgtcagccgacggcagctcccaggagatgctggacttcatgcgcgagctgatggcgcctggctggcgctgccttccacgacccctaccggcacagccggagccaactaattacatgcggccaccttctctccatgcctgcactttctgttccaagccatctggtggaagcaatcaatttgcctgcagaatcatccgaaagcatcactgggaagaagctggtggaactaagaagcaattctttagcctgacagccagtctgttattagtatttctaaatattgaaatcatctcagaagaagccaagggctgtcgaggtgatttgcctgagggtcctacagatcatcactgactgtgtttggaggaaggaagt

SEQ ID NO: 39643 - DNA, 641 bp, Homo Sapiens
cggctggagctgagaaaggagcgcttccccggactcggctcggctccgaggctctgaagccgacgccgccagctcagccccgggggcgggagcaggactgcccgcacagcccgcacctaggaggcgccgatcccgaacgcctcatgggacgcccccgggggctctctccacgccttgctgccgcgtcccggtcctaggcgcccgggatccacggcccaccccgcccgcagcccgcggctgtctggagaggagtatgaggcccggggccccgcggacgccggccaccgggcggcaggggcctagctgcggagccccgcgcccgagagcggcgggtaaggagccgcgggagccggcgaggcgtcggggcgcgcagaggagcgcccctgcccgggcacccgctgggccacgggactcgcgtgtggcctgagcgccggggaggaggcggaggcgcccctctgtccgggctctgggaaggcgacgaggggctctgcgaaggcggcgaggggctccgcggcggccccggaccctggccaccatcctcacgctcctgctcccgccgggggggatgtcgtggccctgggccccgagcgccggcccggccccggggctgagctccggaccatgtctcgcggaggcccgcg

SEQ ID NO: 39644 - DNA, 531 bp, Homo Sapiens
ggccggagggctgggcgcgtactgatttcatcttattcgtggagacgtggatagttacaagacccagcctcgagtttttgtatgtactagaggcaggtgtacactgattggttctatgacgatgaaagacaggaggagggatagaaataaagagacgaagacggaggggagccggacgaacgaaagaacagcagccgcaggcacgccctgaagaagagcaacgaaccacaccgcgactgggagacgggcggaggccagagcagagcagagggacgacacacagcgccgacgggagcgcaaggagcaccacacacggcaggagagagataggatgatagtaggattaggggcgagacggagtggtcatgatgggagagtagggagcagaggagagatgactgagcgtgtgctcggctggggagggagacggaggagtgcagttggtgtcagcagtggaggtgttagataagttggaatcatttattgtatttgtcgcggcgggggctgcgtgggatgtaagtaaaacaagac

SEQ ID NO: 39645 - DNA, 786 bp, Homo Sapiens
cgcgcgggcgcccccgccggaaggtcagttgcaaagcggtcggtcttgggcctgggaccagaagccccctcccgaccgcgctacggagcccggcgctcaggtcccgcaggccgcctcgctgggacctccggaggcttccgcttcttctcttccccctgtgctctcttaggcggctccacgggtcgcatctttcagtgcccagatagactgaagtgcggccaagcggagttcattcactattcagccagtacttgggggtcgccgtggccgggcgcccttctaggctccgcgcatcccgtgaagaaggacggagccctgttctcacggaggatacactttagtaggggagtgtttgcgtgataggcagggaaagggaaagggcacacccggaaggcgttgtggctgccattgatgtgctgtgctgctcccagccttctgcttaaggcctggacagagttgggtgggtatcgccgtgaatggcctgtccacgccactgccttcatctcgctgaagatccaccagctggccgaatttccctggagtctcattccaggcgttggctgggggctgggaggctggcgccagttgagaagccgagcacccagtcccacttaatgacgaagttaatttggatcctcgaggacccaaggtccccggtggcatatagatctccagccttgggcaaggctctgctcagtccctggatgaagaagcctggaggttcctgaggatatatcagcaccacccaggttgtgtatcaggctcaaaggagttagacgaagatgc

SEQ ID NO: 39646 - DNA, 1478 bp, Homo Sapiens
tgcgctgatggctctggtgtgggctcgtgagtgcccggtggctctcgccgatgtcttccaggattcggtcgatcgcttcttaaatagagtaatgcgtggagccgccagaggtgccctcgagtaggtagcgtctgatgatgcgccgtacactcacttccgtggggatcccgctcaccgagaagaccctatagcttccatacgtcacttggcatttccctccggtcgacgccggtactagagcacacctagcccacgttacactagaagagaggatacctcactttggttgagcgcacttcctaggctctcttgttcttgccagagacccgttggcgagtgtcaatcgacgtgccccgatgcaacagacatggcgtatggaccactgcaagtcgtgcgatcagtggatcaggtgtgtagagatactttggattgaccatgcgcgacactacactacccacgaaggacactggccagatggaaggacactgagtgtgctgcttaaacgcagtcacttgcggttgctggaaattctaatagccaatttaccacgctttgagccacataatcccttgttgggtatgttcgagggtgtcaccttaaacgttctgtagagctctcgcgtaacgttcgacacccgcctatgtcaagggtacgcgctattggcgcaaggacagagcacttagcgcgccaagacaagactacttcaccggacttactacacaaccttaattcgcgcaaccgaatattcttacacacaggctcctactttaaagtagttgcccgggctattttggggagtaccgcaggaactggacttgtgagacagcaagcacaacaaatgtgtgggttgcggaatttgcttggaaggcaagaggttagcttgacaaaaggaaagcacttatcgcgcaacctccaacgttgtgctacattgcaccgccacacccacaataaattacgttgcgctagttctaaataatcttgtacaagttgccgggtgttaaccctggcttggacttttcccttgggcaaacttctggatccggggccatctagtgtggagcttttccttgtggaaaaccgccgcaaggtggctttaggaaacccagttttgtcatggcaactggtgcctcggccggtaacatggggttccatgtgtggcacacagctaggagcaaacgtgctgaccggaaccatgatggccacgtgggggagttccctttagtttccttgtggttgccatttggcgagaaaaacgcgcttgggcttgtaaaacaccccttccaccgtggagggaaaatttgtgtgcgcaggatctttgtcccacttgtaattgttttataacagccaattgattgtccacacggggtgaacaccaccctttgcgtatttgacagatgccagattgtgggattccaccacacacaataacggggtgatccgttgtcaaggtcactcggcacctgctgtttgtgatatcc

SEQ ID NO: 39647 - DNA, 766 bp, Homo Sapiens
ggaagtctatgtattgattacatatttgaaagtgacaggcctgttgtgtatgggcagagggttccgggttaaatctcaaaaataataatagcagggctagtagtaatacattctgaaaaaccagcgtatcaaaaagagagggaatactcccctctcttagatctgctcccctgggtgctgattgtaagtagctttgtatgtatgattttagaaaatacatatagaaacacaatattttaacaaaaatagaattgtattcttcttattctgcaacttgtgacttgtatttaatagtgtgtcttgggcctcttccttgatcttcattatattttataatggtcttcaggatttaattgttgagcatcatgcgtgactgcctttcccatatcaatgaacagttagattatatatcacttttgtcttaaaaaaaccaatgtatatgaggattgcaacatccgtggttcgtgtatcttggtacacttattctaagtatatctatagtatgaaatattggcatttggactgctgataatgaggcctgcatattctcagaattagtaaaaactgagaaacttactactgaatgagcagtgtccatatagcatcatgcaacgtccaaccaacgatcgtaatcaagcattaaactttgcatctgcatcggtacaacacaaattcaatactactagttcatcaacatacttgatccagaggcagataagacaggaacaatgggtaacgaaaacctacagtcgccataccagaacac

SEQ ID NO: 39648 - DNA, 1145 bp, Homo Sapiens
gccgcgctgtgctagctgtcggagatggtcggggcttcagcacctcgtgtcgtcctgggaccgcgtgacaccccacgctggggccgatgcccaacagtgatatcgacttgagcaatctggagcggtgtggagaatgtacccggagcttcgagcgcctaccgtgtgccgagcatagcacgcgaggcgctagggccccagatagcatgggtgtgcggaccgtaccgatgagtatttcaggggagtaaggactacgatcccataaggagacagattgatattggggctgcctccaaccaaaagtcatcccggtacctcaaccatgttactggtaacggaaagacgatggccatccgaggagctacgggccaactgttggaaggaggtaggcgtggactgcctcagctcttctcgccaagcagaccgagtggtccccggctggagtgcccgatggcgagggccgagggtggggagatggaccattgtgggccgcctaccgagaaagtcagcagtcttggctgagtacttagcgggcatctaccgagaactgttccacggtgcacagctttgttgccccgggagtccccttgcacgtgggcctacgactgtggggttgacggactgatgcctgaatgccctgttgtactggtgggcaagtgacggttgacttcccaacccgtaggtctttgcccaagctgcccaggaagggtgtacagtacttaagtgcccagacatgagcgggcttcccttggctagggaccagtttggcttaacatccaacgtaaagcttttgtgctttggcgcctaaccattggcttgggaggctcaagatttgccttggaagtaacccttccgcgaggttggggcttggctagaggccaaaaggggttcccccgggggtaaaacacctggggagtttgggctttagacattgtggaacgcaaagggggttggccgcgggttggttccccgtgtagagccgttacgccgcgcagcgactgggtacccagtttgggccgcaggaagggggcttccttgcgagaatatcccagacacgcgcatttggcgcgtataccatgggggtccattcccaaagcgcgaggggaaccccaagacgcgggaatttggagcttctccgtcttagaggg

SEQ ID NO: 39649 - DNA, 704 bp, Homo Sapiens
ggcaggaaaagcggaagagggagcgaaaaccaacgtgttcggtgacagaccccagcgccgactgagcctctaaagcgacttcagctctgccccaccaacaccaccgcgcgcccgggaacagccgctccgggaagaaacctgacggggactgcggggggcacgagggacagctgagggaagggaggacgcgagagaaacagcgcgagcacgctgagggccgggggttgccaggagaggggcccgcggacccgcagagcggaggaaggtccgggagaaaacggggcgggacggaggagaatccgggatcgcctggcagaaacaagagaagggagtttctgaatcctgggaagaggaggcgtgggtagggacgcttagcccgagatccgacagcagggaaccggagcgctccgggggaggggcttaatgctggggaagggatgtcttaaaagaggagaagctttacaattagacgatcggagaaggctgagggaattgctatgaaggggcgggagctgaagtgtagaggactcctttagacagcagaaagggaaacgccgttgagaagttcccttcaaatctccacctgcctcctctccaattcaaactccactcccttctccaaaagttaaaaggaaagccaagtttgccaggctcccctgttcctactcaataaatacttcttctactccgccaccgggaaaacg

SEQ ID NO: 39650 - DNA, 1026 bp, Homo Sapiens
ggagggcgtccccggctcgggcggcgatgggtagtagccgaccccaatccactccgggggccgccgggtggccgcgtgaaggcatggtgttcctggggagaaacgtggaagtggagtgcgcggcctggggccggtggcgctcggctggtgggcctgcagttggctcccctgtggggctctgggctggcggctagctcccgcctgtggggaggagaaggagccggatgggcgggttcatggctgcgctgcggcgggggtcccggggccgccggctcctccccgcgagggtgcctgtccgccgctcgccgcgctgaggcagtgctggtggcgtgtgcgcgcctaggctgccgccatgcgccctcgcctgcggccatgcccgggccctagagcgccttgccgcagctttgcgccccgaagccccgaaggccccgagcccgccgccggctcttcacatggggcaacacttgctcggacggggggtcatgctttccgagagacccaaccaccgtgtaagggacctgcagacatccaccttggcaagacccggaactcgggagcccagatacccggaagaaaccaagggcccggagcaggaggcacatcgaaagggagcccagagggaccaagggaatgtttcaggaagacaagccaccagtgcgagtaaaggacacccccggaggaaagacaaaagccacggcgtgatgggagtggagtaccacggtgcgacaccaatgcccccctagaagccctgtggaatggaaaacggaaccggccacgaagagcgcgtggtcagtgtagaccgcacggataagcctatgggggtatggggatgaaatatccccacgattgaagaagcgccaaacttatgcgcctatataataccaatacaggcatgaaaaagtcttactcaaaattgactgagaacacaggggaaacttttaggactacaaatgttcccgtaacaaaccgcagttagcacaaagcagaaacttctcaacagcaatctcgcggaacatcaacaaacat

SEQ ID NO: 39651 - DNA, 641 bp, Homo Sapiens
tgaacctgtacacagacatcatcaacatactcttctgggctcaggtacagctgctggggaacaagcagtgtccctgagcgcatatagtgtgtgcttgctgcgcgaacctggtacacagactcatcgagcatctgccgtgtaacattcctctaaccattcgaattgatgctagctgcaaaaggagagtacccagatattgcagcatgaagaggatgctagcgcacacatcagaggtagagcacagtgcataggcaacctgaaagcactgcccctatgaacacaggaaggtcacaagattgttactatcccaatctcatctttgatcacacaagagcacaaagcataaggaaaagaaggaatagcctacgttctcgcaaaagccagaataactgtaatatgatacgagcttgcaagcaaatatcggattaccaatagagggagaccacaggactagaatggagacacgaagacaattgggaagcccttataaaaatcccaatcaacagaaagaccacaggctcaaaaggtagaataaacagaaaggggagcaaagaataaacccaggataaccatcactaccctagatctaactcaaataatgtatgcgcaatcaggacccagtggatgtgggccaaatccca

SEQ ID NO: 39652 - DNA, 694 bp, Homo Sapiens
ggcggaaggaaaagcaaagaaagtaagaaatgtttgagattgcaatatccattgcacacacatcttgtggatttcagaaggacagaatatcttgataacgttttgctggataagttcccagttgccagatctaggttcaaggcttcccgcagcgattcgtatttgcctctgtcctaaagcagcaacctggaaaacccaaggtgaccagtcacctggaaggaaaaatggtgttagctccctctagtggctgtttagtgcctggcgtggctgcaaagggttggagccagccctgctatgtgccttcgaaaagatattcagcaagtcacttcctcaccttttaagtttcgttttcttcgccagttaaaggaggaaatcaaaataatctatttcatatcagaaatttcctctatagttattcaggccagtaggttaagatggttgtttatgatcagcacagttaggttttgctaattttctgtagcaaacagctggaaagagtgaacaacaggaaaggtggaggccttgaggaactctggtgttgctgtttagggaactggttgccctggtaacagtgtggttgtttatcggttggtttttctagattaagattcacgccctttgctttctcaagttttcaaacattatttttctcacatcgcatactattgaccacattatgcggccaacgataccc

SEQ ID NO: 39653 - DNA, 1872 bp, Homo Sapiens
caggaataaagcccccggatgtatacaaaatagatattacagcttaataaataagtacaactgagcactgtgggctggcaggtggcgatacccgactccgcagtcacgcccatcccgtgaactgtgccatctgacgtggcctggagaaaggacatgtgggaaggagacagtaggctcagcccagagattgcccctgttcctcatggggctccaacttgctaagtttagcaccctgcacaatctaagacacatatcttgatgttcacttactccagctcagggacacgcgtggctagggattaccacgcggcgtctagggacggccttgcagcgcacgctagcagcagtacaggcttaccacgcggacaacgtgcacacggaatcactacagatgactcacgaacacctggctcacatgaacccggtgccaataatttaaagagacgatgagagctaaaacactaagcgccgcagttataaacaggcaaggcagacccaatgcaaaagccatctccatcctatactcgctaaccattcacgccaacacgcaaatccattgacggcccaatagcacaggcccaccgcaccccacacggagccacacgcgaatcttgcacagcactcgccccgccgacacatgcgtgcgcacttgccatctagggcgccgacccagtccgccgatacaacccacgataccagactacaccgaaactctcacaacggcccccacactcccatcacatcacctacaacctcatacacaccctaccacaccgtatttcatccaacacaatactccacaatgccacaactctcactcacctcatccaaccaacctcattccactaataagaaaacacccactcataaccgttaccccaacgccaaatcgtgtccacttctcgctacatctaacacacactctccccctaccaccaactcccaccaataacggatctccccaccctacaagcctctgtccaaccacatacaaccctaccttacaacacacaagagactctaacaaccttgtcctctcccccactacccacaaacaacactacaaacactccacgcacacactcatcatcatattctaataacactccccaaccaccgtgtcttactcaccaccccacatacgcacaaatacacaagcacctcaacgatcaacaaaacaaacgataacaaacacccaaacacaacttcaactaaacagtaaaaaccaccatacccacaaaaagccagacacgaaccagagaagtgagacaaccggcagaaagcgcgccatacacacaagaatagaggacgacgtcaacacaacgcgcagaggaggcaaagcaacagaagaacagaaagacagaagaaaagggaagacaatcaagccacaacggaaagcccagatagggagcgaaagttttcataatgaaatatctgccaaaaacaatataatactacggtatttctacctcccattaacttagtctcaaatgataagtcctaatcctctactaacatacgtctcttcaacaactcacagatgattatacccaccctccgcaatacatctgtcgactccaccactacctcctactctcatcccacacatccacaagcatacaactacagaagaagcactacgcgagaccctcactcctacaccgacatatcctctctgtcgacgcaccaccatgaccgagcagcgcgggacatctgagtgtaaacagcaaagcgaacagatgcaggatcctgcaacgcgagagtcgcgcggcgattcacgagcgtgctcaaacggacagcacgacgcgtgtatatgcagacgccgtctactacgacaactgagtatgaggctgattgcacacaaccgaccgc

SEQ ID NO: 39654 - DNA, 592 bp, Homo Sapiens
gtatccggtctgacgttgagctcccttagtctgttctttacctaaccctcggcagagcccaggaggcgggaaggaaggatgagaagtatgaggaacaagaagcgcaggaacagtgctctctgaagcaaaacatcagagggaagaagaaactcttgtgtagcccccaggccactatagggctcgttgctgcggctgcgttgtaccacccaccagtgcgccacctgtctgtgcgccttacgaagcctgccttcccctgctctgatgatggggtttctgggaggaactcccttggcattccccacgctgccctggcaggtgaggcactagtcgatcttccgtctgccgctggagtctttaccgcgaagaggctggcgactttcaccagggcatgagtctgctggtgtgccaacggttacgaggctgagaagcagcaaggggctggtcccaagagtgcgtgcatgtggactggccataccagacgggtgtgcaggacaacccctgctggcacagaaactgcacagtcctcagcctgaaaggaggtcagcagggtcatggccagtactcacacgcgagacggtagagtacaggaaac

SEQ ID NO: 39655 - DNA, 880 bp, Homo Sapiens
aagaggccatttttacctcgtgtcggtattatcaagtctagacagtcaccctttgagggagacctttctatccctactttatagatggggaaagtgaaggtcagagaagttgactcatttccccaagttctggagctgggattccaactctcaggtcttactagctgcaataccagcgttcctttcacactgaaattgtccacgggatgatgatgatgatgttcctgatgtcgttgatggctatgaggtaggactcattagcctcattttccagacggaaggtctgagccccagagaagacccatcgcttgcccagtatggcacagctggtagctgggagagatgggtttggatgtacacttttcgtctgcaagccttgtcctctgtctgcttttcttccgtacaggtgtgcatgagctcccggttactcgagtcatgggagcaaattctgatggactcagccagcttacctttagggtgagtcctccccaggagagaggttgggagtagatggtagctaagtgtcctgttttctacttggactctctcagactcgtgctgagtggaggccagtgcacagtgcaggtcccttgcttcaaagcaaattcctgggaagtgatgagcaggggttggggagtaggctgtcaggagccacgggtcacgagaagggccctgggggcagagctagctgtttggctttgagacagggaagccattgagagataacgcagagctgggagtgatgttatcaaactgtgaaagatgattctccactgagctgggagatggggggggtcggggagacacaagagacctgcattgcgggttttgaaggccgccgattcaggggcctggaaggcccagaccaggatcgcagacc

SEQ ID NO: 39656 - DNA, 1061 bp, Homo Sapiens
ggcttaccccctcggatattggtgttaacagaagaataattatttgcaatatgaagatcaaaactttacatttattctacgtttctttctatccttcaaaatacagttaggcaagtctttcccagctgatcactatttactcaagcgctgacaaagcatgccaattgctccccccattactgccactagttctgagctgaaatcattaaagagtacaaacacttatttaaaaatgctactattaatttaaggtctgtaatactatttcagataaacagcctcagtttccttcagtacaacctcagtgtttgactagtagtatttgcatcaaaaagcattaaaaataaaataacacgttacaatgttgaagactaccattcataatgaaaatgtaactattattaatacttgcttaccaaataatatatcaacaatttttcgtgaaggagaaactataggagatgtgagaataaacagacaaaacacagtattggagattttaacaaatctctcagtaatccaagaaaatgaaggtaacaaatattactacagatgtaaaagacatacataacataatcaactaacggcagatctcataggtatctatcaaattctatatactattaagaggaaataccttcttgcaagttgcacattgaatttgcacaaaagtgacattttagccacaaagaagaactcaatgaatccaaagaatagaaatatactaacaagcattctctgccttacatgattttcaggatccagacattacttttaaagcaatcaagagggaaagatgggtactttctcttgggaaaattcatcgtccgaaaatttaggatacagcctaaagcagttgccatataccacttaggcatgtaaattttccaattaatatccaatttccaaagctatcaaaccacagagtggcatgggaacaacgttggatttgttcgaaaacccagaaatatggagttggaaaacggtgaggttatcggagagcgcgaatgttctgtatggaagcaaggaatccatattgtaacagtagtggaagggtaggc

SEQ ID NO: 39657 - DNA, 1179 bp, Homo Sapiens
tatcctttcttcctgtactggatctctggtttatactccaggctgcctaattatctgctttgctgcatgtacctatctggagacattgcggagcgggtaaagggccacagcctatcatctgttgatgaaaatgaaatactgcctccttagctgtatcgtgggattgcgccctatctcctgcgactgcttccagcgaagacacgtatagcgtagataggacacttagggctacgactgtcagcttgcttgaccccatcaaaggatacgtcatcaggcgaacgtcactgacgagacatgtcaaggattcatcatcgagaacaccgaccctgacggtggccaattcgatttcggagggtctatacatcgctgaggttcccataatagccattgacatgggattacagagttgaatgccaagttccatacaggtccttcatgatgaattcatatgctcaacaggcttggattaaatacccctcattagtgatgacattagtggacaagctgcagatactctacgaggaactgcacagtagtagaggaggttcatgcacccggagatagcatcggaagagaaattcaaacccgtcgaatagtgcgtgtgcaaatggaagagccagaacagcgagcactagtacacgtctcagagacacatcatctaccaacaggaccccgggatcattccggttgacaatccccggaaacacgagcattaattgacccccaagtagaactacgtgaaagcaaggaatgacattccgtcaatcgtatcgacagtcgaaggaagacgggcccaagggaaccttgaagaactatcagacgccataatgaccagagaaaaggggcattttgggcacaaggagacataggccagaggtggacaccccgtatcttgcacggcggctagggcatcttggacaataccgactaccaggaacaatatggccgatgaaggagcagcaataggatgcataccacccacagacccggaggtaaattgggcttcgtccatgggaagaaacttgtggtagcccccacagagaaaggagggcagagaggccaaacagtgctatgcgcgcagccatgagtgattaggagccttaagggcccaatgcagttgagaatacctcggaaggactggcatgcagggagaagactggcacgcatccagtagtaacc

SEQ ID NO: 39658 - DNA, 836 bp, Homo Sapiens
tactataaatacccgtccgttagacaggaggaacctgaggggcttccatatttaacactcttcaaaagcacagacaataccaagggcagctggggtgggggccgaggcgcaggtgctggaccacccccggccctgcgccactcaccctgaggggcagcacgtgcagacctggggctcttgctggcatgtgcgtgggagtctctcctccaggagtgaccagtcactatgctggtggacagcggcatgacgggtaacactgcttgtttcaaagcgaagagagtcgatctgtacttgggcaagtggtgtgggaggactaaggcttgaggccactaaggtgctaattaacatcagcccgttgtccgaggccagctctgagggggcctcccaaaggttttgtgcaggtgggagggactggtagcagtccatccattcatggatatagtcttgcttaatacggttgatctgtgaggtcagcagaggagggttatggactagggagagctggaggaacaatgggagttaggcggcgaggccccgaatatcgcatgagcttcacaaccactagtgcacaactcgcgggagtttgccctggaattggggaggaagatagcacctctacctactgcacttgcttagggtgagcgctagaggagcgaaacatagcacgtataccacctgatactgggcgctccggcatctccattcgtctgatgaaacgcccttgccacgaggccaggtccccagaggtgccagagtagagggcccctaccttggacaggtcagaggactagaatgacgagtccatacaagagacacgaagaaagacatgttaagtc

SEQ ID NO: 39659 - DNA, 565 bp, Homo Sapiens
agaggccggcccccgtggttatgggctagcactcctgctcttcatgatggggatcttggaccttcacgcgtgtaatgacacgggtagaggatgagtttctcttctgccctacgattagggcgcttggatacccagtgagctaaatcccaccactgccttccattctctcagatcaaggtagaagccaccttggtgacgtttatgttccaacacattatatgttaatgtggagtaaggtgattggccgtgagttccctcgtcgcatttacagggcttcacagacttttgaacagtaggacgaagactacagtatgtagtgaggccacctgatggagcagatgacaccatccgcacgcatatgcaggtaaagggtcagtgtactggcgcttctggtgctgcattaggtccctggacttggtcatggaagggtaggtgaacgatgtgattggggctcattgttttgagcaattgatctatgtccactggaattcgcgcttgtagggaaagcatctattccacaaggaagccatccagcatcatgtgctggcttgtgccatgctccttg

SEQ ID NO: 39660 - DNA, 574 bp, Homo Sapiens
cacgaattgtaacggtagagtaactttccttcttagtgagcaatctttcagtagcaaagtacaggtgtctctgtgatatttttattctacgcaatttatgtttgacggacaaatctatgcaaagtagcatctttctagatctagaaagttgaatcttatctatatcacaggacctacactacacagattgacatcaccagtctaacaaagccataaactacaacctaagcacttttattcacccggaatgttcatcaacatccactctccttggtcttgagccaagcccagaaataacaaggtcaatggtcatgatcaggaagaaagtaaactcagacttgaagaaacatttctgtcaaattccccatattccaacctgcgtgtgcttgattatatagacttctttcaattaacggtgattctggtagaactttggctgaggactcctcccacaaatctcttttgccacgtaaaatacagcctccactagtctttcgagataggttttgattaatcactatggattttatgttctggtgctcaagacaatgtcatgcttaactgacaatgggat

SEQ ID NO: 39661 - DNA, 395 bp, Homo Sapiens
tcagtcctaattataaccccaattattagtaattaaagaaatgcaaaataaaacagcatatttctttatgcacatgaaattggcaaaagttagaaaactggataatgtccagtgttgaagtccatttaggagttgcaggacaattagagtactgacaaaggaagttcagatgagtacagccattctgatgagaagatgagcagtgtttagtcaaattaaggagctgcatctccagcaaccctgcaacccctttctaggatacatacattccagggatgcaggtcaggcccacatgtatatgcagattgccatgtgagatacaagccattgcttgcaatagtagagaaccaggaatgatccaggtatcccaggagcaatgtagatatgtggattaa

SEQ ID NO: 39662 - DNA, 726 bp, Homo Sapiens
aaaagtgttcaaaacatcgagatatcaatgtggcctggaagtctagtagggaaataaaaaccaggccttctggaggcattttcttactctgaattaccttgctttataagattgaggaaaatcaccattttgtattcccctatgaaggttataatcagagttttaggtcttaatataaaagtattttgtaaatacaaggtattaataatatgtattgattgtctggtggaaatcaactcttcgattttttcatgtttctaaacgaatttgagtttgctcctctaaagcagttagctgtttagcgactgtaagatccagttggactgatctatttttaaacccatagtttgccttgggatgaagcagcacgccacagagatattcaatactacaaaaacatactttcagcaagcagctccaacaagtccctaatagctacatttgcagtgttcagctttggggatgtcatatatttatatgatagaatccacaatgctttttggtgtaagcagtagtttgtgccaaagaaataattatcaaaatgggctctacaatataccctcccccagcttttttgtatcggtagattagctgagaccaggtttggttcactctgaaacaaagaactttgcaatttgtcaagcaacagttcccatctggcctattcgcttgccaagtcccagacctgggctcatgtgtccaacaatttcagcagcaacttagacc

SEQ ID NO: 39663 - DNA, 1114 bp, Homo Sapiens
cacgctcgtcatttacggcgatggcagttaccatccagtggcctacagtggagggggggtggagggagtacggggattaggtgggttggtagggagtgttgggggagggaggaagcacgagggctggctctagggcctaggatctgtgaatcggtggcagggcctcatgtctaaacatttacccagtccatccccagatgagggctagccaacatacgggggacaggctgactcagaatatagtacgtatggaatcactttttggaggactgtggggcacaacttctcaccgtcgccaagaaaacggcagggaagctgaccgggcagaacgttacgatccagatatgggaagggtagtgaatatgccaccaagatagaatatccctggcaaagagggcatgccagctgtgagggtgtgactactgatgatgcttcataaggaacgaggaagcatgcaatcattctataggatctgggtaccacgcatgagaaggcatgggatcgagggagcgtggtgatcacggctggagggcgcgagttcgccgtgagtgcgtgagtgaacgaattctcttcgtcggtgggggtccaagtactagtgcccaggtaaacagaggtagttcgcaggtgggacctggaagatggagaccagtggtcctagcgaggcagcgcaggtgatgtctccaaggaggagtcatgatgacgtctctggattctagcgatcagagataccagagctcagccgtcgtggacacttgacctggagtagtgctctatagatctgcggattggggaaccagtggttgatgtgcccttcgatccttggtcatgaacctccgtgtgcctctggccgctcgaggcgatgctgacataccttgggatgtcaaaagagtcattgagagggttcggagcggttagacgttcgttttctagacctcccaagggtaagactaaagcccagggaaggcaggaaagagcagacgcgggtgcaatgccacgaagtggtcaccagtaatgaacccaatcgtgggcaccaccggagcaagtaaggagtcccgcgctcccagaacaagggccagcggagaaaccctattatgtccctgcgaggtgagtgcat

SEQ ID NO: 39664 - DNA, 719 bp, Homo Sapiens
gcagcagcaaacccgagaggtaatgagaagcacaggcactaattcaacagcccatcactcatgattaattcaacaagcttttacgtccatgtttgggtgacaaatactaaaattcctatgattgtctcactgcattatatgataaatgagactttcttttacccctaaactaactaacctcctaaagatctggaaatatattctctcctacggaggaaaagcgctttgctgccagagaggctggggaggagaacagggcatgtcaagagctgggcttgagggagattctaagaaatccaggatcccccgtgcagcaccagctccactgtgcagcttcctgagtgggcctctgtgcagctcacaggcagtctgagctgctaatttgctagcacctctcagttcagggctaaatttcccttgggccttgatttccttttctgtctctctttccccctgggatcaggcaacttgagaatggaaccttctgattaacatgtcaagagccatagactgtcttaatggacagtctctttgcctgctcgagggcactggctcagcctggagctgggcaggaactaccacaatgtgttaagtcactaataaaggcccgtgctcagtaatgatttcaagtgctctgagatagagagcctttggattcattaactcctcagcacactgcctgcaaagcctcctactgctctcttgcctagcacatccct

SEQ ID NO: 39665 - DNA, 766 bp, Homo Sapiens
tggtaaattagacacgatagtggcagctctattaaaagcatgttctttaaatattattctccttatttgcatttggcttttcctcaaatggaaaggaaaacgatatccaaatagacaattttttaaaatccctccttatttaattacctgttcatataaatatatgaaaatatatatgctagccttttttctttttcctgggaaaaactcaaaggcctacgagaattagactccctcttaacaatgtgagttcccactgtttttcatcgtgcttttggtgaaatcgcttcaagcattgagtggcatcagtcaccgtgtcccttaatatttttgtaagcatatagtattggactcactttgtgcgtgtatccgtactcgaagcaaaagtgtctgtccgttggaaaaacgtgtgggtgtcttaacgcgagtccccagaatagcgacgttataacgccagtgacttcgttacctcattgtgcattcatgttgggcgacaggcacgtggtctcccagaactctcttgggggttgggcggtggggggcttccgtactggacccaaagccccaggataggacctccggtcgccgtcacgttcgtggagaactccgaataggcgtgcccgtggtctgctgtgcatgggcgtgccaaagaccctatgtggcaagaggagataggctgtgatggagcctctttcagaaatcaaggcagaaaggtgcccgcgcccacggaccctcgtgggaggacatgactcgcgagaagtcgccc

SEQ ID NO: 39666 - DNA, 1120 bp, Homo Sapiens
ccacacccctacggcccgtgtacgcgctctgcacctgcctgcccgaaaacatgtgcagacaccagagagcaggggctcccggtcccgcaggccgaggggggagaaggataggcggccataatgggaatagggccatgtggccaatccagccgacatcagagaacatccccatggatacgaatgcagattgacgcgtaaaaaagaacatggaaaatcgaacagagaggcgccaagtcctatcgatgcccggataaggctgcgagggctcttggctggccaagagccttaggcagaggcgcagggcctaaccgcctggctggaatcggcacgggtggcgggagtttgggggggcagtaatccattccaaggtgacaagacaagtaatgaatagacctcaacagcacgtcgcgttagaagttagagagtactgagagaagatagacatagaatagttctaattccctataatcaacaagcgcaaaatggccgggaggagtcatatacaagtctgatttataataagcaggagaagagaggagagaatctaagaaagcagagtagagagaagccagtcaaaattcatctcatcagctagaagcatagcccaagtagtagcagagcagagagcaagagaatccccagccaagataaagaagcatactaactatactaacgtagagagcagtgtagttgggatgatgatgtgtcgtcccgattgaggaggggggtgcgggagggagaggagtgaagcagaccggatgtcctcgagaaagacgaagaggatgaagagtggagaggaagcgtctcaaagagaggagtgcccctaggtgatggtttggagtgatggctcgtgtgtgggtggacgtggggtgaggtgagagagtaagcgagatcgcgccggagcgggggtggggaggtacgagggaaggacggcggcggtgtggatgtttgtggagcactcggtgtggtagaggtctgatgaagggggagggtggacacggcagagtgtgttgaagttgtgtgcggggtgctagaggtgggacgaccgagattggtggtctgtagattagagggaacctggactatgactcgagatgaccgatctcagtaaatatgtctt

SEQ ID NO: 39667 - DNA, 728 bp, Homo Sapiens
ggctggactctgaggaatctatccatatgaggcaacagaaaaatacgagtaattacaagcccgatggagacgatgttgcaaataatcgccattgtaagatgagatgcaatcccaaggcaagaaaaagaccgcaaagaatacaagatgcaatcaaaaaacccaagaataagagacgaaaaaaatagcgaggtcatagagtccttcctagtctaataaagaaggctatttatgttgaggccaaagcgagaaccaagataacaacacagtgacgaagagagagctaaatagaaaaaacagcagagggaaatgaaagctacataagagcataaaacaagaaagataaagaatgccaaggagagacaaacaagctaataatagaagaagaaagacgaataaaataacaatcagaaaaggagaaacgcgatgagactgagatgaagatggcagggataaaagaaaatcgcacattgcagaccaatgcaaacgcctcatcgaagaaatagtcaaggaaggaaggcaatatagggactaaatggaacagaaacaagattgaaatgccacatgagctaagaaggaggagcatgagacagatcgaatcgaggagcaaactcaatgcccccccatcaatggagagcataagaacgaacactgactggacaacacaaagatagaagacctaaatgaaaggatataatataaaagctaagaatgaaagaaatgcaggaacg

SEQ ID NO: 39668 - DNA, 1283 bp, Homo Sapiens
gcacgggccctttccctctccaggccctctccttatctatgtgaagtcctgctggctacgtgcttaccctcaggaaagcctcagtggcccccatggaggagggcaggctgcctgatgtctactacctgttgcagtactggaattcgtgagccggtatacatatatcgataaaagactgagcacagcgatgtataacaataacttgggagaaaaccgccggctgatgcccgggtctctctctactgctaatgatcctcaatggcggtcaggcgtcactcttttgtgctacaccatgaacccagcgcatgtgtggggacttgttgggtgcagaacttatttggggacttgcaagccctattctataaatgcactgataatataagacctcaaactataatgcctctaaatggactaaatgaacctaaccgaagcgccaaaggtacttgtgaaaaggatgactggaggtaatatacaccacaagtcgcccgagatgatgactgggtattactggcgtaaaatcatgcatggggaaaatcaagctctattatccatctgggatagacatagcacccttcccatagccccgggggcaaaacaggagcaattgaatactaaggcagtattccaagataatctataatgaatgctctcgggggggcatcccccatggacaccgatccatcatatcacaccttactatattccaggtcccccaagggccgatactccaacacatgcaatggcaatggcgatcgacttaggttgcgactcattccctacctatttaatgaccgaaagcgagtcactttcaattaggcacggaaaacagccctgaccttctatcgtttccatgggcacctggccccacggtacattaaacaatcaaaggcgacgagccaccaaagggtggactcccgctataaagcaagaatgcaagttaactctgggaagcgttaccatctataagggtttcccccaaggatacatattattccaagaagaatagactcaacttaagagtggactctctataaccaagataattacttggaacgcaaattcgagacactgtgattgtgcttgttggccattttaaaatcctctttacattaccccattaaagtttattgaaccactatttggcccgaaattctttacctgttgccaaagtgggtctcccttaattttatttaacgctggagctaatcctcaagttggctttggcttggagatcttcctcctgtatccattttagaaaacacgggaggatgcactgcgcgggt

SEQ ID NO: 39669 - DNA, 1171 bp, Homo Sapiens
aagatatacacatacagtcaagtggctgaacacccaccagcaagattgctggaaaccaagccgcaccacacctgccggagcatccaggaccatctactcagtgcaggctcagcagccatgcctacctttgtccatcccaggtatggctcccccaggtgccagaatcatcaacacacactgactgatgatgctgctcttacctgctggcacgcagtcggctgcctcccagctctaagcctgtggggcagccaggagagtcttgcctctggcctccgttggtcccatacttcctggcgagtggctttgcacggcagcccagccctggggaactatttcaatggagatgaggaagctgtctaaacccacggctaatgctaccccattgcttgatctgaatggtctagtccgaatgaagttcgtggaccaatcgccagtttattttggccggtggccagggattactggtattgatccaccctaatctggggctattgggcctcgaatatccgcaggaagcaaattacacatcgatgtctgcatgggaacaggtggatcgcgaagaaggttcattttgggcagacctgttcaatcgactgaaagatgatggctggctttaaacaatgcatcctgcagtagatagtacatgggcagcgatcaaatggcacaactcaggggaatgctgtcccagttctgaagaaattagcgaaagcaagtcattacattttaaggcaggtaacccttctggggcgatgcgagaaaagggttcattatctgatcgcattggggaacaaattggactcttgttcatgttaatcggggaacaggataagaaaaaatgtcgggcaaaacagattaatgcgcccaaggggtagggcgattctaagcggcgatgaaggaatggttgcgggcggaacggggtttcgctgctgaaacgctggttcctttccaggtccgatgcgagtcgtgccatagttacttgtcgctgcgctgccccgctagggcaatgtccccttgggactacctcgcgaattgatacccatgttttttagttgttcctttggtcgcgcagtggtctctcctgtaaaagtggtgtgtgcgtaatatctcggctcttctttggcgctcggcgctatacaaacctcttgcttttcttatccgtgtgtccgttgtg

SEQ ID NO: 39670 - DNA, 1414 bp, Homo Sapiens
caactgtaccccggctggtccgcgcgggataactatggaaagaagaagaagaggaaaagggacaagcagccgaggagagaccagaagaccaaacacaccgagttaaaacgaagcacgcagggatggtaagactacttaagagtcaaatgactagccctgacggagacagatgctccatggagaaatgcgggcacgatgactggacgaagaccgaacagagtgtagtggtagcaaaccggtgcagggatgaaaaaagagagtgcgttcgttacatacgaaggtgaatggcagctgcctcaagcccacccacgagacaatatataaaggcaaaccaagagaacgactcaccgcgcgccaagcgccaaatacttatggaagtgcgtgggcgaccttgggagaaagagcgcggaacgctgaattggggaggggagagccttttgtgggggctttgttgcccaattgggcgcgcatgggactctctggggggacaaattgctgatggacagaaggaggatcctcacacatttcttgggctggatgctgcactgtggtggctctgcaaggaatgtcgcggcctgcgggctaaaagcacaactttgtgccaaacggatgggcacgccaatcgcgcaagtgcctgcaaatgcgcccattgcggacacatcagctcagaatagaggctccaaacagctgggcgccacgtcggcaacttgtcacttgcgtggccaacaactgtcttaatggcgacggctgccaatctaaagctcttgtcacgccacttttgactttgttcacatttcatatccggccaacaagagcggggcgtcctgccaggcgccagtgaggctctgccaagggcggccgtgcgaggcagccttggagtcgcaaaagggggggcttgccactcgcggtggcaaaaaggcacagtttattttcgaaaattggctacatggcgtaaatccgaatgtccacactttgggctgtcccaaaaaatttttttccaaattggcgcggcaatctttgtggctgcggggcgaaaacactttggctttttaaggggtcgtgccacagttggcgtcaaccgggcttgctgtcaaacattgcgcaatctggtgccaaggaattttatttgagggcgagcacaattttacacaatttactggccaactgtgggcgaacagtgcgggggcataagcggggtgggattttttgtgggcgaatcttgggatgcgccagagatggggggacaatttgagtgtcggggaaaatctgtttccttttattaatttcatagagtattgccttggtcatttgtctatgagagattttcaataatagagtgcttggcgaacacacataatctggggggatggcgataaaggaaaatttaaaacatacttcattgcgggccgagact

SEQ ID NO: 39671 - DNA, 788 bp, Homo Sapiens
aaacaatgcattttatcatagggccggacagctacatgcacaagatgctacctgcagagattggtttttgcccagatgtgcaggagagatgcacagagaggaagaaatgcatacatgtgtgcaggttttggcgtgtgcacaagaagcctggaaggattttctttggatctacagtcaaaatggatttccgagaggaagctgtctgaacacacaccccttccctgtgctacatacggtcccatctctgccagccaggttgtcaggaaagtgatcagcactggcttcaactctggctagagctctttggccaatgtgatgggcagaaaactggaatgaggacagaaaagcacctcagaggtttgaagagtctagtctctcaccaccttgctgtaggttttctgaatacttctgagtttaggagtattttttctcaacaggcaagtcaggagctgctaagataaaccatggcagtaagctcgagccagtgttcgtatttgccattgatcggccaccaagtgcttgctatgtgccatgcattgtgctaagcactatctcatttaatatttacagcaatcttatgaggtagatgctactgttatctccattttacagatggggaaactgaggcacagagttccacagctggtaacttgaggaattcaaccactggagagtctggctggagttataggtggtaggagaaaatatgctgtctaaatttgccttgggaaaccatcatggtggtcacaaaaccacttctacggcttgccttgacctagcaggaatga

SEQ ID NO: 39672 - DNA, 1381 bp, Homo Sapiens
gaagggcgctgagaggcgagccgtgagcccagacgactagggagagtgagctcaccacgcgcagcgccagtgaccagcaagggtcccgaggagtgtacgttcatccatcggttgactctcttccggcagttacctgcgtgttgtccgcacttgtccagcccagagccctgatctattggatgctgctgtggctttctttgacggagacatgcccgccatgctgggtcctgggctgtcagaatggtactaggtggcagcctggtctatgtggtgaaccgtggttgacctgtctcgggcaaccaaccaccgtacgagtcatccctcacaatcgtgtgcattcgaatcgtactcccatccacggactgctgagttagcacatgatcgtgtgccataagggatatcattgtgggtaggtcaacgggaccacctcgtatttggaggagtcctttttcgaaacgtgaattttctggaaggggtcattacagtcgtgagtgctcacgggtgcttgcacgccatgggaaccaatggagacgcttgcaggtgcaagccgagtccctggttgaaccctgggtaaaggccctgttgaaagcggaggggtcttgggaaaagggtggtggagggggtccatcgccgaggttccacaccacgaagtaagacgcgactctcatcgaagtggtactctgttttggttcgctctgaatttgatggggatggggcttcgggggcgatactactcctaaacgggacctatggggaagccgtgggtttactgtttgggcaaggccggtgactcttcgtacggttttccgctagccggactccccttgggaagtggcgccgacggggccctatttgtggcccccattgggcaatttgcaaggggggccggaatgaggtccgctacaattgccctccgatctggggagcttcgccccttgtccacacctgtgtgccctttgtatatcttaagctagaaggcctgaggaaggttccccgctcgcggattggtgcgatgggcagggggggttctacctcccaaagaccgaaccttgggagggaagaggggcccctatggaggccccaagttggtccctttgctagcaagacccatttccgatttggcggggaaagcgggaaaccagaaccaagcgtccaattgacccacggagcaaaggaacaaccggctcgtggaccatccacaaccgggttttggttaaagagaagcgtgtcctccaatttacctctgtggggtcagagtttcccccgtgggggaacacaacaaggggggacaagtctgcggccgacggaaagtggcctttggactaagggttgcaataaacgctctccacagagccttgggaaaaacagcaaagggtggggg

SEQ ID NO: 39673 - DNA, 746 bp, Homo Sapiens
cctgaaagaggaatcaccattaggaaaggtgagtcaggtccttgtttaatgtgactagtggctcatcatcaccagtgacctggttgggcctactctccttccagaacctgcatgcttcccagacctccccactgagatgcctctaagagccaaaggagtcaacacttgagcctagggtgggctacaacaaaagattctaatttaccttgcttcatctaggtccaggccccaagtagcttgctgaaggaacttaaaaagtagctgttatttattgtattatataagctaaaaacatttatttttgttgaatcgaaacaattccatgtagcaatcttttttctgttcacggtgtttgtgatagaaccttaaattccgcaagcatcagttttttgaaaaaatgggaattgaccggatagttacaggcaaagattataaatagctacaacatcatttaacttttataaacatgccttctctctattgaagacatctgatatttttgctggaaagttggatctatcctcagtaactctgccatgaattcctgtttcctggttccagaaaaagaaaagattacatttctgatcataaagaatgtcttgcatatgggaaatttttcaaaataaggggggtattatttatgtggcatgggaaaacttttgccatggctgtttgtcttagtggcatcttttgatgacattggatcagatatatgtagatgctgatatatgggacacgatgtaagg

SEQ ID NO: 39674 - DNA, 586 bp, Homo Sapiens
tctcccgggggtctccctctgtgctggacagcgcacccctctcaatgtctcatcctttgcaaggaggcaccatttgcgtcatacagtcacatgtgtatagtttccatcatgctataaatagcctttgtgctccttttttaaattaaaaatacatgtaaacattattccacatgctatgcctaatcctcaaaacacaactacccttttaagcacttcagggtattcagtgtggaacctcatggatggcttccccatcttccactgacgcatgcatacctcgcttttcaaatgttttcacggcatctttgttgatttggcgttttcctcctgttgaataatctcctcaggagaaattcacattagtgagatgcctggatcatttatcttgatttgacttttgtacatattattagatcgccttgcaaaatgtctgctacaggataagttttacctccccagcggagtgtatcacttcagctagaaactcattttaatatacatatttttttattttgtgggaataaagccatctcgaggttgttttaatttgatatcttgcaccgaggattaaagaacaagtaaacgc

SEQ ID NO: 39675 - DNA, 533 bp, Homo Sapiens
tgtgccaggccggggccaagtcggaggcccctcgctctgggtgggcgctggggcccgcgagggctactgtaaggacccctggcttctgaggatactgcgtctagaactttctccgtatggggccttgaggtgcttggtcgagacctgcctttgcgcttggtcccgaatcctgccctctaggagtcgctcttgcgggcctccagcccaccggaggcgaagcggccccgggcggaaggccgctggatcctcgagggaggtgccggtttctctccgcgggcgccgtggggacggtgggaggcgggggcgtcggcagcgcttggactaggtgcggccttgggcctgcctggtagcggggatttgggcccgcagagcgcccgcctctgcggctgagttctgcctggcggggaagggagcgcccgatgggtgccgaggcgtcctcctcttggtgccctggcactgctcttcccgaagaacgcctttcagttaaacgggcgtcggaaatctcgggcttcctggggcagggatcgtcggga

SEQ ID NO: 39676 - DNA, 751 bp, Homo Sapiens
gcatctgtctgctggtttcttgacaccagtgtaatatagaattgtgacgtaaagaaccacaaaatataagagggtttcgtttcattggttttgtttcgttctaaggaatgcagtctttcagtcattatcttttatttacctgagtaaaataaatcagttccaaaaaactgtatactgatgcttttattattcttgcattattgtcaggtaactcctaagttaaatatagatttgagtgtccatatatggcttatatgattattatggctctcaaacaagatcttagctccaagtccctgttagttaaaacactacaaaaagttttcagtttgcacatttttagtagtcagcttttcacttatgaagtctgagcagtcgaagtattgctcagtagaaagctgagagcaaactttttccttctttgtatattaaaatcactgtaagagttgaggttcagtgcatttcctggggcttaatgcctagctgaggttgctggcctgtggcattgctttgggtcatcaactcttctggctggtcattaatccgcaggaaatgccctgtgcagctccagcttcagtcattattacttaatcataaacataggctctctagcctaatactgactggactttatcaagtagtgtcatacggaattccactgttgaccatcttagagacatctcgataacagaacaggtcacacactgatgttggattttctactaatgttgcaagtttccctaaagatgac

SEQ ID NO: 39677 - DNA, 987 bp, Homo Sapiens
gtgggtattgctgagccgctgcgtgggactgaggggagggggccgggtggacgccgcggaactgcgtcctgagtgtgggagaccggaggtggtggaccactgagtctgatgtctggagggtccggttgcgggtcggagggcgtgctggaacagccgccacgcgggagccaggagcctcctgggtgcgtgtgacccacgagccggcaccgtcccgcggccctggggtctgcgaggagccctggcgccgccctccggcttcgcgctttttctagatccctagaaccccagccctccgcctacgctccgcgcccctggcctttttctggcccagtggtggggttccgggagtcgtgccgaaggagcccattgccgtccttaaccggttgtaagagcctttcgtgcccctggagcctttgaggcttgaatgctgagagtgtgacattggtcctttccctgcagccctggcccatttttaaaatgacatttgacacaattattgcatcacaccagactcagaacaaggatgtctgggaacttctgaggcttgaaacatgttgaaatacagaatcttgtgtattcgtaatgggcataggaactaaacatttaagtgcagacatctgatggctataaaaagtttcagtgaaaccgtgctggaaatgtaaacaagaatagacttgttcattccttgattgcgctattaggtctatactaaccatattgtgtcgtcatggcatccgacgattgaaagagacccatgcttaactgcaggacttgttagcacttgaactctccttatttacccagccctttggcgttggggggcattattgccctcggtagctgacaggacgatctttcaggttttccaacaaaatcagccaaacactgcctggcatcggtggacactcttacggatatgcgcgggtcagtgggtgtaaggtgcaattgtggcacagtcggctgagacagtgggacgcatgcacgaca

SEQ ID NO: 39678 - DNA, 443 bp, Homo Sapiens
gggggggccccccaaaatttccccccgggggccccaatttccctacccctttttttgtttcaagggggcccctataggagagctccgttatttaaagcctaggcaccggagccgccgcgttttaaccaagcttccgtgattgtggggaaaacagcggctcaacactgggagaattcttgggagaagggaaccacttatcttgcgtgggggggtgcaccatatttgggaacacaaatctaccctagcagagagattttataaggccgctaaagggggaaaatatttaacaattttttaaaggtgtgattatggtgtgtgtgttaaaaacaatagcggtgacaatattgcctggcggtcttgagaaaatttgtggcttatagcggggtatttagattatttgaaaatattttttattacacaggagactagtgataaaaagaagt

SEQ ID NO: 39679 - DNA, 360 bp, Homo Sapiens
tactaaaccatatgagtcatagactgggcgccaaagggctatttaaaaaacaattgctcctctggtggaagggaatgcctggaggctacttattgaaagtatggggtatgtcccattactccccctttcatttgttttaaaggagaaagggagaggccagagaccaaatgtcccggttcctctgtagctgatctctcgggaagataagcagcccagacttgagtttctagatggatataaccaggtgcatttctgaggcacagagggtgttatttataacccatgataacattaaatgtagtgccttcttctcctggttgagcagggcaacggtcatctgtagctccaggcatccacaaa

SEQ ID NO: 39680 - DNA, 781 bp, Homo Sapiens
cgacatcagtctccagagtgaatccaaggagtggacccaagacatttgtgttctgtgatgtggtggcatgttacctgtcatctccgatgcataactcctaaagtgcgtctggggcagttgtacagattgcagaggataatactcaagatgttctccaaggccaactagtcatcagtttattcatagctcccaagatggtggtgggccacttccaagatggtagcaagagtcgtattctctgacctggggttcttggtctcatggattccaaggaatggaatcttgcgccatgtggagaagcgtcagataattaggcagcagtccaacaattaggtttgtggaacttttactatgtcatctatttattggaattccccctggataccaggaccccctccagcagagcttaaagttatagttacaggaagtacaaattccgtatgtggatccctggaagtgtgatgagaagaaccactgtttccaagatctatttattctatttatcaggcctataaaatcatgtaatggccatggcttcaactagactccacatcttgaatcacagaactcaacgaatggcatcaactacaagctggtattctgctatacatttaagaggccattttaatattctattagtctagcagcttctaagtgatgagggatatggggggactggaggatcccgtgctcacttccttttctgtaaaaggagctctttgatccaaggtgacatggtatgggatccaatgaccataaatcagttatcctgtgaaccctg

SEQ ID NO: 39681 - DNA, 686 bp, Homo Sapiens
caggcattccctgccagcagcttaagcaccatgagttttgtcactgtctttgatgtgcctctgaaatgatgagcaactcttggaaaatgccaaacaaaacaaagtgtgaccttccctcaactcacacagcatcggattcttggaaaaccctttgtatattaaaaccttgtggaaaaccctgtgtttatatataagacagaggtgggctccaatctcagatcatcatgacgaaagtgaggtttgcgcagcataaatgtccagcaggacacatggagctcatgtggggtttggggtgatgcttggtcatacaggatctgcccagagccttgtttccctggcagggcccctcatgtgtcaggagcaccacccttccagtcactgaggcaaaccctcctccccacgaatttccagaaagtcctgggggagatactgctcccaaggagatgccctgttccagacccctcccagctctcatgaggccttacatcccactggccacggcagcctcaccctgggactacgaggtgcccacccctgtgggtttggacttgcgaggctgccaggtcagcacatgggaccatgcccccagccttcagacaggtcgggtgtcccaggttccccgtctgcaattgcccaggcaggctgtaaccttcctggctcctcccctgggaagctctgggcttcca

SEQ ID NO: 39682 - DNA, 358 bp, Homo Sapiens
cactgaagaaaactaaaaacaaaatataaaacacatcctcttaaaataatcaaaagacactccacatttgagtcaaaattgctaaagtgaagaatattgtgaagaaccacccataaatcaggcctgaaatatttcttccgtggttaccaagttatcggaactccccacaagatcctcagtgtggactgagaaagaggaagctgtgcagaaggactagctactatagataactgagccacttgagcatgcagcttagttgtacctttgggacccacttgtgcctgatctcatatatattacttcatctacacatgcccaactttacaatttcatgaataaagtaattcccagttcgtgg

SEQ ID NO: 39683 - DNA, 446 bp, Homo Sapiens
gagtgtgctctcagtggagctttggttttagctgttctctgacaaagagcttgttctgagctgcacatctcgtcctctttgttcagcctcaggcttcaagcattgaatcctaaatattctccagctgggaatcagacaagggcagaaatgaagaacccagaagcccagcaggatgtttcagtttcccagggatttcgcatgttgttttacacgatgaaacccagtgaaacttcattccaaacattagaagaggtgcctgattatgtaaaaaaggcaactccatttttcatttctttgatgctgcttgaacttgttgtcagctggattctcaaaggaaagccaccaggtcgcctggatgatgctttaacgtcaatctcagctggtgttctgtctcgacttccaagtctatttttcaggagcattgaactgaccagttatatttatat

SEQ ID NO: 39684 - DNA, 599 bp, Homo Sapiens
aaagatggtaaacctctttgaattggattcttctttgatcccaacccactctaaattttggtagctagacctttaacttgaaacgatcaaattaaagaccctttcaaatattatacatgctgccttaattattatttagttgtatctccaacatctttgggggagcaggaaggaagggggggtaacaaaaacttcattgcttcaggtaggtataagtatagaggtcaatcacatttttagttgtacatcaaaaataactaacatccattaaattataaaacttctccagccctattcactatttaattgggtatggagttattcatttgtatcactcttatcattgcctgtgtagaatatacttattattaatactattctactaatttttctattatttccaattctgaattgataatccatggcttttatttcattgcttaacaatgtttgtatcctttatttagcaaatagtttacactggcctattttgtatcagtcaagatttttctcaggtaacagctttattattatttttattttaattaacaaaggtaggattacataagaaccgaaaactaaaattatgacccagggac

SEQ ID NO: 39685 - DNA, 680 bp, Homo Sapiens
gctcaatgaatgagtactcttaaaattgtgtgattgtgaaaccaagagcgttaatactgacatagatttgccatcaaacaaaacaccacctgatctgactaaagaataaaagactagaaaggatctcatatgaatctggtgacaaggccaggaagagatttccttgctctaattatgtctatatttgttttatttcatgggcacctatctgggtcctgagcagaatgaggaagattgtgctgaatggacccaaagtagtttcttgttttctcctaaagcagggagctttgggaagcaatggaaaagcttaaaagagatgattctgtccttggtaaatgtgagtgagaatagcgtttcgtttttcaagtaaaacttaattcaaaggctacaaagttttaaaaactatttaccaagccaactacattatatgtattcatattaataacatgtgtagaggtagctatacattacttgaatttacactttacacaaatgatttaaaaaataggttgcaagtgcagcttaaagttttttttcaatgaaaagttaattgtttagaggagaagacttttatagtcttcagaggaatgtgtatttatgatggtatatagtcaccaaataaaacttttcaagaaagcaaagacacaagaaagcagaataagcaaacaacaagagggggc

SEQ ID NO: 39686 - DNA, 874 bp, Homo Sapiens
ggttgtgtacgttgagttgcgatgtttttttctttcgttcctcgtggacttataaaaccagctggagcctgtactgtgtagttgagtacctgaataatcgctgataagattctggctgggcccacaggaacggctggccgatatggtgccacccaggtgttcctaattcattgcttttgctaaagggtccccaaagcgaagctgttgcggattacgtctttgtaaaaggatgagtattaagaaaatgcctagggcgacgcagaaccttgtaagcctgcgggtggctgaaagtcactgacggaatgaggaatagggtgaggtgggaataggtagtcatgatatacaagagtggaccctgataatggggtgaggtatggggaaaggagctatccgacatgtccttagctctagtctgtcagtaaagacattgtgaaagattatcaattccgtgtgtggtcagatgctaaaatattagacgacacagcccttacggtttaggtagtgtgaccttttaatcgttaactcctgcgtggtagtctggttttacccgttttcttcagtgtgaatgatagagaagtcataaatagcctggggatctgttcaaccaggcttataggaagctgttaaaaacatcgaactctcaatttagatgcatcgggaaacgtatccacagtctcttcggcgtagctcattaaatgactcatgtaacgtacatagcagggggataccacttatcatagaaggtcaattaaaaccatgcgggacacctagcattcagactaagtaaaattagagccatacatatccctccaaaccctacgtgcactctcaggatctattccctttcctgttcagacgtaccacctggaatggc

SEQ ID NO: 39687 - DNA, 710 bp, Homo Sapiens
ctgctgtggaacttgtctctgtctctttttctgatttgtccctcagtcgaattatttcttctgaggaggcaaggactgaagttgctacagacccctaaggacaggccatcggtaacactgggtaaatcagatctcttccacgggtctatcaatgagaagaaagtgccaactgaaaacttttagaaaatacccagtttactcaaggaaaataacatgcatgaaggtgatgctcaatagagagaagttgaaacagcagactaattgcctgtttgtgacacccatgtaatcaacttgccatttgtactcatcagttcaggctgtgttttcccactgagacatcatttacagtgctctaaacatattttcacaacattcacctgacaacatcagctgagagaaaaattttcagactgccgagaaacatcaggaggccatgaattcttaatcaacacaccaaattatgaaaatggcctataggttgaggttgatctgaaagataggactatttgtgatccagaatcaaaagagtcaagaaaagtctgagaatttcatccttggagcagaaagtgaaagtgttctggagccaaaagtagtaacaaagatggagggcaagagatcattggattaaatcatattggcagaccaaatttcagaagaatcaacacaccagagacaagaagaacttgaagttaaagcaaagttcccttata

SEQ ID NO: 39688 - DNA, 969 bp, Homo Sapiens
cccgggcgcggggcctttgaacccctgcagacccaggaccggccgggccgctcccaagactgaactgcctgcagggctgggctcagcccaagccagacggcgagagtcgcaccgaggtggaatgctggggtgcgcgggctcgccggggccaggacaggggcggggcctgggtggggccctgtggttgatggagcctttgcgccccagccggctcctgttgacgcgccggctgggccctctgtgcatattaatgtgtggtcgcgctccgcgctgtgcgcacccctgtgcgcgcctcctctgtcttggcgcggcgttctccgcgggtcgttctcttgcagatgggctccagtggtactatgcgccgctcagtttactcgcacaatcctgggaatcagtagtggctgtagttgacctagtgaagggcggtctagcctgacacaggtgccgagcgtaggagtttccgacatttccatgcaaaacaggcttctcgttggtagccaagatacgcagtagggtggccccttgggggaatatgccaatttgggcacaaacccgtgaaggggtcttcgcgccatgggattgtagccgggggtcgatatggagttgggtgcccaagacatatctgtatgcccggtggagaagttccaccccttactgatctccagatgtccaactggatggtctggcagtctggttcgaaattagcttcgggaatattgttcctgtagggccttgccttaggcaacaattaaccagcgttgttgtaccgtgtagcttcggttgtaaggcaccctgtacgtcacattatgttctcggtgacggttcagtatccagtgcaacattgctattgggcctgttgcctgctgtcctggatggttaacacggttaactgatccgatgtcagtggctcattgtgttggttattgtttctacaggaaccctgggagtaggacttggccgtgggtcata

SEQ ID NO: 39689 - DNA, 465 bp, Homo Sapiens
ggctttttataacgataccaaagttttttaaaaaatacataaatgtcataaagtttattcctgtgtatacacactctgggttcaggaggtttgtgcttacatttcactactcaaatgccttcgcaaatctcagaacattcctcaccatcactgcaggcctgtgaacagataactttcatcaattaggatggctggctagtggcagggacttcatataaagaaatctttcccagaattgtttttccacattgccttctaatttgatcactccctataacagatgttcaaaattcggccacagctctcttatgaagacagagtcagataaaatgatattctgcaattatctagatcataagcataaaataaatattacaaaaatgattgtatttaaagaaattttttaaaatccagaaagtcatttaaaatagaacctcatatagtatgaacaaactataaaaatat

SEQ ID NO: 39690 - DNA, 700 bp, Homo Sapiens
cgaaatagagattccatcagccaggaagaaggggtaaggatgatgatatatgggtaggcacatgataggggtgtcacaagttttaagatgctcaattagtaaataactgtcaagattacctttgttttcacctgcccagtctccatgtgcctccttcagaaacacacactgggttttctttgggtgtgaaggggcctctgtgtccatcattccagtgtgagcacatgatctgagcccggtcagtgaggtttaatttcaggacttggttggaactcttgggaaagacaagttctccctgacctggggtgtttgaaaagataacatgctagcctggaattgttgggggctattttacctgcctacctacctgaatgaatgaatggttgactgaattaagctgacacaaaggggtggtagagggatgaggagaggagaacagagggatggtgagaaacttggtccaaatgaaattgcttgagaccggtatgcagctgtgacagatgattcagttacatgacataataaatctttccctcatcccccaccttatttttttcttttgtatgtaagttagtttgagttgcaaaagattactgacaggaatggtacctagcaatggagtgttacaagtaatagaccctaaaatgtggattggcaaattgcaggtagaatggaaggcaataaagttctcctatccctg

SEQ ID NO: 39691 - DNA, 887 bp, Homo Sapiens
gcacgaaagtggaagtggctcacatagcagtcaccacgggaaggatgggaagatcctgactttgggcagagcacctgagaggaccccaggatctaggtaccttctctgcgtgcagtttctcaaacaagtggagcttcctctccatccatggccctcggaggaggaaagtgcctgcatagcttggggccagctctggctactgtgaaaggacatttgatcctctctgctgttcagttgtgctctcttctcctggtgtggtctcttgcttcagggcttactttgtggttagctgagtccagtaaggtgaagagtcttctggattatttcagtggcaaaaagccttttatttccttctttagctttcgtaataacaggccgtgcttgtcttgcctaatacccttagaacatgctgtcatgttcttcaacttgcggtcatagagacacaattccgactcttcctgtgctgaacatcagctgaaataacatgccgtattgatccagttcatgagtgagaagtttagtctacacaagccttttctgtcttgctctttgcagaaggattgcgtcagcctaaaaagcggatcttttagtctccatccgctgccacaaagctgttgacggaggctatctgcccaagttggctgccttctctagctcttatcagtaaacttatctgcctcattgtgacatatctacaacagttgcttagccttattcaatcagtatgggaagacaagtggaaatcatctttcttctcatagggaaattttttgaatgggaaacttggcccttcttaaatatgttacgccaaaattagccctgctgtcccacgcaaaggctgtacatgaacctggatatcggcatgggcatgtcctactataatcatc

SEQ ID NO: 39692 - DNA, 676 bp, Homo Sapiens
ttgtctgtctcagctagaaagtgggagactttcatttaaaatggaaattggggcgaggggttggcggctgggcgaagggagcattcaaaagcggagaatgtcactttacccgagaaattcactacgatgggccattggtttctgctcggctcgcaggcgcactgcacgagtggaggtgtggctagtggctgtgatgagataaatccatgcatagccttttcattgcgagcttgaaagttcttttctattacagttttagctttaggtttaattggttcgactgccttctccacaatttgggcgagaatttcctttgccttctcagcaaaagttgttctgcggacccgtctgggtcaactttcatgagggacattgagacaaacaaatgaaatatgggttaaagtactctgagcagctacaaaaagaagaccagtctatcctgctggagacagtggccacgtgaagaaagagctcttgcagtatgaaagaccacatggaaagagaggccacatggaaccaacagtcagcatcttggtttcggacacgtgaagaaattcatctcagactgtgtatcctaaatcaggcacttgctgaatctaactacatgagtgagaccagttgacaacacatggagcagacatgagctgttctcagtgagtcctacacaaattcctga

SEQ ID NO: 39693 - DNA, 782 bp, Homo Sapiens
cagccgcccgggagaagatggctgcccagcagtgtccgggctctcccggcaggtgagagaaaggtggtcctgagagccagtgggaggatccctcctgggatgaccggtaccaaacctcgagcaccaggtgcgatgcttcggctggggaagtctggcagtcttcaaggttatgggacctggcgagtgggagcgactcaggacgacccagcgtttgtcccccgggatgcctacggggcagtaggcgcggggctgcgcgtgccgtaaccttggcgtcttccgagcacagcccctggaagctgctagcctgaggggcgcaggagagggggtctgcccttcgctgaattccggggaaggggcatggactagcccccaaatcagcttcctttgccattgtggtaaaacctgtcagagatcacttactagtaatgctaaggaatatttgtaaaacacatttcacagttttataaataaaatgaggccgaaaagtttaaatgagtctttggctgctcagtcagtaagtggtagaattgagatttgaacccacggaatcacccagaagatcgagtttgaaaaaatgttatgctgtttgtgctgcatctcaccatggtgctttacatatcatgaccccttcctggcatcttaaggtaattttttcataagcattaaaaagtcttaatcctcacaagcagtttgataaaacacgttccatagctggagtatttgaaggtgacctgtgatctgtgacctgtgcgctgcagggtgatttttaaactgtgtattcc

SEQ ID NO: 39694 - DNA, 711 bp, Homo Sapiens
gtgtggaaatgttgaagcaaggctgtgccattactcaggtggagatcttggagaaggccacatagctagccgcctccacagggagacctaagcaggtggcttagaccttgaataaagaaggaactgctttgtcgtgtagcaatttgtaaaaaagaatagaaaaaaataaggaggaaacatttagcaaactattgtttgttgttgtaggagacggggtttcaacagtattgcccaggcgggtagtgaattcatgagctcaagtgatgcaccgtgcctcagaactccgcaaagtgctgggattacgaggcatgagtcactgctcccagccccaaactattttgtttatttaatttctcatgtgacatgtaggataccctagggaacccgtgcatactcatcctctatgaccagaagccctgtctttctcttgtgtctttcttagcattggtgctgagtgatatggcccacgtctgtgattaaagtactgtgtattagtattacctttaggcccaagtacgcacaggtcccgtggactggttccttgggtgaagtgtgagaagcagcttgtgctttgtctctcacaatagtcatcttgagctatagggattgtaacaaaggtctagctttaacagcagagtagagatagcgtattgacaagtgggttggatttccaggagaagttgatagttatagttgtatcagatgtgagaa

SEQ ID NO: 39695 - DNA, 361 bp, Homo Sapiens
agaatttataatggtaggaatttgacatttctgcctttcattctgaaaagatacattgattaaagtgatgtcaaactcagttaatggaggcggtgcagttatttgaaatatacagggtatataatttgaaggcacgccaaatcacaatgacaaggaataatgatgaccttggtttatttttatacagtacattcaggttttgattggattcagagagaggcaatggtttactttctcacaaagtcctgctatagtcctaggaggtttgtgttctgttatcaaggcagttggttcgtattggaatattttctggggaaggtcatgggctgcagtgtgggaaataaacgtttttattaaatgc

SEQ ID NO: 39696 - DNA, 845 bp, Homo Sapiens
ccgcgaactgcgtcatggaggtgtctgtggaccaggcggaaagcagttgagaagcccaacgctgaggacatgacatccagagattactacttagactcctacggcacacttgggcatccacgaggagatgctgcaaggacgaggtgcagcacccgtcacgttaccggcaactccattgtttcagtaaccgagcaccatcttcgaatggacaaggttggtgcttggatcgttcgggctcgggcaccggcatcctctgcgtgtctgctgccaaggccggggcccagtaaggtcttcgggatcgagtgattccagctagtctcatgattctaatggcggctgtaacgagtacgatctaaatgtccgaaacacatgttgtatgacccagcgttggttgtaccattcactcaaggggagaggtggagggagcgtggagctcccacttggagaatggttggacatccatcaatcaggcgagatgcgatggggcataactgacctccttcgtacgttactccagtgctcaacactcgttgtctctaatgtcccgggaacataggtggcttggcgcccggatgcgctctcattctgtcccaggaccgggctcatcgctgtatgtggacggctcgatcgagggacctggctagtacataagactacgagatccactggtgggatgaacgtgtatggcttcgaccatgtcttgcatcgagagatgtggccatctaaggagccccataatggatgtcgtggaccccaaacaggtggtacaccaactgcctgctctcagtagaaggaggtggacgatctataccgtcaaggtggatgacctgaacttgagctccccg

SEQ ID NO: 39697 - DNA, 806 bp, Homo Sapiens
ttataccattttttcaaggtccaaactgaatccagagatttagcatttcagcagccctgcatgcaaggaacaaggcaatttcaaatgattgtcttccattcattcaagccaggacatgggatacaggattgtatttcaggtctgcactggaaagtaacggaacatcatttcctttttaaaaaaacgggcatctatgccaaaacaacagcttcagctgatgtctccatgaatctaaattcacgtgatccactggttgacctgggtccccgccttccaccacctggctttggttcattgtctcctttcatttctgggctctgtgattggaaacatctgagcaggcggcccacactctggtcctcatcagaaccagtcaatatcctgtgtgtgtgatctggcaagggaagggctggcccggcaccagttgtgttttcacctttcatggctccaactgagttcagcccaagcctacgacccagtcactgggaaaacgtgagcaatgggatctacacaacaatattccacagtcagcagctcctgaacgtgccgcagccacagggcttacagcctcacaataaagcccaggggtagtaaaaagtgagctcgctgttacagaacagtgagtgccacctagcttcactgtccatgggacacacgctgcaggcaatgcactacttggaaggagatccagcagttctgaggaagggcctccagtctcccaggtactgcagtttccaggggttcaagtgtccagtgcagggcctggaaagcaaacacgggcaggagaagggctgcaggtgtggcca

SEQ ID NO: 39698 - DNA, 591 bp, Homo Sapiens
atacatctttccggtcacttgtatactgagctcctgattccatgctggctctctgtgttctacacgacaccaacctggacccatgagtgctctcaaccctggagacggcagaaccaagtctctctacaccctttcccagcaaggggccagtgccacagaggaagaatcgcccctgaactctcagaatcctaaagcttcaatggttctggaaatcagaagtcccagaatgaaggtgccatcggtggcgctggttcctcctggagcctctaagggaaactccgtctcctgtgcttccccagcttccagaggtgacctgcattccccagctccttgccccctcttccatcctcagagccacagcttggcatcctccagtctctgtctctgacctcttcttcggtccttgttcctcctactgcccctcgcataaggacccttgtgattacgctggatccaccagataacccaggatcctccccccatctccagacccttaacttaatcacatccacgaaggaagtccctgctgccttgtaaagtaacatcttcccaggttctggggattcatatgtggacagctttgaggagcca

SEQ ID NO: 39699 - DNA, 990 bp, Homo Sapiens
cttggtctctccagcctacacttcggaagtcggcgcaccgattagtgactacgcgatgattttaaagagcaaaataataggttttcccgtgcctgtcccacaggccctccagctcgaataatggacgaactgtcaatgcactccgagagctggtggcccattgctacgcccgctgatggcgaggcaggcgtactgggaggatcagcctggggctccttgccctctgatcccatcattcccaacatacacacgctgcaacagacgcgcctcctcgttcttctgcgtcagcttaaatggtgtaaacggaacacgcattaatatagactcgaatagagcaacaacgcatagacgtaagaagagaaaacctttcctagtgtaccatgatttctacacatcgctaactcctccactacacgttcagagagtcagggcgcagggtcggaaggggccaagaacgtgcctagccagagtcggaagaagaggggaggactatgcgtgcgtatggggaccgtgtaggacaccgccggcgcaaaaacgaagggaccgcaaggggcgacgctcggcaagtatcccaccctgaatcaatgcagttaggcaggcgctaagtggtccaacctcggtgagggcgcccatcgacgtgagcattggcccccgaggtcttctctgcccccgggcttcacagccccgaacacccatctgggcgacaccccgttgatgaacccggttgcccgcgttcagtttgaggggcccaactccgtatgaaaacaacggcaaggaccttacggtggtccccaaaatttgtcccctgtgcgaccttacgattgccaaagctctatgggctgaggagatgggacacaccttactaagcctagaataaaagggctcggatgggaacttattaaattgcaacataacttagggcccctaataggagtgaaaaccttgaattttaacctacccgctgaaacccaaacaaatttattaaaccag

SEQ ID NO: 39700 - DNA, 754 bp, Homo Sapiens
agaaagaaatgaggatatgagtttgctgctctttaaatcgatgactttgcagctcttcatctgaagaggtggcgtctgtttctcctgtttgagtgtggcacatccaggagagtggctttgagcagtggtgtggcagacgtgactgtaggccagccctgagctgaggctgccaggggactgcacacttcttctctcagctctgccagctgctgcactgtgtctgggccagcccgctggagcacagagttcagtgcattgggacagctacagcccattgcatcgggacagcccacagcaacaagacccacctgtcgccactgcaggtgcgtgagggtgcccggctgagagcagacaaaccgcctagcaggtggcttttcaagcggaatcacagactagctccatcgctgtggtgaacgttctccccagtgccaggattccacttggcccctgactgcttgagcagccgatgtgacagccatctctctgctgccgtgcatgtcggctgggctggagccagtgcatcaggaagtagacgcagaagtggatcaggagcaaaacattcctgagagctggcagaagctggcgtctggagccgctgggatgcgggtatgggctctctcagtggcggaggaacagcctcctggcagaaccaaaggttgctttgtgccttcgatgctgctgctggccagagtggttttctgtctcagaccctgtaccacgtgtctgttctttctcattttttacttaaggagaa

SEQ ID NO: 39701 - DNA, 368 bp, Homo Sapiens
tgggtttaagaagtgtatggataacttcttggcagctagagatatcaaacaaagatattgctggcagaaagaatgagtcatttttaacaaatggtaaaagtaaagcagttaatgcctaaaatttttagagactaaatcatttccattatggggagtaatgaggaagatgaaggtgtagggcaatacgttcttttttatctgagtggatatagggaaataaactggtgatatggcagctgggccatcttgaatagtgagaaccagtaagaatatggggtatgcctgaagagcatctgtaaaaacatatcagaacaaatgaaagaggaaagaatgaaggattatatgtgtgcatagagtgaatatatgtg

SEQ ID NO: 39702 - DNA, 927 bp, Homo Sapiens
gtggagctgtcgccatgaacgtcgagctgtgcagattttaggcgtggtacaagatctaccccgggacacgggaggctgctagcgctagcgtaccgacgggcaaggttattccagcttctcttaagtgcgaagatgcgagatcggcttatcctttccaagaggaatcctcggcaggataatacctgtgtacttgtccctctacgagaagggaagcacgaaaagagggacagtactggagaggatagagttcaagataggaaaatgaaccccgccgcagctagtcatggttccagacggggccattactggtgcatctcttgctgatataatgcgccaaggatggcacatcacgaaaactcggaaagttatgaaatggctcacacgagaactacgctatcaggggctgctagatggagagcatagataagagggctatatgcaaggcatctacatatatgacctcgtcgataggcattgcatgactaagggcagccctagcataaggcaggcagcctaatgcataaagattgtgaatgcctgtgaaaggtgttcagctgcccgagtggggtggagaaagcttaaactggcagtattagattatttagacagtaaatgattggagttagtaagctctatacactgaaactgtggattataattgcattgaaggggctggcgtcagaaatacattcttctcgctccgggggacctcaagtagttgcgttgaacgccggggtactacttgagtcagaagctggtacccgaaattctggggtcggtaacaacaagaagcattagagcccttgggccagagagtaaaaaaagccttgactgatgggcaacgtaacggagagtattgcgaaatgccttagcaatgggcccggtacctacgagggcggagcaagttgctggcactcgggtccctga

SEQ ID NO: 39703 - DNA, 591 bp, Homo Sapiens
gcatattttaccacttgttgacaagatacaattgtgacctactttgaggggatgaataacgacttatcactttaagacactttgcaaacatgttactaaaaaaaggtgcctagccaagggaaaaaccattcacttggaattaaaattgtggatgtcacttcagagatgactttaacataaatgctgaaagttcattcacctcacaaatgtggcagttttctctgtggagaatggtggtctccgtggcagactggctctccaaattaaatgaaactcattgacagacctgggaccttttatgtgagtggacagacaagatcttggtttggcttcatgtactgttttctagagagagtgctacgaaaaacttatgatgcttttatgtgataaccaatataatgctttaatatgttaattctttgtgatgctatatacatagtttttatagttttatgaaaccactttgttaaacttatctggattttaagacacttgtaaacaaatggtttgttagtaaaattggggcattaacgaagttttacacgagcaatataacacaagattttgacaacgagaaacaaaacacaacac

SEQ ID NO: 39704 - DNA, 665 bp, Homo Sapiens
gccagagatgatggtgtcttggaccaagcaccaattatgaagggcgtgacagctcgcgtgcatttgtggacttattgaagatagtgtgtgagatttcctgacagattggatgtgtaaatgaaagaagaaaaacaagaactattttgattcttgttgtcttccgttcggtatttattcttttaacccaggcaactaccattagtcaagaatgaagtctacaggtggacaggatttggggggatgattagaagctcaacttgtggtatcctgaggttacgatatttattgaaacataaaatcacggctaagtaagatcccagtatctgcctcatggaagatgtcacaagttattgcacaaatattatatatagtataatcttctcaactatattaagtacccctagagtatgaatgaattaatgaataagtattcattgagcagatggtactcaatgaagcgacgagacaccatgctgtgccctgtcaagtagatggcttaacagaatccatgttagagcttcatcaggtaaatggtattgtctacatctcacagacagaagaaactcaggacaagtaaacttgactgaagttcacatggttagtaagtagttctaactttaagattgacactcactttttccagcaacttcacaatataaacccct

SEQ ID NO: 39705 - DNA, 473 bp, Homo Sapiens
cagcttcaagcagccatcaaaagttatgagaagcatctggtggagttcaaatcagcctcaggaaaaatataatcatgccattactgaggtcatcaatacagtgaaacaccaaatgaaatgaacagccgttttatttgccactgaagtgtttttctgcttccttttcagtaacagtgtttgcttctttgattaggttcattttctataggcttccaatatggacttaaataagataaacaatttggagagggaaactggagatgccaagactagatgactagatgagttttgagtcaacaatgcctggatcagctgatgctagaccctgtgaggtaaaaaaattttctccctggatgttttcacaccctgctctaccagatcaacattggggtaaatgctatcgtagagtagcaagtataggggttacctttttctccttttctaattttcagtaaaaaatcctttaaattttc

SEQ ID NO: 39706 - DNA, 790 bp, Homo Sapiens
ctgcaagggctgtacatatgccagctggcatttatggtgttagtagcatataaacttcagtgggatgttaatttccaagtttttccctaaagaattagtttaccccacggcttaaggataagatcttagtctaatggtacaagatgctgtggggtagaggtagaaacaggagcctgtaacagggagtgggtctctgagtttagaagagatttagagactaaagatacacaattctaaggaacgtttaatactggttggcatggattacctcataaataatacatttatagatgatccgaactaatggaaaacccaaatgtcacctttaattctgactttgaagtatattacaggctttttattttttggctagcaatttatatttctaaatatgtttcaattaatttggtattagaactaatttgtgaatcccttgtaaacattctctgagacgaaccaaaccaggaacaagaacgaatgactaacaatggcaacagcatcccaataaaaggtgacatttagtgagtactcactgtgtgctggacactcttatggatgctttgtgtgaattgttttatttaataaatgaatgagtgaacatgctgttcacggagataacggttacagtatgtaactgtgtggttaattgaatgtcgtaagtataataggtatgatattacgtggatgatggtgcagttgtaacttatagaaactttacttgttcattcatccattctggatctattaagtgctagatcttgccattctgagctcttctcagagcacctca

SEQ ID NO: 39707 - DNA, 974 bp, Homo Sapiens
gccggacgccgctcgcagcacctggagagggcgcactgcaaaggcgtggcagctagaccgtggaggagcccgggagcggagtctggacacctgcctcgtgagggaagaaatgaggtagcggcggttcccggacccggccatgcccgtcccctgttctcggagcccagcgccgtctcggccaggccagcccggacactgagcgggccgagcgcgagtccccggcgtccggcggagcgaatgatgcagtgagtccccgcgggactgctgcgcggggcccgccgcggccagccggacccagcatccgaccgcactttgggcgagctgctgacttgagaccagcccaaacggggggctttccatctccagcacccctcggaggtggggagcaccggcccctaggcacactcgctgtagagtttccgcgggttttggccccagtcctgagggttgtgtgtgttaggggacccacctcacgttcgccgaggagttcctgcatattcttgcaccatcccgggtgctgttgctggggctctctttatttgcacgcgcgcttctagcttttttcctgacattttccactctacgctcgttctttctcccttgcattttgttgcttgcctgagactctttgctctcgcccttgcccaggctggggtaattctgtgtgcgcgcgtgttctcccccgaacaaccttttttgcacactcgaagctgaatatttcttttagagaatttacccgacctcctgcggggtcctaagcactctctctgtccctcccccaaattcgctaccacagtggctgctccaggtagtttatcgttcggatcttgcccgggccgatccttgcaggcgccggtggtcagcgggctctggaccggggcgtcggcgccgcgccgcccagtgtccggggcccctcgggaaatgctcgcgggacagccaggtgactgtggccgggccccgggggggtcagccag

SEQ ID NO: 39708 - DNA, 783 bp, Homo Sapiens
tcacgttttggccgtgaaagtcgggcttgggcagcgtggcgtcgggggcgagtgtggtgtcccctgttggctgccgccagctctgcgcctgggcttcccctcggctcactcaggatccgcggcctccgtgtccttcaggtgcagcggggagccggctctcagggcgcatgcgccgcccgctctgcgccaccggcctagttagggtcggagatcactgggaaggtggggaaggtgctgggttgggtccctggaactgcagtcagtgatccaaaggagtgggcctgttagggggttcacaggtcgtgggatgagctcttatgagcgccggctaagtgccgggctctggggtgcccttggcattgtacgggctcccctaattcccaagaccaaccgtccccaacccacttcataggtgagaagacggaggtcaggtcacatcatctgcccaaggtcacgcggcaggctgcgggacagttccaggagggccttgaagctggggaaaggaatgtggtaccgaggactgttcaggccttgaagagtttccagcagggcagggctgggttccgatcctcgtgccactccttatcgtgtgacttccgacaagtcactttttatctatttttttgagacaaggtctcactctgtcgcccaggttgggagggcagtggtgcagtctgggctcacatgcaacttctgcctcctgggttccagcgatttctcctacctcagactcccgagtagctgggattataagtgccagcaacaacctggctaattctgtaa

SEQ ID NO: 39709 - DNA, 716 bp, Homo Sapiens
gtggctgggaaccctggcggggaggctgcgcctcctcaagctccagtccctctggatggggcgcaagaggcaccctgagaactcagaggacccatgaggctcccctcaagcaaattccctgctgaccctggacaccccgttgaaggagggggcaagaggctgccacaaggctcatcttataactcccagcaaggactcccagcagaacaagttcagcgttgggatctgcccgaccagcgaagcctggctgggaggtggtgggggagcgaggggcggtggagaggcagagtccctgaacagggaaaagacaatcagttgttccccgtttctgggtgtcagaggcaaagaagtctgaagggctggtggtggtgctggctctgggtttattgactctgtgatcctgtccagctgtcctacagggagttccagagctctcccaaagtgcatgaggaactgcacaagtaggactggtgcgcacaataccagtaagctatctgtctcctagaacctggtatcccctccacttatcttacaggagacccacatcactcagattcccaggacacctggtgggagaagtctgggtgagattggggaggcagacgttccgtcgtactcacaagtttgtttgaagaatggacataaacgctgaagaacagacactccatcgccccttcagggcctcctttgtgtcacaaaagctatcccctcctagg

SEQ ID NO: 39710 - DNA, 928 bp, Homo Sapiens
attctaaccctcctgtctgccagctctgatccagaacttgcatgactgatacggctgagtggattgtctatggctgatagactgtcatttctgacctaaaagtctgatcattttacatctgttcagacatcttgcagcctttcggtgtcagttccaaagtgttagtgggaatttcaaagcctttaataatctagccccacttgttcactctctgtgtaataaccacatacaacaattggctgcatctccatagcacatggtactcctcccgttgtcttggttgtgccagcaacactggttttcgctttctcttcctgcttgttgaggtcatttccaaggcccaggtctttgtgctttttcccaagcttcccagagcttcttccatactccccttacttcctgagatttaactgttctctcttcagcgcttgtctagctaagaaggaggcagcagcagcactgtggggtggtggaaagtgtaccagcttggagtcagaccatggatctcagccctaccattttctacttagatttttttaggacaaatttctccatctttctaagcctccaattgctcacttacaaaattgatataacatttaccttgcaagatggtatggaaggtaattaacccagtatttagaacatagtaagttaataaataactattattaccatcattactatagttagcgacactcactgttaggtgctatacaaagaggatcatcaccagcggaatgtgtctttgggcttctcgcgcataacactgtcgtccttttaacctgtacttttcgaaatattcattccgggccatactcgctccgctgcccataatcactgcacacatactctcccttttccacttaccccccctttgctcacctcaacccccgcttccaggctcccccacgctgactatgcccgg

SEQ ID NO: 39711 - DNA, 559 bp, Homo Sapiens
caccaactctgtggtgttgccttcattttcttaaggaaagtagttatgaccttctagatggcttatttctctaagctgtcttttattaatattccagaagcaatattgagatagatttatttcttatatacatgcaataactattattctcctaggttctgaaggagcttagactcatttaattggaatgttgaaatgttttaaattattcatcaaacatttatctagctgcgaggatattccaggcactctgttaaggtctagggatgtatacataactgagacatattattttctcttaagcaactcatggtacaatttgggaaaggaataaatgaacaattatggtattgtgctaaatagtattattttgataaatgccaggataaagtcaggctaaagatccccagcaagcacagggtagctcctaaatagctttatagccacttaaaatttcacatccataaagttttaaatatgtggtgggaattaagtgcttaatctgtagcactatatccgtttcctttgcaagaatatatttttgttcatcttattctgg

SEQ ID NO: 39712 - DNA, 853 bp, Homo Sapiens
aatttcgttcagtcgaatttgggctgataccttctgaggcaaatgtctgaaattggttaagttatgttactgatgatttatactgattgtctctgctttattaaaatagctgtacttgggttaatatcttcttgtggcaaatatctataattggttatgaagctaataaccgatgaccttttccactgtttctgcttctgctttattaaaaccctcacatatttgctttatttccatttctttcttggcctgggagaaagggatttcttgctaatgatctgtggtgcagcgttgtgccgccagtacttacttgtattatgacactgctggcaatggctgctcttagactcttgagtgtttggggccaattttcaaaaggtcctaatcaagaacacaaaattcctgcatgtgatttgaattaggttcaaaatggtcaaatacaagttcagtctgaaaatgcacacgcctgtaagagtgtatcttaattgtactcaaagttagctccttactcctcaggaagtggaaacccctgaatgaaactgactttgtgtgtgaatttctcactttctgaatccagttcagtgtgtccagagaggcatgtgcttacaacatagatagttttttccagatgtagttgtatttgttaagatttctggttgtaaatgatagaaaccaactctaatttgagcaaaagccagcatttattggctcataactgcgaattctaaagggtcaagttggcagtcaggtataactatatgtacagggactataatcaatcatgtcctccatcacttctcaatttttcctctgttctcacaagtttgacattcattctccagggctggccacc

SEQ ID NO: 39713 - DNA, 836 bp, Homo Sapiens
gtcatcctctcaacccagaatggctcattctctctctgcttgcaccggcacccagaaggcgagctgcggtcactgttttcctttattcctccgccctctcgcttcctttcttatttttaaagaaaatagtcccctcctaataggagaccagctgcggcggtctctggccgcccagcgtgctcagcaaagcatgcgggtccttggaaccccttttccgggaaggcggctgccaccaggcaaattctcaaactgcctagctgcgagtgaggggcctgtagtggggcctccgaatgcaatagccgaggaggaggggaagggatcccgctttacaaactctcagacacatgttactactcaaactaagcagcagacgcggtggccgctgcagtcttttcggcaactaggccgcttagccccagctgtgctcggtttctggggtccctgtcctgctctgtcactccccacgcctgggctaaggaccaccaaggaggtccggaaggggatttcgaacttccaagtggcccaggagaagtgaacgcttctccttctttttcaagcctcccgcccagccctgccggctcggcctgggcgctgtggaccggtaacagcagttccaccaggatgcaggccggactatgctcctggggaaaacccgttgcaataattgtttttcacacacaacttcaacccttccccatttccgcctccaattcggagacttgcaaaggccaagaaaggggacaaggcaactctatcttgatcttctcatccaaagttacaaatactaacgacatgatgatgtacgggagaaagaacaaatagagaggtaaccccac

SEQ ID NO: 39714 - DNA, 756 bp, Homo Sapiens
gaagcggtccgagaatgaagagtgtgatctaccatgcatgtctcagaaagaggcgaatgaggtccgatgtccaggtcagttcttggcagggagtccaggagcaacagaggtgatggcaaagatggctcagtagcttctgagcccccagcactgattgagatgtcctttcccacatcatactcctcatttttctggcagacatctaaggctggatcaaagtctgtagttctcattacctgttcccacgtgccagcctccttttctgttgtgccaaagtcaagttggtaaaatgaggctttccttaaccttttatcatttcccactgtgttggggacaccaggctgtgcccacgtggtgggcagcatcattcaaccttgtcactgtgccctctgcacttctgcagaaggtgtgcaatcacatatcataagtgaaatttacagattatatctgaatgcctcggcctgctttgtcagttttgcaaaagttcctcttgtggctcataatgagagcattaccttgacagcaagatttgaaagaccagtatacctttatttgcttctccatgaaagatgagccactcaggtatttacgagaatcagatcattgtcctattatagtcacaatgacgagagtgaacttacttttaagttagcatctacaggtgcaaaagctgaagcacgagttccaccatcatacggtgagctcctcgaagggctatttgtaccccaatcttcccatccccattgctctcccaga

SEQ ID NO: 39715 - DNA, 1072 bp, Homo Sapiens
agacgatccgctagccacattaggcgctcgtgtctctgcgtccgccccgtcccgtgctctcagagacttgcagctccccaggcccgaggcccctgtcggcccatcctcgagcccagtgtaggctcagcagaacgctctaactccagcctgctagtcagacccactcccaggtccctgctcgtccccgaagcaaccctgctgtggctggccgcagcttggcccattccttttggctaacgctgcgaggcctgcagggttgtccggcgtggaagtcctcctcgggttgccctccgcggcgcctgtccatgacggcgagagggcgggagctgcctcgcgatgggtgactgtgccgagcgcctatggcaagcccccaacgtgcagtcgcgtccctacgttcgacggtgccctgcacggtgatggggcggcctgggttgaatccattcgtggggggcataacccgcggcggatcccggcatgcgtcctttaaggcaattggggttccaaggggccgacaacgcaaattccaaatccggtccttaagaaggcgcaaaaagctcggcagggggcgaggcggcggtttccattggccccggaaatactcagttcccctcatcccaaatttggcgccatgggaaaccccgggctttatctcccatagcgccggctcctatggcctctgggggcacagaaagggctctggggtggtacgccccaagggtccgttatggcacgcaggagcccttcccacgaggggcgcttatctggggcaacgtccccttgtgttcggcacacgccaagggccacagatgaccgaggccccgataaacttttggcccgatgggcatggggaaaacgccctgaaccgcaatgggcggaactgccaaatgaggttcccctgtgtaccctgagaggaaacaacttgatagatacccaaacccaagtggggtactttcccttggcaggatggttcacgctcccctaggaggtagccccattgtaccgtgggtccgcaccgaaattgcacgagactttgcaactccgtgtgaaacacccgccgactggcacataggaa

SEQ ID NO: 39716 - DNA, 901 bp, Homo Sapiens
ctgtgctgcaaccttggggcattgggctctgtctttcggcccctcggggtcagacccctgggtgtgttgggggatccgaagtgctcccaagctgcctggaaagcattcaggcggggtcgctagcaagaactcaggctgggcagcggaggcggcacagtgcacacactcctgcaggaacaaccagacaggggctttgggaggggctgcgtgcagggggtcccgcagaacatatgcgccccagtcccgcaggaaggaccgccctgctctctcttggctcactggtaagttgaggtcagatggggagccttgggggataggcgcctatagccaccttcctctgcagctgccatgcacacaaaaccccctgggctccctgcaacctggagctctgtctctgcctactccctgggcagatccccctgtcaattcaactgtctgtgggggtcataggatctcttatagctgggatcccagaaatacgtgaggagagtgggctgcccactgtcactttactcaacccttccctaggaaacgttctgggcctggaactagtcctggcactcaccccgcgcagggttcccagcttccttcctcttcagcctcgtgtctgtgtggccgctctgtggactcagcgtttcactgcgaagatctgctcagagtgtgtcggtttacgggatacttcggtgtctcggcgggagcagcacttattgactgcatctgtaatcttctgggacaactcatctaatcaagatgcttctgggcagcaatgttacacaaagaaattccagacgccaagaagggcatctccatcttggagccacatagcattgggactaatggcccaatgcttgcgcatatcctccagaacctaccccatgcctggaatcttcaacattacccc

SEQ ID NO: 39717 - DNA, 868 bp, Homo Sapiens
ctgcttcccaggaaacttcatttcacattggattagactgcccaggagggcaacgctgggctggggcagccgggcaactctgccaggcctcgctgcccactgagctgccttccacagctcgctagacccccatgattgtggctgtgaattgtgccagccaccctgataaacacaccactgcctccaccccatgacacacggaatttggggggagggaaggaagaactcaggtatgctcaaattatcaacaagaaaacccggaaaatttacattgttgatgagcactgtgatggataagtttccaggaagaaaaacttggttttcgcctgtgggccacagccatgcctgagatccgcctaatgggaatggagccggcaatttcctgctgccttgctttctccgccagcccctggcccacagtccagcctcagaaggctgaggggggtgcttcggtttcgtttcttttttctcaacgggtcgacattttaaatttctcagtatccaaggcattatgaggacttaggaaacagatgcatttaatctaattaaagcaaggacggcgagtgagtgaaaaattacattttcacttgggttctgaacattcagttgcacatccaagaataatgatgtttttaaagccagcccaataaacttgagattgcaagttttcagtggctcctggataagatgccacttcgatcatcctagacaatgtgcccttttgaggagctgctcagcagctttggggactctggattaaaggcaaaccaggcttatgatttcttccttttgcctttcgtttcacagtagttcgcaggtttgagagtccatttcataggcctgtttcatgacaacatacgctcctacg

SEQ ID NO: 39718 - DNA, 707 bp, Homo Sapiens
gccggacgacgggctggtggggtgaacccttcatcctgggtcttttaatttctcaggcggaacgagtggcggcggacagaggcttttggctgcgctgtctgtgggttgtctgggcttggggaactgggcacggagaccgtggcgccggccgccggtcatacagctctgcttccagtcgtcgggcaaaaagctgaggcgcttctcctttaattgcggtgggcggggcgtgccgacgcggcccgcgttgctattggtggccgttgggggcgcggaaactgaacgggccgcaacggccaccgcagctgccattcgtgcgccgtcctagccccgccatgcgctgcgccactgccgcgcgagcgacccactcgccctggcacaacggcactcttctaacgcgcgccaacccgcaccactgcacgcctctaacccttgatgctgcgcaactctcagcctagttcaaaacagcacacacggcacgccctgcgacccaaggctgcgcccttcccaacttgcgaatccttccactctgcccttccaattgcgcgttcctagggcccaccatttgccactcggcccggcaagcgtccagcggcccggcctcgttaccctgagccgtcccaaccctggggaccccaaccaagacgcgcgattggcacaagactccgaccccattggcctgccttgaaaacccctttaactttcgttcc

SEQ ID NO: 39719 - DNA, 1482 bp, Homo Sapiens
cgcctgctcacacgtcccattctggaagtgcccgcctgctcacacgtgccgatctgtggagttgtcggcgcctgttcacacgtgccgatcgtggaagtgtcgcgcctgttcgacacgtgtccattctagagaggagcgcgttgttcagataacgtcaattttgtagatgagtgcctgctctctcgcttcgtgtgttgtgtgaagaatagcggggtagcgactatctattgcgagttagatgtggagacgtgatcgggggtgacatctggcgcgatgtgtagtgcagatgaggtagagagtcgtgagcccggggagcgtggacgtacacaggactgtttgtagattgaggtcttggagtgggatgcgtgcatagagctatgatcgatgaacatgatactataaggactggccgtcacttaccctacttctccaccctcaagaatgcaggtggggccgcgtctccttcaacaacattatttactcccactgcagagcctgctgctgcggcgcttgctcaaaatatcttctatcctatgtggacagcccagcggcgcccctccacatctattacactactctatataggatcacctccgggctaggccctcacccactgctgttactcatccactctcaccatccgcccgcgcggtcgacagacgcgctccccatcattactgcacgacccgaacaatagtccggccggcggcggccaccaccatcctgcatacctacagttcgctccttatcatctcaccgtgagcgcgagcaaccacctcaccacactcgtgcgacagcacatattcctccgtctctcgcgggcccgcacccatctactcccctcttgtctttcacagcgcctactcccctccccgcttgcgatcgagataccaactatcatttctttacatatatgtgctctcgtgcagtacctcccgactcatatgtcgtctgcttcctacactctaccctccttcggcacttcgtaatcatctgcggagcatacacgacttaccacagtacgctatctcctacactctactctccatcacagcttgccctattcagtcaacaatcagtatcatgataccgagtcatcctacctaactcacctcactcccgcttagctacgacctcagttgagcttcatgagtctgcgaagcatccgccacggcgcacactgccgacatcatccccatcacctacccgtcctgtccgtcttgcttcagctccgcctccccacgctctccccgccttcctacttctccacacgcacgtcagtgcggatcgtccacacacggtctgaactcgtgccgtgagctcccactcaatagctactcgcaagtcactcgatccgtacggcgcgcaccgctcgacacctcaccctcctacactccacacgaccgatctcacgatgcgcagcctagcgcggatccgccatcccgacggagctcatgagacgggatgcccccaaccctgtga

SEQ ID NO: 39720 - DNA, 777 bp, Homo Sapiens
ccatgcctcctccacgggcctctcaacacgtgttctcctttagggctggcatgcatgtgcccaacttgctcactgaacagactaccttggcctgctcagctactcacccttgacaccttcatcaagcactggtgctctgctcagcccagggtcccacagctcctgtgtccacacgtgagtatgcacatgtccgttcgtcccagcatgtgctgcctgtctgcccaggaggcggctgacagggcaatcctcccaccagggttctggccaggacaaacgaggggcttccccatgatccgggtccctggcagttaacaggctccttgtcttgcctcgatggccccaggagacaatcccaaaaagaccacagttagaaatcaggacgtttcccagggtttagctgccaggtttatccatggccatctgattacatattttaaatcattgcaacggtaaattatccattttaccagcctggtgctggaattcactttttctattgatggaaactctgcagttttacattagttataaggggacttcaaggttgcttatgagaggtttagcccatacaaagaaagttaggagttatttatgtcccaaaaatgagggactgggatgggctggtagtttcccaaaaatcagtgattaggcttgacttgctatgaatcaattttcctcacttcttgggacatggatcttatctactgagaagtgagctaagtggacaaagtcagtgagtcgaatccaagaagcaacctggaagatgccaccaaaacc

SEQ ID NO: 39721 - DNA, 777 bp, Homo Sapiens
cggatcgacgcgcgagaccgggaggggacgagggcgtgcaatcgttcggggcgggggctttccggggagggggtgctcaggtgcaccagcggcggcggacctcagactctgccctcccctccctttaacccccttccagccggacgggaggcggggcagggctgagcatttgtgacacctacatttccgtggctcccttcttttcccccgacccctgtttatctcttcgccttccagaagttcttttccatcaggccgtcgcaccttgcgtgggaaggagcaccccacttggaagcaggaggcggggttcagatcttggccctacccctcctgtgttaaagtccgcgagcctcagtttccctcacagtatttttgcctcgccttacccggtttgaggatctgtacgagaaagagaaaggaagtggacatttgttgaattcctgcatgggcaaataccacgcagactgcttcatccgccacgtttaatccttattacttggtgttctcagaactcccatttcatggattcttaagctcacagagtcagtgaataacagaaagggattcagatctagccgtttagctgcacagtggagttcttctccagagtctttcccttgtctgggctcgtggctggaactattcctcagccaaatcctcgccccagaacaagtgcttccgtgtttctccagctgagaaaggtctccctttcagtttgccttcttccagcacggagtacactgtctgctccacttagattacttcagaaatgaaatg

SEQ ID NO: 39722 - DNA, 1217 bp, Homo Sapiens
cgcttcctccgggcgcgagaagaggggagccaggccgagccccggccctaccgcgcggcgccgccatgtggccccagagcccgacccgatcacgtgatccccgaggcctgctcggcaggatcccagtaccgtgtgcccagcggttcccgcggagctccgagccctgtatgacggcgcgggcatttccatctgctctcgtcaaaggccagcctcgcgtgctggtcgagtcgggatctcatcagttcagtcacgttttagtcgtgcgtatgtggctgtccgtcagacatcttgcacatatccgtcacagtcgcctctgacatggaggttcctgacttggacctatgatacattccatctttggcgtgagtgccaatgacaagacgtgaaatgacaagggtgggcagggcattggtgactggccccatgaatgggaccttccctggcgcttgttgagtcaccacagactgggtcgcctccagtcagtaactttagcagtattcagtcccagtcacaggcacgatcggccacaggtacatcgggacttgagcggattcccaagaagcacagactagggcggtggttatagggccatttcatgtatggcattagcccaaagttccggtaggtttttggagcaaagtggtggagttttaacgtaagcccgttggaattccttatattaaacgcggagcagagtagtggcatacgaagtaatttttcgcgtaccagaggagcctagatagggagtgaaacatatccgtttggccggggaaaggtggagggagaagacaagaaaaggacgctccaagccacacggggcaccacgggaaacaagcaaagcaggaaacggaacaaacttccaccggaacccattccacgggcgaaagcacgatacgattggagagcagtcggagagacgggggacccattagcagaccaggaggacgatttagacacattgatagggaggcacaagaacccccgatagagactggcaccagacagaccaaagggggccccattccacggacacgacccaccccgattggacagggaccgacctatccaaccaccacagaggagaggaggttccagaggcaattcggagcaccagagatcaatcggggaagagcacggacgaaaacggcgcgaccagttacgggagaaaccatctcgcattggacaggaattgggacaaacgaaaaggcgacgaaaga

SEQ ID NO: 39723 - DNA, 934 bp, Homo Sapiens
ggctggtttcttttgtgtcttctacattcagtctttggggtatgttattttagtcgaagtgtatggagaaaatacagctgcaatgataggtagtcagaaacagaggagcgtttttcagataatgtggatgtttttgacactacaccaaagctcaacaagtggaagattcatgtcagctgcaaggtggaatctgaaaccctatcaatgagcatttcattcattgttacattaaaatccattagcccatcttgcactttgaaaggctcttttacccatgcatggttttataacatgatgccatggccacttagaaaatgttggtttactgagttatgcacatcttttaaatatggatacgtttcattacacaatatcaaaatatcacatttcattaaattacaactgatcttgtcagaaatgtctctgaaaattctaagtattgaagagttgtcaagctcatactggtggatgtaagtctttcaaaatccaattttcatttgaaagtttgactcataattatcatgtggtatcaaatactgtcagtttttctttaagtgatagattccctttgttcatttgacaaaatctgcaaaaagcgaagtctgaataaccagtttgacaatggttctttcaagtaaaaatggtgttccttgaagaggttggtgggtttagcttttaactctaaacttttcctggagatagccatcacatctgggtatgcagcaggactttatgtatgcatgcttccatatttaccccacaaaagtattaaaaagagtcagggtgaattcaataagatgaattatgctgttgtgaagcacagtcttaatttaaattgtcctttttgaacttgtggtggaagaatacatgattaccggtgcagttgtgccacagtcttgaacatgctaatccagtagtttaccactgtgcttga

SEQ ID NO: 39724 - DNA, 702 bp, Homo Sapiens
tgcaggcggacggtgcgcagtgctgttcccgcgtggtctggagccagcacactaaccacgccacgcgccctgcctgtcccttcgcctccagccgctgcagtctgggccctgcaggagctgggaaaaaccgcagggaggtcttcagtgcctgatatgcaagtctcccagccgaaggtggcagggtgacctgaacaggggaagcagagcacctggtgcctgtgccagagctgacacctggctaggagaggaaggaccaagggacggggcgttcccagtgtgggatgcctggagggcaaagctgtggtgcgagcagtgtgagtggagatgagctagttggtaagctgtggaagcccacccgagtgggggcttgacctgtcccgagaggtccccgcacaccctgctctggccgcacgccgtactgctgggcgtggaggcgcaagcccggcggcccggcctccacctgtcccccaagtgcaccctggtccgcgcccagagctctctggagggtggggtatgcgggagaggggtggaggccaaacgcaagggccctcctggagtccccaggcctacttcggagccaggcgagggggcaccaagctgagagaaattggcgcacccccaggctccgcgtccatgcttatcagcaaccggcgacgcccagtcgtcgtccccggagcagtctgcacctggccagtgcgtccg

SEQ ID NO: 39725 - DNA, 574 bp, Homo Sapiens
actaaattatcacttaagaactctctcatagcagtaatttcattaacacatatatatagtaaccaatttgctaaatgaattgtcggttgtcctgcttaagtactagggccaagctttgaaatgacttaaagtgatctgaattttgattgagaaaaataatctgtcttctatcgaatgtttgaacttttagtgatgagcctcagcaaagtttcaccctgcatgaagcagaacaggtgggggaaaattacaagaggggtctgtaccaaaaatggccccaggatattccattgaacaagtattgaccattatcttcctaggtgctacaactccatactagtcattacagttagtctttggtttcacaaaaatgttactgcttcaaaggcttggcattaacagtgatgtcagcattcatactgccaacaatctgctggtcatacatggaagactgttaaagtgtggtctgtgcatcattgagcaattgttatgtagacacaaggcctgcttcactcaggatagcttgctcctctcgctgagaagagatacctgaagtctactaagtctactaaatgag

SEQ ID NO: 39726 - DNA, 573 bp, Homo Sapiens
taggcctcattctgtccgggagcaaatctggtaactctcccaggagagctcagcagccagcggctcgcaaagaggtagtctttgggtgacccccagcagctgcctggtatggtttgtcctggggactctcctgaggacctttctggctgcaaagactgcccgtctctctattactgggaaagaatagagattgggagcagttgcactcaaaagccctgcagctagctgtcccaagtaaacaaggctcttggagtaaattggaaactcacacagcatggaaaccacaaccttctggacagactgaaaggatgaatcaaacacgaaaacagtgccaaactgtgccaacctaaaatggattcaggtactcagcattgtactgctttgggtaagtgacccctagaagtgggatggaggttaaatccctataaaattataaatgggagaccctttgctgctaatctgtcttgggttacttgggtacctcttaatagaaagccaactattaaacactatgctactcacttgggacaaaatacttaatgttttgcataagcttgcttgcaacaggagtat

SEQ ID NO: 39727 - DNA, 968 bp, Homo Sapiens
cgtggctgaagtgctggtgctggtcggcatcatcttcatctacgagaagcgccggaggcccgaggacgtcctgtggagtgagttgatcgagcgcccgtgctctgcatccctgaagatgcagcgggctggaccagaatgactcaaggcaaggaacgtcacgccagagggtacactacttgcccgtgaggcaggtggggccgttaggaacagcgtccactgacgtaccgctgtctgcagcacgtgcaggtcccgtgaggtcctattcgcacatttgctgtgcgagtattccaaggttctcacctgcttaagagaatgagcccatcactggacactatccacatttgattcatagcattcccgtatcgtttgtgtctaaaagaaaaaggctctgggggtgttcctcgcaattgcaagcgatatctgtattccagttaaggatttatatcctctcgtctcatgaagagtgttatctagcgagaaggcccagggaggctggaattggcccatggccgagccccccagtgcttggtgggctattcaaggccctcgtggaggtctcgatgttcacatgggcgcagttccgtggcgcggcagccaggcacctttcatctcgatctggtgcccggtaggtcacgttggcccacgggatccgtatagccccgtttttgggtgcgaaaacggtcgacaggggtcacgaaactaggaacggtgggtggcaccacccaggtgtgaaatcccattggcgcggtaggcttcgttggaacaacggcccccaacttggccttggttcttggggctatttgccttccaccaagcaacagatgtgataataaagttgaatcgattgcacaggatacaaaacgacacgtgaattaattaaaagacaccaaacgggtataccaaatcactccacagtagcgggaggggtcggtaattggccccgcaataaggtagtatgcgtccacatg

SEQ ID NO: 39728 - DNA, 743 bp, Homo Sapiens
cgccccggcgcgcggacctgcagccatggcagtcacgctgcccaggcagcccgcaggaagggagcgcgtctctgtcctgtttgactgtggagcgggagcctacactgccgagctcgccaggtcttagcctcctctacttatggtcccagaatgcccctccccatcctctgctgtgtgaagttgccctggcttgtggaacccttggaggtcgcttcctgcgaggggtggatccgggaggaagatagcaggactggagcagagaaaattgacccatgaggtggccgccttcctgtcagaagctacgtagagtagcagctgcgagatcgggctgctggtgggcggatctgattactgtgaagatcgctgagcagctgggtgacgggtgatgaagtcattgagaagtttgattatgtgtttgccgagaacgggacggggcagtcatctgcatcggacggacgtgctctccgaatgcgagaaccatccaggaaccacactggggggatgtgagctgtcgtgcagcgacattgaattcacactttctgccattcagctaacaatgcgtgcctgactacaggactggcccaacgaaggcagctggaaacccttcatcgaagttcctggcaattggcatggcttgaacaatctcggcccaagtcgaggccgagattcgtgtcaccctgggcaggaacagggatccgagttccgtccgaaactgggacacgagatgagaacatcggggccaa

SEQ ID NO: 39729 - DNA, 947 bp, Homo Sapiens
atctgcattacactttctgaataaaagtgaagatcatgggtgattaaggatattgaaagagaagacatgaattcatttgtaagacaatggaaccaagccaattggtcaatagtgagcaactgggttgggtcctaatagtgcatctcaaatatactagagccttaacctatccttgccatctatagttactgcagcctttctcgtctgcgcaccattgcattcgcgctcctcgccgtacgagcatgtcgagtcgcacattcgctaaggctagcactgtgactcaagctgcgccacgtgacttcgagttgacaaagctgttgtcactgcaactacagggttaaacactgtttcataaagtcagtcacgcaaatgcgagagctttggcatctatatttttaggctcgaataagtttgtaatgactcgattccgtttcgatcttactcaagatgacgatagaggagagggaaacgaataagtaacagagatggacaatagtaagaagagaacgtgaataagaaacagaaagagcaagggatacggcacacccacagcacaacacggtggcgagccggcaatggcgaccaacaaataacgggaacaccgtagcacccttccagccctcaactacggcggccagcacaaaccatggcgcgcacagatgtgggttcatatgacacaacattccccatcaacgctaagcaccgccacgaacgcgtggcacacaccacacgccaggcgagggaggcctaactcagacaacgggctacacaaccaccacccacaccggccaacaacactaccaaaacccccgacagaaacatacatgcacccggattcgtaaggcccgtctcccaacaacacgtatcatcagccatggacaaaaccaatgcgcaccacactcgcaacacccccggtcaactcgcaccaggggaggaaggcaaaaaag

SEQ ID NO: 39730 - DNA, 632 bp, Homo Sapiens
cgcgcactgggggaagcggcaggaggcagcgggcatgcgcggggctgcggtggcggaggcgccctgccgcgcccgccagtcgggaaccggttctccgagtccgagctggcggcgcgctgtgggctgtgcgggagcgaggggagaagagggagatagggagcccgacatttgggaagggcaggcttgcctctgggatggggaggagccggtgcacggatcctgctgtgcctctgtgcagggcgcgcccagtagtttgggatttgcaagaaaatgcaatcaaacaacatgggcaaagtgcgatgcgtttatcctaagccaagaacacgcttagaatgcacgcccagagccagttctccccaagggatggcaacgcacctgtgtgccgggctccgcgcaagggctttccctgtttattctcccgccgccgctaacaaccttgtggggcgggcatggttggatccccaatttaaaagtggggaaactgaggacagattaacctgtctgcacgtaacacagctgaaaagtggtggaattgctatttctttcaggtttgcctgattctagagctcaatgctgcccatcaggtgtttgaagtcatgatttggtgaaaatgggacagtgaagacgttctg

SEQ ID NO: 39731 - DNA, 1026 bp, Homo Sapiens
ctggaatgcctgtggtttctccggcacctgggtcctgctggcaaccagcagcacccaggggccagcagcgtactctttcacctcttcttgggtgactttgtggaatgctccaatgtgacatctccctgtgaacgcctttcctgacaccctaaaaagtgtcaggaatttccagcaagttccagagagcaggtttccagcaagtttggtcagtatgacaccacagcgatatctctgccattcactgaacttggattcttccttcttcaatgagagatgttcaagaaaaagaacaacttcagtggaagaagaagaagataggagcccaggtcctgtgtttcaccaagacagccgtgcaaagcagatgctgccaaaaaggtgcaaagtggtttgtcagctcttctgcatgttctaacaaattagacatgcatcccaaaaggtttcctagactttccatcaccaccagtgaattctgagtgacaatagtgtggaatttggaagaatggaagagaaactgaagtggagagatggtgaaagagaagaaaaaactgaagaaagatgcttgcaaaaatactgctgtgggtcctgagatgaggattctgggagggtaggtgtggcaatatctcccattctgtgcttacctgggcctcgactggtaccagcagacagggcatgggcagtcagttaaggagtgttggctagcgactgttgtgtcatgcattgcactggttttctgctcctcaggctgaaatggatgcccctgaccggctccctttgagttcctgttcatctgaagtacaccagctttctagatatgctgtcactttccttctggcagagcgacaggggtggtcctgtcttcttcagaacccttctctacctcaaattcccttagggacttccggcaccaaacacgattcgcagattcaaaactttttagattgttgaaagggttaagggaatatatggcaaattaggatttcccgtcagatctgggcaaccccttatgagactgtttatatttggcca

SEQ ID NO: 39732 - DNA, 1073 bp, Homo Sapiens
taacgacggagtgccagcgagggattcggggaactaaatgaaccgtgcgaggatcctggctagccactctggaatccgataccgatatctcttatgacctcaggcgactgacaaagggaacggtgtctcatcccccttcctcctctcctccctgatcctgagccttagccatggccgatgcagggtgctgggcctgagcgagaccggtcactgcagtacgaacggctctaccggtgatcaaccagagactcctgcattgcactttgcgggatcgaaggtacggaagaaaatcgaggcagaggcatttatactttctcgcttctgagagacgttgcctcggagagcctcttcctcagggagatagccgcgtaacgcacttacctatccacatacttccggtacagaccggtagaggcgcaggaagtaccaaacacgggtagcatatggcactaaccgtgcacgacattgtgtgcactaagtgagccacattgggcctgccgttccatcgcaaactgactgcttgtatttatggagtacaacctcagggccttctggcgaagagctccaacggtatatacgtgcatgcaggtaggcaacgaatgagggctggtggtgcatctcaacacgtagtgtaacggtagagcgcgaccgcgataggacggagctgtcggtgcaacccttaggcagcggacccgcagcggacgaactcatggcgttcttgaaattgggacaaccctatacagccacttggactctacccaaaagtgacactgggaagaggctttcggcatagcctgctgggatcttcttagccagccacccgggaaccatgatgccccttgctcacatatcaacggatggccattccaaggtgcgccctttcccgttggtattccaccgtagtaggagccaaactgacccatggggtacctcaaacaggctagtgagcgtaaacgcaacaatcacaggcaactacagctagtgggcatttccaagggcgacactaccattatccaagcggggccacactccttcatttcatttagaaggaccattgtacagccaattccccc

SEQ ID NO: 39733 - DNA, 786 bp, Homo Sapiens
ggggtcctacaggagaagaccaagagacagagacagagaccaggaaaatgaccgataccattccttctcagggacgctacacacccatggggcagaggataagaggttcctgaaggcatcacccctctggccatggctggtgtgcagacaaagctggagattggagtagcctgttgtcccactgactcttagactgccccagctaagaagaaccaactcctcctattacagatgaaataaacaaagctactcaagctctctggcatcgccctgacggtcatcatgtgcttcacatttccctcctgccccccctgattttctggaaaagggagaaacacaccaaagagagttctagaaaacaatgagaataagaaatttacctgtaatccttgctcaagaaactgaagctctgaggccacattgttccagccttttgcagctcctgcatgtggataccagcaccagcagctccccgacgcagggccccagtaagccctcccagaggatgatcttggctttgtaccatggggtgtcaatatcctgtgagtccaacagagggaagacataagaatatggtcacccaggtaagtggtggatacgctgagtggactgtagtccttggctacacaaacatccccatccagagagggatgaactaaggaactagttggggggaagctttgcgtagactgtctgtattcctcccgtgttgtaccccaatctgtgtacaggaaccagaacattgcctaatgtctacactgggtcatcagaagccactctttatca

SEQ ID NO: 39734 - DNA, 684 bp, Homo Sapiens
tggtgcaggagaaagtctcactaagcctggagagaaggcactttaatatttttcacactgtgatccctgttaacacatcttgcctcagttgacaaatttctgcttctttcacaggggtcaaacatcagactaaacgtggaacagtgtgcctcagactaagactgcaatcatacaacggaaataaaattgttttatttaaccaattagtgacaagggagcaatcaagttgttttcttggcactgtgtatccaattctatgactatgattttcatctttgaagaagttgcattctgttttcaggaagacaatcttaggttgccttcctcacatcattttctgccttttcaaagtcatgactagcgaatatattagaaattttctatataaatcataaatttgcctctgaatattataacaatattttattcattttcatacatcatttgactcttctgccctcattattttgttctactttgattgtatgtttggcccagaacactgagtgaaggaggcatgcaattgctgttctgagggtaaccagcaggccaaagttaatttacacttggtggatttccaactgcagaggagttggtgaaattgtcattggagcttttattttgaaatattatgcagttatgtgctaccacatgtttaataagattgaactaactgagcacttg

SEQ ID NO: 39735 - DNA, 779 bp, Homo Sapiens
ctgcgggcgacaatggcatgcggggccccgcccgcgccccgctccgacaccgctggggacagggccgggtgatcccgcgctccccgatgcagccggggccgagcaacgctgccgggaggggccgctgggggcgaacggggcccgggacccccggggctgggcggagtctcggggctcactctcccgcccagggggccgggagccggggctggacggagctggggctgtggccgcgcgggaagtcgggaaggaaattcccccagtggcgcagggtccggcggcgccgaggggtgggcgagcctcggtctcgagcctcttggcttcctccgcccgtccccactccggtcccggtttgggccctgctcggtctccgagtttgatccgacaccggctcggcctccgggggtcccaccctcaggtgtgcggcctggagcacggagggctgcagaaagccttgggagcgacagagccgggggaaggtcggcggccgggtcggcaggcgggagggcggagtcagcggacggcgaaggggcgcacgggtggccccgcagagcagggccggtgatggcgcgggccgggcaggaccacgaggagcagaacgtgcgcgtgacgcgagcgggctggtgacgtcaccaggcacccggggcgatgacgcaagcctgctgggatgacgtcatgtggccagtgtcgccacgtgcttccaggtgacccgctggcgaactcagcagcagcaaagtggggctcacagaacacatgaggggccactgttactataactg

SEQ ID NO: 39736 - DNA, 734 bp, Homo Sapiens
ccactcaggcagcgacttacagtcttaaagagagaattcccggaagggagacaaggcagtttctttttctgtgtgacaataaagaaacggtaaacaagcctccagaagctcattcagcccccatataactttttcgagaaagaaaaggtgccgttcttccgagccctccggcttaaccactgcttcggtgctgacttatttcctacgtctgagaactgccagaaaatgagcaatatctgttctgaaggctgcaggctctctccccgcccccgcggggcggcgcgcactcacccacccgcgccggagcggacctttggcttggcttgtcagggcttgtccaggagttccgctcctctctccaaccggggtccccctccagcgaccctaaagcttcccagacttccgcttcaattcctgtccgccccccaagcccacctcaacgtggagcgcagtggtctccgaggagcgccggagctgccccgcctgcccagcggggtcagcacttcgcatcaaggcccaagaaaagcaagtcctccagcgttctgagcacccgggcctgagggaaggtcctaacagcccccgggagccagtctccaacgcctcccgcagcagccctgcgttcccaggtgcccgggttgcgccgctgccgccgcaatcccgcacgcgtcccggccccgcccactttgcctatcccgggaataagacggggtaagcctcaccgggcaggagggggc

SEQ ID NO: 39737 - DNA, 664 bp, Homo Sapiens
ctgacctttccttccccatctcgagtccctggtggttattccaagtgtgttcttagatgtggacagactattgcctcccggtcactggagcattctcaatacttcagccatctgtgcatgatgggtacagtaggaattgaattgtgccagttggtaacggcttcagtaagggctgcagagaagatacagaacagaaacgaccaggagcagatcctcacggagccccccggctagtgatgaggatcactgtgccctggacacgcagacacaagcaatcttcgcattgaccttgttctggggctcactctaagctatctctgaagaaaaccattgcctaatctggagctgctactaccagaaataaccatagtcaaggaaaactctacgtccaagtaaactcaagatatcaggaaataagattaaaaaggagtgtggggctgccactgacattttaaaatctcctctttgtattctctattttcagaaaacaatttcaacatcaagcatgaagtttatgatgaatataggaaatagaaaggatggtgaggattgaggatttgtctgtgggaaattattattgttctgatattttaaaacagaagagccaaaccaaaacaactgttcttttgactaaaaaggtgatgagagatttttagtgtcccca

SEQ ID NO: 39738 - DNA, 1705 bp, Homo Sapiens
cgcgcagcaggagaaccccagacggaccccaggccctgcagcctgtcatgaacccgaggggctgaagttcagccccatcccgtctgatgtggataaggagtgcgcaagctccacccagctggcgacgaggcacgggccaatttgccggagccgtcatgcaagacgagcacacataacgctgacgaaaacaacatgctgaagacctagcagacgcccggaactacgacggtccagaactggcgccagaacgtcgcaggcgcaaaaactccacagcagacgagaccagaccacaaaaaacacaacaaccacgaaagaagcagacaaaagagaacagagcgcgagggagggaagaagaacgcaacagaccagcacgcacacagagcaacgcacgacacaacaacagagaagaacacccaacagcacaggagacgagagggagacacgacaaacaagcacaccacacaagacgaaccgagggagcagaccaagcagacaccgacgaacaccaacggcacacgagagaaaaacacaacgacggcagcgacacgacgcagaaacagggaaagagaccagagaagcaacagaagcggaccagaaagacagcggacagacaggcaaggaaaaccacacggagaagagccaacacagcacgagcaggacaaggcaacgacccacacagacaacagagacgcagacacgaaaaacagcgacggcaacagccaccacgacaccacaccgcgcgaaagcaagcaacgcacaaccaacaccgacagaggagcagacagcgcaagcacaccgcaacgcagcaagcacacagagcaaaacagagcgccgcagcaccacggagggacacgacgaaacgcagacaccagacaagagaccgacacgccacgaccagcgacgagaccgccagacacgacgagaacgcaagagaccgaaacaaagacgcgaaacaggccgcatgagagccccaagagaacgaacacacaacagccacgacaccagacaagacaccgcaggagaagaacaacagcacgcaaacggagaaaaccgagcgaacgcgaagccaacacgacaagaaagcggacaacacgcaccgccacacgacgacgcaaacaagcaacaccacgatcactcccacaactcctcagcccacacccaaacacacacacacatatccacgcctcctcgcacagacgcacccaagccctcactacgaccacgcccgcacgacccatatacgcacaccacagataaacaaacacatacacaaaacaaaacaacgatgcagcccacagacaagcaactaatgacacatcacctaaataacccaatcacacaaaccaaatattaaagactaactatctcaaagacatcaaagcggaccggacacaaaaaaggaccgaaacgacacccgcgccagagaaagacagacaggcagcacagcacacgcacgcgaaccagcagaccacacacacaaacacagcgaagccgacacgccaaccaaacccaacgaccagagacacacacacgacagaacacccgcaagcaaccagaatagcagacacaggcacggccgcgcaacgcacagaaggacgacagtacacacgagaaacgagcgacgcaaagcagacacggacagcacgagagagaggcatcgagacgacacgagacacgcagacggacgaaagcgacggcagcgcag

SEQ ID NO: 39739 - DNA, 867 bp, Homo Sapiens
cgctggactctggtcgcggccttagtccgctgatcctcgcttgggtgcccgcccttagcggcccggcgttgaattccgggaagtgggagcttcaggctcgctccgtgcgggtatgggcgctaatgtcacttgggatggttgcgcaaggacatcgcggcggacactgacaaggaaccggggaggaacgggggtggggagagactgcgatgggactcgggaagccgggaagggccgcgctgaataagcctaaggggccgggtcgcaaggagtgtcgggtagcacaggcctcggctcagtcggagcgccaggcctcagggtccgggcgggggctgctgcgtcacaccaggcagcctgggaacgcaactgttgggcaaccgtggtggcctctcgccacctcttacgcttgggcgatctgcgattgacgcatcctgggagctgatgtcccgcacgggcggggcgccggaggaggagagaaaatagagacccggttgttgacagcctgtgatgccgcttgattcatgtgtgggtggcctggtttagaaatgtaccacccttcctttctaggttcctccccggagggcggggtgacgggtgcggcgccgaatcgcaacaaaaaacgctgctcgagggatgttagtaactgtctcagcttaagttgctgccttttagcttacagtttgtatcgtaacctgtacttgtggatcttagttaaattcccttcagtgtgttggacaccatattttaagtgtatttttgaaacatacttagaagcattttgacatgcttttttgaaagcgtttttaacatcaaaatcctgttacactttattttttcaagtctgcagatgaaccttgcacaactccaagg

SEQ ID NO: 39740 - DNA, 615 bp, Homo Sapiens
catcaaaaagccgtggcagtataccccttattacttataattccgggtactctcggaggggacctctttcgtgcccaggggggggtttacgttgacacattaaaccttttcctaagaagaaggacgacaacatgttggccgggacttgcccttgtcccccagcgtgtgtccattggtgggggctcttggggacacgcaaaagaaacgactcctttgggaaatgaagcgtgcccctttttcgcaagccaagtcctgcgagggggcatttatcttttctttcatccaaaagagtggacctcccgcattacaaatcttgtggacatttagaagccccgcatttgtgataaaaaatggtctgcgttgcctgtgttcaccccagagaagaggcttgatgagtatgggggagtctgtcgcctttggccgcccaaatttttgtagagagggaccttacccaaggcccactgggggggacgaacgggttaccacgtgcctacaaggtcttaccctaagaaatggttcgtgacgccgctttgggggcgctatctttggccgggagcgacgttagagaaaaggccaagaaagaggacgggtttacagagacctaagattaccgtt

SEQ ID NO: 39741 - DNA, 741 bp, Homo Sapiens
tgctctgcaaactgaaggaactggaggtgtggttaaggtgcctgaacccccttttaggagaaatcccagcagaagatgcctaagcaagccttgcaggaagtcatctaggccaccttcaagtcagtgccaaccgcagaatctttagatcccccaaaagagcacctgtccctttgtggtgcttctgacagagaaccccaagcagccctagacctccctcaacctgactcaggggtgcccaccactccccatcctccctgacacacataatcctggctgaggcagcccaaatagcagcttccccggattactcaccgtggctctgtgagaagaatgcctctcccaggcagcgtccgcagttgtgaccacagatgggagactagcctaattggacttaccagcagctcaccttggcttcctcaaggcccagcagcaggacagggcctttctctgagcagaacttgaatgataaaagaagcaggtgaagctgatccagcctcagacagacctccagtgggcccttgagggtgtgagaggcagctctgcgggcccaccctagaactgcgtgtggacagctagaaagcctagcctttctgacattgctggcctaagaggtttcatctttagggttatttccttctcaggctgctagcttccatctcacttaatacagaaggatggtctcaatttaagcatctgaaacaaattacttagcacaaaccattttcgttgtatccaaaccca

SEQ ID NO: 39742 - DNA, 641 bp, Homo Sapiens
ggtggacttgctccctcctatcctcctacttcaaatgcagaacttcaatcgtttacagagagaagactgaatcgtataatagaacacacccttattcattggctggcttcaccaatctcatggctgaacttgtaaaaatacaatcttagccacatacctatgaaatgtatatgtgtgtgtatatatatacatgaatttgcttctgagattatggaggctgaaattcccaagatggaaggaaagctggatacccaggaaagcatttgtttcccattaggcctcttaattctctcctggcccttgattgattgcatgaggcccacccctattaaggagggcaatctgcttcacttagtctgcccatcccaatgttaatcgtatctgaaagactctctggaacacaaccagaatcatgtttggccaaatgtcctggcaccctggtgctcggtcacagtgacaagtacaagtaactatcacacatgccctttgtcatattggtgatttccactgtttttctcccaaactgcagcttatatttgttctcttagtactgttgagcaaaaacttaatttttataaagtcgaatttatcaatgttttctttaatggttgtgtttattgataataaagaacactttacct

SEQ ID NO: 39743 - DNA, 454 bp, Homo Sapiens
ttccacagcatcttctcttctctgggttgtgcttcaccagcacgtgggaaggagctggtgacgggtggtgccgagtgcgccagtccctgcagttagcgtcctggtcatggctttgctcaggttttcttggtctcctaaatataaaataccaactttatattcctcaggcacctttccctccccccctcattggttctctctcggccctgtgtagagggcagttcaacagagtcctgtaatatcctgaagtggaggggaggctgcctgcctgccagagagcagcctcaccagccctgtccccaaggccgagatgcaggcagcaggctggggcctcggcgtccagtactcttgtgaacccgcgtccgtccctcccggccatccgacccccccgagtggcgttttctgggctgtgtgtctgtcacctggccccacagttcgtgatttagagcagccc

SEQ ID NO: 39744 - DNA, 646 bp, Homo Sapiens
cagagtaggactgcatcaccaggcaaatacctgttctgagccagaaagactctggcggggaggagatcctgagagtctgagtagtgccaggaagcagcctcagaatttgggggcccattacacaccccagccatgttcctgcgacggcttggtggctggctacctcgcccttggggccgccggaaaccaatgaggcctgacccgccttacccagaacccagacgggtggacagctcctcggagaattcaggaagtgactgggatagtgccccagaaaccatggaagatgtggggcatcccaagactaaggactcgggggcattgagggtttctagggctgcttccgaaccaagcaaggaggagccccaagttgagcagctagggagcaaaagaatggattccctcaagtgggaccagcctatctctagcactcaagagtctgggagactggaggctggaggggccagtcccaaactcagatgggatcatgtggattcaggtggcaccaggagaccaggggtgtcccctgaagggggactgagcgtccctgggccaggagccccattggagaaacctggtaggcgtgagaagctgttgggctggctgcggggggaaccaggagctccctcccggtacttggggggcc

SEQ ID NO: 39745 - DNA, 416 bp, Homo Sapiens
tggggcacccaggggttcccgtcatggaggatgcgccggtgccgagctccgtcgcggaggggagtctactacgagtcactggccccgtccgcagtccttctccatgcgggcccgtggggcctgcgcgccttaatctcgatcatggactgcagactggctcgctggcttgaccagtgcagaaggtggcgtgggcggtgaggggggtggggtaggactctgaacttcaagcactggagtttgccgggatcgtgaacttgcagggagaggcggtcctcatccagtgaggtctgtatcgccacctacacccacacatccacacactgctttgctagctagaggaatgctctggagtaggaccagtgctgtcaaagaaggaaagtgggccaaggcgccaaagtccattaacacaggaatag

SEQ ID NO: 39746 - DNA, 684 bp, Homo Sapiens
gaaatggatcagagcggggggtgtggacttccatctggagccgggacaggacctcagggggcaaatgacgaccgtctgtgacacgcaggcccacgtctgtgctagaaaagccaccccttgatatggggcgaggatgggacccgagagaccctcgccccaccctgcactggctcagcagccgggtccagactcccaggcctctggaaaacgaacctcggggggacgcagtagggtcacacagggcttcacccccagctcgggttcagtcctgactcagagacgacccggcccccacgactggaccccacaacgcacagggcccccgccggccaacaagaccaaggtcacgcacagcggtgctgggatcctccagaggactccacaggggaccgagggcctgcagggattcgaaaaccagtgccggacgcagccttcctcccttacagcaagagctaggagataaaacaggcaggccgggagagcagggcccgggtcgcgccttcctcacggctggaagcctcccaggttgacgggaggaatgatggggacggggcggggtacttggagaccttcctctgtcagatggctctgatgtttccactgttgctgtgagcaggacagggttaacttggcagctggctcctccacaccctgagcgcccacatccgtgccctccttgccccg

SEQ ID NO: 39747 - DNA, 838 bp, Homo Sapiens
caaatgggcctgtttagttaaggcttgtgtgaagtatgtggaagtgggtttcacttggcaagaaggcagcatggagctggggcttggcctctgctgtctggtatagaggagcctggggatcaggtgtagctgcaagtacacagctgggcgcatgagggagtggcctcatttcccagccacctactccgtgccgtgcctcactcgccggggaatgtgatgtgttggtcttgagaagaaggcccaggtcctgcagcccggtgaaaagacaactgtggcctaccacgaggccggacacgtggtggtaggctggttcttggagcacgtggcaccccctggctgaaggttggtcctccctaccctgagtgatgtccacctggcaggcttgggcctggtatctctgggccaacctgtggtcatgtgggcatggtacattcaaggattggccctttagctttttaaggaataaactgctctagaatttgtcaaaagatcccttcggggtgggtaaagcagggcagtgggttccaaatggggccttggccatgcgactccagggagcagtccgtcagtgttaaacccgcgctgtagctcctgtagctctggattcgaccgttggcctctccagagactctgcagggtgggcagagcgtaggtggttgccacgtgaagctcccaaaggcgggtgcacgttcttggggcatccccatggtgtatgggggggcctgggtccaggctgtcgttctctcctggttccaagtacgaaggcacctgtggatcagcagcttagggtcagggtggcctggccgctccaggttgggctcctggaaggaagtgggga

SEQ ID NO: 39748 - DNA, 731 bp, Homo Sapiens
gaacttcggaggatgttcatgtccaggagcagccccacgccctgatatggtcggtgtctagagcctcacagcaactaagaccaacccagctctcagaagaaggaatgtcaaaatgtcatgttcaattttacattcagtgcctggaatcttttcttcacaattgaaatgaaatgtgctgaaggaggtgaatccatgcattaatcttcagctcacaaaggaaatactacataagaagcaaggtaagtgcctgctctcctcccagaacgcctcctggggcggctgaacaaacgttttgctgcacaaagcctagcgttggattaaaggggtggtttaattcattcctaggaacacgcaagagatctacagctctgatctccaggatagtgaaatgaggtggtgaatgataagggtataatttagccagctcagtgaataaataatcattgcaaatgaagcagtagcaccaggtaattaaattaatctgtctcatagacatgattccctgactctccactgacaaagttgcctttctagatttgacttttactgttgggccttctttggatgctgaaagaagttcttagcttcctattctcagagggttccccctggaaagggcatgaagaataatagacaaacattccattcttcaccccgtgctgcagccccatgaggtccaaagggtgggatgtagaccaccatcacagtttcatgtttttataccttccctt

SEQ ID NO: 39749 - DNA, 579 bp, Homo Sapiens
ctggaccagatgaactggagtctaggcctctctcgtgactgggacttgtgggacgtgggaggcccgtgagatccaggactaaagattatgctgtttcctaatgggcagatatgtaagtaggtaagtgggatcctcaggtaagcgggatccagaactaaagactgtgctatttcctgatgggcagatgtgttgtttctacctcatcttgggcagcacctggatatgctggcgctggttcatcactggaggagcctcttgtattttgagccctcggacatgctccagagggtcctgacggtcacccagcaaagagggggtcttctcaggacctccatggtgctggcaccaaagacagagatgggcacagctccaggctcgtgaaaatgagctctctataacattgtcttcctgaggttatcctgcccttatccaaggtgggccctaaagctcagtccccagcccagcagcacctctgggtgccggggtggaggatgacgaccagagcagctctctggagaggtgccctgtagtcagtcccacagctctctggtgctacccccgtccccagcagcctgtgcc

SEQ ID NO: 39750 - DNA, 1166 bp, Homo Sapiens
cgacgtcgcggcggtggagggcgcaggcgtggtgggcgcctggcgagtggactgttcgagcgcgttccgctgggacccgggccctgcgctccggccccgcgattggatgctgctctccgctggctgagcctgtcagcgagtcctcgacgcgacccgtggtccctgaagtcggagcaagagccacctaggcaacgccatgagcgcacatatttcgcaatctggcgctcagataggtgtctgttaccactgtacgcgggatctctacgatgtctgtatgcgagcgaacgtgatagtgcaaaacgagatgctggaacagactcgatgcgtgaacctgctgtagccagaaggagtcgtccttcgagggggacacagtgaaaacagcttgctgcgtgccagctacgtggtggagacccgccaaaaggcgccccctgcggggaaacgacgaagtccaagctttccattggacaagggtcagggggaacgaaacgaaacctgggaaagtcgtcacaccgagcaatacagaacctgatgaacgcgctctgcgcataacatctattagggagaccactagggtataggtgagcgtagtttaccgttgcattattatggggccatgcccagttggctcgtcataagatacccggacaccatacagaagagaacaacaaagtagagatgagatcaatagtttgcgatagaggacgagaaattcacaaagaacgagcacacgcagaaaaggcccaggaacagtttcctttgacctataattcctggacacccgaataatggcccttatgagacacagatatcaagagctgtcccaaaggcaatgtaatgcgaattttatgcaaattagtcgccggtcgaggaatctatgaagagtgtaaacattcgcaaggaatgccgaaaattgtcgcgaatttaaaaagtgcgaggtacagttcaagttgtaaagagatagcataatctagttagaacgtgacactggcgtgtgaaataaaaacgacctacattaggttattccaagaatagaacaaggaaagtctcagcaatgagagactgacaagaggaagcttgtcctagagtacttgatacgtagacagagagtatgagaaacagacacgtcatacgaatgtggcaatataaaatgcgttggcctacagcat

SEQ ID NO: 39751 - DNA, 1240 bp, Homo Sapiens
agctgccgaagtcagttccttgctggagccgtgagctgggcgcggattcgaccgtaggcaccgaggacacgtcagaggaggcgccatgtcagaaccggctggggatgtccggtcagaacccatgtctgcagcaatgggctgccggcgcttctcttcggccgcagatggacagctgagcatgatgatcctgctgactgtgattgcgctaattggctgggctcgcgtccaggacggcccgtgactcgatgtgaacttcgactttgtcaccgagacaccactggagcgcggtgacttctgccttggtatgcgtgatggcgtggtggccttgtgggcatgttgccgaacgcgtctagcctttcccatcggtggccccggactatgccctggggagtgaggtctggggaggtaggctacggctgtccctgtctacccttcagcgctgtcatcgttgcttgtcgatgggtgaccaaggcagtatggtgacatggaccgattcgttcgggagctccattgctttatcttggtcactatagtttaacccgcgtttcgtttgcgcttctgcgatcaacagtcgcgagactgcccaattgtgcccttagagaatggtgtgttcactcacaatgtggttgggacccccttttgcgatggaagcttcgttcgaatgtggggttcgtggaagaaacaccgtgggacgtggggctaggtaacctcgaacggacgcaattttgcatgcgactggaaagttttcttcagttaaacgcagaatgtttcccctatatatattcccgatcgccgtgggtggtccggtcgcacgtaccttatttcattcgccaaaaacgggatgctggaacacatgtccgctcggttaaaagttcgcctgggccgcctaaccattagcggaatgattacccgctttggcgatcgacatcccccgttgctgcactacaactgtccgcggcagtgatatgcgggttagctcaccatatcatgagcagagcgcgtgtccgccgtcagtgtctatctatttaaatcgacacattcgtttatattacgatttgtgcccgccatttttagagggggttccgcatttccgcacggatgtattacattgtggcgttgtgattttggatatacgtcgtttttgtacgaatgtcgttgcgaaatttttacaacactatcgatcgtgtgtgtttgtggctttacatctcggcttaatacgtattggtgtcaacacagacac

SEQ ID NO: 39752 - DNA, 661 bp, Homo Sapiens
ggggggactcgggttggatgtgtcggtgacttccccctccacttcgacccttcgcctcccgtcgccgctgcaggggccggtcccctgggccgtcaggaaactgagcgatacacgatgacgatcgcaggcggaggcacgcgacgctgacaccaacgggctccatcgatcgagtgcacatggacacgaaaacggtagcggaccaccatcgcgcaggacagaccttcacagctctgcgggactcagatcgccaatcacgtccacgggagcagaaggccctcacagggcaccaaactccgagagaccgaaagccagcagaagtagtagtccaggaactagtgccgacaggacagaaacccacacaccgcaaccaggcacgaagcactatgacagaaccgtcagacgccggccagacaatgcctcgtttactgcgaaggaccaatacgacagccaccgatgccgacagcagggcagcaaaagtgccgaagagcatccgcatactgcgcgccaaaagcatcggccagggcacgcacaacgatacacaccgcatccccgctccgaggagcagaagcacgcaacctcacatactcaccccatggcggacagacagcgcggcacacggcgaaccgagtcataccttgagccggcgaaagagaggggtgga

SEQ ID NO: 39753 - DNA, 706 bp, Homo Sapiens
gcaaagagtgcaaatgcacctccggcaacaaaagtaagtgggatcctctctttcctctaccccgttccctgtgctccaggctgtcccctctccaccacatcctcaggggaagtcaaagcaggctggggatgccccatgtgcgcggaaatagtcgcctcctcagatgatcctttatcagggagagccaggaatccgttaattccgctggtgtcgctaagtcaccgtcatactctggccggcatccatgtactagcccaccaggcttgctgctctctgctgccccgtgggggcttgtgccaaagctgtgcaccaagggctgcatctgccgaaaggggcagtctggacaaggtgcagttgtgctgctgccatgatgctggcgacagtcccggtcccagactgtagaagaatcgcgacgttcgcacaaaagccttggattgtgcataattgtacaagcccgtgagacggtgaccggttggcgtactattgcgcttatatccttagtggagattacatggtggaaggtgagtaagttaaccacgaaggcgttggaccttggacaagacagcgaaagggcacacccatgaaaagcaccaaagaaagcgggggccgcccgcgcatcgacgagagagcatccccggcagaggggcgccccacagtcacaggggtgaccccggattagggtcacgcagagggcggcgcacacagc

SEQ ID NO: 39754 - DNA, 890 bp, Homo Sapiens
gtcgtgcccagtgctcagaggttccacggtcaatctgtgctctgggaaccacatcgccttcgggctgaacccccggtatttgatgagaatgctgtggtccgacaagcacccagagtcgcatgaactcctgggggtctgaggagcgaagatctgccccgaaaaatgcccgttcgctccgtgggccatggatgcttgctcagtgtagggatcttgtgtgaatgctcacgtgacctgcaaggatgggccgttgggatgtgtactagcgaccattgtttgataatacgtactcatacggcgcgtgatggaacctggcccgacgcattcagatcagactaggcaagatgaggaggtgcgacattccagctgacccagtgtgtcatgacctgtatggcggcattccatggtcccctgggcgctcgggggctggtggtgtggggcagctcggggtccgtctcattcatccccacttcgcaggcccatgccttgtccatatcctgcctgggatctgggcctttaatgcaagaggccatgtacctatgctacgttgggtccatggcttcctaggcctacgagcacagcactggtgaacggagcaaggcatgcatgatcggggcatttgccattccttcaggccgtaggcagcaccgtggggctccagcctgctggagatcctaccatccccagggaggccagggcacagccagggagaaggggaggaacgtagggccggagacagacgggaacggccccgatggcgtacagggccccttgcgcaaattagaacatacgcgagcttcgaaaccacagaccacagggcaaacccaacatagcatggaccaaggatacgaggagtgaaatccctcagaccctcggccaacgcacctaccaca

SEQ ID NO: 39755 - DNA, 928 bp, Homo Sapiens
gtgcctccgggaagatggcggcgtgcagagcggcgcaggtgagagtgtatggtagtgagccgaaactgagcaagaaatagtgatcatcattagttccacggttgctctgcacatgttgactctatctgctgttaggcttgttgtcggggtccctgagcaaatgctccatgggcatatgtggggatcacagggtacacgtgcgagctgggatcaacattgcatccgtttcacacgtcgtcgctcacaagtgatcaatgtcagtatatgtctgatcgaccaggaaagtgcagactgatatgaagacgccatgagataggactgagaatgagaagtaagcacgagtaagcgaggtgcaaagcagcaaagagcgtcagtgaggaaacgagctacagtccaaggcgcactgcttgctgccactcaaggcaggactactgatacatggtgtgggtcctgatgatgaggagcggtggatctcaaaagtcattactagcaaagattcgcgcagtcaagctattcagtcagctgaaggtcagatggggaagatccatacccacacaagttccatgtatacattctctacgtcactgacttcagtctcgaaagaatatagtcacctgtcagcctggggatctagcctgactgatcatcaccgttacaggtggcaggctaggatccatgtccagaatagagcttctggggggaaagctcatcttctatgatcttcgaggagagggggtgaacgttgcaacgttcatgagcccaagttgcccgaaccattgattacattcagtaagaaagaatttatttcatagttaattagacagcctgcgtcgggagagacataagttggagttccaggcggatcctggtaaaccgaagacaagggtgagctgagcctcttccgtatgagatcacctggtgtctcctg

SEQ ID NO: 39756 - DNA, 933 bp, Homo Sapiens
gcaagagcaatggattctgtgattgtctatgtggtgtagttgtgctaagaggatgctagggtgatcttttctacctatacttcttcatggctcagaatgaagcaaggcatgtgctgctttcttatatgtcatttatgccataaatcccattgttagaaggtaatgcttctaacggattccattcatgctttgagataaatggcattgactttcatatgatcacatggaaagctgttacctgattcctttcctgagatcacttccagcctaatgtgcatttggctggaatatggttgtctcagaataacatcatgcactcgggcttttatacttctgcctttaggggactgtggcagcatggcatgggtcaagaagtacttctccttcatcttcctttgatgtcggtaactcatcctttctgcactgcgggagttgttaatgcttttgtgtcctccagttcacatgctgatctaagaagaaaatgagcatgagtgaacccaaagctgctgaaacattctgcgtttatgcaacttccttgccctctatacaaggaagatggtttcattgtcttgtctagagaataaagtctttttgttaaaaaataaacaaagaagaatagtgcaaggcaaacagccatagagtgaaaccaaaagaacgcaggcaagaaacagaacaggagggggagggcgactaaaacatacactaccaggggaagaagaaaaagtggccgcagccccaggaggaaaataaagaaaaggaacccaccacctagaagacagacataataaaaaagaacacgccgagcatgcacgcgtcaaaaacaaaagaagaaggagaaaacaagcaccgcacgaggtgaagtcatttgtgaaggaaacgcacaacacaatatgtgcggggaggaaaaataagagcgataccaccctcacgcag

SEQ ID NO: 39757 - DNA, 1207 bp, Homo Sapiens
gcaggctgtactggtcctgaattctttgtgatggcgaagaggtggccgaggaggcctgagctaacacagaatagtgcctgggtttatgctggctgtgagtgagccggagcctgccgcagcgaccgaggaagtggctgggatggtgcctgagccttgcggagggtgcggtgtggtgtgccgcggtgtggaagactgtgctggatgtgctgcatcatgctgctgatgggcctgcgtgagaccacgtgtgtgcatgcaatgcatgttctggcccaggactccctgcttgaggcccggctcctggatggtggccctcccctgactccgtgtcttgcttatcctatatagatgcattgtagtggttccaggaagatcgtagcagcatatcgacattaaaaccttgcggaattggaatgtggcccgttgggaggtgacctttgcatatcagacaggagcagtaaatggcggttccctccggacaagggcggccttccgccagtggggcttttcccgttggacccccttccacgtggacgtcgggggtgggaaaggattagggcgattatgggccggaaaaacaattcaggacgagcgggaagggttccctggacaagcggttagattatccccaagagggccggccatatactaagggggggttggtaaacgttcggtgtcacccaagtggtgaattaatcgataacaagggcccacgaaaagggggcaccccctgggaacgtaaaggtttcaggaaggccacgccccgttccgggccaaaggcaagggcctatggggatggtatggtttccccgatggcggacagacgggcgggaccccgcactggtgttggattggacccgaacagccgttggggggataccgtcccccaggaacattcgaagtgacgagcagattggagacccattcctggaggagtatcccgttgtccagggggatgtccagcagcaagacgcaaaagtaccgggtgtgaaaaaagcgcggaagcggctgggggtcgccagccccaaagcgtttttatgcccaaggtccgttataagaaagaacaggtatccagaaatagcgatggtgtgcccgcatatatccgtggtggggcaagtatccccaagggacctattccgacagaaaatggggcattacgcatcgattgaatctgggtagtggaagtgtggccgccgctatcccgtttgta

SEQ ID NO: 39758 - DNA, 615 bp, Homo Sapiens
gctggtacggtccggaatttatggatccggcggtggtgtgaggacagagctggctgaagccaggctggggtagacacagggcagtaggttccccaccgtgaccgaccatcccctctaaccgtctgccacacagcgggggctcccgggaggtaggggaggtggccagaccggtggggggctcctgccatgccgtgcaagtgctcagggcctgcctcaccctccatctggccccagcccatgccggccttccctctggggagcgacttttccagaaggccggccaggcgagagggtcttcctgacggcggagctgacctgcccggcccaccagctgcatgtcagctccgagccaccgggtccccgtccaaggcttgctctgctaagttaaagacacccgaaagcgcttgactcaggtccccggagtccctggccagggccccagcccctcgcttgccctgcactgtgtggactctggggatgcaggtgtaaggggagtgtggctgggcagcccctggtcagccagggctcacgcctgtcctgggggccccaccctgctgcccgacacccccatgggaggctgcgggcggcagttgctgtctcagagaggggagtgtg

SEQ ID NO: 39759 - DNA, 1017 bp, Homo Sapiens
gcgggaggcttctccgaaagccgctgagggcagctcccgtgtgtccgctgtgcaaaccggtccttccgccaaaaacctgctgtctggcttttctcagtgcctccctggatggatgtttgggagagtttacgcgtggccttgtgggatcgctgtggcggactctcagctatcagagggctccatcactccatctgtaagtgatggcagctggtggcgagtcctgagcagggatgtgatcctgactgggccacgtgctggctgccctggtgacagaagcttgacgtcacaccagaccatgtgcctagtgaatgtgcacccaagagcctgagccacttgcccctgctcccaactattcccaggccaacaacctcttgtcaaacagcccggccaactctgcctggcacagggtgcaggctctagacgtggatggagcaggattgcatcctttcagttgtccacactgttggtcaaacagagtaaaagccatggccagcaactgtactaagtggactacatgttgcatctagcctgttcaccggaattccttctgacaaatatttgagccatcccctcctgctgactgtggacagcagagcgagcacgcaaggccacgttgcaggccatcgttgcaatgccacagctctggggctgaggccatggcccctcaaccgaacacgtatagatgacaagggtatgcacccgtgttaagccacggactggtctcaatctccttgagctacgtgaaactggcccggcggaggactccccaacagttgctaggggaattaacacggcagttgatgccatttgggcccccgtcaagacgttctggcattcctttaaccgggcggcaacccacccacgtgtcgccctatggtaacgtcggcttcttgcgccatgggagacatgaatcacacggtaggccccaccagccgggcgtcaaccactccaagtaggtcccggggtctcggagacacatacaccgtttgagagacgcgctctgcagcaagacacttg

SEQ ID NO: 39760 - DNA, 835 bp, Homo Sapiens
aaaagcccacgctggtacggtcccgaagtcctttggaaagaaggagccccagatcatggcaattcctgctagtcaggatcagctaaccattacctgcaggtcatacttttccctattatcaagggaacaccctgaaggaaggggcctggggcaaggctagctaggcttcagctttcccttgccctaccccaggcctttttcttaaccccggagtgaccagaaaggatagaaagtagttctttctggattagtgttatatctccctctcaactagttctccccttccatcccctcatccctgcccctgccatctagactagggtccagatgagagacttctgagtgatggtagccataggattatcaacatccattgcctatgagtattaatggtgattgtctgtgggtattgatagttaattgtctgtgagtacctgacagcaacgggttatggctattgatgacaattggtaccttcagtgcccaagcatagccagattgtagcattgctccccgtactgctcctgggacaaatgctccttagagctgtaagaaggcctttgaaggtcctcagagactccaagcagatgcgggtcagtcaggtctgaaccaaagtactctaactgcactgactaatcgctccttcattacccttaaaatttaattactatatgtggatagaaagatatcgacaccatgatacaccacgagctgcgaatattacagtatagacacacatcttgtggaccacacaggtcacctcagggcccccatatgtttcaagaaaattacccgatcgcacaaatagcttgacacaaatagtgcgttcaacccc

SEQ ID NO: 39761 - DNA, 669 bp, Homo Sapiens
tagcaggctgttactggtccggagatttttggatgtttcttaaccaatgaccccaaaactggatcgtgcgatgcgggaaggaggtgagggagcgatgccagctaatgcggaatctgcccttaccgcgggctgccaatggtggagcatgaaggactctggacacatgtgacctgccggggtcctgcttgtcctggtgtgcagccacgagggagccctcgtcaggagctgccatgggccgaagctgcctgccctctgcacgttggattgtttctttggaacaaggggaaaaattatgattttcttattttgctttgacctgtgaatgacaccctggtctctggtgcctggggtgtgctctctgcagtgctgccaggcacatgctggttccttcagcgttaggtgcttggcaccttcagtcttttcctgacgtcatgtatgttcctggtgcctcagataggagacggctgttctgacggctccttgcttccccattcctggagggaagacagacttagccactggtatctgtgggacttcttggaactctgaattgccagaccttgcccagtgctagaggcgacaagtgtgtgaagttgaagaggcttctcccacccgctcagctgcagtggacccgagcgggcagagagagcagagtgcagcaggggccag

SEQ ID NO: 39762 - DNA, 885 bp, Homo Sapiens
agcaggctggtacggtcggagtggtaggatcttagaaagcactgaggaaaaatttgatagattcattgtatacattcagatttgaagacttctgctccgattttcaacatcaccatataaaacaaataatgtttctgcttcttaaacaaagctgtggagaatgtgcaccaccaaaataagggaataagtaaagaaggaagaagaccctgagttcaggaataagaatggatggtttcattgcaaccagtgcttccgaaaagatggggcccatttcttgtcaccagctgtggccatattttctgtaaaaagtgtgtgactctggaaaaatgtgctgttgtggaactgcctgcaagcatctggctctttctgataatctgaagcctcaggagaagatgttttccaaaagtcctgtggagacagcttggcagtatttagtcacatctctcaggtgtggagtttccagaagaaacaaacagatctcctcatcgccttttataagcatagaattacaaagttagaaacagccatgcaggaggcacagcaagcactggtgagccaggacaaagaatcgtcagtcttaaggaaggagaatggagaactgaagaaatttctagccattctaaaggaatctccaagtcggtaccaaggaagcaggtcaatcacacctcgaccagtgggcattacttccccatcacagtcagttaccccacgaccagtttccagcatagcagtcaaagtggtcagtcggtccctcctcagcgggaatctattccttatagagaggctggtttggtagcttgggacaaggaggcagaggtctgcagggcaaggagaactccccaggagactctttataatgaacttcatctggctctctggacgggg

SEQ ID NO: 39763 - DNA, 1005 bp, Homo Sapiens
tgagccaccgcacccggcgccctgtagcctcttgatgtttgactcccctgagaagagcaacagaagaaagtcaaaatgcctttttgctaggcttcctgccatctttaccaagttgagattatccgggttctggcattaacagagtttgaggaaagcgggtcaagtctaccgcgccctaaccttggaccccgcctgcaggctgactttcgagtcacacgccagagcacggcgacccctaaggtcgcagcccggcttcgcaaggcacctccttctaacgcgtcggtcgaactcgcgcgcccgcgagcagccggactacatctcccaggaagctgtgcgccgtccagctgtcctgcccttggtcgcgaaggactacattacccggtgatatcttgcgggaggcggttgccagacctcaagcgcacaaccattggtccagcgtctggcggggagctgcacggtgattggccaggagcccgccagtttcgtccgagctcagtagagtttgctgttaagactgcgcgaggagctaaagagagcgggagagcgcggagccggggccgaacccgcgagccgtctgatacctgctggaccattgtgttggccagaggcaggggatggttggtaatgaaccccaaacaagatgggcaggaataacaccaagttccaggtggccgtggctgaggctggtctggaacttgttacatcggcgctgatcaagcctttcgagtgatacaaaaatcccgatttctcagcgttcttgacagtagcgcccgttatctgcagatgacccccacgccaaaggtccagtgcatcctccagggcacatgggaagaatcttcaggaggagagggccaccaggtttgtggaacggaccggtccgaggagaatttctccaaaggatagtaggcacaacatgtgcatggaagcgtgacagagtgtccacaagcagtgtacaaccgggaatcaatccatgtcttgttgccgagtagatataagacgccacag

SEQ ID NO: 39764 - DNA, 444 bp, Homo Sapiens
ggcggtacggcccggagtaagggatattaagggatatgatactaaaatagtaatataagcaaggtgccggtgtacaagcggtgatcaggtcttttcagcacttgagcatttactggctcatttagtcttcctttgtagcgcatggtgggaggaaaaagtgcatgcatcattccgttcactcgttctcctttttcccggcacaaaaggcatcaagcttcgggacagtaagggggtagggcagctaaccatgcttctgtagtgacaagtgcacaggatagagtgggaacgcaagtgcaaagatcaccattaggagagagtagaagctatgaggaagagacatcgcagctagatcacggcgtcaaaagataataagtgcggccgcgaatggcagcagaagacaaaacccacacatgcataggagtctacaggacagtatgaagagtg

SEQ ID NO: 39765 - DNA, 1025 bp, Homo Sapiens
gatatcccgggatattttttactaatgaatatttaatattccttattgaataaatgctgtaacttgtttgctatggaacttattcttaaagttctagttaaaaataatttttccacatgcatgaaaatatgtattaatcagaggtggcttaattacattgaaattgcttttttgttgtgttagccactgatgtaactcatgtttgtgtatgacataatgcctgttactcagagtttatattgtccttcagtctatagttttaagatcaaaaggtcggggtaatgtgatacttttggatcttacttagttatacttttttataaatgacactagaaaaactacatgtattggttatatagctagaagatgtgccacactttccaagtgtcatgatacacatcatgtcaccattcaggttcacacagcaatgtgtgtttcataatgcaccttctaacctggtcatgacgatattacttgcacgatgtgtacctttgactcgtctcgcgttcactcctgtacctctttctgccagtctccgcgtcgtcgttcttgtgttctcccactctacgctctcgttcttacgtccggtccctctcctcacatcacttctctccctcctcgaccaatctgtcccctccttcgccccttctggcccctctctcttctccgcgggataaccacttcgtccgcggcgccgacgcgcggtctcgctcgccaccctcctctgcccccgattcgagtctcgcgctcgtcgttccagcgagcgcccttcaccccatccctcgcgaaacctctgtcgttcttctttcgcgcggtccccttgaccgatgtccgcctccaccgacacagtcgacgctgccctctgctcatcgcctttctcctcttgtgcgtccggatgcgccttccatgctacctttcgcagtcttttcctcgcccgcccgctccctctgatggcctcacttcccccgcctctcccttcgtctcttccgcgcccctgtcgtcaccactcccgactgcctcgtctg

SEQ ID NO: 39766 - DNA, 870 bp, Homo Sapiens
tggtacgctccggattacgggatcgcttctccccagcccctcctgtgagctctgggagctacagaataaggacactccggggccccaagccagccccagcttgctcgggagcctgggtttccccctccgtccccatcaccgcgagggtctgtgcatgggaatctgctccagaggctccctcaggcgccgcgccgcggggatacgcctttcaccgccccagcagattggagcgctgagtcgaagtcctgattccacgataggcggatgaagccctaacgctgaaattctttcctctaggtctttggcagcggctggggccaaagcccgggcaagaccaacgccttcggcacccggactcaggctccgtcctctctgccagcgtgcggctacaatgactcgacatggcaggtgggcaagcacagcacgccccaacagacatgctttatttaatatgtactaaaaatacagcaggcctgtgaaacccacaggtgcaattgcttaaaatgaggctaaggtagacgtgtgaatggttaataatgagttgattaaaatattcagaaatcatctactggagacgggcaaactgcaaaatggtagcatgggagcaactgatgttcgacgaaagcccaggctccggcaagaccgtgggttctgaatatacacatgcgcacataatgggtatgaataaacctttcttcacaaaaaccagatcaagtcaaggcagttattagctgtgggcagggtgccacggctggctgctacagtccaccacgcgagttcagcccgagccctgtacatgcagcccaagcctggaaagtgccagggcactggcacaggagccacggccaagcaccagtaccagcaggctcc

SEQ ID NO: 39767 - DNA, 1009 bp, Homo Sapiens
cgcgcttcggccggcgccttttcccaggactcgccaacccctcgcacccccgcgctcccaggtccccgcgtcccggcgccgccggccctggagctgcccggaagtctcggttccgccgccgggctcgccagggaagccctggggccgccgggacctcggcccgttcctccgtgacccgagaagcctgcacgcacgggctgtcacctccgagatgctgctagctgccgctcgccggtcaccgccaccctcgggtcctccttctccgtgtagagtccatgagacccatcagcacccacctatgatggaacccgcgaatgtatcgacacatgaccgtgcctaaaggatctctgatctccatgatacatacacaacgctcgtcccaaatggtaccacccacgcaacgccaggatggaaagcagccatcaacgcaagcgcgcacctgcgaatccacatacactcagtacacccaaacacccctcctactcactaccatgaaacagaaaccactacaacactaacaacacgaattacaactcaccatctgcttgcgaccaccgcaactgcacacctacacgagcccccacaaacgccaacaaacaagacaactaggccgccatgccacacaaaatccaccccacacacccatatccgcactacacaaacaccctagacccccgacacccaagtacgccttcccacgcgcaaccacccatctaaccaccacacccaacaactccagacaaccctcaccagataccccaacaatacaaggacttatagaagaccacccgccccccactcacccactacgcacagcaaaacgccgcaacaaaccaacgtcaccacgcacgaccccactcaaacaacccacacaaagacacaccagcgagtggagaagaccaatcgataacacgaccaaccagacgaccatatacagacacatacaaaacacgaccagccaccacagcagcaaaacacttgccgacgggtccccgctaccaagccagca

SEQ ID NO: 39768 - DNA, 946 bp, Homo Sapiens
accgggcatgggagcgtctgaggagtgcgcggtgccgctgctgtggctcgggacgccgagcgcgccgggcggagcccctggacgaggcccaccggagccgtcggcccgacccagcgcccgatgtcctcaaaatggaggcatgctgtgggtgctgtgctggcgtgtaagaaagctggtgctgtgggcgcggtgagtagggggccctgtgtgctgtgagtgcaggtgtgcggggagtggcggctaggcttgtctcactgcatccgtggctgtctgtgcctgtgctggggttccttctctcactgctcctctgcccagttcttcctgctgtaccgcagacagcccgatgccgccggctggaccgaggcctgccgctgcgggcgaggggcttcctgctacatcaatgccagtgccggtgcctgattcctaaggggagtaccttttatggcggcggccggggatgagggagaccctccggagacggcctcctgagtgggcgtgccgctaaccaataacccgactgaacaaccagtcgtaaacacactgagccagtcacgaagcacacgaagcacgaactagtgacaacggagcggaaaacgcaccagagatgacgtgacacccatagatatcacatgaaacggcagaagaccgaaaaacaagagaggagaaacacgaaagacacgggtgcaccccacgcaggacccagcgcggcgggaccgagcgggcagaagagcgacgacgatgcacgagacaagaagcagagaggagcgagcgaccggacgcggacaggcaggtgacacgggaagtagcggcgcgggacagaggggagacacagggccggcagcgacggcggaggacagacagcagcggcacgaccgcgggaagacagcgagggcgcgggggaaggccacagggcccgacggcggcgcaacccggaaggaggaccagg

SEQ ID NO: 39769 - DNA, 774 bp, Homo Sapiens
ccaggctgtacagccctgggtacgggattacaagcatgaagaatggcagatgaacggaaagacgaagcaaaggcacctcagggggctcagcaccgctaacagaggcatctgcacactcacatccacctgagattaaggatcaaggcggagcagggaaggacttgtccgaagcgccaatggattcccatacagggaggatgaagagggtgccttggagagcatgggtcacagggcacctattcaaataccaaagagaatgggatcaacggagagctgacctcagctgacagagaaacagcagaggaggtgtctgcaaggatagttcaagtagtcactgctgaggctgtagcagtcctgaaaggtgaacaagagaaagaagctcaacataaagaccagactgcagctctgcctttagcagctgaagaaacagctaatctgcctccttctccacccccatcacctgcctcagaacagactgtcacagtggaggaagcagcaggtggggaatcagctctggctcccagtgtatttaaacaggcaaaggacaaagtctctgacggagtaaccaagagcccagaaaagcgctcttctctcccaagaccttcctccattctccctcctcggcgaggtgtgtcaggagacagagatgagaattccttctctctcaacagttctatctcttcttcaggcacggcggaccaccaggtcagagcccaattcgcagagcagggaagagtggtacctcaacacccatacccctgggtctactgccat

SEQ ID NO: 39770 - DNA, 736 bp, Homo Sapiens
cggctggtacgcgtcgggtacgggatgcagtgtgtggaggtgagctccgggattgcggcattcccgcttctgctggttgtgatgctgcaggctgcggcgtcagccctcgctcgcattggtggcgctgaggtgccggggcagcaagtgacatgtcgtcgggcctccgcgccgctgacttcccccgctggaagcgccacatctcggagcaactgaggcgccgggaccggctgcagagacaggcgttcgaggagatcatcctgcagtataacaaattgctggaaaagtcagatcttcattcagtgttggcccagaaactacaggctgaaaagcatgacgtaccaaacaggcacgagataagtcccggacatgatggcacatggaatgacaatcagctacaagaaatggcccaactgaggattaagcaccaagaggaactgactgaattacacaagaaacgtggggagttagctcaactggtgattgacctgaataaccaaatgcagcggaaggacagggagatgcagatgaatgaagcaaaaattgcagaatgtttgcagactatctctgacctggagacggagtgcctagacctgcgcactaagctttgtgaccttgaaagagccaaccagaccctgaaggatgaatatgatgccctgcagatcacttttactgccttggagggaaaactgaggaaaactacggaagagaaccaggagctggtcaccagatggatggc

SEQ ID NO: 39771 - DNA, 699 bp, Homo Sapiens
ggatgtcaagaggctagaggagctggagcggaccgctgagctatacaaagggatgacggaacacaccaagaacctcctacgggccttttatgagctgtcgcagactcaccgggcctttggggacgtgttctccgtgatcggggtgcgggagccccagccagctgcgagcgaggctttggtgaagttcgccgatgcccaccgcagcatcgagaagttcggcattcggcttctgaaaaccatcaagccgatgctgacggatctgaacacgtacctcaacaaagccatcccggacactcgcctcaccatcaagaagtacctggacgtgaagtttgagtacctgtcgtactgcctgaaggtgaaggagatggatgacgaggaatacagctgcattgccctaggcgagcccctttaccgggtgagcaccggcaactatgagtaccgcctgatcctgcgctgccgccaggaggcgcgcgcccgcttctcccagatgcgcaaggatgtgctggagaagatggagctgctggaccagaagcacgtccaggacatcgtgttccagctgcagcgcctcgtgtccaccatgtccaagtactacaacgactgctacgcagtgctgcgggatgccgacgtcttccccatcgaggtagacctggcgcacaccacattggcctatggcctcaaacaggaggagttcacagatgg

SEQ ID NO: 39772 - DNA, 676 bp, Homo Sapiens
gatgtggatagacatgaacgagccttccaacttcatcagggctctgaggacggctgcccggacaatgagctggagaacccaccctacgtgcctggggtggttggggggaccctccaggcggccaccatctgtgcctccagccaccagtttctctccacacactacaacctgcacaacctctacggcctgaccgaagccatcgcctcccacagggcgctggtgaaggctcgggggacacgcccctttgtgatctcccgctcgacctttgctggccacggccgatacgccggccactggacgggggacgtgtggagctcctgggagcagctcgcctcctccgtgccagaaatcctgcagtttaacctgctgggggtgcctctggtcggggccgacgtctgcggcttcctgggcaacacctcagaggagctgtgtgtgcgctggacccagctgggggccttctaccccttcatgcggaaccacaacagcctgctcagtctgccccaggagccgtacagcttcagcgagccggcccagcaggccatgaggaaggccctcaccctgcgctacgcactcctcccccacctctacacactgttccaccaggcccacgtcgcgggggagaccgtggaccggccctcttcctggagttccccaaggactctagcacctggactgt

SEQ ID NO: 39773 - DNA, 625 bp, Homo Sapiens
tatggcgcagagaggaggcgcggctttctggggctcagccctagggctacagacccagggggcggagatgctcgcggccgggccacccaccagagccaggcaaccggcgcttccaggcgagctccgcggggccgaggtgccgggagaagcggccccgggcgcccgcgcgctgcccgacctgggtaacaggcaaagcggagccccggggtcgaagtcctaaagttactaatcccgcggagggggagagagcgtgcctcgggccgcccggggcggtcatttgagcgtgtttacttaaagactttgcaagcagagcgcgcgcgaaatcgtcggatttccagcgaggcagcaaatatttgcaggcaggagaaagaagcggagccgagccgagccgccgagtccctccccccggagccccggagccccggcgcctgcctgggcggtcccggccgcgcagacagaaaagaagccgggattctgcggggctggggggcggggagcgacaccaaaggccagaaactgcagcacggccgaggccctggcgagctgggcctgggggaggagaagtcccttcccattccagctcgatcaatcttgctgggctgcgatcggtcaataaaaaacggtg

SEQ ID NO: 39774 - DNA, 748 bp, Homo Sapiens
tcagatgcgggaaagaactacccacttcaggtctctttgactcaccaggactaccagcagcgggagggagctacccatgtcgggtctccttgactcatcaggacaacctgcctatggaaaggagctatccactgtcagtctcctctgctgagagctggacactcgggatgacatgcctgcggtacccactttgggtctcctgagagctgtcgctcaatgaagcttctctccaccttactcactctccagttgtctgtgtacgtcattcttcctggatgcaggacaagaacatgggacctgctgaatggcgtgactgaaaaggctgtaacacaaacagggctgaaactttgccctcaaccccctggcccaacacactgtgggcaatgagaaggagagaagagctgctgcccttcaagggacctcagacctaggggctccccaagacagggctgtgacatcctctttgtggctctgtcgttcctggacatctccaagcttctgggtgccactgcattcccctcatccagacgtggatgcccacagtggaagcctcgtgtagtacatctggttcagctgcagactctgtcagcagctgtgcgggtgcctggaactgcccacctgtagcagctggcacacctggctatgcacagtgggctggaccctgagcattgtgcaacaaacccctcactgttctgtgactggcttgcccattgggaggcatgggatctgggcccagcagcacaagcca

SEQ ID NO: 39775 - DNA, 876 bp, Homo Sapiens
taaggatctgggctggagtgtggaagagccatccagagtgagtgcctggggcagagtgagagcaggaggagcgggcaggtggcggagcgggggtcggtggtggatggcccagccctggaaagccgaggtgaaggttacgagtccctgaggatctgtgggtgtgagccagccgcgtggccctgggcaacggcgctgccggacagaagtggcggttgctgacgcctggaaattcccctgaaggtggagcaccacccaacgctcctgggtctatatattcgttatggaaggttcacgaagattgccatcgtcgtcatctagtaggcgttgtgatgcacagtacgacgataacgtagacttggacacataacgcgttacttagactggtatcaaagtgaaaagaaggaaagtataagaccgatcttaggcatacactagacgcaagagtgatagggttagcaaaccaacagagtatcactagaggaagagacacacacaaggaagagagatgcacgagccagaaacaaagaaaagcacgagtagaagaacagataaagggcaacaagaacagcagtcgagtgggcaacaaacgggaagacgtagatgggcaacgccacggaagcagaggatcagtacgagcgatagagaacacagggagaacaaatggggcgatgcgcgacaacaatagcagagaggaaagaagacgacatcgcaaaccaagagtagaagtagggagaagacgtaagcaaacgaacgcaacgaacgggcaccgacgagagaaaccccagtgggggcgaggacgaaggagcgagagcgaagcgggacggaagggcaagcacacgcactgaggggaccggggcaacgagagcagaaggcacc

SEQ ID NO: 39776 - DNA, 1065 bp, Homo Sapiens
gggtccggaattcccgggatcagagttgcaacctcagcctcgctatggctcccagcagcccccggcccgcgctgcccgcactcctggtcctgctcggggctctgttcccaggacctggcaatgcccagacatctgtgtccccctcaaaagtcatcctgccccggggaggctccgtgctggtgacatgcagcacctcctgtgaccagcccaagttgttgggcatagagaccccgttgcctaaaaaggagttgctcctgcctgggaacaaccggaaggtgtatgaactgagcaatgtgcaagaagatagccaaccaatgtgctattcaaactgccctgatgggcagtcaacagctaaaaccttcctcaccgtgtactggactccagaacgggtggaactggcacccctcccctcttggcagccagtgggcaagaaccttaccctacgctgccaggtggagggtggggcaccccgggccaacctcaccgtggtgctgctccgtggggagaaggagctgaaacgggagccagctgtgggggagcccgctgaggtcacgaccacggtgctggtgaggagagatcaccatggagccaatttctcgtgccgcactgaactggacctgcggccccaagggctggagctgtttgagaacacctcggccccctaccagctccagacctttgtcctgccagcgactcccccacaacttgtcagcccccgggtcctagaggtggacacgcaggggaccgtggtctgttccctggacgggctgttcccagtctcggaggcccaggtccaactggcacctgggggaaccagaaggttgaaccccacagtcacctatggcaacgactccttctcggccaaggcctcagtcagtgtgaccgcaaaggaccagggcacccaaccggctgaacttggggcagtaaaaactggggggaaccagaagccgggagaaccttgccagaaccgggaaccattttacaaggtttttccgggggcccaaacgttgaattcttgaacgcaaaacccagaaggttttcacaaaaggggcacctcagaggggg

SEQ ID NO: 39777 - DNA, 1075 bp, Homo Sapiens
ctgcacttagggatccctccctcactgccccggtactccaagcttctcggccccgaccttcgccctgggaggttctggccaggtgccgggaggggcgctgtgtcgagggcgatccccccaaagcagcgtcccgtgctaaagggatcacatgcagtggtctaaggaagaagaagcagcagccagaaaaaaagtaaaagaaaactcagctgtgcgagtccttctggaagagcaagttaagtatgagagagaagctagtaaatactgggacacattttacaagattcataagaataagtttttcaaggatcgtaattggctgttgagggaatttcctgaaattcttccagttgatcaaaaacctgaagagaaggcgagagaatcatcatgggatcatgtaaaaactagtgctacaaatcgtttctcaagaatgcactgtcctactgtgcctgatgaaaaaaatcattatgagaaaagttctggttcttcagaaggtcaaagcaaaacagaatctgatttttccaacctagactctgaaaaacacaaaaaaggacctatggagactggattgtttcctggtagcaatgccactttcaggatactagaggttggttgtggagctggaaatagtgtgtttccaattttgaacactttggagaactctccggagtcctttctgtattgttgtgattttgcttctggagctgtggagctcgtaaagtcccactcgtcctacagagcaacccaagtgttttgccttttgttcatgatgtaatgggatgatggcttaccttaaccctttttccagatggggatcctgggatggacattccccccttggccttggggcctctccttctattcatccctgacagggatgcaagggtggtgtaaacccgaattgtccaaagttactggaaaccttgggcggaagggcttgtttatttctcagccctatggcacaaacaatcgattacaacttccccttttggtgtttcagacaagggacactttgttttttctggaaaccatttttatctgtcctccaaggcacattgggtatccacagaatactata

SEQ ID NO: 39778 - DNA, 1069 bp, Homo Sapiens
tcccgggatggcctccacagaggatctcagactttccctacaccgcagccctgcccagtgttaatagctaacatttatagggtgcttaaggcaggcagcccctagaacaagtcctccctaaggttgttcatttaatcctatcatcacctgagacaggtgctgtcattatccccatttttcagacaagttggctgaggcttagaggttaaatcactcaccctgggggccaggcgctggcattggtacagctgggactgaagccagagccagcttgtacatgtgaccactgtcccacacagccaccttccactcttgattctcatctgctacagggacaggaaactgaagctcagaacaaagaaaagcacagacaccttctgcagaaggggaagttgggaggggagggagcaacgtctgggtcttaggatcctgggaggtgagcatcactcgagggggctggacaaactctggaagcagatggataaagccaaccagctttgaagctgagtgtcccctaagaccctagactacaggtatctcccacatccgcccattctcggtttccctgaggtgggggataaggatggcccctgggccaccaacctaaggttctagataatactggcactgtactgccaactcctccagtatcaccattacccctctgggtgagagtatccacagcccctctgccccttgcatactgaccccggctccatcttctaggtaaagccacatatgtttctaagctgggtggccacatggaagtggggaaggtactagaagccaaaaggagatctggatgcccaaggcagccatagcgaaggcacctgcaaattttcctgacaaacaggggaaaaaggaagaaccccacagccccaaaaattgtgccggcaaaccgggaagaggctaacgggttaatcaaccaccagttttccctgggaaagcggcccccaacccaaatgaaagggggaaggcccggccttaaaaagattgcctttccactggcccccggaaagggggccccacacctttggggcgggcgggggctttcccccctcactggggc

SEQ ID NO: 39779 - DNA, 752 bp, Homo Sapiens
gggtccggaattcccgggatcactggcctccctgaccgcttgcttccttccggacctctgggttcagggcgggggcggagggatccttgatttccctgataacttgatgttcttccctccctcgccagccaacaatagaggcttagagatctgtaatttctctgtgagaaagtctgaaggggccaggcctggtctctgctcccttctacccgccttgggttaggactgtccggcagttgcctgcttttggctgctggcaggagagaagcagggtgggctgctggcagtgcaggagctggagtgagggccatcctctttctgctcctcgacacacgcaagccgctctcagcagttccctcgactggccagtcggggtattgatctgagccagcatcccccaagacttgaatggcttgagtgggactgcgttgaagggcactgtgtggcccccttccaaatctcagcttggagccagctgagcaggctttgctttattattattttttaagcctactgcagtgggtctgttgccaattttaattttttattgtcccaggagctccctctagtggtcaaggtagcaaaatgtgcccaaggactagaacttgggtccctctgccttgcctggaggcagaaggagggggctctgggtttgactgggattgtggtccccaggggtccgtggcctttaggctcttctctcttttctgtttcccccacctgtgttacagtcttaaaaatactgtacataa

SEQ ID NO: 39780 - DNA, 1024 bp, Homo Sapiens
tctcgggatcgccctggactcccagtcctagcgagaagaattcctctttcacgtggtctgtgccaagctctggctacggggcagtgacagcaagcaaacacagcaatagcccaccgctggtgacaccaccccagtcgcccgtgtccccgcagccgccagccataactcaggtccatcggcagggggagcgtcgcagggagctggtgaggtcgcagacgctgccccgcacctcggaggcgcaggcccggaaagcattgtttgagaagtgggagcaggaaacggcggccggcaaggggaaaggcgaggcccgggccaggctgaagcggtcgcagagcttcggcgtggccagcgccagcagcatcaagcagatcctgctcgagtggtgccgcagcaagacgctgggctaccagcacgtggacctgcagaacttctcctccagctggagcgacggcatggccttctgcgccctggtacactccttcttccccgatgcctttgactacaactccctgagccccacgcagaggcagaagaacttcgagctggctttcaccatggtcgagaatctggccaactgtgagcgcctcatcgaagtggaggacatgatggtgatgggccgcaagccggaccccatgtgtgtcttcacctacgtccagtcgctgtacaaccacctgcgtcgcttcgagtaaagcccctgagcctggattgcccaagagcagccccagggagaggccgggggtccgccttgcgatttcccagcccgggatgcccccaggaagcctttgccgttttggtgtgagccgcgcttgtttggttctgtggcaatgtggaccggcaactctccctttccgagccccacgcttgggttactggatataaaagtaactggttgaccttgtggggtccgaacaggcactgtaatcccagccccagagggctttggggaggaaaaggggaaaaaatttatttgaaaggagaggaggggaacatttgggtggccttaagcaaaatgaattctttccct

SEQ ID NO: 39781 - DNA, 1073 bp, Homo Sapiens
gccggaatttccgggatcaaggaccgccgtgggcacgtgtgtgtccccagcgcagccaatcggcttccgaagtaggtgagttgctgcctgaagagaaaagacaaactccagtatctttcattccattggccagacgcgccattccccaagtgagttctgttctccaaccaaagtgctggattccaagggactggaagggaaagtccctaaaaatcacgagttcaggcgtctgagacttggtgggaacggaccttcctcttaggtgagttactctttggttctggggctgacctggagttttgccaggattcattggccgcagcaggatgctggtggggacagggtaaataaaatctgcactcctgcgggcttttattgttgaaaggggcactgacgctctccctggaaacttaaaaagaacagccaagtgaacggatgtctttcttttgcagtgcccaagcctgttctaatttttaaaaactgatgtctattaacacccaatgttaactttatgaaaatggttcctaaggagattcacatctctgtgtccgaattctgtgtgcagcaaacatcatctcaagtgcgttttcccaactacgcttctttccaggataaaatactctaagtgacaaatgttgagtacattatcaggtatgttcactattgtgagaactgaagccatctacactcacatagcttgccaactacattaacctgacttcttattccattattttcatcaacatacatttactatttcaagaaactttttgccagggaccgggaaagttgcaaatatcttttattgctttaatccagtatcttcctttcaagatcccaccccctctttcaatggaaaaacatcaaagaaacaggtttacatttctaaggacttttgaaactttataccttcaaaatccctagcccttggtttttatcctaccaaatccttaaaactggtttaccccgtaagcttgacttccaatttctaaacccaatttcccccctccctttaaaatattttagaacctttacacatgggggggacctttcaaaaaaatctttccaataac

SEQ ID NO: 39782 - DNA, 663 bp, Homo Sapiens
cggtccggaattcccgggatgcagccatcctggtgtctctgccagcatcttggggaacgctgtgatggtaaaatatctgtctctcctctgggaatcagggcagccctgagaagtgagcagttccctttacagatggataattgtttgtgtaagaccaaccagataaagtccaaactgtgtagaacacacgtgtgcctcacacatagccatctgagtaaaatattttttccaatgtatatttataattagaaatgacagatttataatatagacttcagtaagttgggcacagctgtcactttcgtggtatcaataaaaggctagaaaccttgggtgtccttggcaacctagcctttgacattgatgtttttccatacgattttcttcatttgggttggaataaaaatgcatttttattcacaaggcacagacagataagaatatcataagcagggaagtgtctccaaaggtcaggacatatgtttttctgttgagtgctatatgtggaggtcattgcaagttccctgatatgagtatggcttcgcttgctacattgtgcctattaaagtaaaattttacacgagcctcgcatttctaagattagtgttcctgaatgaaatgttaagaaaacattaaaagattatctcttttttaagatggagg

SEQ ID NO: 39783 - DNA, 1042 bp, Homo Sapiens
gggtccggaattcccgggatatcaattatgtgaagggacatgcagacaccccagcttttgagggtgctgggggtaggactgaggcagccccactgggaaccagactgcagcctggcccatggctgttttcccaaggatcagttcctggagggaagggctctggccctgactccgctgtgtcccgagcacacgtgctgaccgcagcccgccgccctgtagttcttggctgggtctggaggtgtctgtggagcaccctgccctcaccacaggagcgtgagccacttctgcagtccaagctgaacatgggaaacaacctgaaaagcaggcaggcctcccggtcagggagcctctgctgtgctggcttcccatgaccacctcctcctgctgaaagattactgcttgaatctggagcagattgcgggtttataaaactgctttttatctgagaacaaacgggtttggaaattagtcgtcttttttccccactcccagagctgctcaaatcattccaccggccccctcggcttgggacagggtagtgtaactcccgatcccagggcctagccctgacacaggtggcttcccgtatcccggtgggaaaacgccctgccaccagcgggcttgagctggcctgtgtccctccactgcctgcaccacccacctccagagtgcagtgctgggcaagggcagctcaagaggacaggaccaggcgcttggcaagacatcagacacaccccacccaaaagcgtggaccccaggccccggcccgtggtacccagcaagtggcactgcagcttccccgctcctgcaggtccagcgtccctcacaggaacaccagggcctggtgctcccggacctttctttcaaacccttccttccacgtgcccactttgggaatgcaaattccagcggaacttagaaccccctccccgggcttgaaacctcggttggcgtaaaaattccgtaggggctgttcttctccgggcctggaaaggggcaacccctccgttgctccttgccgaccccccccaaaacaaacccc

SEQ ID NO: 39784 - DNA, 1001 bp, Homo Sapiens
ggaccggtccggaattcccgggatgtgcagtcacagcttgggctgaccacaaataagtctgaagaaatccattatctttgtaacctgcttataaactatgctacccaaatttgggccgtgaaattttttccgtggcttactttaaaaaacacacctctttttatttgaaataactgtaggttcacaggaagttacaaagacggcctatgtacctttatccagttgctccatcataaaattcccctgtcagaaccaggaatccacattggtacagtgtgtgtggtccagggtcattctgtcacacaggtggactcccacaaccctcactgcaatgatacagaactgtttcctcacccggagggcccttgtgctgcctctttctagtcacacctcctgctttcctctactcttccccagtccctgaaaccacgactctatgattttgtttccatctctgattttgttatttcaagaatgtcatataaatggaatcacacggtatgtgaccttttgagatgggcttttttcatttggcatgatgccttggcttatgcttctctattaagtctcttacactgatcgtccccagataaaagtggattgcattctgatagctcctcaatgatctctgaatgccagtattttatgattcactacatattctatattctgtacgcctttcttaattcaacatagactcttgctaagaatggctttgtgtacccaaacaggatagaaggctttttattacactgctcattcagctctcagtgaccttgcaagaaaggctggaagcccattttatagagggagaaatataaaagtaatttgctcagaccccatagctgttaagtagtagagtggaaatgagacctctggtctgcatagctccaagccttctgctcttttcatgacagcaggctgcagggacaccagtggtacaggtgtatggccattgactttttcattgcactcgagcgtttattaagtaccacttgaat

SEQ ID NO: 39785 - DNA, 966 bp, Homo Sapiens
gggtccggaattcccgggatgtgagaccaggactgagaacagggagaggcgacccgacccccagggcccggtgctcaggacagcacacagagccgctgaaaacgactgaagagagcaagggatttcctgggacatctggctctggagagtaaaaggccaagctatgatagcaactggtggagtgataactggcctggccgccttgaaaaggcaagactctgccagatcacagcagcatgtcaacctcagcccgtctcctgctacccaagagaagaagcccatcaggcgccggccccgggcagatgttgtggttgttcgtggcaaaatccggctttattccccatctggtttttttcttattttaggagtgctcatctccattataggaattgccatggccgttcttggatattggccccaaaaagaacattttattgatgctgaaacaacactgtcaacaaatgaaactcaggtcattcggaatgaaggcggtgtggtggttcgcttctttgagcagcatttgcattctgataagatgaaaatgcttggcccgttcaccatggggattggcattttcattttcatttgtgctaatgccattcttcatgaaaaccgtgacaaagagaccaaaatcatacacatgagggatatctattccacagtcattgacattcacacgctaagaatcaaggagcaaaggccaatgaacggaatgtacactggtttgatgggagaaaacagaagtaaaacagaatgggagctcctgtgccctgagattggcagcaaatacgatcgcctctttctcgggttttcggagcagttttcgaatggacagctccggggagggagaatgaacttatggtaaatgaaagtaaaaagttctggggcatcctatgccccctttgcctcttctgacagctccggggggcgggccttgggccctctatcccacctcctttccaagag

SEQ ID NO: 39786 - DNA, 392 bp, Homo Sapiens
ggtaccggtccggaattcccgggatcagagggacagcgcccagagcccggatagagagacacggcctcactggctcaggacagggggcacagccaccagggtccccttccccctcctcagctccctccctggcccctttaagaaagagctgatcctctcctctcttgagttaacccctgattgtccaggtggcccctgggctctggccctggtgggcggaggcaaagggggagccaggggcggagaaagggttgcccaagtctgggagtgagggaaggaggcaggggtgctgagaaggcggctgctgggcagagccggtggcaagggcctcccctgccgctgtgccaggcaggcagtgccaaatccggggagcctggcctttgggggggagg

SEQ ID NO: 39787 - DNA, 1021 bp, Homo Sapiens
tggaccggtccggaattcccgggatggtcaccaactggatgctcagttgaggggagatggaaccctgagcagcccatgtacatggaagatctttattgcagagatcttcaaaccaggatcttctaagggtgtgaggatacaggcgtcaaagaccccgtgctgagacagctccataacaacatgcagatatttggcaatgagggttcagaagaggacttgctgtggagaagagagaaaagagatgggaagactctgtgaatgaatagagaacactctgcaagcatcccagttcctttggttgccctgcagtctgcaggtaccaggagaaatcaaaagccgcctggaagggctttctgtctgtatggagtcaaggcagtgtcttcaaatctgtgctttctaaaacaaagaaataaccttgatgaaacaaattttccccagaggaaggggagagcccacagtgagctggtaaagaagatgcctggagcaggcagcatcctcaaatggaaggtaattgccctcaaatcacttaactaggatgacctactttgctttcctgtatagccaggtctgttatcagacccttatcttgggaggcatcgtgccagagcctggggcaagaaagggctgctatccaggaatgcaggtgaaattatagctattagccctgtcttagagtgtgaggaaaatgtgcccccctacccctggctaagtttgggttcccatgtcataaactgcctccctctctgatagctctgcataaacatcccaggaactcaaagtaacatttgatttcccaaagagaacatttgcatttgtaactgtcagaaataggagagatcatcaaagctaaatgaattgggctataaacagtttgaaatatgtctttaaattttaaaaacatattttttgtttgtttgggggagagaggatcatttagactcaccaaccaaacggaaaactgtgagtgccattttgagacagaactacctggtccttccccttcatactttctgctaccccg

SEQ ID NO: 39788 - DNA, 1143 bp, Homo Sapiens
ccggaattcccgggatcaagggccccggcgccgggggcggcggggaaccccaaacgcaaccgggtctggagggatccccgcgccgagccagccgccgtcaccgcctccgcgccgcccctgcgggcttggcaggcgcccggcgcgcccgcactgcgcccggacgccggctcccgcggtcccaccgtgagctcgccggcccgtcacccgctcgccatgcaaccgccgccggcatcacgcgcgtaggcgcccgccgcagggcatgctgcccctgctctccgcgctccaggccgccgcctgccagctgccgcccgtccgcggcggggccgcggactcgaccggcctcatcggggtgacctccaatgcttcaatcaaggcgtccaccgcggacaataccatcaccccgcggctgctggaatcggccgcccccgggcccccctaccacccgggccctgacgaagcagagaccaccaaaaataccgtgcagtagttccaggaagctgagaatctgatagatcaggtggccagcccaggcgccagaaggaatttaaggcgtaaacatgagaggccgaaaagccacggactgaaattacacagaaagctgactgtaccaactggttgggcaacaaattcccaggaagaaaaacgtagaactaagctgaccatataggcagggagagataacattgaagcgggaaggagagaatgccaactcaccaacggcaggacgcagatttgaaaacagaaggatggggtcccaaacgtgggatccaactaccgatcctggagaacttgcgggggaatagagggcctcgccaggcaacgcgggggaggcagaaccttcccaccctgaaatagagagcccccggcgggacacagagaagacacgccccgcgtaaagtcggtgagacaaaattacctggtattctcgacgtaggtgctcaaaataagagaaaaaaatatataggcccttctcctccgtgtcgcgtagacccgagcaaagctctagagacgactgcttcataatacaaaataatacaaagaactcgtcgcttcaaggaattctagagaggccgcgaagaaaggccgttaaaagaggagtcgcaacacaacctcacgagaagttgcgtccgcaacatcacgtcg

SEQ ID NO: 39789 - DNA, 977 bp, Homo Sapiens
aagctgacgggacgcgaggctgtgagaaactgggcgagtgtgcgaggacgcccggccagcctgcgggagccgcagtcggcggaggagaaaggaggcggctcccggtatcccgaccccctccccctcctctccttcccccacttccagccgcccggcggcccgcgcttcctcgaaggccccagcccggctcagtcggccgagagcgagggaggagccccccgacccagacgttacatccaagaggaaataatccaggcaaggaagcacaagctgatcaagatgtgtagttctgtggctgccaagttgtggtttttgacagatcgtcgcatcagggaagactatcctcaaaaagagattttacgagcattgaaggccaaatgttgtgaggaggaactggactttagggctgtggtgatggatgaggtggtgctgaccatccaacaagggaacctgggtctgggggatcatgggaaacttatccctggctaccccaaagggggggaatccaaaagacccacccccttgggggcaaagggtaggggcatcccgggtttgcccctcctaaaaaaaaggggaattgccgttaatgaaacccaacccccacccacccgggacggggggtaaaaagatctgggggattttcaaaagatggcggggcccaggggatctccccggccgaaaacttttccccttagggggggcccagaaaatttttgcttaaaaaggacatctttcccgcggaacaccccggaggccccccccgggggaacaacaaagaaatcacgggggcgccacgaggaagaaaaccctgttacctggcctgcgccagaaatgacgccctcttgcgccggagcagaaacgccctcttcatctgactacgaaaaagaccgcgccctgctgtttgaccaacaagattagaactaaaaatctctcccccgccgcggggcaagatcgcgcgcggtaacaacccggagtag

SEQ ID NO: 39790 - DNA, 1170 bp, Homo Sapiens
aattcccgggatgaagccaccgcgaagcgtgggggaatgaggcgaagaggatacagatcacttggattcagtcgagtttgctttgctccgtgggaactgcaccagagctggaggtctgaaaaagaactgtgtttgatatgcagatatgctagaagactgcctgaaagctgcttcctttgccacttcctgtggaggcctgtctttgccatttgcggtttctttattcttttggttagcatcttgcaaggaggtagtaacatatccagtcgtgaaactgggaaagaccagagctcttgcatcagggaaacatgtcccgtcggaaacagacaaatccaaataaagttcactgggatcaagtatttgctgggctagaagagcaagcccgccaggcgatgatgaaaactgattttcctggagaccttggcagtcagcgacaagctatccaacaactaagagatcaggactccagtagcagtgagttctgcaccttctggtgacagtgagggtgatgaagaggagacgacacaagatgaagtctcttcccacacatcagaggaagatggaggggtggtcaaagtggagaaagagttagaaaatacagaacagcctgttggtgggaacgaagtggtagagcacgaggtcacagggaatttgaattctgaccccttgcttgaactctgccagtgtcccctctgccagctagactgcgggagccgggaagcagttgattgctcacgtgtaccagcacactgcaccagtggtgaacgcccagaactacatgtgtcctgtctgtggccggggccttaactccccgggggtcattgggggcccccaccttctaatcccccttcggagggaaccccgaaccaccctggggtcgcgggcgggaacccccggctcccccgttacgcccatttttaaacccggaacaaccctttctcatagtctcaatccttggctaaccccctcccccattccccaaagaggtgggccctcccccacgagccttgttgcaaacccatattgcctctcttttcccctccaagggtaaccccctccggcacaatctccttttgtggccccccactccttctcgtgtccccacccgccacacgtttttgcagaccccacatatccccctgcccccccaaatgagaccccaactcatac

SEQ ID NO: 39791 - DNA, 1225 bp, Homo Sapiens
ttttttatttctttttcctatccccctatcctcgattttggaccggaccggaattctcgggattgcttgcccggtcacccacctggtgtgtggcagagctgggatgtgaaccacgcaggcaggctgcagccccccacacctagtcctcatgttattctggaggtgttgtgaataagggggctaggcagcggcaatgaactgttagaaggtggggaaatgggtggatggggcgggtcccccagagtctggggtgtcaggggtgtctgggtggggttgtctggcagttacttggatgtctgagcctaagtggaggtcagcactgggctagggtttggggagctgttagtttaacaggactgggcagaatgacactggaggtggaaaggtgagagaaggttctaacaacagaactttggggcatccttctgcacggaaccagtagggaaaagaggagccagtgaagatcgacacggaacagagccagaagactgcacactggggtgggggactccacgccctggcagaatggtggggattggcccaccaagaggtggtgattgggaagtccacaggcactggtcagaggccacctgctgctcctgctcctttgcaagcctctcaggacttgcgaggctcagaatgaatggatctggaacagggcttgcgaacctcacaatgaatggatctggcacagggcctgcgagggctcaaaatgaatggatctgggacacggctttggtaaaactgcccaaggccccctgtggaacccgcgaacctctggccaggtcccccttaagggaccgccgaaaggccgggtctgtcttcccgtccgtcccccattcaatcggaggtccctttggttctctccctgggtcttttcctagggaggccctgtcgcgccgcttggctgtcactttctcttccccccctcggcggttcctcgacagcccccccttccatccccacctcttgccccgttttaaaaccccggtttcccccgtgttgacggtacctcaccccctctagcgcgatcccgcccttttattacaggaaaaccccctctttttttgtcacccggggcgcgcttcccccctgttttttccttttgtcgcgtttcctccccgtaggtccggtccccccgttatccccctcgtcggactcctgtaaagtatacatcgcgcccatccgggattccttcgctcgaatccgtgtgagcgccctggtg

SEQ ID NO: 39792 - DNA, 1082 bp, Homo Sapiens
aattctcgggatcatgaggaaatgtagctgtatgtcctggagggatctacagccagaccagccaactcagcctggttaaaacacctgttgaagaactagtgcaggcgtttggaggacataggacactctggccatatgtctggactgcaatcctgcacagttttgagagggagatgacttgagtggttggcttttatctccacaacaatgtccatgaacaattccaaacagctagtgtctcctgcagctgcgcttctttcaaacacaacctgccagacggaaaaccggctttccgtatttttttcagtaatcttcatgacagtgggaatcttgtcaaacagccttgccatcgccattctcatgaaggcatatcagagatttagacagaagtccaaggcatcgtttctgcttttggccagtggcctggtaatcactgatttctttggccatctcatcaatggagccatagcagtatttgtatatgcttctgataaagaatggatccgctttgaccaatcaaatgtcctttgcagtatttttggtatctgcatggtgttttctggtctgtgcccacttcttctaggcagtgtgatggccattgagcggtgtattggagtcacaaaaccaatatttcattctacgaaaattacatccaaacatgtgaaaatgatgttaagtggtgtgtgcttgtttgctgttttcatagctttgctggccatccttggacatcgagactataaaaattcaggcgtcgaggacctggtgtttctacaacacagaagacctcaaagactgggaagatgattttatcctctacttttttctttttctggggctcttaacccttggcgtttcattggtgtgcaatgcaatcacagggattacccttttaaaagttaaatttaaaagtcagcagcacagacaagggagatctcctcattttgcaaaggggaattccggcttcctggggaaaaggggggcccccggaatttggtggagccccattcttgggtaaaaggggcaaaattgggaataatggaaaatcattctctgggaaactttggatacaacccctttttggt

SEQ ID NO: 39793 - DNA, 1105 bp, Homo Sapiens
tccggaattcccgggattaggtgcccgacattagggactgtcgcagcccggggaattgtccccatctgctggcttaccttgtgggcgtggatcccctctaactttcctaattcccgggcggcccgcgggcctgcggcagattcagctctcaggactccactttcagtttcttccacttctggggcaggctgcttgtcctgccactctcaggccccccaccagacacggcagcaacagctgttcctaagtgttcaactcgctccttcccgcaaatgtagaagctcaaatccctatagcaaattccatattctatgtcattcttaatgcttccgtctctctggttgaatctagattggatacaatcagtgatgcacatttaccagacagaggatgtgcagcgtttactgttgatttctctcttttcctccctatcacctcagtttagttccaggatccacactcctccaccatagtcaggagattcagggaaagttggcagggttcagctttcaagttgacccttgatgaaccatggtcaatcctgttaagaggcgtgaaagccaatcccagccaatgagactggggagaaatcactgaagaacttgtggaaaacagaccctctggataaaagacacgtgtggggaaaaaggggctttttaatgttattctggatgtttcccaaaagtactgctgctgccttgcctccctgacagacactggccttaggatgacatgcggcaggaaggaaggacggatctggggtttttcaagactcactgagatgcacaaggaaacaaccctcaagtagccaactcgttcctgtttgcatgtgtcgactgaaaagaatccaaataaaccaaatataactatttcctagaaggttacaacttgcaggcaagaaagcagccctctacctgagggcataaagcatacttttgaaagagaaaaggtaagtaatttatgctaggtggaaaaggtaggaatatacttattctgtagccatacagggagaagcctatggaaatttctgggagggaaactccgttagagaaacccactgggctttactatgaagaaaattccaaaaccggaggaactgggggtc

SEQ ID NO: 39794 - DNA, 1384 bp, Homo Sapiens
gcggctggtaccggtctggagtcctcgcatgtaggggatacttcccaaaactttttccaagtcaactttggtgtagcaccgttcccttatcgagtccaggactactggttctgtcccccacatgcttgcttcctcccggacgtcctgaacactgcagctagctttctggacggcagacgagttgggagtttctggagcttggaattggggcgggggaggaggtccaagaagtcaagctccggagaggagcttcgggggaagtgcccatgagacgcggccgaggagacggatatgttaagaacactgcgccgaacgtctctctgagattgtatttcggccggaacgaccaagctcctggaagtgctccctgcttcaaagactaatgggctcaggacaagcgggacgctctactagcgccctccaggacatcgcaaaacagcggcgccgggccctgctagagaaacctggctgggaccaagcttaggccgtgcccaaatacgcttgaatgaggtcgggcgcgcatgctcaatacaaactgaccatccggggacggctcccgcccacctcgcaatgcgatactgatccgctatgtactgcctaagtttagagattccaccgggcccggcgccctctcgtgcatacagggagaaaggtagagctggccccgcacgcggcccaccaggcatgtgtttcaagatgcaacagagtcggcgatccgcgcctcgcgtacaaagtgattttaaagatgtttaaacacctcacccctaccttgttgcgatgtggcggacttgggcgtcacggaatgcgacatttactcgcggggacgcggcgcgtatcccaccaccgtttctgaaacacaggaaggaagccgcacgcccccaacatcaaatacactccggcggacataatgcataaaatggggagggacgccacacacgcgccaattgcgagatggatttccagttcacacacgcgctagcaacggaggtgaaatgcaatgaggggatcacacattgaagtgcctgtatacactattgaggggtctgctcgcggacgctcggtctgccactcccacagcgactgagctcccgctgcgcgagatgcacccccgcgtgtccaacgtgacagtgtaatccacagcgcgtcatgtcaaaaaactgtcagactgcggactccccaagcctcgatgcagtggggacacgccagcacaagtccacgtgtctcacgcgacgatgttgaacgcctacaatcgtctattcgccggcccaggctcactcgacggccgaaaaacactctcgtggtggtcgtgtcggatatcgccacctccatacgattatgtggctggtcaatgcactatcgcgccgagaatcccgcgcttcgcccg

SEQ ID NO: 39795 - DNA, 1174 bp, Homo Sapiens
tggaccggtccggaattctacggatgaagactttttgcttgccctatgatgaatgaagaacagtatcaaaaggatggccagctgattgagtgtcgctgctgctatggggaatttccattcgaggagctgacgcagtgcgcagatgctcacttgttctgcaaagagtgtctcatcagatatgcccaagaagcagtctttggatctggaaagttggagctcagctgcatggaaggcagctgcacgtgttcgttcccaaccagtgagctggagaaggtgctcccccagaccatcctgtataagtactatgagcgaaaagccgaggaggaggttgcggcagcctacgccgacgagcttgtcaggtgcccgtcctgtagctttccggctctgttggacagtgatgtgaagaggttcagctgtcctaatcctcactgccgaaaggaaacctgtaggaagtgtcagggactctggaaagaacataatggcctcacctgtgaagagctggctgaaaaagacgacatcaagtaccgtacctctatgaagatgatgagaagcttattgaggaaatccagaaagaggctgaagaggaacagaaaagagagaatggagagaacaccttcaaacgcattggacccccgctggagaaacctgtggagaaggtgcagagggtggaaggccctcccgaggcccgttccgcagaacctggcccaaccccagatgccaccctatggcctttcgggacccaaccccttccccctggcctccccgggggggcctggggttcaaccaactttcccccttaaactgggggggcctatcccccagcccccgtaccgtggcccccttccggcccaaggtgggggggtccaacttattgaaacttcgggcccccattccccattggcccctggggaagcacaaccacggggccaagtgcccctttggggcccccccaacccggcggaaaatcgcgctttctggagggggccaccccaaaccccccatttgagcacgcccagcaaaaagcccccgatttgggagggtaaagaacatgtggagataagcgaggaaaacccttagccccacaaaggagagtggagacactagcagcgcgctgtgcgggttccgaaaactacaagttctcaaaaggggagagaggcacgcgcgtaccgctgct

SEQ ID NO: 39796 - DNA, 1236 bp, Homo Sapiens
aattcctgggatctcggcttcctcctcccccactcaggccccaaaaacgagctcaggggcctgccagaggctccgccgaggcgacgggccgcgcagaactctggcggcggccgtggggctgctggagccgggcctggctgggatgaccgtgaccgtggcccccacgcacgcctagaccggaccccgggcggacgccgcctcctgggaccagattccaccgcagcggcggcgcggccgggagtcgcgcgggaagaaactgactcagcggactccgctgagtccacaggcccggagccccgcagcggaggcgcgcagtgcgcagcccggccggccaccctccgcgacccgccagccggggatcctgcggccccacggaaggtctgggaactgggagcaggaaaaatgaaagccgcctatctccagatctaagaatagaaatcagggccgctggggaaaagaggacaccgcccaatatggcccccttttaggaatacattggtctttaagcagttccgacctataggggagatgagccaatttttccccccaaaggatggcaaagagggggttatccccatcaaaaactgcccccccgctactccttttttatgattttttctgtgactgtttagtggggcagaggcaaataaaacatttgttttcccccgcgaggttatcctgacagctcctcggtcaccccatacgggccacctaaagttcaccttttttgggaaaatttcgacgtttgccacttatggcacggcatcccttggataacttcggggggaccccccccaaaaaggtatattcaactcctccaaaaccctatttaagagctcggagaacccaccggaatagggggctaccttggaaaatgaaactgggggaaaaaggttgaaataaaaagcccaaccctcaaaatacccccttctcactggggaatcccccaaactaccccccgcagattattgggtggggcgtttttaaacccccaagggctccctttcgcggcctgtggacgtcttccccagcgcttgtgcctccgccacgggtctctggctcactttcccctcgacgtaaacgccggggtttacttcggagcacaaagatcattctattaccctcgagaccccgtggctcgacgtgcataggtgtttatatgcgcgaagatgattcatcttcatagctcacttctcatcgacgcagatggcgtccccacaccatcccccccgagat

SEQ ID NO: 39797 - DNA, 1122 bp, Homo Sapiens
acgctttgcattcctgaccggcacctggcgaggctcatgcgtcccgtgagggcggttcctcgagcctgggggcgctcagattgctttggagacgctgagagaacctttgcgagagcgccggttgacgtgcggagtgcggggctccgggggactgagcagcacgagaccccatcctcccctccgggttttcacactgggcgaagggaggactcctgagctctgcctcttccagtaacattgaggattactgtgttttgtgagagctcgctaggcgccctaagcaacagagttctgagaaatcgagaaacatgataaggaattggctgactatttttatcctttttcccctgaagctcgtagagaaatgtgagtcaagcgtcagcctcactgttcctcctgtcgtaaagctggagaacggcagctcgaccaacgtcagcctcaccctgcggccaccattaaatgcaaccctggtgatcacttttgaaatcacatttcgttccaaaaatattactatccttgagctccccgatgaagttgtggtgcctcctggagtgacaaactcctcttttcaagtgacatctcaaaatgttggacaacttactgtttatctacatggaaatcactccaatcagaccggcccgaggatacgctttcttgtgatccgcagcagcgccattagcatcataaaccaggtgattggctggatctactttgtgggctggtccatctccttctaccctcaggtgatcatgaattggaggcgggaaagtgtcattggtctgagcttcgacttcgtgggctctgaacctgaacggctttcgtgggcctacagggtattcaacatcgggcctcctttggggggggcctaccttcaaggaagcaggtttctcctcaaataaccccaacgggagtgaacccccgtggaacaggcaactaacggtcttctttcaaccttggcacggggttggtccctcacgctggaatcctcattccggggaagggtttgcccttgtattagacgcgcggggggccacacgcggggtttcctggggcctgcccattgcggttttcctgggagctctcgccgcgggggtttttcgcacttttgtggcccacgggaat

SEQ ID NO: 39798 - DNA, 1061 bp, Homo Sapiens
actttaaaggacatgtacatatttcaaagatagaaatttgaatttaaggaaggacctagtgattgggaaaaaaggggacctaaggagtttgggaagactcttagttgtttgtttaggggctaaagtagaagatggtgccattcacagaggcagtgaaagcataagtattattgaaggacaagcaggtttgaggtgagggaaagaaatttgtccatttttgcacaagaacttctgaagcattcaggtaaaagaatccagctgcagtcaaacctataaatatggagatcaggagagacattaaggaagggtatagagatttgttgttagtaagacatgggtgatggttcaaaccacctccagagatgtgatgctttccatagcagctccaataggcataattacagagaagatcattaaatattcaatattgcttataatagataaaatcaattttgtctaatttccctaaatattaatatctttgtgcacccttaatcctttcattatcataaacatttattcaagttaagtattgtgcacacacttatttttcaggattttgctgttttggcatcctgatctcactatgcattaaggctggaaatgtgaatgaattggaaaatgtgtggcactaatagattggcttttgcctggctgttgcattggcctaaagatactgaccagaaaagaatatagacttttgttaccagatgggacctggggtttcactttctaagttctggtttttcagggtaagaaagaacaacctacttaaatctcccttgagcctcagttttcctcatcccttaaactttaaaattattcttggagaattcaacagaaaaatacctttaaaccccctcccctgggggccctaattattaaaaaacccacgccggaaaaacccctggcactggaggtgaaatctaaattctcccaagcctgaattgccgcgctctttgaacagggaacacccttttcactttgcggggagagtctcagaaacccaaggggtgctctcgggggatggggctctatcgcggcaaaactatgttgtgggc

SEQ ID NO: 39799 - DNA, 526 bp, Homo Sapiens
agaagaagcttttgagttgaataacgagttccacgttccaggccaagtcatgctttcagtctcctgtttaaaagtctatcaagttttggggcataagggtgggaggaaaataaaaccaaggcccctttgtcagcatacagcttcagtagataccccaaattcttgaaatctgtatagcagactgctggttttttctccttgtcagagcccagcccactgacactttacagttgacagcccagcccagatatgggccgctgtggcttctatcgaatcatgcttgggattgccacagttttcttctttggattggggcttgaggtggttgggaagaatgcatgccaaccagccctgcatctgggacttggagcctgtcagctccctgctctttgataatggaatagtctgtggacttcttcccatttgtgagagaaaactcccccttagaactcaactggtagagcttctcatagcttacagttccaagcaatagcttggttgtaggtccaggcaggactctgacatg

SEQ ID NO: 39800 - DNA, 503 bp, Homo Sapiens
gccgagacacctcgaggcctggaggggtggtgggtgctgaccgcgcccctctgcctctccaaggtcctcagccctcgctctcgctggcggagcagcacctggagtcgcccgtgcccagcgccccgggggctctggcgggcggtcccacccaggcggccccgggagtccgcggggaggaggaacagtgggcccgggagatcggggcccagctgcggcggatggcggacgacctcaacgcacagtacgagcggcggagacaagaggagcagcagcggcaccgcccctcaccctggagggtcctgtacaatctcatcatgggactcctgcccttacccaggggccacagagcccccgagatggagcccaattaggtgcctgcacccgcccggtggacgtcagggactcggggggcaggcccctcccacctcctgacaccctggccagcgcgggggactttctctgcaccatgtagcatactggactcccagccctgcctgtcccgg

SEQ ID NO: 39801 - DNA, 470 bp, Homo Sapiens
cgcctgttgctcgctgcccgcgtgtccctggctctctcgggaacccagcgccgaaggcgagaaatagaaaacaatgactgggagagcccgagccagagccagaggaagggcccgcggtcaggagacagcgcagctggtgggctccactgccagtcagcaacctggttatattcagcctaggcctcagccgccaccagcagagggggaattatttggccgtggacggcagagaggaacagcaggaggaacagccaagtcacaaggactccagatatctgctggatttcaggagttatcgttagcagagagaggaggtcgtcgtagagattttcatgatcttggtgtgaatacaaggcagaacctagaccatgttaaagaatcaaaaacaggttcttcaggcattatagtaaggttaagcactaaccatttccggctgacatcccgtccccagtgggccttatatcagtatc

SEQ ID NO: 39802 - DNA, 486 bp, Homo Sapiens
caaatatgacaagtatttattgagagccaaatgtatgtcaggcacttattgctttgtgcctggggaacaggggcaataaagtagaaaataaaacaggcatggaattagcctcacagatcttaaagtccagtgaggcaaacgagtttcataagaaacacatgtatatttaagtattttcaaaagtactgtgaagacaaagaacacggcaatttgagagagaaaataacaagtgacgcctgctttaaaattatctgccggaaaaggactccagagatagtgccactggagctcaggaagagttaatatgttcaagaaaatgcaggagggcatttctttcaggtagatgcctaggctctgcctactttgcatgcttctatctgactatgtaaggcaaaaatttatagaagtataatcatgcctttgctgcaaaatgagaaatagacatttaagaagaaatttccatctcatcgaatgagcattttggtg

SEQ ID NO: 39803 - DNA, 613 bp, Homo Sapiens
ggaaccgctgggagccggggcccagcgcgtgaggacggagcgcgctgagcgagggggaggtggctgccgcttctcccgcgtccgccattttgttgctgtggctattgggaacaagctgggcaaaagcaccccggagcgcgacgtccttcgagttcggtgcctcgtgtgacggcgggggtcggtgaagaccgtcgagctgcggcgccggcgcgttccaggccgggagtcactggaggcacccctgggacgccgagcagcccgagaaccccggggtggcctccgctgcggctcgggtttgcctgccccgaccccccggctctggctgcattcccgggcggctctctccgtgtggcggcccccgagcaggccggccgcgtcggaagatgctgcgggcccggagccgagaagaaagtgctggcccagccctctgagcgctcctcgaggtgtgcgagaggcccttcctcggccccaaagccgtctgcagggctaaggcgtgcagacaggcgaggacagccgccgcccctaccgccgcagaagtccccggtccaacaccatgtcctccgccaggttcgactcctcggaccgctccgcctggtatatggggccggtgtct

SEQ ID NO: 39804 - DNA, 528 bp, Homo Sapiens
tttgtaacacttcttgagccaggactttatagcctgtttattacctttatcccaatatcttgagacataccataaaatctatcataacctggtagcaggattcaaaaattcaatcacagaaaatgggggcaggtgcattactgtgaggccagtgaaaaacaatgttttcagctactaacccagccatgtgtgaccacggcctgggctcggcactgcctgtgtgttggccagtgccatgatgatctagtgaggctggaaggctggatggagccaggaagcaggtgcaggctgaggtcgcggggcagagtctggtgctgggtgatgcggagagagaggacgcttcggtctctgtacggggtggggagctggtaccagctgcagccgacaggtaactgtttctttcactctcctgagttcttgttcaggatgcttcagccctgaggctttgatgggtgaagaaagttccctatggctgtgatacactcttcccacgcagaagccgggtccagctgtcatggaatccaaaac

SEQ ID NO: 39805 - DNA, 475 bp, Homo Sapiens
aatgtttatagaagctttatttgtaattgtcaagaaaaattggaaacaacacaaataaggtgggatttgagagactgaagacaatggaaagaccagggagtctatatgagtggagagggaatggtgaagagcttgtccacgaatcgggagaggagttggacgagttgcatggtccctccttctccactttcccctccctgtatgcatttatccctgatgtggaagggagtcaggtgtgctaagccaaggaagagtctgaagaagaaatggaagaaaaaagagaagacaggcaggcaacttccagttccatcaagggggcaaccatggagcaggacagctgctcctaaactcagaggggcagcaggaaaacccctgcattttgcttttaataatatttggattatttaattttttaaaagtcaaagaagttttaaaattctaatgaaatactgaaaagctaattttaaaaagtatt

SEQ ID NO: 39806 - DNA, 494 bp, Homo Sapiens
cacctgcactaaaaatgaggacagcattagacaaatcttttccacttaatgtaacacatgctggaatgtggaattttgtgtttttgaggactcatgaacggtaactaatgctgtgtttttcttaattaatgagcagctcagatatgtaaaagaaattggcttatctacaccgggataagacagagaagaaaacactgatatgaaaagctagaatattttctaagtggctctgtaattaaaaagaacatttaaaatgaggaaaagttaatagacttccatgctctaaatatattcttcctaaggtaatagttcagtagtgctagagagaaagataaccatctcctcgtgccttttgtcttcagccatgcttttagttttcattctgcattccatagttccaaacgttgaagtcatctgcaggtcaaaccatggcctcgggtaagtacctagtacgtttttaaaaaatgcatcttcattctgaaaacatgaaaact

SEQ ID NO: 39807 - DNA, 361 bp, Homo Sapiens
ccgcttttttttcccgcggcttctcccgctggagaagccctccgctccgttaaaaatccttcacccgcaccaaacacttggggtgcttgaactactcccagtcgtgccgctactgctcgagccaagcaacttggggaaactctcaagctctaaatctcaccagcggatcaggtggtcggcgaactagtccccaagctgcgagctcacatgcgctcacataaactcctcccctgtgggcacaatctggcgctccttgggttcgggcaaacctactctggcgggaaggttggcacttcaagggggtcgggctacacccaggaactcgccacgctagcgccggacaacgtcggcccccatggct

SEQ ID NO: 39808 - DNA, 594 bp, Homo Sapiens
tttttttcctaaataattcagtatttatttccttagaacaaggacaaatttgcataaccacagtagggttgtcaaaatcagcaaatctaatattgatacactatacaatcctatgaccaatctcatctacaactttattcaaattttatagaggctgggattacaagcatgaaccactctatccagctgattccatgttctctaacaccctatccacacaaatctgagatgggctcaaggatgaccacaggccttggagatctctgcagtgagcatctgtgcggctgaatctgagtaaaggattctgcttcaggctgctggccagcaaggtgtctcaggagcaggctggtgcagggcagctatggagagacattagctctgcctgcacttacagcctgaggaccaagcaggctctggaggcagagaaaggcctcagcaaagaagggcaggtcgacctgcaaggaagagtgagtggagggaatggggcggggcaccacagcctctgctaaggtctcatggcacttagcagggtcctcagcgtctgctaagagctcaggaaatggtacctgctctcattcagaccgtttccatcgt

SEQ ID NO: 39809 - DNA, 414 bp, Homo Sapiens
aaggtagaaccaagtttattaatgacagcctttattacaatcactctcaagtgtaaaaaataaagggtgattaattaatatttaaaactcactcggacttgctgtttggcctttcagtggatgtgccaaagggcaagagatcttgcctgattctgaatcaattggccagatggagttcactggagaatgaggcaatcaacaaaaaagacaaatgatgccaactggagagagctcgtgtcttctccatgttggaaggacattacaaaatggcaactgtggtaggggcagagatgaagtaagacaaccttacagtcggagtaagatgtgaatacctctacctatacagagacaaaaacacacacatgcagagccatacacacacccaaacagtgaacacagttttgaaaataattt

SEQ ID NO: 39810 - DNA, 488 bp, Homo Sapiens
acaagtaaacgcagttattattacagtttagtttatgaattaaacaggattttgtgtgctgatgtagtaaccaccacttagacttagtttctaagagaaaaataaatcccaagtttcaaacaactgacttacatgaaaatttctggatgaatattgtcggagtctgtctttatcctgagattctatagcaaaactcccttaaggattttaaagggttttgaatacacccatttccagccttcgtttttttatttaaaagggtcttaattttcatagagaatctacacaatgcatgtataataaaaacatatgtcactgtcaaatatagatgtaaaaagcttatgttcttctatgttttaactcttctctctagctaatttgaaatatctctaaattcatgtccaaactgagataagacgttggtacacttcaataaaaatgtataagcattacaagatgttaaaactgatgccacagtctgagcccag

SEQ ID NO: 39811 - DNA, 508 bp, Homo Sapiens
agtttcctgttattgttgcatggatacagtatcttcgctctaaattcagatactatgattttgtgaccttttcttttgttatttacattgcctttttttcctacttctatttgtcaaaattcacattgcctttatttccttgtttttcagtttacctgttctggtctttcctcacatatctgacaatcgttagctctctttgtatttcaaagaaaagctctggaatgtgtctgggacctgtgtatatatgggcaaaactcatcaacgaatgggctccctggtgattatttggcagattcctggcaatttcatcagaggatccaaaaatgtatgtgcaggcctttttctctttggttggttggcttctccagagaataagcctctttttcaactcagacatttatacttagctaacagcattcaggaaactgagaaaagaaggaacgttggaaatttcacccttcagtgtgtggactttgagttagtcttcccgtgttcagtctagagc

SEQ ID NO: 39812 - DNA, 428 bp, Homo Sapiens
ttaagtcttcaatgacaattttaatgccttcccactccaataaacagaaaacattaacgtgaaaacaagcaaaccaagtacgttggaatatcaaaattattgggagtgcaattatcaaaaaagcaagcacttcactgactttccttactgactttttttcatatcaacttttggctcaataaaaccacaactctagaaattaagtgttattagtcatttgacgcaatatttgatactgctttctatgcatatcataactaaaagtacagttttagagaaagttttaagtcacacaaatttcatgtgtagagaccaacatacgctgaaatcaaagaaaatgccagtcatgtcacagctcacatgtaaaaacctggtaaaataattttaaggtcttaataaccctgataatttaaaatcaagtgggaaaa

SEQ ID NO: 39813 - DNA, 372 bp, Homo Sapiens
caccggggccccggcagtgtcgtcggcgtacaggatgttctccggcttgaggtcgcggtgaccacgcccgcctcctcgtgcatgaagctcacggccgacacgaggctgcgcaggatctggcttgcttccgactcgctgaagtgccgcttcttgcagatgtgctccagcagctccccgccccagcagcagctccaggaccaggtacagtgtgcagctggcagtgatgcacatcagtcatgattcaccacagttggggtgtgactggcacagcagcagggcagccacttcgcgctgcgtgttcgcctccagcctgaacatgaggatcttgactgcgaactcctggccgctctggcgctggcggcacggcgacac

SEQ ID NO: 39814 - DNA, 466 bp, Homo Sapiens
ctgcatatatagctgtggtacattttaatgtgaaatgatgactgcatcagcttatatccatggagcagattttagcattcagcttgggtctcccagtcaatatctacgagtctcttcttaaggagatcgatgacacagatacatacagactaataaatgtgataccaataatcaagaattcactcagttaagattttgcccactgagttccacacaagaaacctagaatttactagattcttgtgcctgtgaggatccactcatttccctgaatcacaaaagctacagagtatttagatagaaatatacctactcttaacatgaaccattttaaatatatgtattactgtgtccacaggagtacactttaaagcagggacttcactcttcaatctctccaatcatgtgttacctaaagtggcatgtggttccctaaagcttaataactgacattgccttaaaaaag

SEQ ID NO: 39815 - DNA, 392 bp, Homo Sapiens
atgggattcaagtttgaggtggggacagattcagtaaatgtagttaagatgaacctttttgtagagtaaattctggtctggtgaagcaaaaggtcaataaagtctatacttggctgtcattcatattcattcattcttccattcattttaacttcagtttaacagcaagtcttgggaggaacaggagtcttaaggttgtaagttatcttttaagatgcctgagttttaggcaaattaaatcctcattatctgaataaatggtaagtctttcattattcattttgcatgttctcatcttcctgtactaaaatatttccccattattttctgctttctctgtaacacacacaaaggcaccaagccacacaaaatgcaaaagaaaaccctcattt

SEQ ID NO: 39816 - DNA, 378 bp, Homo Sapiens
gagaaggagggggaagagcagaagttagagaaaaaaagccaccggagaataggaaaaaacatcggccaacctagaaacgttttcattcgtcattccaagagagagagaggaaagaaaaatacaactttcattctttctttgcacgttcataaacattctacatacgtattctcttttgtctcttcatttataactgctgtgaattgtacatttctgtgttttttggaggtgcagttaaacttttaagcttaagtgtgacaggactgataaatagaagatcaagagtagatccgactttagaagcctactttgtgaccaaggagctcaatttttgttttgaagctttactaatctaccagagcattgtagatatttttt

SEQ ID NO: 39817 - DNA, 350 bp, Homo Sapiens
gtagtgacttagcattttatttcgtctatataactaggcttaattttaacaccttaattttaacattaaagatggcacgtcagacacacagataagaaatcaatgttctgaaattaatatcctacttacattaaacatccctatcaggaagacacagagagtagaagcattttgcactagacttaggaataatacttccagctccaaggaagtgaagaagggggaacatgtttggcatcggaggctgtgtttttgtttgcttgcttgtttttcttttaatgccagaacaaaataccccactcacgttcatagtaccccaggaaatgcgcaaatcgggacagccatagaag

SEQ ID NO: 39818 - DNA, 430 bp, Homo Sapiens
gtttactttaaaaaatattaacatttactaatttttcatcaattcaaatatcatattgtagagtgcaatttaatcaaattagataacagtcccaaatataacatttaactgtacatcttccagaagccaaaaaatgagaaattatttgtggcttttggctagacaaagatttcttagatgtggcccaaaagaacaacctgtctttctgaaaagtgtcttgtctgttaatgtcatatgagcccctgtggtggtagaagaatgctataaattttggatccacagaactaaagtacgagagggaatttttcacaggaaagatggttgatacttgtccttagtatcaggacaatctccagtggattcaacagagcatctgccgttttcttgaacaaaggtttcttagggctggaacaccagtaaagcttctctt

SEQ ID NO: 39819 - DNA, 403 bp, Homo Sapiens
gctgccctctgattcctatggagcctggaggaccttgacgggcatcttcccctggcgcacccaaaggtccaagttttccttcaggaccttgaacaccaggatttcctgtcaaaccccgagcacctggaagcccaggttcccctggacgtcctggatccccctggcttcctttgggtcctgaagaacctacaggaccccgttctccttgagcacctttgggccaggtaaaccatcagagcctggaaaaccacgattggcaagagcaccctttcttccaatggccctggaagaacaactgttcctgaggtcactctgggaacccttttgccttctttagcgggtgggcctatcggacctggatacatgtggcctggttccccttttgggcagttctctttgaaac

SEQ ID NO: 39820 - DNA, 392 bp, Homo Sapiens
ttgacaggttggcaaatatttttatatttccatttatatccactgcataaatgcttgaatttcccaaatactgattcaaagtagtaacatatgatcagatatggagaaccaatgatctgtctattgctaatataaggctactatttggagatcaaacaatgattattggggaaagacaatacaagcttccaaatcctaaaatctttttaatcttctgatacttaaattttttcgagagtggccactggtccttcttttagggtacttttgttggatatgattggtggttgtaattaatggtatgccaaattctccagtctttgcagagataggtaaagcaccaaaattgtcctagccatttcttggccatcagtttgagagaaaaatgcttt

SEQ ID NO: 39821 - DNA, 466 bp, Homo Sapiens
ttatttttgaacaggatcattttattctcatttatgcttaaaataaagatacaattcaagttttacaattcagtatgattagacgtgatttataattttaacaatttaaaaaaacaacagaaataaagaactagtacaaactttaaaactaccagagcaaagagaactacctttctgatcaaaacatgtgccacagttaaacttccttagaaaactttttaagttttctcagctaaattttctttaaaaaggtttgtgaaaagcctttaatcataaatatttaaactgtttttgtaaccactaaatgccttcaccaactcattaatccaatgttttctaaattcaggaaccagtgaccaagtggcctgaaacatgtaagccttgatcttattcttccagctacaaaatactaatattttaagaaaacaacaaaatattttctaagcacagaagctttctgaaaact

SEQ ID NO: 39822 - DNA, 469 bp, Homo Sapiens
ccttaccttctattttatatcatctggtatttttatacccaggaaaactgccttagctccttttgggaaaaagggtgtaaatgagtgactagttgctctgaagttggcatagtggatggatttgaggagaggaaatttcacagcagggaataggtagcatgagcaatggtccaaatgagatgaacaaggactggaggcggaggtctgggatatacagcaataacagaaaccaggagtgaagagtccagggagcatgtgtggtaagagaactcgggagcccaccaacatttaagggttaggcacaccaggtgtgatggctcatgcctgtaatccttaatttcaaggtgacacttttcaccttttgatacagccaacagggcagtgccaactgaatgaatccattacactgtcagtgaacagcaacactggcttcaccaaagaaacacttgatgacttctaaaatagtcgc

SEQ ID NO: 39823 - DNA, 544 bp, Homo Sapiens
ggaccgctccaacatcagaatggtaacagtgtatcatgcttggaaatctaagaacaagaagagaaatactgaaacagagcaacgtgctccaaagtctgttactgattatgctcagcaaaacccagcagctcagattcctgccaggcagcgggagattgaaatgaaccgacagcaacgcttcttccgcatcccattcatccgccctgccgaccagtacaaagaccctcagagtaagaaaaaaggctggtggtatgcccattttgatggaccatggattgcccggcaaatggaactccatcctgacaagccacccatcctacttgtggctggtaaggacgacatggagatgtgtgagctgaatcttgaggagactggcctgactcggaagcgtggtgctgagatcttgccaagacagtttgaagaaatctgggaacgctgtggaggcatccagtaccttcagaatgcgattgagagcagacaggctcggccacctatgcaacagccatgctgcagagtctgttaaagtagatgttgcacaccagcc

SEQ ID NO: 39824 - DNA, 474 bp, Homo Sapiens
acaagaatactggagatttgagtcaatttttgtggtcttctgatagctaagtgccatcaggttagaagcaccaacccattttcacacagatgattgattaatgtttagagtttatttgggaaagctacgaactagctgcccatcttaaacagctgtacaataacttgaataaaaaattatgtaagaaaaaatgagcaagcgtagttcactaaatataaaggagtttgttaaaaccagacagtaatagctataaaaggcacaacttcccttttctgatatacacttgtaaactttttttcaggtttccatgcataaatcaaaaatgctatcctaactatacaggggggggatacaccaacagaaagtctagaaaatttcatccagccaactgtgtaaaaaagtatgaagagaaagttcctcacacagactttgggcactggtggtttaggtggcatccatctttgactgtggaga

SEQ ID NO: 39825 - DNA, 411 bp, Homo Sapiens
ttatcatcaatcactttatttttcttttgctcttaataacaaatttattctttctcactcttgaactacttttacagttagtgtaatacatctgttcttcaaaaccagcagaatcgtttctataaagattgagaataacagaacactctgattaatataattactccctaaattaaaccattagatctgaaactgtttgcatttgcggataatcacgaaaggtcatgaccccagaatccatctctcctaccagggttgtctgcctgtaccaataatatcaataaggaaatatgggtgatatctcttctcatgaaagagcatcaatggattatgagttcatgactaaaacaaatatatattaaggcaaaccatatgaagttactgcttgtcagattaaaaacagccaaatat

SEQ ID NO: 39826 - DNA, 417 bp, Homo Sapiens
aatttcatagcaacatgtttatttaagccctagctaagtttacatttacaagcaaatattttcaggggaaaaaatcacataagacaatattttcaaatgttataccatctacataaaaattaaacttgcagaatttacaaattaatattctgagcagacagaaatattatacatccttttgcaaaatccagtcaacaacttttaaaaattcatacaggcacaacacaagatagtctctctatacaatctacctatttacatagcttttcccaccacagatgataatagctctcatcatagctaccaaggttcgcaaacatagtatatttaaaatatatttagcagcatataaaaaattagataaaagggaaggaaatactactattaaataaaaacaaaattaaatggtcataatag

SEQ ID NO: 39827 - DNA, 505 bp, Homo Sapiens
aatgaacttttttggattattggttattttagatttatcaaaaacaccatttcattagtccacagtatagagaggactacagttgaaaataatattccaccaggtctcatttccaggatcctatattacagaatacaaaaaggaaaaggtatattcaaaatgagtaacaactaccaaccctgtttacattgtgggcactgaatcaatcgccaattgaagctgataattttctttcagatcaagttttcccacacctaaagaaaattccattatataatacagttataccatctgtaagctatgattttccataaagaatcacaaaaaaagttaaaaactaccaacaaaggcactgaactgctatgacttgctttttttgttgaccaccaaccttttgtttgtaaactagtgaaaagtcacatcaaaagatgaaatagaatccaatccaaaagattgggacccaaaggcactgccacaaggctaatttgaaatgctcaaatgcatt

SEQ ID NO: 39828 - DNA, 431 bp, Homo Sapiens
tttttaagaattaatataataatttataataaaatggtgtaatgataataaaatcagtgaaatttcaactggataattccacactcagatgagaccaagatgttgaccagaaggcaatccacacagtgactctggaagggagcccgtctgaagcagtgaccggtttttcttcctgatcagctctagcagtgcaggtggtgatgtgtgatattcggatggatgctggaaaactaaccctcctctggtggtgaagagttccactttgatatgtctggggattcctgaagcctttccaggacccttcagcactaatgttagggtcctcggcattacagacccaccttcagcatgggagtaacggtaaataccagcgggaggaggcaacagaggtgaaatggaagagcatgtgtgcctgcccctcgtggtgccac

SEQ ID NO: 39829 - DNA, 387 bp, Homo Sapiens
ttttttctcctgaaattgatttattagtttaacacaattctcctgaaattgacttattactttaacacaattcttatcaaaactccagcaaggtttttttgaagacttagacaagattattataaaagttacgtggaaaggcaatggattagaataattgaaacaatttcctgaaagaattaaatgggaggaatcactctatctgattaagatttacttcatagcaacagacaatagagacgatgtatattagtgaaggaacagatagatcaatgaaattgaatagaaaagccagaattaaatccacaaaagtacagtcaactgatcgtcaatggaggaagaatagccttttaaacagacagtgctggaaaagttggacatccttag

SEQ ID NO: 39830 - DNA, 411 bp, Homo Sapiens
aatctacatattatacatttcacaatgaacattaagagaataatttttaaaggagttacataagcataccatcatgtatgaaggcttagaatatgttgggcttcgtaacacacacactacacaatttaattccccatagggccttataacacgggtactagcaacatgttacatgggatgaagtcaaggcttaatgtgaatttgccactataacttctctagtgagtggcagggctgagtgacaactgaaatttgttgcctctctgaccaggatacattagagttacctttaggccaagcttagtgagggataagagacctatttcagtggggaaagataactgaatctgggatcagtcaaaatggactctatgcccaactctgcaaataactaggcatgtaattttaaac

SEQ ID NO: 39831 - DNA, 405 bp, Homo Sapiens
agtgctgaatctttaataatttgccaaatatatctggaggttctcatttcttcaaattgtcattactttccagaaaaaaacagcttaggatgagtaaaaaacttttctgtcctcaatttaatctagtaatttacatgggcaattcaattaagacagcactacaaactgggtgacaactcaatgcaaaaaaatttggtaacttattttctaaagcaaggctcaatatgcttttagtcaaataaaataaatagaattcagcatattagtaacacatcatgttcaaaactttcaaattcactagcctaatagaaaagtgtattatttataaaaattagaaaagtaaaaatcgggaaggaaaaccacataatgaatcacatccttgttaaactgcatgatttaaaattt

SEQ ID NO: 39832 - DNA, 437 bp, Homo Sapiens
cggttcggcctccccactccctctcctccctccgcgctccaggtctgggctgcccgttttcgcactcgccattggcccttgcccccgtcgctcagccctgtgccccttccagccccgcactgggttggccctaaatactgccgctcggaactagccccgcacagtcctcttatgctcattgggcaaggggccgaggccctctgaagatacctctccccattggctgcgcggaggtccgtctgccccatctacgagtctcgtaaacgattggcctccgccactgtcgcttagaaagaagccagcctgcttcccagcttgcctactggaagggggagcacccaggtgctgctccgcccctcgctccctactggccgctcgaagcttgaagctgcagttcactttcgcgaatgtaaggaacccagcttctgtgtggtggg

SEQ ID NO: 39833 - DNA, 370 bp, Homo Sapiens
aatcccagcagaagtttatttagggcacagaaagctggaaacaagggcttgactggaggcagctctgcagcaggtggagatttggacagcgagggctgtcctggaggaagtcccaaggtcctcacttccctctgtaggccacccttggtgtggacaacagcccgggacgcccaaccaagccctcgggggaccaagcccggggacttcgtcacaactccaggccagccaagccaccccacagggaccctgcctgtcccacccgcagcgtgctggggggtccatgcttgcggtgatcaggagggtggcacggcctggggttacagccggcggaggggcttcccaaaagaatcctcagcctctcccgcctgcg

SEQ ID NO: 39834 - DNA, 364 bp, Homo Sapiens
taaagaaataaatatgtttattgtgaaatataattcatataatgtagaaagatatgaattgaaaagtacgtcttgcttctaagactctgcatttagaacagagaaaaatatttaatggccaaaaacttcgcattggtctatgacataaaattacaaattcaaaaagctctgcaaatcgtgaacagggttaatatgaagaaaaaccacatctactagtcaaattgctgaaaaccgaagatagaaaagaaatctaaaaagcagccagagaaatagcacattaaatacaagaaggagatcagccactggaatgacttttttctcaccagctgcaaagaaggtccaatatgagtataaaaaagaacat

SEQ ID NO: 39835 - DNA, 375 bp, Homo Sapiens
aaaaaccttggtggtgggtaaaggggtggagggatttgaaagaaaactgtaaattatcaagaaaaatgattcatttctcagatgaagaccctcagtcccagaaaagcaagggtgagtatgcccaaggtcacccagccagggtgaagggtgggacttagcctgtcccaatcccagtctactattttctgctccaccaccatagctgcccagggtgaagacaccatcagttcttaaggtcacttctaatttggggaaataaaaggtcttgaaggttacacagagatttgtgcactgctgatcttaattttatgcttgccgtcataaaaccagtttatgcttatacaactaaagggggaagacatgcatccaattctc

SEQ ID NO: 39836 - DNA, 397 bp, Homo Sapiens
gttgggttttttaattaacttttattttaggtttggggatacatatgaaggtttcttacataggtaaacacgtgtcacaggagtttgttgaacagattattttgtcaataagcaatactattttgaacagaatcttttctttttttctgagcaggagaatctgtggggctggtgggaatctgtggacaatccgagggaaggcttggtgggcagcaggtgcgggtgaggcagggaggtggcagagagagcttgtggagatgttctggataccagagccctggcctgatcctgtaccgtccccaccttctctggatgactggggccaacctaacctgttccgaagaaaataaatactcggacataatcctttgttgtgagattaatgtgttgttttgtt

SEQ ID NO: 39837 - DNA, 363 bp, Homo Sapiens
tttttaaatgttttaattgacaaatgaaaagtatatatttgtggtgcacaatgcagtattttgagtacacatacatactgtacaatgattaaataaagctaattaacctatttctcacctcacatactgttttgtgatgagaacattcaaaatctattctcctagtatttttcaaacaaacaatatgatgttattaactatagtcaccatgctatacaacaaagctctatgatttatttatatagtcgaaaggaaattgtaccctttgtttaaatccccaccatccccagacccctggtaaccaccatttaactccatgaatctgtgagatcaacttttttagattccactgtaagtgagatc

SEQ ID NO: 39838 - DNA, 504 bp, Homo Sapiens
ggaaaagagttgctctttattcagcacgtgagttcctgacccccagataagggccagtgcagccggggagggaagcattagtgctgccgggtggaaggtggacggcgcctggatccagacccagcagtgctcatggggccaggcctggtgctcgttctttctcagtccttaacgccaccttgcaaggtggggattgtcctcccatctggccatgaagagctgaagcagagaggtgcagtcgctcatctgcgctcactggtcagtgggtcgctgcgtccccagaggcccctgggaagggtggacgcctctgcaggtgcccgcacaggggctattctccttcacttggccacactcagcctttgatgcggatactgtatgtgagtgttggcagagcagcgtgacgctcggcctgcaaactcaggacggcaccaagccccatcgccttggtatcttccaggtggaccctcagcctgcgtggggaagccccaagtaggtgccctggtc

SEQ ID NO: 39839 - DNA, 353 bp, Homo Sapiens
agaggggtgagcaccatgtgaagctgtggcctcaactttcaatgatcatccatgtgactatgacaccccaacctccatctctagacagggcctcatctccaaacacgagatccatatgcagcctcctacacgtgccccccaccagatatcccacatgtaccttaggctcagcacatttgaaactgaacttgtcatccttcccccaacctgctcccactctggtatcatttatcttttgtcaaaaacaccatcatccacactgtcgccaagcagaaagcctgggagccatgtggggctccttctcctcaacagccacatctaagggctttcaatttcctctcttgaacatctcc

SEQ ID NO: 39840 - DNA, 429 bp, Homo Sapiens
gctgggagtgggaaaagaagggggaagttattcaccaacaacaggaaaaagaatttagttggccttaggaggaaactgactaaggatttggaagaagtggtctgtcccagaaatccacattggcaaagaccactaggtcttcttcatgctttctctagaagactttcccattgtactctccttgttgtcttaagtgtggcattatttccacaagtccagcactccaccaaaaaggtccttttccaaagatttcaaagggctcaagcctcaaatactcccgaattctcaaggcaataaactttcttacagtgtcactgagggccatctcccttccaagaggggagacacagaacctggagtgggcggggcacctggctcagagaaaagtagcctcccaaagtctggctgctggggtaagaagcatggtga

SEQ ID NO: 39841 - DNA, 566 bp, Homo Sapiens
gattaagaaaagctaaatttatattaaattatcataaagtcctaaaatactgaacatagtggttaaataactccagaaagtccaatctctccagtgagtaacgttaaaaccattacaaatgagcatgggagaatcgcttccattagtttaggacagagagattttgctttttacagagtaaatcagtgctcaaatagatacttcctcaaatatgtcctttctacattctgaacagcccaagtgcaataagatccttccccctttccaatcaagaaaatgccacttttctacttgctcttcctccccagacatgagtctaaggacccaaagtgctcactcctttactgcttgttaagtgtaatgtggggaggctcagaactggggctgacgctactgagagcaaggctaagggcctggtatctctctctagcagtcttagaactgactagaaaagaattgatcttgtcctttttcactttggtagctgatttctcaataccagtaaccacaggagaagtttcaactcaggaaacttcccctagaaattctcccctccattcccagcc

SEQ ID NO: 39842 - DNA, 610 bp, Homo Sapiens
ctgttcttaacatgcccaataaataccttctcactgttcaagaacaggagtgctgataaacatcatctcaaaactggcatctacacccataatattatattatataataatattagaagcactctccagccactgggcaaatccttcatgagaaaacagcatccatttgaagttgtgaattcttttcttctttaaggatggatttctcataccctaccagaatttttgttatcacaaaatgcacactcttttttcagaattcctgaataatgaaaaatacagaatttatgatcctttgagtaaatttctaacaagtgatgaaattccgatgaagtgtataatgattcctcattttctttatgaaatctatcagttcaactctttgccttgaggacagatgctaaacagttgctctggcaagttattaaatcaagtttctggtttcttgcagggcctttcaacatatccccacagaaagatgaggcagacaaagaaactctgtcaatacacctcatatcattaaaagtaaaaaagattaattcctgaaataatgtaaatacatggtatttttcatgataagcatttgaggacatttttcccccatatccct

SEQ ID NO: 39843 - DNA, 396 bp, Homo Sapiens
cctctctcaatctcttttgtttttcaccccaaattcagttttccaataggtgtcatttattctgatgctctgacatcttctgaaagattctcatgcccaagctatacagaccttgcatgcttttaaaacacaatggcaacaggctcctgctggagtcccccagcgccgaatttccagcagaacctttggaatcctcgcagccgccttgtctgccctgggctgtgcgccccagctctgatcagctcaggacacttgcaggctccgtggtactgtacattaactctgcagcagcctggctcagctgcagagactgctgcctgacaggggatgtgctggcgtcaagggggccctctaggtgggttcccagacattgcagagccgcgcactccttgctaa

SEQ ID NO: 39844 - DNA, 379 bp, Homo Sapiens
atgagccactgtgcccagcctgcaatgatctctttaatcaaagcctagttcaagaattttttcttaaataatcattttctattaatatgttttcctctaaagttacatataaaatttaaattactttattggctgagtaaaccttagtaaattcaaatatcttggtagaacctcagttgcctaatttataatgtgaggataatatgtacttcagaagggagttacagaaaacaaattcatcatctgtattaatctccatgacagtttataaactttgaaatgttacaataaatgtaatgcaaaaattatacattctaaagaaatcataatatagtaatgcaagaattttaccttctaaacaaatcacatttagtgcata

SEQ ID NO: 39845 - DNA, 512 bp, Homo Sapiens
agctgacagtttcatttattagtgacatcaagcaccagtccaactatatcatttccactatcctccctccatggccagaaccacagattctctctggcagaaggttggatttatacagtaaaggcatgtgacagtgacacattgtccacccagcaccatgtagggattaaatcaccatttggagcaataaaagggatgtttgttcttcccttgttctctttaccaaccgcagaaacttgaggtgatctcagcagagttcattagacccaggtatcatatgacagtaagaaaaccaagccttagatagctgcagatcctttatgtaactggagttttcaggtcatatatttataggcttttaaagcagaagacgtgagacaaccctttactgcaacccttatgtttgcagtaaaatggatcacaggaaggggaattgacagtccaagatcacaaagatagagacagaagagacagagctaggatgagaacccaggcttcttggctcttctacc

SEQ ID NO: 39846 - DNA, 391 bp, Homo Sapiens
aagtgaacagtttactgcagttaacttatgcctcagtgagcaaacagggacagagaatcagtgaactctacaggatgggaggtttatcttcatttccatggaggggaggtgacctgtgccaggtcccacagctggctgcttctcagggtcagtgttggaatccaggactcccgactctgactaaggagattctccattgtctttcacagacacctaaaagctgaagggtctcagatgaaatggatgaatgagtatcagtgaatgtcatctgtttcttttcatgttctttaaatgaggctatgaaaacacagactcgaattccgggccctctctgtctctaaggaaggtggtgtgcagtgcattgcacacacatctcatttaatctcttcta

SEQ ID NO: 39847 - DNA, 352 bp, Homo Sapiens
ttttctcttttttagaagaaaccacaataaaccacaataagctgtcagtggtggttatctttgctgagagagatttggaaaaaggcagctttcctttttttagatttctagaaatgtgttttttaaatctttatgtgcacttctgaccaacttaatgtgtattactttttcaattttattgtttaagtttaacaaaggtaatctggacactagaattatgaaccattttctacttacttttctatatgcctctattttaaaagcctaaaaaatgtgtgttttttctgtttctgtcacaactgctctagtagtaatgggtttatttaaagtgagcactggtaatctttttctt

SEQ ID NO: 39848 - DNA, 376 bp, Homo Sapiens
cattttactacaaatacaaaacaagagacccattagttgagtttccctaaaagcttcatgtctgagtctttctctgtgtctaggagtttcctcataactcatcaacttgtgataccacccaccctcatctatcctaccagcccacacactaccactgttacacatgaaggttaactgcttgctttaattcagtcaatctgtaaacccccatccctggcagcagttcattgtcattatcaagtgatttcaaaactatccccaccacaaacacatccacctatcagtgagcaaaattagttctgctgctcttccagagtacatcaaagcaaacgtaaacattttaagtgggccacaaaatgagaatggcattaacagt

SEQ ID NO: 39849 - DNA, 354 bp, Homo Sapiens
aaatttagaaaagatataatgtatacatacacacgcacacacacaaatacatatgttaacatcacttctttctttcatccataaaatgatgtagaatttactcaaatggaattgttagccctggaagtagaaaatgaatagatgatcaagtcaacaaaaagcttatttctgagacaatcttattaccagcaaataattggtattggcaaacaactgctgctaagagagacaatcaaatataatgaaacacatcatactagaacacatcaccacccgtaaagtcgccttgctcttcctgacatccccccaccaaatatctgttgaaatctctagatttaactacacaattacagg

SEQ ID NO: 39850 - DNA, 383 bp, Homo Sapiens
gagatggagtctcgctctgttgccaggctggaaagctggagtctagaatgaggagttgatactgaattccctttgcaattgccacatatatcacatgaccagaggtataattaaggaagattcatctgagagtggaggttgctgtaatggtgaagttctaaagagctgactcagaatggtgatggaaagtttctgagagacaatgcagctgggtggaaagagatgggcttcacagccaaacatctacaacccagccccacaacatcccaactgtgtgacgttaggcagttgctcaatctttctgattcgtagctatttgtcaaacatggtgattcagtgaggatccagttacaaaaataacactcatgccaggtagttcagtg

SEQ ID NO: 39851 - DNA, 395 bp, Homo Sapiens
ccagaataaaaaaacataaacgacacttttattgtcttccagtttctgtgggtaggaatccaggcatagctcagctggggcctctgctccagggtctctcatgaggcagcacaagggctagattctcatctgtaggatcagctaaagaaagaccctccttcagtatcacatgatcattggcaggactcagttcctcacatgctgtgggactgagggcctcggttgctcactggttgcttaccggctgttggccagaggatgctctcagtcccttgccacatgggcctctccaacgctgcagctcgcttctccccagtgtgccaaccaagaaggcaagagagagagtctctctcaatggcaccactcagttgcataagccagaaattagagccatc

SEQ ID NO: 39852 - DNA, 626 bp, Homo Sapiens
tcaaagggtagaaatggtacatctcaatttttgtaaggcttctgaggattaagggcagctcatcgctcaggacttgacaatctctaaaggagctcctggactctttcaccacaaggatagatggagccactcctatccacaactcatagcaaggatctctatgcatctagattttaatgccaacggtttcttggcttcctgacttgacatgcaccatgcacaaagagcaaggtactgactggtctaaagccactctccccggacactgctaactctagctaaccatctcacagacatcctgcctctgatcataagatggtccctggaaggaagcataaacacttcccaaatactagaacagacagcccaaagtgcaagttctactaatgggagagtaaatgaatcacctctgtgtacagagaatggcacaggaaattgttatgagtataaaaccatatctcccctttcttaatcacttgttattatctaacaaaggtagatacttttgagaagacctcaccaactacataagtatgtcctataaattgtcttgaaaacatattcccatgtttaaagattactttgaagaaccaaagttgaatgttcaaaaataaaaactattctta

SEQ ID NO: 39853 - DNA, 384 bp, Homo Sapiens
tcttgtcatttacatttatatttaataaaaccatcctctcaaaacacataatgactttgcctttagatggactcaaacctaatattttaaaaagaggcagtacttgtctgacgcatgaatggtgtcttaatagaagcaaactagctaccaagtgaaactattctaactggatctgagtggaagcagctgtgttctggaccattaaggactgttttctctaacaaaccaggtgtctccaaacagtcagaatgccctgcctgctgggctttgggccagcatgcccaggtgcagaaacgttcttatcctgagagctgacagctgcccaggatctggtggtgaatggacaaaagcccaacttggcaaacccccagccctggggaaggc

SEQ ID NO: 39854 - DNA, 522 bp, Homo Sapiens
ctcttattgtattttttaattgtcttagagtcctctaaagcaagacatcaagacaaatgctattaaagttttgaatcttgctttttcttgcatgccataccacctctttgatggaaagaaagaaattgctcacattaccccaatttccaacgggcttaggctttaagaagcaacagattctatgtttacaaaaagcccaatatttgggtaaagtctatgtaaatattgaccaagtgcccatccttccttatttccatttcttgccttcccaccaattctcactaaacttggatgacctatttatgtgtccatgtacccccacgggactgaggagctgaaggcaaaccctataaactgtcaatgaatgatcatggtcctcaatccacttaatacttactaagtggctactatgtacccgacatttgcaggcactagagcttcagcagcgcacaaaaggttttcatgcagctcacattccagtgagcacagaccaaaagcaaatctagcacagggcacgtgctg

SEQ ID NO: 39855 - DNA, 413 bp, Homo Sapiens
tccaagactctgaaataccaggatttccacaaactcatcttgccctgactgggaatctttcggagattggatttcagagtattccccaacctgatcggatatcacctcctcaatggaagcttccctaataccctctgatgtttctagaagcaggacacatggcttgtgtcataagtcttgacctgattatcatagattgcctcaccaagtttagcataccctgtctgagagtgatgctggcaaattagtgaataagaggactgtggaatttatttgattgctaatcttgtgtcaggacatggttattttttagaaaagaagtgtcctcttatgatcttaactgtttgatatctcagcccttgagtgaagcagttatatgcaaaggagatgagaaggatgagaaaagtgagtac

SEQ ID NO: 39856 - DNA, 355 bp, Homo Sapiens
aagtccaaattttatttccccagggaaaaatttacggttccaaataaattaaaggccggcttgtaaaccaaatccaggccccttggggggttcagtcaaaaagggaagacccccagcgggctcccaaaaaaagggcccacaccttggcccaggttttgggattttgccaaccctgggcacaacaaaaatttcttcaaaacccgaagcgggcaaaaccccaaggaaattggcaattatttgaaccaatggggggttaaaaaagggcccaaaaaagtccccctctttaaaggggaaaaatttttcagggggaggtccccccaaacttttttccaagcgtttttcaaaaaggccacca

SEQ ID NO: 39857 - DNA, 412 bp, Homo Sapiens
ttggttaatatagtgaattacaatgattgatttttgaacattaaaccaaccctgcattcctgagctaagtccccctagtcatgatgtattatcctttttatatattattgcatttgcaaaattgtttaaattttttgcatctacatccgtgtagaatgttggtccgaggtttctttccttgtgaggtctttgctggtttgggtatcaaggtaatgctggcctcataaaatgggctagaaaatatttcctccttttcaattttctggaagaatttgtgtcaaattggtattatttcttccctaatgtataccgttcaccaggaaagctatctgggcctgaagttttctttctgggaaagtttttattacatattaaccttcttcagtacatatagggccactcaggttttcta

SEQ ID NO: 39858 - DNA, 427 bp, Homo Sapiens
ttgggacttttatttttttcaaacccaagttagcctggggtaactctaatggttcccctagtaacccaagggccccatccaacaggaagaaatttttgctttcacgttacagcataaagaccacctaagctttgacagcggacttttagtgggtaagcgttcgggcaaaagggtcaggtggattgacccagttgggaatccagtaatggctaagaattcagcccggcctgggtaaggggtttcaaagacttgagggtagaatacccttctttggttttagggtattgaggggaaattcggggctgaattggccataattgggtcatgaacctgaggttcaaggtggtcctggaaaatcttaaacctggaattcttaacggaggttataccataactggaggtcttttttgggtcgccaaagaagctc

SEQ ID NO: 39859 - DNA, 403 bp, Homo Sapiens
tataagttcctaagcatagtatgggggcatatctaatgtgtaccattttaagtagtggctattcttgaatttacactttcacatgaattttagaatcagtttgactagctctaagtcctattgagagttttaaaacaggattcaaatgaattctttacaatataaccttcccattcatggccatgatattctgctccattattgaagttttcttatctatctttcaaaaaagaacataagactctagcatatttcttgttaggctttccctaggtgatttttaattgctattataaataaatatccatttttcccataaaatattgctatatgttagtgtattaatcttgtactgttacctttttcaactctattggttctgatagcttgtcagttgtctacc

SEQ ID NO: 39860 - DNA, 460 bp, Homo Sapiens
gaatgtgtttttcacccgacgatgttgtgcaccgtcagcattgaagacgtgttacttttgtaacatagttgagtttaaaaaatccagaggtagtgtaattcctgtatagatgatgggacattaaagtaatgccgttgttttaaattaataaccgcaatttcacccccaaataaaagaagttaggccaaagaagcaaaatcgggcactcttatagaccagtatttgtcccaaaatttaaacctttctgaatgaactgagtcaacgcctgatgcaacttgtaaaatcatgtcttaattaattgcctatatcgaaattgtgtaaaatgtaataacctttaaccgtagtagcttaaacacacatgttcctaattgccattcatatctaaaacctgtttttaatcccaaaaaagcgacatgtgtcacaaccaaaccccctgtgcctagaggttgtcaaaaataat

SEQ ID NO: 39861 - DNA, 501 bp, Homo Sapiens
tcatgccctgcaatgtgtaggaagatggtttaatgtttggcagtgtgtatacatgtgcctctcagttaacatctttgatattcaattgcagcgatcaggcaacattgctcatttttcctactatggccattaaggcaatgccattctcagggcctccattaggacttgtaggatgaccatgtaacatggaggccagtccctcctggagggcatttcttaattgctcctcagttctaagtgtccctcagaatgcctcagatatttgctttgactcagcagaagaagggaagatcgtggccagagatagcctgaaccctgcgagaggaggttagaaagcagaaagccctctgccagccaggtgggtaccaatggtcgttcctaggatgagacctcatgtaacagagcccaggcagtcctggggaactggacatagctggtgattggcaacaagttgatggcctgagacctttgacactcccaactttttccccagggtttcag

SEQ ID NO: 39862 - DNA, 483 bp, Homo Sapiens
aaagaaaatagcctcaagagtataatgctaaaccaatgtaaatttttctaaccaagagggagtgggaaaatgtggggcaggggtttccagcatccagtgaatcagactaaggaattctgctctaacctcaagttagagcaagtcggctatttatttcctttattcaagttgcatctggggaactatttcaagctatttataaagacatcctttttttgattatcatactgtacaattatctgctttatttggtttcccagagtatccagctaaaaaccatgactgtctcttaaaattttcttaacaggtatatattaaactgagtgcttttgccaatttaaagacttcatgttgaatataaactattttgatgcaggctctggtacttattcctgcagatggttaatacttctcccatttgttaagtctggtaattatattacaaatagtaatattactgattctgacagtaagatcagctag

SEQ ID NO: 39863 - DNA, 419 bp, Homo Sapiens
ttttgacacatcattttatatttttctgatgacaatttctagtttactttttaaaaaaagacactattttaaaaatactttgggataggtttgagtcgttgtgtttgcttccagtcagagaacttcctacaaaactgaagatataaagtgctgatgcctgggcgtgcctgcgttcgttgggggcacgacgtcatcgtgggaagcgtgtactttttcggattactgcttggcggattagaaacccgtagatcagttctaggttagccctgattaactgccctgggtgtttctgggccagagggaatgtctgctggattcaaaccaatatccgttgtaagacaaaagagttaatttgtactttacccctatccaggctaataatgaaggtaccgggaatgatctggaatgttaactggtgc

SEQ ID NO: 39864 - DNA, 368 bp, Homo Sapiens
tgacaaccatgcccggctccatagttcaatgatcaaacccagaaggttaacttcgatacactaccattaactaaatgattaccctaatttgaacatcacgagtttttccattcctggccttttgttccaggatctcacactgcatttagctgaactgtcttctttgtctcctccaatctgttgcagcccctcaatctgtgtgtcgttcataaacttgacacttttgaagcgctggtcactctgcagaatgtctccccgtttgggttggtctcacgttttctcacgagtagggagttgcgcatcattggaggaatgtcacagaagtgctgcgcctcagtgcacccactggctgtgcctcctgctttggc

SEQ ID NO: 39865 - DNA, 354 bp, Homo Sapiens
ggatgagggtgactcatgatttgctagcaccttggcccttgcagctacagttacaggcagtggaatttgtcctcagggtgcatgaaaatgtgtgcccacccctctgctgggggtgatagggtcactggcagtggctcccaccttggcaccagcagcagcagccacagcagctgtggtggggaatgtcactggggcttcagggatgtggagatgtagaggctgttgaaccccaaggcaagacacagtctgatggaggctgagctctccagatgatgccacactgcagctgctgaggactcaggggtttgtgggaccagtgtgagtctctctctggagtaatgtcttcatgcaatc

SEQ ID NO: 39866 - DNA, 426 bp, Homo Sapiens
tttgagcatacataaggccatgatactttaatgtgaaccaccatttcttggaagaaagaagacatccaaatgtccgattcagagagaaagttcctggccagtcatccagtagactctctccactcttcaatgggaaggtgatgcttatatttttaaaaatctctacaaagctcacatacaacaagacagtacatcctagatttgtgactgatatgagcatttaaggctgtcattttcaagtataaaagtttagtgttccattacccaatctgtgcagtagacatagctataagctcaagtcatgtgaattaacagaagcccaccaaagacatttaaaaaattataatttgggcaacagcaagtttaaatgtaggaaaggctagaaaaaatgtgatgagattgtttctctaaaatgcattaggttgt

SEQ ID NO: 39867 - DNA, 365 bp, Homo Sapiens
ttaactctaaatccccacacaactgatcagaaggacacccccttatcagaacacaacaactaaatcttggagtttctacattcagaagggcagccttgcaagaggttgatgtgcagtctcgggcgtgaaaggataccgattttgcagcttcggtttttgagaataactaataccagatgattaaccaaacttgaaatgaaccgacttctcttgtgaactatacaggggccgaaagaatcacctctgcaagtattggggtcagaatagggaatcactcctccagtaaaaaggaaccggggggtgacccctctgagatgtcttgatttgtatagctggggatattgagaattctctcaagctgcctt

SEQ ID NO: 39868 - DNA, 402 bp, Homo Sapiens
gagacagagtcttgaggaaatacatttctaagaaggatttttacagacactcatctttcatacccaaccacagggtctaactctaaagaggataaaaccaattactttcgtcccaagagctcatgactaatgacagcgtaaatctatgctatcaaaacctgcgtctctcatctgttacgagtattcaggcaggattcaaatattctcaaagaaagaaacacagtgcatgctgtgatcgcctgctcagcaacaacaagcactgcatcccaaactatctcctcccaggaattaaatgaggccagttgtgtacactggcatttcctccactgtggtactgcagaaggtctcagtgtcacaaagaatccttttgtcttctttaatatttatggtcacagctgtgct

SEQ ID NO: 39869 - DNA, 365 bp, Homo Sapiens
aaatttaaatctcaatgcacataaagttttattagaacatatccatgatcatttgttcacgtacagtattgtctatagctgctcttacaataccacagcagaggtgactaactacaacagacactgtgaacaccacgtaaggctgtctagccttaccaaaaaagtttgccaatccctcaatagttcatcctttccccccatgatctgcagtactgtctctgttgtaaattagagtttcatttatttgtgggtctgttttggaaatttggctcaatccattggccaatttaactatctctacaccaaaaatacactatcttgatcacaataataatttataataagccttaataataacacaagtc

SEQ ID NO: 39870 - DNA, 521 bp, Homo Sapiens
tttgtatagctttcaggaagcaggaagacttttctctttttaaatgatagaacataaatactgaaacaatgacattggaacatctatccattcttgtttcggtggaaagtctatctaattcagcttctggaccgactgttcgtttttccatgatctcttcctgcaggtttgctaggagtccctttccccccataaacaccttcctttgggagatttgggtgccttccttttttaaggttttaaaaactaaaatgatttatagactatccgtatcctgttagagttgggcaagtgaatggatcatatttgcgtgggtcactctgattataggacttcactgtttcctgaacaaaaagtgcaagatttataattctattaatgctcataaagtcactcttttgatgagccataacttctctttatgaggagtgtgtatgccagtcacctatgataagggagaggaaagtccagacttctaacatattcactcacattccctgcaacattaacagtcttgaaac

SEQ ID NO: 39871 - DNA, 433 bp, Homo Sapiens
aagcaactgcctttatagggggcaataaagtggcatgaatcagtcgagagcaacacatttggtaaagaagtacaagtcagctaccgtgaagttggtggcctcccagtaaaggcggttagagaactaggttacgtatcaatctggagacttgacagtcaggttgggcagaacggaggtgaagcacacctctgcgacacttacaagctgaatggagaaaaagggctcccactgctcggtcccccaggccccgccgaccttactgttgcacacgaggagtatggcgtcgcatggagttaaaacgcgacggttaaagtggcggcccaggtatgttgcgagtttgccccggtatcacaaggagcacatagccgtcgggaacaacacgactcgcactcgaaagcactactccgatttgagatatcagttactagggacc

SEQ ID NO: 39872 - DNA, 471 bp, Homo Sapiens
ccattggattacaaactttattaaaaaatataaaacacaccaagtgtgagtgtgattgtcacttgggtgggaggacgaaccatgggtccttggcttatgggaacagtcagccctcatcccgcttttgatccccatgccaagtctgtacatgggaactgtttcccttctgcctcctagtcagtcagtcctcctccccaaggataattttatcttgtacaaaggagatttttgtcacggacactgaacttaaccatttctcactcttgtggtgtcttcagagtcctaactggttcttaggtaatgtggaaggaaggcacttccaattttgatacagaatataaccacaccccatgccatctcagaaacattttagcaagctttggtttcttgtctctctcttgccccctcttcccttctcccagtgtgaagcaggctgactcctgcagaggcagtggctcctggggcccctgg

SEQ ID NO: 39873 - DNA, 537 bp, Homo Sapiens
tcagcatagtcataccatttattttaagaaattttacttagaattaattgatccaacagtgaagagtggtactcctctatttgaaggcaggatcctaggatccagagcccatccctttggcttccctctcacctctgcagtgacccagtgacccaaaagtcaggtcgatggatcttccctaaactgaacaagagcccaaggaaccccagtttgaaaatgtctgtcccagaaaagagggcatgctatgacacgcatgggcattttttatgaaaaggcaagactgttcagcccttgactcaagttgtgtactatttgttcttggaaacagagagaggccaaactatccagtgtcatcacatcctgacctagctggattgaggctgctcaacactggggacaatcttcgggttaacaatagcaggcagcttttgtttgatggcacaaacagagggaaggtattgcctactcagcttacagggaactgaacacagtgtgttaaattgacgaatgttgaaaacaggttgcctgaaatgctga

SEQ ID NO: 39874 - DNA, 389 bp, Homo Sapiens
gcgtcctcagccgtccagaccctcgcattataaagggccggtggcggagattagcgagagaggatcttttttcttttcccccacgccctctgctttgggaacccgggaggcagcttatggggagggtggggagggtggggaaggtggggaggagactcagccgggcagccgagcactctagctctaggatgtaaacagagtaagagagccgcatgaattaactacgcgcgcctaccattttcttttgctccctctcaaaccctctccctttctctgctgctcctccgtagcagtactgtttgacaaaccgcatccttgtcctgtgagtataaatcatcgcaggcggaacagctgccctccacaccgagaacgcactgcgcgcccaccgc

SEQ ID NO: 39875 - DNA, 487 bp, Homo Sapiens
ttttggttttttgctggattcctccaagctgaggacttgcttcagtcagtcatttattcattcagcaaacacttctacaaatactggcagccaaagtgtgacacagttaagttctcacccagaagaagctgtccagtggggagactgacacaaaactggacaagcatattagcatgtgacaagtactgggatgagggaagtcccccatcctgcctggaaatggctttacaagaggctgactgtgagtacagactcctcaggagggccctcctggcagcaggcacggcacattccacagcagcttgacagccaaaactgagcagaagagaggcaagattgacaatttttgttgagggagggcctctgaggctcgcggaagagctgtggctttatcctaccggtgagagaagtcactgagggttttaatcaaagcatgcacttggtcacacctgcatcctaagattatgccgtggccaaatggaaggta

SEQ ID NO: 39876 - DNA, 534 bp, Homo Sapiens
ccgctttttccttttccctttctcttggttatgttttcacaatctcatctttttgtttgccgcggcagacctttctatcaaccccatctgagactaacccggaccatcagggcagctaccaagccgaaacaccagctgggaaggcttggagtccccaaaggaagctcttccaagcactgaggctgtgggatgtggatggccaactttcctgtcccctgatctctaagcctgaccacagggaccaagctcgcaaagcctggaggacagctccaccgagcccagggtggagatgaggggatgtctctgatgacgcatgcgtccatagggtggtggcctagcccacctgtgtcccgcccacattttttgaatgccaccttcacaaggacactgcccccaacccactgcggctctcccctcccaagcccaccctggttaccctgtccagagcacagctgggatcatctcaggctgatccgtgaatcctgttgttgcaggtgttcctggacactgaatgggatggtgggcgtccacatc

SEQ ID NO: 39877 - DNA, 505 bp, Homo Sapiens
caaaaactacaaccttacacaaaggacactgcaaccttgcaccaaaaaacttctctcgtgagaaaatctgcctagcaactgcctgtcaaccttggactggtgtcatccttgttattgatcttggtagccaagaataattacctcaaagtaattttgtaatcctcgtcatttgtccttaaaaacttgttttcctttactcctctgaatatgtacatagttgactatagcacaggcattcccattgcaatgccctattcccaaatacagatcacttccttttagagagcctctcccccattgtcaattaaatggaccgacttaccttcgcaaaaaccgaaaggaaactgctgggattccaggaatatgccaggaaaagggaagccagcattggtctaaaagtgagtttctcactggcaaagacaaagaatgtgtctttagaaagtgttttaaagaatagactgttctatcgtgctagtccccccatccaaaataaattctttagctg

SEQ ID NO: 39878 - DNA, 512 bp, Homo Sapiens
acttcctgaaatccttatttaaatggcagcattggcagtgtttctgcacacaaaccagagaatcagctacacaggagaaagtaagtttggccccaagtaaaacatgaaagaagcaaagcctgtctttgtgtgggtcccaggtccttccccttctgagggcctctgcactacctccttcttccagctctttgttttccccatgaaatatccagaattgctcccccgtccaagcctgcttccacaaatcacttctgcctgtgtcagtcacgtcagagctgactgtcctgttacttctcccaggagtatgtgcagtgagcactttagctctgaataaggaatgacaagttttgctctgataatattttcaagccacagaggcccaggggcagtcatactcttgaatctccaggtacctttcatgcctgggggacctgcttcatttctgaaaatggccacaggggtcttagaagtctggatttccaggtgcctgctgccctcagatgcctgaaaac

SEQ ID NO: 39879 - DNA, 410 bp, Homo Sapiens
attacttactcagttttatttaggtggacacaacagtgaagaactcaaacatggtttgacctttatctacagacacagcagcctggattttcagcctttcattccttttaaatgaaagtcagcaggctcaaaatgcagagcctggctaagtcacttctgtggaaatatgaaatatagtagtgacaaccaccaagggctttcaaattcttgtgttcttctaaggatcctttcctaacaccatgatttgttctcatctttgtggaaatgaaaccaagatggtcttaatttgtaaagtcctttttcctctgttggcagtcttcttacaaaggatgcagcaaaaagaacacatttttctttcaaagttttgaagaaatatagtcattaaaaagaatttaaattatgcctagagc

SEQ ID NO: 39880 - DNA, 369 bp, Homo Sapiens
gtgtgagccatggcacccagcctgccagcagttttaatttgcatccacatttaaagatgttaaatctaaatgtaaaagaatgtgagtcaataaaacactacatatcttagagtaataagacaaacagaagtagtaaacatttctttattttggatgtgacaggcaaaaatagaatgcaactatgaaaaaatataaataaaattcaggtatgactgaaaattacaaatttcaaacattattcaaagtgcttttagttccaagaaaggggatatgactttctaattgttgtattcttcttttggaataggatcctttgcatagctgaaaatatctaaacatataatgtttcatgttctacctaaggtagac

SEQ ID NO: 39881 - DNA, 509 bp, Homo Sapiens
ttccttaaacagaactttattttctcacagttctggaggctagaagttcaagatcaagatgtctgcaggtttgctttcttctgaggcctccctcctggcaggcctctttgcagatggccaccttctcactgtgttctcacagggtctttctttatattctcaggtgaaaacttaaatatttaaaagtgttgaaacaaagttttagtttttactctttaccaggtattttctacagtggtaaagagataggctaagccagggtgtagagttgaaccaagacgactctccaggcaccaaccgcacatcacacgctgggttctggcccgggcttccctgcattttaaatgggaaagactgccagctgtctcatgtttaacttgtctgttattttcctgcttcagcacactgccacctaaaaaggagccgtaccaacaggtacagttccacagaacgtccgttctgtccacgatgtggcagctaattcatgaattgcctgaaagcttgcaatc

SEQ ID NO: 39882 - DNA, 450 bp, Homo Sapiens
gttcttttgtcatttattcattcattgaacaagtatttacaaaacagctgctttatgctaggcattgtttctgggcactgggaacacattggtgaacacagatagaaatggtcactgaccttgtggaactttccatccaatgaaactaggatcattattcaaatgactggacaaatacataggaaataactgtgttaagtgctctgaaggaatgatatatagtaccatggaagtgtgtaactcggggacttgactgagtctaaggagttgagaatgagtttgcaaaggacacagagaaagacaggtcagagcaataggaggagaactggcagtgacatcagagaatcaaaggaggaggtggtcgactgccgagatatggggagctatgagacacctatttgccttgactcctcacccgctagttgtgagtacaggtatggaaaggctctg

SEQ ID NO: 39883 - DNA, 353 bp, Homo Sapiens
aagatcaatataaaaataattttcattgctgtacactagcaatgaaaatctgaaaataatattaacaattttatttaaaattgcatcccaaactacaatagttaggaataaatttaacaaggaaagtgtaagacttctacactgaaaactgtaaatcattgttcaaaaaaattaaagaagatatagaaaaatgaagagacgcatggaacaaaagattttatattgtgaagatggcaatattccccagattgacctttagatttaatgtaatctctatcaaaatcccagaagctgataaattgattctaaaatttatatgtaaatgcaaggaacccagaagagccaaaatagtc

SEQ ID NO: 39884 - DNA, 475 bp, Homo Sapiens
aggaatcacatcctctgaatctcttaaagttggagttgaccaaaaatccaaccccatctctcttttcactccacgcactcctgctgaaaacttatgttcaacccaaagctcctactaccacaagggcccggcgcaactgatgctccagcccagagtaggtcctaaagaactaggcctgtacttccacctccagtctggacttctctgccttgaccgccaacaagaacctcaaattcaacatgtgtaacacgtgtaaaaccaaaccactatccctacactttaaaggtcctatcttagaggactgacaccatgattgcattccaccttccaatgaatcagtaggtcaaggtgactcaatctcccagacttcttaaactctctgctacagccctggtgcaggcccttaacctcttattcctgcctctgtgactcttccaatccatcctctacacagcagacagtgatctttcaacta

SEQ ID NO: 39885 - DNA, 518 bp, Homo Sapiens
cctacgccccgagccagtcccgttccctccctccggaagaccccggtggttcccggctccgacccagcacactcacctgccagccgctgccgtccgccatgtctgggcgaccggcgcgccaagcccgcccctcagtccgccagccaatgaaaaatgaagaaaacggcacctcgtgatcgactgacagaagaactaatgagcaccgacacattcaatcacgtcttcgcccccttcttcgagaagcgccgacaaacaggacgagcaaccaatagcaaccgagggcggctgcggccgcgcggatgggccggggatcgcagggtaaatccggggcgagacctggcgcgaacctacgcgaccaccgcgacgacagcgccattcaccccgggccaggcgggcaatcctgggccgcgcactaaccttacgtcagccgcctctcaaatcacacggctctggccagttcttttcagcagctttatgagattttctcaaatctcaacaatccggtatattttcaaaag

SEQ ID NO: 39886 - DNA, 454 bp, Homo Sapiens
agatagagtctgatctggaggctggaaggcggggctaaaactcccactcacttacctctaccaacaactaggccaccaagtcatttctgaggactggctcaagaaagcagatttaacttacactggcctagcccaggccaccagatgcatccacggagatccaaatgcatctaatcacttgaatcaagatctagacagggacgcgtgcagcaggcttcatctgactgattcctgacacgggagagaaagcctaagctccgaatcatccttcaatgtttacaaaggccctaaatagcagtgggctaattgctgttcctggatttccaggagacctgagacccatgaaggagcaggaaagaacctgggggttaaaaaattaattctggaacctactggagcggaaggggctgcactcacctggaaaagacaaagttcttgggaactggccacgtag

SEQ ID NO: 39887 - DNA, 359 bp, Homo Sapiens
tttttagagccatttaaacattttccaatatatatatagagagagaaagaagacagaatcaggagttctgtgaggcagaggagaggggagtggcaatatcaacaatggtttctatgcgtgaaaggcccttcctaaacctcctaccatagcaaagctcccccggtctatcagatgaacagaattctagatttgttttctctttctctcaaaggccactgacaagaaagcagctatggtatattttccttgactgagggctggagactcaaaaacaaaagctatctgcccagccagagccctctagaaggttgctgggcttggggctattttacactggataagcccttcctgagtttgga

SEQ ID NO: 39888 - DNA, 379 bp, Homo Sapiens
cgggtgatttctgtaaaaaggggggatgggggtaacccttttaaaaaggggaatatttttctgggaaaatgaaaaaactggaatggtatttggggtgaaaccaaaggggtttgggctttagatccaacaaagggatttgggaaaaaatctttcggctttgcatatggttggtctggggggtttcccacagcccagaaagtgcacaaaaaggcttggggctggctggcgacaaaggaaaagagagacttccccaaatttggaaacttgctgggcacacgtttttcaagatatccccttacccccccaaaagaaaacagccaattttttttaaataagcaagggagaataagttccttggtataagaaataagtatagacg

SEQ ID NO: 39889 - DNA, 380 bp, Homo Sapiens
gtttgctggggcaaacgggcgggtaaatcgaccacctttaagatgatgtgcggtttgctggtgccgacttccggccaggcgctggtgctggggatggatctgaaagagagttccggtaagcgcgcccatctcggctatatggcgcaaaaattttcgctctacggtaacctgacggtcgaacagaatttacgctttttctctggtgtgtatggcttacgcggtcgggcgcagaacgaaaaaatctcccgcatgagcgaggcgttcggctgaaaagtatcgctcccacgccaccgatgaactgccattaggttttaaacagcggctggcgtggcctgttcgctgatgcatgaaccggacattctgtttctcgacgaaccgac

SEQ ID NO: 39890 - DNA, 422 bp, Homo Sapiens
acaatgcccgagtaccacctaccatagacaacgtgatgttcagtgattttaattagagaagcttctaaatagtgttttagatttaaaaaacaacatagataactacatataaatgatttgtatttctgtataaaaattgaaaatagtgtactaatttttcaatttaatcctctaaatgagtttaatttcccttcatagtagaattatctgtctgcatgttgccaaatactaaggagataaattagattgatacttagaaagcatctgaatacttcaaattgaaggagtctataaataactaaaataattcactgtctgtctatgtcaaggtgctatttggtaattctttcaaaaacattttaatgatcatctattaaccaccaatatagtcacaggtaccttgaggaatatgaagctgatta

SEQ ID NO: 39891 - DNA, 472 bp, Homo Sapiens
cctattgctaaaaacgtcaaaatttacttgtttaaaaaagaaagtttggcgaaaagggagcaggcctcggcaagggaccacagctccttaaaaaacagaactattcagggccctccacaaaccacagccaagcctaaagccgcccaaacccacagtgctcccaggaaggcgcaaaggaggccgacttactttgcacgcaggtggcgaacgtgaagttatttggtgtacggagacccatacttgttgatgcagtctgcaggaagaaagggaatggatgtcagtcatccttacaagaccggatcgactgcagagcctctgcttctgagacgctctggagaggcagttactctgcttacctggggtgctatcatcctccagaaacaatgccgcttagcttgtgttaataaaaaacatgttagccccaaccctgacaaacaggaaaccacctccaccaactcagcggagttgtgca

SEQ ID NO: 39892 - DNA, 408 bp, Homo Sapiens
gatattataaaactgcatatatttaatgtatacaatttgatgagtttagacatagtcacatacctgtcaaaccatcaccacaatcaaggtaataaatatatccatcacctccaaaagcttccttgtgtatatgtatatggtaagaacacttaacatgagaggtaccctcttaacaaaatgttaagtgcataatacagtattgttcattatacgaactctgctatacagctgatctttagagctaattcatcttgcatactataattttataccaattagacaactccctatttcctcatttctcccttcctccttttccctaggaaccactgttctattctctgcttctatgagtttgactattttagaacctcatataaatgaaatcaggcagtatttgtctttctg

SEQ ID NO: 39893 - DNA, 519 bp, Homo Sapiens
aaataatcgtccttacacttaatttatttatcttgaaatggatggcaactataactgcagacctcaatctatagtatacatcaagcaattcaaatttttcctataacattatgacttgcctctgctttggggaacacttctggcaccaccagtggtacttcgtataggtcttatggcattatttaaggtttaggttattgcactaaacaggatgcaaaatactcaaggacatagagagatcactttttactgcaatacacaatttactggatgaactgttcactgtgacatgattagggtcacatggcattttaaatggatactcacaatacttgagatcattgcaatagcaacaagaggtggttacaaaattattacagtagtatagtaggtaatgcagttaattttatccaattacgatttatactgtattgtttacatttgtttctatttatctagactgtgaatggtgccatgtatgtgatcgagtgtgtgcgtaagttctgatacattttaagg

SEQ ID NO: 39894 - DNA, 449 bp, Homo Sapiens
tcgcattaggagacagattggtggtaaacttgacagaggattaggctgccactacctgcattgcctgatagatcttagcaaccctgaaagttgtaatgtgaaaggtgtgatgtacatggcaccattcataaagtatgctacccacaaagggttggacctgaaagcttttagctataaccttctgcttaaagaaatagtgtatttagaggaataagtaaatgacatgagaaaaccatcagataaattcaggatgtggaacaacttaaaagtgtattgctgcagtttcctcagttcatcaaaaacatgaaaatgaaggaatgggtgcccctttctaaattgagggacttaaatcagttgtactcaaatgcaatcaggaaaccttatttcagcttgacgagtacaagccaactgaagaaacacatttccaagacatctgaaaaatttgaatt

SEQ ID NO: 39895 - DNA, 473 bp, Homo Sapiens
catcctggaaatgagctaatgcagacattgccatttgctcactacaaatccattttcttttttgttgtggcagaaacttgccaactgtaaacaatatctgtgttatctttctccatatacccatttagactgtatgatctaatcctctttattaagtggggctatgtttctgagtgtaggtagcagaacatacatagatgtgatatgtgccatttccatgcctagtccttaaagcccgacttacttctccacactccctttctttcctggaagccagatgtgaacaatacaatatctgcaggccagatgtgaactatacaatggaggacgctgagcctctgagggatgatagagccatgagatcacaggcatttggatccctaaatgattacatgaagcagctcccccaccctcaatttccattgtactgtgatgtaaacaagaatgatgtcttgtgtgtgtatgtgataatc

SEQ ID NO: 39896 - DNA, 449 bp, Homo Sapiens
acaaaagaaagaggtttattggacttacatttccacatgctgggaaggcctcacaatcatggtggaaggcaaggaagagcaaatcacatcttatgcggatggcagcaggcaaaaggagagcttgtgcagggcaactcccattttcaaaaccatcagatctcatgagacccattcgctatcatgagaacagcataattcaatcatctctcacccactggatccctccccacaacacacggtaattatgggagttataagaagagatttgggtggggatgcaaagccaaaccatatcatcttagtaaccttaaattttagtgaaaccttaggaagcaaaaaatcctaaactatcagatattagcattttatagatgagaataattccacaatttttggaaacatattcctccctatcataaccctttcttaattggaaatgactgagatat

SEQ ID NO: 39897 - DNA, 460 bp, Homo Sapiens
gctacttttatgactaatgctgccttagaggccactattaccttgttgttcaggttattctgtaatcctcatagcaatatcttataaaacaagagacctatgataggttaggttttcactctatatattgaactcctcattgatatgtggacagaaatcaacaagtagaggaccaagcaaactaattaagtttacccaccatctccagtgggatgggtcagatggaaggatctgtttccttgattcctgtcacatgtacctgttgatctaattggattccttggcactacctgcttataaaattagtattgaaagtgttgtttcctttctctccagatgctgcctttatgcctgcatcagttttccctagcattccccatacttccaaattaggaagtctctgcttctaacaaaatatcgttgttattgctgatatggacacaatcagcaagtactggat

SEQ ID NO: 39898 - DNA, 353 bp, Homo Sapiens
aaaaatcagcgagagtccgtttaatagcagcttcatgtcctgctggctttgcttgctgtacgtcctggcgaccaagagtggacagaagcgtgagtgccgaagtgggccatagaacagcttgcaacgccgcacagccccaagcgatccaatcgacaaccgagaagaaccttcggcatgccgcctctaccaggagagcagacgctggtaggcttggcatccatattatttgaaaggtcagaaggaacatctatgagacagggaaggggtgaggctgaagcagcgcctaacagccagggacatgtagggaacacgagcagcacagcgcggccacagctggtcacgacgctgaacaa

SEQ ID NO: 39899 - DNA, 364 bp, Homo Sapiens
ggaaaaagacttcgcaatcatttatgtaacaaaagattttcattcagagcatacatatatctaacaaaacatttgtatccagaactgttaaacacgaaggaccagatttaaaaacgggcagaagactggaactgaaacttcacaaaagatgcagaatggtcagtaagcacaggacaaaaacggtgccagtgacgctggtgccaaagcgggaaggaacgcattcttcagcctaaaagacctaacagtaggacacggacataaccactcccggccaaaaagaacacagagcaacacaacgtcttggctaacgaaaactcaaagcctcaattcactcagttccttcacagcgctcggaaacagagaa

SEQ ID NO: 39900 - DNA, 383 bp, Homo Sapiens
acatccagaagtattattgctcttcctgggacatcagggccaccagtgctgcctgtacgtcttctgcctgggatgggggcagccgacagtcctgaatgagggccacagcagctgcctctgtcaggctgctgaagtcctgggatgttttgacagggaggtgcccagccagctcacagagggcaacattgaaagcttcaccgtcctttatcccaaagctggacttccgggcccacagaattactcggacccctgtgagggctgaggaaggtgatgtctttcccggcggacgtccccgggtgacaaacaagttatgagcaatctcatggtcagtcagataatcagtggcccgacataccctgcttatcaaggactccaagtcaggc

SEQ ID NO: 39901 - DNA, 433 bp, Homo Sapiens
aatatattaggctatttattaatatgatattcatagcacaggagctaggggaatggacattgtgagactaactccaaagagtatatttaaaagtaagtcttacataagccagatcattccttttcccattatatttcataatcctcttctgatttcattaacctctccataacaaagacgggcgaactcaatctttcattttgcctttttgacttctgggatatcttctcttttctcctggctcaattcctagcctattgcaccatttagctggatattctagtgcttaggtatctttttcatataccacacgaacaggttaaacagatacttagaattgggaaaatctcatgatagcaactaggcagtagtacttaatcttttctgctgtgtttttattctcaaaacatattttcacatgcctcattcaaaa

SEQ ID NO: 39902 - DNA, 381 bp, Homo Sapiens
gaaggtagaattaagtttctggaattgcacctacatgttttcttattaacattcagaattgggaatattaatttttccagtgagtagttttctgaaattggtaacttggagagtaaaataacgtattttgcttttcaattttgtgtttgtttacttttatgtaaaaatttgatatgtgaattacacagttctaataaaacctcatgccttttcattacatctaatttgaactctcaacttcatgttacagaatgctttaaagatgctttaatgaaaagtattaagaaaatatatagatttgtatgtcagtttatacttcagaaatccatatatttgtcatatttatttttttagaaacctcctaattggataactagatgg

SEQ ID NO: 39903 - DNA, 406 bp, Homo Sapiens
catttaactattaatatatgggtctcttgattctgtgactaaaatttggtcaatttgtgtcatttagaaagtactgattttaaaaactaatagcttaaaactgccactcgcagaaatgtatgccaaagtggtccacgaaacattcgcctttcctgctgaagtttttacaattcattgttatcatgagccagtctttgactacttggcttaaatggcctgttgttgcagtcagttcttagaccgttcttccatcactgtttaatagtgtggttgcaggtattagtgataatagtgcatttagccatcagatgctttcagtgcatactttgtgacactggccatctccagcagccttcttgaccactgtcgaagatggcgcccgccgcaacttgtcaggctcatatca

SEQ ID NO: 39904 - DNA, 359 bp, Homo Sapiens
taaagaatttagtgctagaaaatacttcatttcctttgagaaatgaagaatgggtgtctgttgttgttttcttttctaaaaataagaatcatataattaatgttcctttttcactttggctgccccaaaacacagggctaactttgaggtctaactctagtaactgtgtagaccctcactgtatttgtttttctctggcctttgtattatgttttgtttttactcttgactgacatataatatctgatcttatatgtatttgttgtgatcatcttaaatcctttgtgaataaaagagaatgaataaatttaaaaactaaataaataaaacagccaggcatggtagccctagcctatagg

SEQ ID NO: 39905 - DNA, 603 bp, Homo Sapiens
gacgaaaacgttggatttttattacgtttcattacaaaggatgcaaaggtacaaagacaaaagcagccctgccagaggatggggcagggacggccgagtgtgccctgagccgcctgcccccgcccgctgcggccgcccacaatcatggcccacgggacgtccgtggcagagtatacatgctagggttgggggagagccagcctgggcacagaggagcacaggcaggaacagggctcggaccggcgggtttgcatatatcagtggggccacccagcccctaggggacagtttcctactcaggggcacggcagggcagttgagactttggctgccaaagccctccctccccaggcctactggccaagtccatggctaagtcccctcctggtgggcaggagatcagaagttcttgatggctgggctgggcaagagttgccccaaattccagaacacttcgagatgggggccatccccgaccccaacacatgccacctgtccctggctcctgggggtggggtgctggccaggagcccagaaggtggatacaggctctggaatcatcagagccagcaccaccccaaggcccagccctgccccccatcc

SEQ ID NO: 39906 - DNA, 401 bp, Homo Sapiens
tttaaaaacccaaattaatcaaatgaaagaagcggcaaaagatctaacctagctggcactctgcaagtgtctctcctctgtggaaacgaaatcctgccctgagcacaattcttgacataactgccttctgcctcttgagataaaaatgacctgaccgatggctggcaccctcagccagagctaagaagatggattcctaccttgttaagtaccacatttgcatgtagacccaaaacgtttaagagccacttaaatattcaagacaaatgaaatatgtgagaataaggttttaaaaaaccctttagaagatgttcaagagatactgcctcgcctaacgtgatgtttccaatcttcaaacgtgagtaggtcccaagaggaaaagcacacctcactcagattga

SEQ ID NO: 39907 - DNA, 402 bp, Homo Sapiens
ttccttccttctcagcctcctttcctaactttctttccccaaacatcaagtgttgagagagttctttggttataaacatcctgggtcctcttcacgtctcactctattcttgctcaaagggatctaatctactcccatgattttaataagcacctagaagatagaattcccaaatgtttgtttctaattcagatccgaatacacacctgcgaactcaacatcacatggatgtctcagaggagcctaaatttcactcatcatgactaaaaactcaacttaccatcattgtcatccaacataaatgtggcctagatcagtaggtgggtcaacaaccacccagttatgcaacctgaaatccagagggacattcccgaaaccttctcctactaactttccagtatg

SEQ ID NO: 39908 - DNA, 407 bp, Homo Sapiens
taaggttttctgtttttttaatctaaaactgcatattctacttaatgtagaatttagatctctaaaataaaacaaaatatggcagatatgtacatcatgcattttaagtggaagctaaactatttcttagagaaaaaaatatataaattatgctgagagcaaatctaggcaagtctttcaagatttgcctgtttgaaaatgtaacaatgatcttaaaactgaatgttttatgttaactgcaaataaattttaaattcagtcagtctgagtcagattaatgttcttctccttaaggatgtaagattcattcttgggattttgttaagtaattaattttgatatcagtgtatgggtttagaatcaaacaatatcttggaaaaagacgtattacaaatttaaagaaggac

SEQ ID NO: 39909 - DNA, 400 bp, Homo Sapiens
actgtacagaatttattaatatgtagatatgaggtgtctggtgacagatcctccaagttatttatatcagaggaagaaagtggtctggctgcattcacagatgagaacagcagggtagcaacactcaggaccatgacactgggtgctcccaaccccgaaggaagcatctcactgtacacagatggccaggagagtgatcacagggtcctgtgttatctcctcctcctcctctcctgggtcctgggcttcacttcctaatctcagctggtagcaaaattaacttggtattcaagacccttatggcccctcttcaccatagcatctcatcaggtctctttcctcataagaatttcagcacaggggtgtactctagaaatatcaccatggaaggggtggcaga

SEQ ID NO: 39910 - DNA, 560 bp, Homo Sapiens
ggagaacggggtcttgctatattgcccaggcaggtctcgaactcctgggctcaagctatactcccacctcttgcctccctgagagctggcattacaggcatgagccaccgtgcccggccggctacctcattctagtactgccccaacactgcctgccatttttgggtgctgagctaatcaattacctctggtctttagctcctttctggatgtcgtttcttagtgggtcaaatgagatatataaaaacttcctaaaaaatggatactttgctgtcttttctgtatctttcagttatcatcccaccacaattttcttttagtttacctcttccctctccacaaaagttgttctcaataaagtccagggaaacatttgtattcattttctattgctgctgtaccaaattatcacaaacttggcttaaaacaacacaaatttattctctcatagttctataggccagaagtcagaaatcagtttcacagaactaaagtaaacgtgtcagcagggcttgctccttcgggaggctataggggataatctgttttctttttctttt

SEQ ID NO: 39911 - DNA, 592 bp, Homo Sapiens
cagcagtggctcccttgccaaggaacctgaggctgcaggtttcagggacccccttgaagaaacctctcctggccaaaaagagaagtctctcctgtagagtcacaagagaagcaaaagagggtgggtcactgggtcctggacatagcccccaaccccaagacttcccaatatggagaaactacaccaatgtttaaaaggggaaaaggaaagaacttgtacatcaagggaagatgatttgtaaacatacagtcctgtgcagaaagatccccttcaggaggtgtctccagcatcccaaagctgtgcgcaccttctcttttcctgcctcaggccacctatgcatccagctgcaagcccatccccacacctgaaatccatctcttgaatcccagccaggttatataccaccccattgccatgtcctgtcctggccagaatgcatgctgttcccccaagcctcgtgggagtgaggccatgggaaacagagatgagcatgtctggacaagtctgtgatggtagtggatgagaataacccatggcaaaacacgcacattcattaagaaatagggcgacagattccccgttggtgaagcac

SEQ ID NO: 39912 - DNA, 413 bp, Homo Sapiens
gccaaaggaagcaagctttattgaatttacaacgtagaaaatatttgtagttccttagacatttgcattgctataaaaattacactttatggtataattattaaggtttgaagagaaataaacagtataaacgaaatatggcccacacaatgaaaatgtaaaccatataaatcaaaatcataaaacaattattcaatactcagaggcctacttaatatatacatatgaaatttcttacacacacacaataaatgcccacaaaaaccatcactgaagccgatcactgtacaaatatgaaaataaatctttatctttaacctcaattttatcttcagcaggagggttgtgcaacttgggtttatgcagatcacatcaagtgttaaataatcaaatgtcacatatgtcatataaag

SEQ ID NO: 39913 - DNA, 515 bp, Homo Sapiens
ggagcccatttgctatggttgctcacaatcttctccttttggaacagatccttttggatcttccttttggaacatctttcagcttaaggccctttaaaatcaaatccaaatttctcgatatgacacataagtctgtaactctcttgactttaaacatagcactacttcttcagagaacaatcctgtcactgtaagaatttcctgatgccctaaagctgacttaaatactcatctgacatgctctcttaagtatatatacgtccactattattgaatgtattctctattacaattgtatatttgattgcctgtctcccctcaactgcatcatacattttcaggggtgagccaatgtctttttcactctatctcagtgccctgcatagtttctggcacagacatttccatgtctggtgattttttttccacattgcttacccagatagagtctacatgtaaccaatattgagaattgtgagtgttctatcaaaaatgttgtgggtttttgatataaa

SEQ ID NO: 39914 - DNA, 451 bp, Homo Sapiens
gtatagcgatatgcagtctataaattctcacaaacacagctttaaaaagtgcaagttgcaggaactatgataaatttgaaaataacaatctttttattagacatctgaccaagaggatgctgtaagatgcgcaatgtcaggttatatggagcttattcacatgcttcttgctatactaaatatacactaaatggcttttatttaaaatttcataaaaggaacatttcattaaaaccaatttaaattctacaactactaagaacaaataaaactagtagaggtgaacaaatctctcttctccagtcgactggacagcaggattactgagtagtaggtaggccgagtcttcttcacccccttattatttggtgaggaagtcaactgtgagaagtgactcgaactgtcagaagaaatgagaaaagtgcttgggtctatgggcagggtactaaga

SEQ ID NO: 39915 - DNA, 457 bp, Homo Sapiens
gctccttatcagcaccatagatttttaactatggacctgaacagattgggataaaaggaaacacaactgtaccaccaaactctcattctttttaatcataaaagtacttaattcagaaactttaggggaaacaaattcttttctttcccagaatcagaattgcactgacattgtggcccaacatgtgacttgagctcaagtatacactaaagtgaaaagctattgtcaatatttagcggaacgtatgccatgtcggaggcagtatcagcttcctaataccaaaagaaaattcacgtatcacagggctactgagaagaagtaacgtgcagccccagagggcacagatttctgctttatgtaaatcagagcctgtcacggcatgcatgattcactgctcagggtgtactctcctgtgacgaatgagtcccgcttaatttggcagtgattatgcgggttg

SEQ ID NO: 39916 - DNA, 373 bp, Homo Sapiens
aattgtctttttttaactgacttctggttcccatttttccttagtcttaaataatctttcttttgaactaccacagacacttatttccacctatattaagaatcatataacttaagaaattattgtttatatcctctctcccttcctagattgattagaaattacagaaactatgaaggtaagaagtacatcttaacattatatcctcacagtgcacgtgccactgtcttggtcccaaccaattcagtgtggctcatttaccactatatattaaggtcccttagctataacacatagaactattttcccaaacaggatggagaatggccctggcattggtagcttaacatttaactgagtgggggcagatatt

SEQ ID NO: 39917 - DNA, 374 bp, Homo Sapiens
tgtagaaacatagtgctaaggcataaaggtcagtacacaaaatccacttaatcctaatgtacatgaagcatagaacatactgaaacccaatcaccatgtaggtcatagtttctatggggaaaatgattttagaattgtgtattacaagccagaaatccatctcttttagctacaatgggatcacaattatgcctcccattctaaagtgtgtagtaggaagaaaaactctctcattcctgactttagtggcagttcctgcagccagtgggcctgcaaggggcataggtagcatggaggattggcagaggtctttaaacctttgtaaagatgaggacatcttactaatatcatctcaccagagacccccctggttc

SEQ ID NO: 39918 - DNA, 396 bp, Homo Sapiens
aaatatttttattagtatttcaaacatacaggaaaagacaaatgttttccattcatcttgatagctaaatacctttagatctacacaccaagatgaagaccgccttgtgtcttggataaatgtaacgagcagatgctggcagctcgcaggtgctctgggctggagtagttagaactgccgggccaggtggagtgagccagcactgctcaggggagcttcatctctctgattccaaaataaatgttttctggagtctcaacttcaccctcctggagaggggtaatcttatctgtggaggagagagcaagggctgagggggcgctggggtggcatgagaggcccaaagaccttgacagacacggtgggcttggcgcggggcaccgggttaaagaggag

SEQ ID NO: 39919 - DNA, 504 bp, Homo Sapiens
ccaactcaggacaaggtacaaaatcgcggcgccacgcgacgcgacgctgtgacgcccacgctcaccactcgttcaagtctcttctctgaaacaaattgtccacgcgggacctcagcatccgggcgcaaaacgcgcaagtacacaggggtctctgcaacttcttctgcggtcttggtcggattgggtcccgccacgtcagttctcacacaccttgcgcaggaggcattcagcgaggatcgtcgtatctttcctctcgttacttacgtttctcggcgtggatcgtcgacaggagcggtgacgcgaatattccgtcacctcgtatgccgctgctcgcgcacgcatccattctcggtgcactccttcttttgtattctccagacagtcgttcatggagccaccacgttctctcagtgatggctcatggcggacttacgtgcagtctcgcgcgcgattttagcgcctcggaccgcaagatgtacgaacgtcaccatctccctcgcggtt

SEQ ID NO: 39920 - DNA, 462 bp, Homo Sapiens
atgttcacttgaagatcctcggcctgattgaaggctccgcccacaatgctggaaggccccctcgcaggaaaagtacctcgctgaaccagcgtgtgggctctctcgccgccacgatccagctctggccacctggcacgactcgtagtcccgctggcacgctgcactcagcgcaaacgcacctttctcgtctcgcaagacgcacacctcagacatcgacctgcgattgtcgtttccaaaaaagatgacaccggccaccgagctgtctctgagcttgcccagtgcctggcagactgtcgtgatcagactgtcgtcacgaaggtctcacgtgagttctctcgggaacggatagtcctccgtaccacaggcacccgcccgtcctcaccacagcgcctacagaagtatcccagtgcacacgagactcgccgcgagttcgactactcgcggctaacttaatccaacaca

SEQ ID NO: 39921 - DNA, 389 bp, Homo Sapiens
aggctagtaacatcagttttattgcggttgggttggcaccataagcctgacgggggttgggcctggcataacgtgttattaattccaacaagcatttgtctcaaaggtctgttgatcctcaagtttcgcctcattgacactggcaaggtcctcctcgacggtcatggatggttttctgcagactttgccacagatctctcggtaaactcttcaagggtacaggctcgtacactactgcccaagagtctgatctcgcgtcatatttagctctgtggcggaatgatatcctctgatgccatcaggactgtgagggacgtgtccattgttcgtagttcctcctccaactggctgagtctgctgcttggcagccccatcactctcgtcggagc

SEQ ID NO: 39922 - DNA, 512 bp, Homo Sapiens
tatgcgtatcacaatttattaaactctaacatctaagagcaaaaacaccaggattaagtaagaacatgcatgaactaaaatttacatagatattcaaagtaagttaaatttaccagagtcctgcatctggcctctcccatgccattatcgctattttgcaatttgttttgttcaggaagcctctgattttaatatttaaagtgtcacctgagaagagtaacctcaattcttcatgttttctcaacaatcttagaggtgttggacatcattaataaaatatactaaattatcagagaacttaagaacgctaagattctgatgagttcctttaccattttcagtcactttctaaaagggatttaacttcacattatcaaataacattttacactaaaaacacaatttatatagccctaaaataatattacttgagagatctaaatgaattccaccaatgcaaacgaagtttatatactgtattagtaatttgataccaccgtattccatggaga

SEQ ID NO: 39923 - DNA, 450 bp, Homo Sapiens
tattcagctcaggggtggggtggctgggagcatgaacttcaggtccaggaagatgggtttggatccagtctttgccatttgctctctgaaataacactcaaaacatttcactcctctaagcctcagtgtccttataaaaaattgggtgaacaatactggtcccgtgtacattgtgtaaagattgaatagtgcataataaactgtattagaagatcttgtcaaggtgtgtggcacatggtatgtgctcgggtcaatagactttgtgtgtagtaacggctctggtagtaatttagctagctggagagatggtaataaatgggacagcaacaagtattgttatccccatttcacatatgaagatataggctcagggaaaagaaataaatatcccctagagtcgtcgggtaatgtgccaccccatgacacctcctaaagctggcacatgttaat

SEQ ID NO: 39924 - DNA, 573 bp, Homo Sapiens
aaattgacattttattgacttgcagtgggagttgttaaagacagattactgcagcaagggttgagtttgattgaaaggacgggagagaactcagcttccaaaagcatcaaacttgaaggccagtaataccccaaggggcaaggtgagcacataaatttgaactcatacaagaatactttccagcacatgcactcataccacacatcacaaatagctcccagaagccaggcccagagacaccaggtgaaatgagggggtaagagcacagtgttctagatttgactcttatcaacgtcccgtccccaccccaacccgatgtctggccccactgggagcttcagagatggaatttctcatactttaatggagaaatagtgtcttgaggaaacacccttttgcttccaggaagaaaatgatcccatttcaaagctgtctcttcagggactccctgcatgcttagtggctcgcagaatgcagcacttgctgggaggccagcagcggtctgcaaaggccttctcgggagagcctagccccgtgcgatttgtcttggtgcaggcgtgggtgtgggcgaca

SEQ ID NO: 39925 - DNA, 477 bp, Homo Sapiens
gttttgttttgtttttctctctagcttatcattcatactgacagatcctgatatctacagtgacttggggaattttcaaaggacagcgctaaaacctctgcttgggaggcaggtcggggtgtcagtgactaatgtggtttgcaagcaaacgcctggaggggcagggctctgactgcagtctccgtgtctgtgcccttggacagaggctcaacccccgcgtccgggactttgaagttagaaatgatatgtccgtgtgaaagtcgctaaattaatttccgagggaccggcaaacactgcggggcagctgatatgaaattggaagggatttgaaatggaaatccaagaaggagagccgcggggggagtggggatggaggaggggagaggaatcatcacagcaagggagggaaagagaggagcaggaaaatgcagaggcggggcgcactgcattttcaccaacagactgttttgcgagctc

SEQ ID NO: 39926 - DNA, 376 bp, Homo Sapiens
agggaagaaactgattttacaattaattaagagatgaaaaacctatagcttagcagttaaacacctgggtcctagaccagataggcctgagtttgagcccagtcacctgcaagctgaatgttcttgatcgttatttaaactctcttagcctcaggtcccccatcttcaagtggagaagacttcctgccatagtacacaccacagcagatcaccaaatgtttccagctctctgctgctgtggacacttcctggcttactgatttgtgagtgagtggggccatgtgattggttctagccagtgagttgtatgcaaaatgaagcaaatcacttgcactccaaacacttaactggcagctcaagactattcagagcattc

SEQ ID NO: 39927 - DNA, 453 bp, Homo Sapiens
gaacacattgtgatttacccagttatatcaggctgtcttacaaataacctaaaaattaatatgatcaacaagtatcttaccacatcacagaatcctacccatcccactcccactacctgactactttcaaactcgacgtctttggttcttggattcttgaattcatagccagaatttctcactggtaagagttcactccagtaacacgagaacaagaacaggaaacacaatcaaggaatgattccaaagatcaggaggaaatggttagtacaacagtaatctttcttaagaattttccagtaacactagttttgcctgtcaggagagcaaagaattaaacatcttaaaatcaactctcaagacacttaacatccattttatacacaaggaagacttcaaccagctacaagtgtataatttaaaaattcagcttattcagcagagtgaatatgg

SEQ ID NO: 39928 - DNA, 388 bp, Homo Sapiens
tgatcaactcattatatttgactctaaagtgtctttctgcatgtgaagtatcatcatctggagagatgagcccaaaagcaattctttctcccttccacccagctcatcaacagaccgcctaacccagaaattaaatctgttgacaaatttgcctgtattgtctgtgccagtctatctatcttgtcatttatgcagccaagtaagaattgggtgggtatataagaggagcattaaatttgatgtggattttattgagattcttcataatctttatattctttggcacagggcctacctatgtcctctggaaactagaaatgaaaaccagtatttattcaatgtagtattaattataattttaaaaactggaacaacccaaatatcagaa

SEQ ID NO: 39929 - DNA, 399 bp, Homo Sapiens
caagttgagaatttggccctgctgggatccatgtagtgggcactagctgctctttggcaaggcttcataaatgattcagtctctcattatctgtcctctagccccacaccctgatttagaccgtggcaaaggaagaacttgaggtcaagaccaaccaaatctgtgaattaaagctgttatttttttctctgcaagggcgctttgcttcaggtctgggctatgtgcagaacctaagcaggctgtgagagttagaagaggcagtattacatgttaggcccagaacaccatgggaaaaggtttatgtagtgtatcttagtggcctgcctagctgcctctgggccaggctgacttctgatgtccacattagctcgtacctgaaccctgttgctgaatgccagc

SEQ ID NO: 39930 - DNA, 459 bp, Homo Sapiens
gcaggtaagatttgctaacactcacagtcctctctacaccaccaggtgatcccaaggtaggtcttaggtcttcagagcccaagtcaaacagagcactgaagaggtaatgcgagccaatgaggcccaggggaaagtcacttagtccttataggttgacacctgccaaggagtttgtaaagcccactgcatgataaagacagtctcagaagccatcactggcataaagtgggatgtgtacttcctggcccttgagcttagctccaccagtggtagtcaaaggcagggaagcagaaagagaagaacaactcttgcagtggctgggctgctgccagggcaggcagtgggggtccgataaggtggaggtttcacagtagagactgttctggtaagttttcctagcatagcagccagggttgcaaaaacgcaaactgctttgacttttcccttccctaaagtttt

SEQ ID NO: 39931 - DNA, 386 bp, Homo Sapiens
ttcccttcaacttttaagttctggggtacatgtgcaggatgtgcaggtttgttacataggtaaacgacgtgtgccatggtgattggctgcacagatcaaccaatcacctaggtcttaagcccagcatgcattagctattcttgctgtcttcctgatgctctccccaccccacccctgctgacagggtttgtgttgttccctgccatgtgtccgtataccacattttctttatccattcatccgctgatggacacttgggtcatttccaaatcttagctattgtaaatagtactgcagcaaacatgggagtgcagatatctctttgatgtactgatttccttttctttcctttccagcagtgggattgctggatcatgtgacagctc

SEQ ID NO: 39932 - DNA, 396 bp, Homo Sapiens
acatttaaaaaaagaatatggagatgattttgatgcacatatacttgtggcaattcttaagaaacattaaggaccgagccagatcaaggtagaaggtaatggctggagaataatatatgtgtatttagaagacattagaaatctttttctccaaagggatacctataatagctttttcatctggattcctaaaattccaaatttcttaaattaccctgaaatatttccaaaaggaaataatttaaaaataaacagtaacattctattacaaaatacacttgtaaatctggattaacaaatatgttcagcaatatgaagaaagcattgaaaactctcctgaattaagtgattcaatgccaaacaacacattatccaggcactctagaatatggaatc

SEQ ID NO: 39933 - DNA, 532 bp, Homo Sapiens
ggtggtataaaaacgagacctttactctggcaataggaattcacatttcaaaagctgatgattgtcaaggcgatttaaaaaacatttttatgagtgtaaaaaatagtgttttaaagttggccattttctaatacaaaatgtttctttttaaatagcctttaataagcagaatgtgtgattgttctttaattggttctctttaaaatgtgctggaagacaaagttcgaggagcactgtttcaagcaagagaaaaaggggacataatttaaatggaaatggaaatatgcagtaatgccatgaaaaaaccgtttcctagatttagttgtaccgaaatacatgacatcgcctgcattttgtgactttgtcagtagtcacgaaggtaagtactactttggggtcagagagagcctgttgagataaaatctcaaagctgttagaaacattttaagatgtggaaagataatcaacaaaatcatttacataaaatttagttttagcagatgtacacatctgcaaaaataaagtgagtttg

SEQ ID NO: 39934 - DNA, 557 bp, Homo Sapiens
tgtgggttgaccgtggcttctttaattcatttggagacattttggagtctgtggaatcgggcggcggtgctgctgagaggagtgggatgggaaagcatggactccctttgggcagggggtcctgacctcacacctcctcccagagggtccctcacaaatcccacgagggtgttggagaaagcaggctggggctctagccttttgggcaggagtctcggacacaggaaggtggtaatgggggacaccaggaaacagccccatgcctccgagatgggagaggggctggggcagagctcgtgagggccacagcagggtcagagctgcctcctcagacctggcgtcccagtgggaggaggtggcttggggaggggggtcaggagaagccaacccgaagcaccgtctgggtgtgtgttccattgtgggtctctccggcattaggggttagggcttgcataaggaaaagtggctcagtgttcatgtgttgggttctgccagccactgggccactgccggaaagccgactctgcatccaggtgatgcaacacatcctgctcagc

SEQ ID NO: 39935 - DNA, 418 bp, Homo Sapiens
ggaaaatcagaagaaaaaagaagaaaacagaagtcatcttaagggaatgcatggacacaggtaaagccatgtatggcggaccacaacacccagagtagccttccctaagaacaacagcagcatttactgaacatttgctggatccacagtcctgtagttaactattatacagagactggtccatacaaaagactcaagaaactatacagctgtcttgttgtgactatcacaggaaaatttattctgtaaaataaaagtatgctgtgcgtaaccaagatctaatgctgtactagattttttagaaaacatttagcgcccactatatttttttaaatgtgaagattgtgaacttcccttccagctcaatcttcacaagattacctatactatacctcaggggaaaatcttactttaaaaa

SEQ ID NO: 39936 - DNA, 359 bp, Homo Sapiens
gaatgggtcatacttgccaatttcttcgtaagtcttttgatatttttgttgaaaactagacatttgaatctaataatatggttaactctggaaatcaaatcctctccctttcccagggcttgcagttttattatagcttttgttgctgttgttgtaggctgtctctgtgccaaatatcagcctgtggtgtaaacttcaggtcttctcaagtcttttctgagcccacacctttccttacacatgcatggtaactttctaattttccccatgtatgcaattgctttttaaggtcctagtctttaatgtctggcttccaagaggggaaaaggagaaaaataggtgtggcaggaatcactggc

SEQ ID NO: 39937 - DNA, 1136 bp, Homo Sapiens
  misc_feature (25)..(25): n is a, c, g, or t
  misc_feature (29)..(29): n is a, c, g, or t
  misc_feature (31)..(31): n is a, c, g, or t
  misc_feature (39)..(40): n is a, c, g, or t
  misc_feature (47)..(47): n is a, c, g, or t
  misc_feature (64)..(66): n is a, c, g, or t
  misc_feature (68)..(76): n is a, c, g, or t
  misc_feature (80)..(82): n is a, c, g, or t
  misc_feature (775)..(780): n is a, c, g, or t
  misc_feature (782)..(782): n is a, c, g, or t
  misc_feature (784)..(794): n is a, c, g, or t
ggatggatggatggagagaggaggngtgngnagtgtggnnggggggnggggttgttgtgtgagnnntnnnnnnnnnaaannnccatacgtctaagtagcgagcctgggtggcgccacagcctgaccacaggggctgtgggtcctgcgtccccttcctcgggtgagcctggcctgtcccgttcagccgttgggcccaggcttcctcccctccaaggtgaaacactgcagtcccggtgtggtggctccccatgcaggacgggccaggctgggagtgccgccttcctgtgccaaattcagtggggactcagtgcccaggccctggccacgagctttggccttggtctacctgccaggccaggcaaagcgcctttacacaggcctcggaaaacaatggagtgagcacaagatgccctgtgcagctgcccgagggtctccgcccaccccggccggactttgatccccccgaagtcttcacaggcactgcatcgggttgtctggcgcccttttcctccagcctaaactgacatcatcctatggactgagccggccactctctggccgaagtggccgcaggctgtgcccccgagctgcccccaccccctcacagggtccctcagattataggtgcccaggctgaggtgaagaggcctgggggccctgccttccgggcgctcctggaccctggggcaaacctgtgacccttttctactggaatagaaatgagttttatcatctttgaaaaataattcactcttgaaagtaataaaacgtttannnnnnanannnnnnnnnnnacttcgagggcatcttaatgtcgggggtggcggaagaaaaagagggtaaatgaaaaatggggcaccatgggccaatagccctggttttccctggaaccccagcttttccttggtaccaaaagtgggtaagaatcttgcccgggtcttcccctataagtggagttccctaatttaaattttccgaaaaagcccaagggtttaacacttggcatttaaatggaaattcgggccttgccagttaacccccggggaaattttaaaaccccgccccttaaatggaaccgggggccttttttttttttggggaaatccccaaaagggaattctttcccttgaaaaaaa

SEQ ID NO: 39938 - DNA, 749 bp, Homo Sapiens
tcccgggatgaggccaccgtcttgttaccgtttccttttcgtttgctgagggtcacagaccccaacagggaaatcagtatctgtcttcccagtggttgccctgctcgccgggcactccacggggtcccgcccttgtgtgagatgggccaggatccttcggcaaggggcgcctggggctggggctgattgtgggcggtggagcgccagacagaaaaggattccaatgagaacttcaggttaaagtcagatgccacctaccagggtctacagtcaaaatgttggctttttcttattttttaatgtatgggagaaaaatgtaaaattccagttcttttctaattgtgtttctgaaattaggagtcagctgccagcgtttttgtgtggctgcagtgtgcctgggcccagctcacgggcagtgggtggacctaactgcccaggcaggcgagagctacttccagagccttccagtgcatgggagggcagggctaggtgtagcggtgtctcctctttgaaattaagaactatctttcttgtagcaaagctgcacctgatgatgctgcctctcctctctgtgttgtctgggcccttgtttacaagcacgcgttacccttcctgaggggagccatgctctagcccctggagggcctgttgcaggggcagggcgggcccgtcgcctttggcagctcctggagagctgtggacatgcagtccccctcagttcgtgctgcaataaaggccatcttctctta

SEQ ID NO: 39939 - DNA, 501 bp, Homo Sapiens
agacctgaattgtataataaatttaaaagctaggaactatttgctttctcttccacacaaaaataaggtgccatggaacaggctgttcccaaatgctgactccaaagctctggacttattggacaaaatgttgacattcaacccacacaagaggattgaagtagaacaggctctggcccacccatatctggagcagtattacgacccgagtgacgagcccatcgccgaagcaccattcaagttcgacatggaattggatgacttgcctaaggaaaagctcaaagaactaatttttgaagagactgctagattccagccaggatacagatcttaaatttgtcaggtacctggagtttaatacagtgagctctagcaagggaggcgctgccttttgtttctagaatattatgttcctcaaggtccattattttgtattcttttccaagctccttattggaaggtatttttttaaatttagaattaaaaattatttagaaagtt

SEQ ID NO: 39940 - DNA, 507 bp, Homo Sapiens
cacgaggattatgttgaattccaagggctacaccaagtccattgatatttggtctgtaggctgcattctggcagaaatgctttctaacaggcccatctttccagggaagcattatcttgaccagctgaaccacattttgggtattcttggatccccatcacaagaagacctgaattgtataataaatttaaaagctaggaactatttgctttctcttccacacaaaaataaggtgccatggaacaggctgttcccaaatgctgactccaaagctctggacttattggacaaaatgttgacattcaacccacacaagaggattgaagtagaacaggctctggcccacccatatctggagcagtattacgacccgagtgacgagcccatcgccgaagcaccattcaagttcgacatggaattggatgacttgcctaaggaaaagctcaaagaactaatttttgaagagactgctagattccagccaggatacagatcttaaatttttca

SEQ ID NO: 39941 - DNA, 1188 bp, Homo Sapiens
  misc_feature (996)..(1027): n is a, c, g, or t
  misc_feature (1029)..(1033): n is a, c, g, or t
  misc_feature (1035)..(1052): n is a, c, g, or t
  misc_feature (1056)..(1062): n is a, c, g, or t
  misc_feature (1074)..(1075): n is a, c, g, or t
  misc_feature (1077)..(1077): n is a, c, g, or t
  misc_feature (1081)..(1081): n is a, c, g, or t
  misc_feature (1096)..(1098): n is a, c, g, or t
  misc_feature (1108)..(1114): n is a, c, g, or t
  misc_feature (1116)..(1116): n is a, c, g, or t
  misc_feature (1126)..(1133): n is a, c, g, or t
  misc_feature (1138)..(1138): n is a, c, g, or t
  misc_feature (1141)..(1141): n is a, c, g, or t
  misc_feature (1144)..(1146): n is a, c, g, or t
  misc_feature (1151)..(1153): n is a, c, g, or t
  misc_feature (1156)..(1157): n is a, c, g, or t
  misc_feature (1164)..(1169): n is a, c, g, or t
ggtccggaattttcgggataaatgctccatttgcctgctatgaagaaatacaatctcaatcagacagatttgggaactgtggtagggatagaaataacaaatatgtgttctgtggatggaggaatcttatatgtggaagattagtttgtacctaccctactcgaaagcctttccatcaagaaaatggtgatgtgatttatgctttcgtacgagattctgtatgcataaccgtagactacaaattgcctcgaacagttccagatccactggctgtcaaaaatggctctcagtgtgatattgggagggtttgtgtaaatcgtgaatgtgtagaatcaaggataattaaggcttcagcacatgtttgttcacaacagtgttctggacatggagtgtgtgattccagaaacaagtgccattgttcgccaggctataagcctccaaactgccaaatacgttccaaaggattttccatatttcctgaggaagatatgggttcaatcatggaaagagcatctgggaagactgaaaacacctggcttctaggtttcctcattgctcttcctattctcattgtaacaaccgcaatagttttggcaaggaaacagttgaaaaagtggttcgccaaggaagaggaattcccaagtagcgaatctaaatcggaaggtagcacacagacatatgccagccaatccagctcagaaggcagcactcagacatatgccagccaaaccagatcagaaagcagcagtcaagctgatactagcaaatccaaatcagaagatagtgctgaagcatatactagcagatccaattccaagacagtacccaacacagcatagtactgtgatcctctaaggacgataactcaagctcctagatgaatctgcttcctccggcccctgagacataatggtgtgtccaaaaaaaaaaaagggccctattcctcggccatcgacctctgagcctagggtataagggttaccgggacgttgtccnnnnnnnnnnnnnnnnnnnnnnnnnnnnnnnncnnnnncnnnnnnnnnnnnnnnnnncccnnnnnnncccccccccccnncncccnccccccccccccccnnnccccccctcnnnnnnncncccccccccnnnnnnnnccccnccnccnnnccccnnnccnnccccccnnnnnnccccccccccccccccact

SEQ ID NO: 39942 - DNA, 902 bp, Homo Sapiens
  misc_feature (750)..(750): n is a, c, g, or t
tgcaccctagagattagggcctggaactccagcaaataaaaacatatggacggcaaatattagaggtactgaagtttcttcatgacaagggattcccttatgggcatcttcacgcctccaatgtgatgctcgatggggacacttgccggctgctggaccttgagaattccttattgggcctgccttccttctaccgatcttatttttcacaattcaggaaaatcaatacattggaaagtgtggatgtccactgctttggccacttactgtatgaaatgacttatggacgaccgccagactcggtgcctgtggactccttccctcctgccccgtccatggctgtggtggccgtgttggagtctacgctgtcttgtgaagcctgtaaaaatggcatgcctaccatctcccggctcttacagatgccattattcagcgatgttttactaaccacttctgaaaaaccacagtttaagatccctacaaagttaaaagaggcattgagaattgccaaagaatgtatagagaagagactaattgaggaacagaaacagattcaccagcatcgaagactgacaagagctcagtcccaccatggatctgaggaggaaagaaaaaaaagaaagattttagctcgaaagaagtcaaaacgatctgctcttgaaaatagtgaagagcattcagcgaagtacagcaactccaataattcagcaggatctggggccagctcacctctcacgtccccgtcatcgncaactccaccctctacattagtagagcatgcaccatttttgaacgtgatttttcggtaaaagaaactatgctgatttctcagactttaaagatgctctggtttttgtgtgtgaaataggaccccaagtgtctcgattgctgaagtgatgacc

SEQ ID NO: 39943 - DNA, 926 bp, Homo Sapiens
  misc_feature (690)..(690): n is a, c, g, or t
tagcctttctttagtattttaagaactcatacgtactaggtatgttggtccctctgagaaaaacatgtggactctcaccagtccgttgtgctcaggactgagcagcagcgtgtgtgcagggcagctgtggaggtgaatactgattgtcccccttttcctccacagggatatctgcattacctccacctcctccacctccaccaccaccagcagctcccttgcctcctgcgagcaccgaggcacctgcccagctctcgtctcaggctgtgaatggcatgagccgaggggccttgctcagctccatccagaatttccaaaaaggaactttgaggaaagccaaaacctgtgatcacagtgctccgaagatcggctgaagcttcctgtttacacttggagggaaaagttcttttttattcctactcacccctaccccccaaactaccctcttcctgggaaagtaattgctgagccagtacagccacaaacagtactattttgcagatgctcatgtaagcagcttttcgagagaaataattctttaagcagaataaagttaggctggcattgctcccttaagatcttgctcctttattaaccctgtaaaggagtcttgtttatcctctaatggccaggcttttgggacagcagcatattgaaatattttcaccaactaaaggaaatagacagaanaacaatgacaatattcaatcacagcagtaaatggcccttgtgtttgaatccctcttacccatcagacagctcctagaacattcctttacaggtcatttctctaagcattttctgattcttagaaactccaattttgctacctttatcttagacattacccttttccccaaagcatagtactttgctaaataagaagacaccggtttctttgttttcctctcaaaagaagggggacc

SEQ ID NO: 39944 - DNA, 625 bp, Homo Sapiens
gagttcatacattttccagtatgtgaggggacctctcaacctgaaccctcgtgttcagctgtcagaataacagccaataaaaactacaggagcaaaacctctcaggaaggtgctttaaaaaagatgcatgaggaagaacaccatcaacaaatgtccatcttacaactgcaactgatacaaatgaatgaggtgcatgtggccaaaatccagcagatagagcgagagtgtgagatggcagaggaggaacacaggataaaaatggaagttctcaataaaaagaagatgtattgggaaagaaaactacaaacttttaccaaggaatggcctgtttcctcatttaaccggccctttcccaattcgccctaagactttgggggtggctctcttgtaattaatctgtgttggcaaagaatgtctggaacatggacttggcggtcagtaacctgtaacagagctacaactaggaaaattagagtggtagtagtcacttatttaagaattcattcaggtaaacagctgcaccctctgtaccccttaagtggcaaagaagctgttatagtcttctgaaaattatcactatgagtgctataattctgaatataatgtctcttaattagaattcata

SEQ ID NO: 39945 - DNA, 598 bp, Homo Sapiens
tgttctgattgggatgctgtaaaacgctgatcctcacctcgagttccagcagtttccccagagcccctgatctgcctggaccagaagacagagggcaagaggagcaaagtgaacaccaagcaactggaggtctgcagctggaagcccagcccacagcaggacaagcaactcttgtctaagggcagtgctctctttggacgaggtagtcaagagagaccaaggcaccaccccatccacagctgacccagcctctgtctaggatctagaatcataacccacacaggcccactgcaggacaggtggcagaggagctatttgggacaggagtcagttctccctttctgctatccatcacttataaccccacaggccagaggagaggtcctgagagaggtgacacttcagggaccagaggcagcacgagggctggcatctctccttccagcccaaactgcacagccccaaccaggttcccaacacgtgtagcagtcatcagccattccttaacaatgaatgtggtacctggttagtgccagccttgggaaggagggagggaggtaagaggggcttggtgatctctggaggaagagtgttgcct

SEQ ID NO: 39946 - DNA, 593 bp, Homo Sapiens
gggcctcttgctgcttagagctgatgggccgggcatgttggctcacacctgtgagcacagtactgggaaatgggagcacagtactaggaaatgggagcacagtactgggaaatgggagcacagtactgggaaatgggggctcacagcactgcaaaatgggagcacagtattgggaaatgggagcacagtactgggaagtgggagcacagtactgagaagtgggagcacagtactgagaaatgggagtacactactgagaaatgggagcacagtactgggaaatgggcatacagtactgggaaatgggcatacagtactgagaaatgggagcacagtactgggaaatgggagcacagtactgggaaatgggagcccacagtactgggaaaggggagttcacagtactcggaaatgggagcatagtactgggaaatgggagcacagtactgggaaatgggagcatagtactgggaaaccccagacctggattctgagtttttcagcctagcccagacttcttatcttagtagacaaaaagagtcaataccagagaaccagaggcatcctctgtattttaatgaactctgcatttt

SEQ ID NO: 39947 - DNA, 501 bp, Homo Sapiens
  misc_feature (29)..(29): n is a, c, g, or t
  misc_feature (37)..(37): n is a, c, g, or t
  misc_feature (65)..(65): n is a, c, g, or t
  misc_feature (69)..(69): n is a, c, g, or t
  misc_feature (79)..(79): n is a, c, g, or t
cgactgctggaacctgtgatgattgtacnctgccggncacaagacctcctcctggtggaggctgntgtncaaaaagccntccccgagtacatgacaatttcccagaaacatgtggaggtccagattgataaagaggcatacctggctgtgaatgcagctggaggtgtggaggtctacagtggcaatcagagaataaaggtttcaaataccttggaaagccgactggatctctcagccaagcaaaagatgccagaaatacgaatggccttgtttggtgctaacaccaacagaaagttctttatataagcctctgggaagtgaagctagtgttgaaccactaaaccataaaagtttaagttttttggggaaaggaaactagtagtgtttcctcctctttgatgctctgatactgttctgtttttcttcacgaaataccctttggatagctaaagtgttaactttgaaataaagcccaaattaatgctcaaaaaaaaaaaaaaa

SEQ ID NO: 39948 - DNA, 539 bp, Homo Sapiens
gcaggatgactcagcaccgcccctcagcaaggatgactcagcagggatgattcagcagagataactcggggatgactctgattgtccttcagcagggatgagtctgttttgctccgatggaagcatctgtagtgtccatcagcaggtgaatggccaaagtggtatatactgtagtcacattcagctataaaaaggaataaagtatcgatgcatgccacaacatgggtgaacctagaaaatactgatctaaatgcaagaagccaggcacaaaaggccacatagtatatgttcccatttatgtgaaatgtgcagaataataataaaaatgtatagaatagcaaatctgtagggacagacatgaggtgagtggttgccagaagtggaaatgggagttaactataaattgcacagggtaccttacagagatgatggaaatgtcctaaaactagattatggcaatagttgcactacgtgatcagtttattaaaaatcgttgatgtgtgtgtgtaaaaaaaaaaaaaaaaaaaaaaaaaaaaaaa

SEQ ID NO: 39949 - DNA, 683 bp, Homo Sapiens
gccaagctctaatacgactcactatagggaaagctggtacgcctgcaggtaccggtccggaattcccgggtcgacccacgcgtccgccagaggctgctggagtccccggcgacagcacttggtgacatccgcagggagatgagcgaggcggcgcaggcacaggcccgggcctcaggtcccctccgcacccgccggggtagggtccggcagtgacctgggcaggggcctcgctttcccacctccctccagactcctttgaccccaggaagttttgcccctccttcttctccagacagccccctccccaggtgtctgggtcccctttcccgcccctttccagaactcagagtcagacaagaacccagagcatccgatggtagaaacaccaggaagacaattgttgctgtgtggtatggaatggagtttgcggtgactctggggccagcacccaggggacgacgttcaaccctagcctgaagggacccgctcccagctcagaagccgtctctgacttctcgtgcgtattttgaccctgatttcaatcttctacccttgggagttctggcgtttggcacaaagtcccctttgcctgtttggagctcagtgctagaccaggtcccctgccccgagctttggttttgggggttattattgaaacaaagtgtggggagctggttgtgggt

SEQ ID NO: 39950 - DNA, 365 bp, Homo Sapiens
atcatgtttatttaaatagtaatgtcatgagactattaaagatgtgccagagtttcaatgaaaatcattaaagtaggacagctaagaaattaatattaatatcaaaattattgataatcttaaattattgattattccttaacgcactccattctccttttacattttatcatgtttcttttgaatatatgaattggcaaaggacttgatgaaactgagtactaagatttggtacagagtatgtcaggaagacaactcagattgccattttaaataaagttgtacatgaacaataattggaatcatcaggtaatttttttaaacaaaggttcttcatttactgttatgattggaaaaaaattaga

SEQ ID NO: 39951 - DNA, 614 bp, Homo Sapiens
gggacgaggccctggagccctgaggtctcgcctgcccccgcccggtttcccccacccactgccctccttccctcccgtgcccggtcctgccagccagctctattagagcagcttttcctgtgtgccttgaaggccagagcatttagggacagaacttgaaagagaagatggcgaaaagggcctgagccagggctgggaatgtgtccactttggtgggagagtaggtcggttgcttgggggacgtgaagctagaaaaataaatgagcccaggcatagaggactagagcccaggtgcacggttagcttcacagcaacagggagctaggccattggttctcaaacttaaggaaggatcagcatcacggaaggtcttgtcaaaagagtgctgggcaccactcccagcatttctggcacgttagatttgggatggcgcccaataacttgcatttctaacaagttcccaggtgatgctgtgctgcttgtccaggaaacacaatttgagagtcatgtgaaacgtgcttgaaggggtataccttaccctggtaaccttactcaaaagaagggtcagtgtgtgctgggggacttttgccttgtttgtaatgttaaagtttttg

SEQ ID NO: 39952 - DNA, 567 bp, Homo Sapiens
ggaggctggactgcgagcctcgtctgggactcggctggagctggcctagggaggcctggggtaacctggggggctcagcaatggtgctgcacggcgaggtggtgtccccctttgtcctccgcccagggcagggaaagtgcttagtattagcgtgatgcttggggttactggagcctgagcttgacctcaaacgggtggcgatttgatgggtacccccaggctggggaaaatgacagcgcttctcctaatcagctcactggattccatcaccctgagcggtaaaccagatgggcgtcaccccagttctgcagacacatacacaacccgtttgctgcagagccggacccagtggctacacccacagcggtctgtggtagagaactctcttccttctttccaccgacaggggcgagggctgcttcctcgcggcagcccccgcgaagaaatctcgagagaactggcatgaggagttaggttcatcacaaatacacacacactgcccccaaccctctgccgttgcctctctcagaaaaacaagacgtactgaatgaaaaaaaaaaaaaaaag

SEQ ID NO: 39953 - DNA, 773 bp, Homo Sapiens
  misc_feature (633)..(633): n is a, c, g, or t
  misc_feature (653)..(653): n is a, c, g, or t
  misc_feature (712)..(712): n is a, c, g, or t
gggaaaaagtgatagtctgcttctctctggtaacttgtctgccacccatctgatagtaagattagccaaggccctttagccctctgtcctttctggttattgactgtccctggttcctaggaagacagagttgttctccagctaaagcgtctcctctctataaagtagttttactattcttttcatagcaggagccaaaatagtagaggaggggagagaggcacctggcactctgcgggcctgcacaggaaaaacagagccaaagacagaatcattgtataagatatttattaaaggagagcctctaagtccacatcctgagcccatgtgagtggacacaggtaggtaaaacggtgggtccagctgctgtcatctgaaagccttcaggagatgaagctatcagtatccagctgaaggctgctgggttctgttccaccaccaccttagcaccagggccctctctggtcccagaggcctcatctctccttgggctttgacaatgtggagcagcacatcagcagggactggtctagaccctccctttcctgtcacttagctggagctaagctccagataacccctaggttcccactggctcctagtagaaatagtttctgtactttagcagaacangaaggatatttgttcattanaggtggcttggtcttacagctgggtgcagtggtatatacctgtggtcccagctactcangaagctgaagtgagaggatctctagagcccaggaattcagtttaacatgagcagcaacatt

SEQ ID NO: 39954 - DNA, 742 bp, Homo Sapiens
  misc_feature (41)..(41): n is a, c, g, or t
  misc_feature (734)..(734): n is a, c, g, or t
ctcatctgttgttggattaaagtatttgcttcttggtgccntacacaaatgtctaggaaactcagaagatgctgttcagtacttccagcgagctgttaaagatgaattgtgtcgtcagaataatttatatgttcagccgtatgcctgttatgaacttggctgtcttctattagacaaaccagagactgtaggaagaggcagagctctacttcttcaagcaaaggaggatttctctggctacgactttgaaaacagattgcatgtccgcatccatgctgctctggcctctctgagggaattggttcctcagtgacagacccggaacacccgctccgtccctccccacccagggtccgcactttaaaataaaagcagaggacaaagctcttgtgaagatgggcttttcttctgaaaaccacctgtgccagggacacattttcccagttaagctgacatattaaagatctcctcttttaaacatgtagctgaaaagtaataatgatgttgaggaggatgatgatggtaataataactaaccacctggggagagggttaagtgaccttgctcaaacgttttagttttgtgatttattatttttaaaataaaatcaaacggaacatccaacccaagatcctgtaggaacacctaccttaagcacatatctgaatgggtaacatgatgaggtacctgtaaaattattaacaatatcatgacatagcatttatatttgtgntttgaaaa

SEQ ID NO: 39955 - DNA, 746 bp, Homo Sapiens
ggagatttacggttaaagtaacaggagaacccaaaccagaaattacatggtggtttgaaggagaaatactgcaggatggagaagactatcaatatattgaaaggggagaaacttactgcctttacttaccagaaactttcccagaagatggaggagagtatatgtgtaaagcagtcaacaataaaggatctgcagctagtacctgtattcttaccattgaaagtaagaattaatcactctttttatcttttattctattaatttttttttccttaaaatcacttttcttcttctcttttttagctgatgactactagctcccctcccctctccctggaactttctctttcactccaactttcttactacacccatcttttctgtggcggggccaaaaaaggaaaccaggagtgccactatgctgacttcttattccttttcataacagtcttcaaagcacagctcatctaaagaatgcctacttcttttccaaataagcatcagatttatcgcctattatgcagtaacagtcaataaaatgtacttatgggggggaattactcaattattctatcagaacctattataaagactgtatttcccatagacgtttaccgcaactatgtttaaaaaaccaaaaacaaaaaaaaaaccccccaaccctaagtaagaatacattaattttgccatggaaaggaaattgtccatttttctgaaacctttttttaccacccttaaaaatttat

SEQ ID NO: 39956 - DNA, 552 bp, Homo Sapiens
cgctcacaacatggcacagaagaacaggggggacatatatatatgtatatattcgaataagactccaaaaagtagaaatttaaaaagtgctatacatggcatcaggttctaaaatcccaaaccccaaacagccgggaacatgttactctgatttcagggcgtggtaaaataacagagcggggaagaatattcaagatgacctgatttaacacctttcattcggtgggggggccttggatttcctatatccagaagtggagagacttactcaagatggtaccaggcaagcgggcaactagaacccaaatccttggactactggtggaatgcagtttttctagattgtaaattaaaaatcatatctccagaacggttctggaattctggggatggccttctaatccagtttacaagtgacagaaaacctgttatgctgctgggtagtcttaccttagattttgaaatgcttatttaagtgtaaaaaaaatttttttttacatcttttaaagactatatttaccattgtgtggaaaaagtaaagaaaaatcgtga

SEQ ID NO: 39957 - DNA, 834 bp, Homo Sapiens
ctggtggccgagtgcgggggccgggtctgtgcctttgataaccgggccaccggccgggagcaggaagcccaggtggagcagctgctggggatggtcgagggcttggtgctggagcacaagggcgcccattactccaacgaggtgtatgagctggcgcaggtgctgcgctgggcaggccctgaggagcggctccggcgggtggcggagcgcgtggcagccaggtgcagaggaggccatggggcgcctggctgtcggcccggctgtggaagtggctgaagtcccccaggagctggaggctgggcctggccctgctgctggggggcgcgctcctgttctgggtgctgctccacaggcggtggtcggaggccgttgcggaggtcgggcctgactgacagcgcaggtcctaaaactgaaggcaacttggttaagggaggctgaattcttggagctgaaggggaaaacttcattccaacggaaggaatcctgtagtttcaggcatagttttaatgacacagaaaactttgctgcatcacctttgcaactttggcaaagctcagagttcactttttaagtttttaactcattttaaatgatgtgtatgcagagttttagaataagttcgtctaacaataacttcctttggtagtttggtagtctaatgtcgagtagcttgtagtgggggacaacgcatggacagggaaaacaagtggcattattttcgagcttttaaaagattagaactgccctccttgataatttctaggtccttatacatgggtagataggtcctttgggatccttgtaaacgtttagcatcaataacagaatgttggg

SEQ ID NO: 39958 - DNA, 672 bp, Homo Sapiens
cacgattacgtgagcaacacagagaaccgggccttgcgcgastggtggccgagtgcgggggccgggtctgtgcctttgataaccgggccaccgccgggagcaggaagcccaggtggagcagctgctggggatggtcgagggcttggtgctggagcacaagggcgcccattactccaacgaggtgtatgagctggcgcaggtgctgcgctgggcaggccctgaggagcggctccggcgggtggcggasgcgtggcagccagggtgcagaggaggccatggggcgcctggctgtcggcccggctgtggaagtggctgaagtcccccaggagctggaggctgggcctggccctgctgctggggggcgcgctcctgttctgggtgctgctccacaggcggtggtcggaggccgttgcggaggtcgggcctgactgacagcgcaggtcctaaaactgaaggcaacttggttaagggaggctgaattcttggagctgaagggaaaacttcattccaacggaaggaatcctgtagtttcaggcatagttttaatgacacagaaaactttgctgcatcacctttgcaactttgccaaagctcagagttcactttttaagtttttaactcattttaaatgatgtgtatgcagagttttaaaataaattcgtctaacaataa

SEQ ID NO: 39959 - DNA, 953 bp, Homo Sapiens
  misc_feature (702)..(702): n is a, c, g, or t
gccaaatgcgaccttgagcgccgccatcgttcaggagaaggctgagtttgatgacttacagcgtgaacatggcgaaggttctcaaacggagaggtttcatgcaagtcaagggtggcttgtgagattcaaggagtgccactgtttgccccacttcaagatgaacagcgcagctcccagcaacaaggacatgtacatagaaatgctgaaaagcatcatcgaagaaggtgagtacaccccccaggtgtctttaacgtagatgagacgagacttgattggaagagaatgcccaaaggaacgtttatttccgaggaagagaatgctgagccagggtttaagtcatccaaagatcgcttgatgctgctgcttggtggcagtgcagctggggactttaagttgaagcccttactggtgtaccgctcagaaacccgcaaggctctgaagggttcttgaagcccagtttgcccgtgatttggcgctccaacagaaaggcttgggtgaccaggagcatctttcatgaatggttcacttactttttttgccgttgaaaatacagtgcccaaaataatctcaccaacaaagcactgctcatactagacagtgcgtcatgccactctgtaaatttgagcgacctttctgataactaagagtagaataccttcaggccaggcgcggtggctcacgcctgtaatcccagcactttgngaagccgagacgggcggatcacctgaggtcaggagttcgagaccagcctccacatggagaaaccccgtctctactaaaaatacaattttaacccgggcgtgggtggtgcaaggcctgttattcccagcctactcgggaagggctaaaagcaaggagaaattgccttgaaacctgggaaaggccgaaaggttggtgggtgtaaaccgaaaaattcgccgcccattgggcacctctccattccctgtgaacaa

SEQ ID NO: 39960 - DNA, 674 bp, Homo Sapiens
ccacaactgattaacaaagggggttgttctaacatgtgtgctggttgacatttttgtttatggtaatgagtaagatgagaagacatttgtcgaaactttactggtccatgttgtcagctacttctttgctagatcggatagtagttttctattgagaatatttgagaatattctattaagaatatttttgcaatttttgttctatttacaatgtaatggttatagatgtgagatacttctaagtttaatctgcattattagcattttcttatcacttgcttaagtctagacaatcaacaaaacaataaatcaagccctgatgtgtaatgtttaccaattctgcagtgtaaatactcccgctgtggccaatgctgcattaccagcacaaagtccctggacagagagttgggaagagatgtcacactattcactaggatttccaccatgcggatacagtagatgtgattggcccaagagcacgcataatacaacacagtgaaatatttaggaagtaataaatttgagtatctattgccttgtctttaacatagttaatttaaagtatataaatttaattgttaatggctgtgcttaacaatacatcacagaattactaaaaatttgacaatcagtgtctgtagttatcacaccattatctaaagtagcacaagaag

SEQ ID NO: 39961 - DNA, 700 bp, Homo Sapiens
tgtgcccaaagttcagaaagatgaagtttccagaaactaagaaggtagcacaatatgtggcatcatactcagaaaggaagaccatgccatggggccagaaattcagaaacgtaattcttacattgtgattgcaatggatactcatggaagaaagtgggtagtggccgatttgacttcagagtgacaggtagagaagggaagagcgtgtagaactgtggccagactttaggagtgtgagggatgctgaatctcccagagagctcacactggccaggaatgctgagagtagcagatgcttttcttttgggaggatagtaaaacaatttagaaccagatatgctttgtcttgattctcaagtagaataatcttcaaatgcaaaagaatacattagaaatggacaaaagtggccaggagcggtagctcatacttgtaacccagcactttgggaagccgaggcgggctgatcgcttgaggtcaggagttcgagaccagcctggccaaaatagtgaaactcacgtttctactaaaaatacaaaaattagctgggtgtgatggccacttgggaggctgagataggagaatcgcttgaacctgggaggcagaggttgcagtgagccaatatcgtgccactgcattcccagctgggtgacagaatgaaactccatcactccatctcaaaaaaaaaaaaaaaaaaaactc

SEQ ID NO: 39962 - DNA, 584 bp, Homo Sapiens
tattatttctcaggtgagaaacaggctaataacttccatgattaaacacattactagtgggagaactccagagttcttttctgactcccattggtgctccttctacgaggcaaggaatctttatattaggtttattctagcatgaccccttttaaggtttaaactggtgataaatatattatttgctcatgtcattcttcagtgctttgaagattttatagagaagaactcaggctcttttactgcattgagtcttaaaaggggggttgaattccgaagggatcaaataaatccaacgtagtagttgcatcagaaaccatattaggaaaaccctccttaaacggcaaaaggcagagatcagttccttgagtataaagtgttagggatggaagaatgaaactaaatgaacccattatctactcctaagtaattaagtgatgtgcacagatacacctagctataggtaaacaggaaaattggttgtgcaaaaaacaagtgaggtttttcttgactataagttttcccttttggaaaaattcgctggggatttgaggatattaagagttgggccctaaattgggact

SEQ ID NO: 39963 - DNA, 518 bp, Homo Sapiens
  misc_feature (483)..(504): n is a, c, g, or t
  misc_feature (506)..(512): n is a, c, g, or t
  misc_feature (514)..(514): n is a, c, g, or t
ggtctgccatgagtcccagggagtcacactccccactcccttcctggcttgtatttacttttcttggccctggccagggctgggcgcaaggcacgcagtgatgggcaaaccaattgctgcccatctggcctgtgtgcccatctttttctggagaaagtcagattcacagcatgacagagatttgacaccagggagatcctccatagctggctttgaggacacggggaccacagccatgagcggcctctaagagctgagagacagccggcagggaatcggaaccctcagacccacagccgcaaggcactggattctggcagcaccctgaaggagctgggaagtaagttcttccccagcctccagataagagccccgccggccaatcccttcatttcaacctaaagagaccctaagcagagaacctagctgagccactcctgacctacaaagttgtgacttaataaatgtgtgctttaagctgtnnnnnnnnnnnnnnnnnnnnnnannnnnnncntgtc

SEQ ID NO: 39964 - DNA, 658 bp, Homo Sapiens
caccaacaccaccgccccccccccccccccataatataagagcgagcctgggtggcgttccggcacgaggggccaccccaccccccacccaccacctcctgcctcctctcctctttggggatcaccagctctgactccaccaaccctcatccaggaatctgccatgagtcccagggagtcacactccccactcccttcctggcttgtatttacttttcttggccctggccagggctgggcgcaaggcacgcagtgatgggcaaaccaattgctgcccatctggcctgtgtgcccatctttttctggagaaagtcagattcacagcatgacagagatttgacaccagggagatcctccatagctggctttgaggacacggggaccacagccatgagcggcctctaagagctgagagacagccggcagggaatcggaaccctcagacccacagccgcaaggcactggattctggcagcaccctgaaggagctgggaagtaagttcttccccagcctccagataagagccccgccggccaatcccttcatttcaacctaaagagaccctaagcagagaacctagctgagccactcctgaccctacaaagttgtgacttaataaatgtgtgctttaaactgcaaaaaaaaaaaaaaaaaaaa

SEQ ID NO: 39965 - DNA, 500 bp, Homo Sapiens
aggacctgtgggtttgttaggtactgtttgcattaataaattaaaggtcaaagatccaattcttttttctatttaaataaccatcattgactgactagtccatccttaccccacccctactgattatgatgtcactgctgtcacatattgtcatacgtggggggctgttactgggttctccagtctcctccctttatctgtttgtgtatccctgtgctggtgccacactgcctcgttcactgatgtttttaataagcctgcaccatttgtatgtcaattcttcctgctcttcttatccatcaaaaatcactttaacttttcttgttcctttactcttccatataaattgtttattcaaccatcaggttccaggaaaaagcctgttagtattttcattggacttacatggaatttgtagattttgaaaaaacagatatttttatgagtcttcctattcataaaaatagtatgtctccatttacttatgtctttaagtgtat

SEQ ID NO: 39966 - DNA, 852 bp, Homo Sapiens
gttgatgcaaattcactgaattctaacgatgtttttgtcctgaaactgccacaaaatagtggctacatctgggtaggaaaaggtgctagccaggaggaggagacaggagcagagtatgtagcaagtgtcctaaagtgcaaaaccttaaggatccaagaaggcgaggagccagaggagttctggaattcccttggagggaaaacaagactaccagacctcaccactactggaaacccaggctgaagaccatccacctcggctttacggctgctctaacaaaactggaacgacttgttattgaagagattccaggagagttcacccaggatgatttagctgaagatgatgtccatgttactagatgcttgggaacaagatatctcatccggattggcaaagatgctcctgacagtctgcgcaacacacgaatctctgaagtctgccaaaatgtaccttgagacagacccttctggaagagacaagaggacaccacattgtcatcataaacacagggccattgagccacccacattcacaggctggttcctgggctgggattcccagaccaacagtggtcacacactctggtattccggtaacacacagcaaaccacccattcccaacggcagatactctcattcgctggccagcgcagcacgcacgggaacacacctcctggctgaattcgtcctactggaaacttcaccggctgcgcgcccgtggctcacgacccgtgtaatccccagcaactcgacgacggattgaggtcacgcggaatcactggccgtcaggcacctccgagaaccagcctggccaccatggggcaacctcgcctcctctacacactccca

SEQ ID NO: 39967 - DNA, 634 bp, Homo Sapiens
caaatatcttcatagaagtcactgaaaatatagtatctgtggcaaattgtatatgattaacaagaaaatatatgattctttgtagatgatttcatctgtaaagtcacaatgtttctcagagtcacttagtccaggatgttgcattcccagcacacagtacagttattcttgaaaactacaagtgaaaaagggggaacaattgaggttgtccaaggccacctagaggactgtcttgcactaccttgtgattcaaccatttcattcctagatatataccccagaaaaatgactgctcatagcagctttattcataatagcacaaaattgtaaacagtgaaatttccatccataggaaaatggatagacaaactacaatatagtcagtggaatactgttcatttaaaaaaggactgctgatacatgcaacaacctgtatgaatctcaaaaacattaagttgagcaaaacaaaccaaacataacatactatctaattacttttatattaaagccacttccaggcaaaactaatatttgatgatagataccagaacagtggctgcttagagtgagggcagggaattcaaattgaatggaaaaggggcctgaggaaattttctggggtgattgaaatgtt

SEQ ID NO: 39968 - DNA, 590 bp, Homo Sapiens
  misc_feature (516)..(516): n is a, c, g, or t
  misc_feature (520)..(520): n is a, c, g, or t
  misc_feature (545)..(545): n is a, c, g, or t
aacccccaagtcacaagtgttcctacataacaaacctgaacatgtacccctgaacataaaattataattaaaatattaaaaataattcactgtgatttttattgtactgatgccattcttaatcaagttctgataagtggatggtctctgcctatctccacctttctgaatcctatgtgtatcgctgtggattaattctagatatcttctccaccctccttgcaccagactaaatctgtattatgtgatattgattcttccttctaaatattacccgttatctctttcctttatttctaccattatctttatctggctcagaattattgtcataggctcctaactgttcctcctgcttctagtttctacccactcaatcaattaccgatggtgttgccagatttatcttcagaaaatattcctaacagccacattatttctttcacttaaaatggtttaatgccccctctttgcaaaagacataatacccataatttgaactccaaaatttatggntttncacaattgggtccaattcacttttncagtgacttctcttactatctctcatttctttgccttcagcagaa

SEQ ID NO: 39969 - DNA, 299 bp, Homo Sapiens
aaggagcgcggggaggacgtaccttgtgagatgcgagccggccaacagcttgcaagcatgctccgctggacccgagcctggaggctcccgcgtgagggactcggcccccacggccctagcttcgcgagggtgcctgtcgcacccagcagcagcagcggcggccgagggggcgccgagccgaggccgcttccgctttcctacaggcttctggacggggaggcagccctcccggccgtcgtctttttgcacgggctcttcggcagcaaaactaacttcaactccatcgccaagatcttggc

SEQ ID NO: 39970 - DNA, 794 bp, Homo Sapiens
  misc_feature (699)..(699): n is a, c, g, or t
  misc_feature (794)..(794): n is a, c, g, or t
agaggtaatcctttaattctacttaattttggtagatattgaatggcttggaaaagaggtacccattcatatatttataaattaaaacatagttatctagtagtaggagaggaacctagtttaggacctcttttattaaaaaagcctatttaaagggctatttctgtagacagaagttcagtctagatttaggccatctctaggttacaagatgataggaggttagacaaaagtgattcttttgccaatgggtggtggcattgatttttttcctccatgcatcttgcccaggatcactcagtcaagcatgtcttcatcaagtggaagccaactgtcctgcctgcctcaagaatatgtgttttctttagcttccctgaggctttttggtggttcagaaataggtgtgtgtgttgatgtgtttttggtaacctagctttcatacacataatatatgatttattagaactagagaatgtgttttccccgtttgttcataaatgcggtcggttatacttcttaggtgacaggttattgtccagtactttaatgtatgtatgtataatggctgtacaggtagaccataattcagtcctttagatttattttatgcagcaaaaagaagctcttttttttttttaatcacaaaaaaaaaccccagttcaaaatgtgtagttcttcatttgtgggttgattccccanaaccttgacagatgtatcgatgggaataaagtatgttttaaagggtactgatgtcacaaatatgcctctcaaactttaaggaaatcattataaan

SEQ ID NO: 39971 - DNA, 763 bp, Homo Sapiens
agctgttcactagcaagctgctggacgtcatggacagaggactgatcctggaggtcagcggtcatgccatttatgccatcaggctgtgccagtgcaaggtgtactggtctgggccatgtgccccatcacttgttgctcccaacctgattgagagacaaaagaaggtcaagctattttgtctggaaacattccttagcgatctcattgcccaccagaaaggacagatagagaagcagccaccgtttgagatctacttatgctttggggaagaatggccagatgggaaaccattggaaaggaaactcatcttggttcaggtcattccagtagtggctcggatgatctacgagatgttttctggtgatttcacacgatcctttgatagtggcagtgtccgcctgcagatctcaaccccagacatcaaggataacatcgttgctcagctgaagcagctgtaccgcatccttcaaacccaggagagctggcagcccatgcagcccacccccagcatgcaactgccccctgccctgcctccccagtaattgtgaatgccatcttcttccttctctttttttataatattgtacatatggatttttttattgtttagatttaaccagcttttaaatctctcttttctctaacagtgttagaagtttgtgattctccaaatatgcctagatttaaagctgatttaatttatggaaaaatcacccatcagactttgcttttctttttcaaatctcctaatggtagtatgata

SEQ ID NO: 39972 - DNA, 731 bp, Homo Sapiens
cgtccgggctaactgcctggaacagaatccttctgcattgttcttgtaccacatttttccttggttttgttaaagtttcctcaagcactgatttgtccaggatcgagctctgtttgacctgttctgctagtatagtaagctggctccctgatgggggaagtgagagggagaggagctggctggctggttgcttagaaactatgcttgatatctaaatagaaatgggtgccaaagtctgaaagtcacccagcctgtggagtgaaagctcacaaatttggcttctaaagggaagctgttgacacagaaagcctagggattctgtggaagtataggttgtcaggcatttaccttattaccactcaaataccagtgtgtgtgtgttgggggggcggcagggagagggggtaggtgacagtatgtgactcgggtgttagctttaagaggaaagagctctatttttcttgttttcttctctgagctagactgagctggggatctaagatgtacttctctgactacaaaagggacagtatcatttagattttttgcagttggaagaaatgggttgttgagtgtgttaaggctgggatgaagaagggctgggcagtactcttctggaaaggctcacctagcacgaacctgcttgtctcccttactagtggaggtatctgagtgtgaacagtgaaggtaaagagtggtatagaacaatgcagctgtatctgtcacaaact

SEQ ID NO: 39973 - DNA, 943 bp, Homo Sapiens
  misc_feature (943)..(943): n is a, c, g, or t
aaaatattccatgacttggatatgctgacgactgtgcaggaagaaaacgagccagtgatttacaatagagcaaggtaaatgaataccttctgctgtgtctagctatatcgcatcttaacactattttattaattaaaagtcaaattttcttgtttccattccaaaatcaacctgccacatttgggagcttttctacatgtctgttttctcatctgtaaagtgaaggaagtaaaacatgtttataaagtacactaagaccctttgatgaaagatagcaataatattaataattcaaacatgaataactaaaccaaaattgcacccaccatgagcatctgtaatttgctctttaaccattccttttttaggttttaactaatacttgtttacgtgttattagtttttaatgttttcatactgttttgaaataattttatacttatagaaaagttgcaagagtagtacaaaggattcacatatcctctttactcagattcccttaatgttagtttaccgcatttgcattacctttctgtctacatatgtgtttgtttctgaaccatttggaaataagttgtagacgtgatacccctttacctataaatatttacatgtgtattttctaaaaacaaggacattcagggccgggtgcagtggctcacgcctgtatccaacacttggaaggcgagtgggtgatcactgagtcagagtccagacaggccgcatgtgttaatcacctctctctataaaatgcaaaatagccaggtgggggggggcttaaccaacagcgaagtgagggaatctttaacgggggtttttatcacaattgcctatacgtggaaatgccttagggaaaaacagcgtgcaacacacagctacacacaatggcgctttccaaacattgacactcactaacacgccctctcgtctattactgtttttn

SEQ ID NO: 39974 - DNA, 608 bp, Homo Sapiens
tttaaaacagagcaggagaatgaagccaaatgccggaattcaaaacctggcaagaaaaagaatgattttgaacaaggcgaattatatttgagagaaaagtttgaaaattcaattgaatccctaagattatttaaaaatgatcctttgttcttcaaacctggtagtcagtttttgtattcaacttttggctataccctactggcagccatagtagagagagcttcaggatgtaaatatttggactatatgcagaaaatattccatgacttggatatgctgacgactgtgcaggaagaaaacgagccagtgatttacaatagagcaagattttatgtttacaataaaaagaaacgtcttgtcaacacaccttacgtggataactcctataaatgggctggtggtggatttctgtctacagtgggtgaccttctgaaatttgggaatgcaatgctttatggttaccaagttgggctgtttaagaactcaaatgaaaatcttttacctggatacctcaaaccagaaacaatggttatgatgtggaccccagtccctaacacagagatgtcttgggataaagagggtaaatatgcaatggcgtggggtgttgt

SEQ ID NO: 39975 - DNA, 1116 bp, Homo Sapiens
  misc_feature (866)..(866): n is a, c, g, or t
  misc_feature (868)..(868): n is a, c, g, or t
ctggaccggtccggaattcctgcgatctacgcaagacggcagaaccaccggggagggcaggccagcgaaactgtcctacacggaggcagagggcgaacgatctgcactgctggcagctatccgcgggcacagcggcacctgcagcctgaggaaggtggcatcctctgcttctgaggagctccagagcttccgagatgccgcactctctgcacagggctcggaaagtcctctgctagaagaccttggtcttctgtccccaccagccattcccccaccaccccctccaccctcccaggctctctctgcaccaaggacggcctccaggttcagcacgggcaccctcagcaacaccgcagacgcaaggcaagccttgatggacgccatccgctccggcacaggggctgcgagactgagaaaggtgcccttgctcgtgtgaatgaacagaggccagagaattgcagaaacccacctgtaatatgcccacaggcgtcactcaaggagtctgcatagccaggaacatcaagttttggtgttactttcttgtctacaggccaaaatgcgcacagttgattttcggtgtgttcctgtataacggcttgaaaggaaaggagaagatgctgtgtcgctgcgcagctcgtgtgccaaggaaatgtgttttgcctctgaatatcttaagttgctaataaacgattcttgttggcaggttaatgggactataaatgctggagcccagcactcacacttaattatatttatgggcaaagtaaaaagaatcatgccttagactgattttggacctttgagactttaccacatacagatggatgaaactacttactggatttaagatcttttggattttagananaacatatgaatcagatggaacaatctgaatgtgatatgcttcatgatggctgtggggttttggtagtaagaaaaaaaaaattggggaggtttttcaaaagtgggctttgttaaggtaagtaaaactgcctggattcttcttccctcaaatatttgggggctaacaccttcacagaaggggtccccggtccatgaatcgggaccccactaagcttttaaaaaatccactattacccccccgaaaaacag

SEQ ID NO: 39976 - DNA, 752 bp, Homo Sapiens
tgctcctacctgggctggtcccctgctctttgccgtctgcccgctctggggtggaaccactggacccctggtgccaactgcagctcccaggctatcttcccagccccctacctgtacctcgaagtctatgggctcctgctgcccgccgtgggtgctgctgccttcctctctgtccgcgtgctggccactgcccaccgccagctgcaggacatctgccggctggagcgggcagtgtgccgcgatgagccctccgccctggcccgggcccttacctggaggcaggcaagggcacaggctggagccatgctgctcttcgggctgtgctgggggccctacgtggccacactgctcctctcagtcctggcctatgagcagcgcccgccactggggcctgggacactgttgtccctcctctccctaggaagtgccagtgcagcggcagtgcccgtagccatggggctgggcgatcagcgctacacagccccctggagggcagccgcccaaaggtgcctgcaggggctgtggggaagagcctcccgggacagtcccggccccagcattgcctaccacccaagcagccaaagcagtgtcgacctggacttgaactaaaggaagggcctctgctgactcctaccagagcatccgtccagctcagccatccagcctgtctctactgggccccacttctctggatcagagaccctgcctctgtttgaccccgcactgactgaataaagctcctctggccgttt

SEQ ID NO: 39977 - DNA, 930 bp, Homo Sapiens
  misc_feature (36)..(36): n is a, c, g, or t
  misc_feature (759)..(759): n is a, c, g, or t
  misc_feature (799)..(799): n is a, c, g, or t
  misc_feature (801)..(801): n is a, c, g, or t
tggcgcccgcgctgtcctgcaccctctgttcctggnaggggacagcgtgagctccgagtcctcctccccggacgtgcacctcaccattcaggaggagggggcagacgaggagctggaggagacctcggagacgcccctcaacgagagcagcgaagggtcctcggagaacatccatcagaattcctagcacccccgggacccctgcgggtggctccatcagccagcaaccttagagagaggaaagacagttttcaagtgtctggtttcactttcacagtgcggctgccactttgaagagacccttggtaaacccctgattcggggtggggtgggggactaggctcagccggaaccagcacctccaaggagtccgggaggtgcctgtggtttgcacccaccactgaaaaagccgcggagatgcgcagcgcgtacactgactttggggcctgggtgttggggttctgatcagaatttggcgggatgatatgcttgccattttctcactggatgccctgggtagctcctgcagggtctgcctgttcccagggctgccgaatgcttaggacacgctgagagactagttgtgatttgctattttgcctagagctttgtccttctagatctgattggctgtaagtatctctactgtgtacctgtggcattccttcacagtgggttacaagcttcttttggattagagggggatttttgatgggagaaagctggagatctgaacccagcccatttgcacactataangaaaaaaaagtaacttttaaacctgttaacattgcccggngntataagagatgatcttctattttgaccttttgtctaactatgaccttgaactctgacctgtgaccatgcagcatcacatgatggcatgacgttcttttggatcagagagcttccccaaatctaacctgc

SEQ ID NO: 39978 - DNA, 967 bp, Homo Sapiens
tttcgtctcccagctcagaaaactaggctgggaaaggacataatgtggtatttcgtcacgtagctgagacctagaagggcatactcaggcggagattgcacaaagctgggctccaagttctgtgcttcctgatcccgagccctgacactcatttgctgtgtggtcccgggcatgtcatcaagaagctcgctgtctgcatgaggctcccgacgatctccatccccagggggttgggaggatgtctttagattttaggactctgtgataaatattccacagcctggtgtgaggaagcttggaccaaatgcttcccctttggccggttagtctgaacaaggatctgctgatttaaaggagcagttggagattcagaacacatataactggggaattcagggcaagctaccaacccagccctgctgtagttttcccaggactgaaggaaagaggcagacaccacattctcctctgcaaagttctctggagaatgtgtgatgttaacactcccagctaagggaaagcaaagtctaaaggaaaacacacaggaatgcttccaatgtctccaagtattcctgtggtcaacagtttcgcagatccgttaggcccttaaagacaaggaggaagtaaaaggtcaaatttaaatctatttaaaaaaacttttaaaaaaattatttatttattattattttttatttttaagacagaatctcgctctgttgcccaggctggagtgcagtggtgcaatcttggctcactgcaacctcccacctcctgggttccagcgatttctcctgcctcagcctccctgagtaacttgggattacagggggcctgcccaccaagccccgggctattttttttgattttttagcaagaaaaaggggggttttcgcccatttttgggccaaaggctgggttcctcaaaaacttcccttgggccctttaaaaatggaattccctcccccct

SEQ ID NO: 39979 - DNA, 794 bp, Homo Sapiens
agaggtaatcccagcctctgaatgttggtgttgcccatgttgtcagacaacaacaatccagttccctcccttcgaagaagaataagcagtcagctccagtctcttccaagtcctctctagatgttctgccttcccaagtctattctctggttgggagcagtcccctccgcaccacatcttcttataattccttggtccctgtccaagatcagcatcagcccatcatcattccagatactcccagccctcctgtgagtgtcatcactatccgaagtgacactgatgaggaagaggacaacaaatacaagcccagtagctctggactgaagccaaggtctaatgtcatcagttatgtcactgtcaatgattctccagactctgactcttctttgagcagcccttattccactgataccctgagtgctctccgaggcaatagtggatccgttttggaggggcctggcagagttgtggcagatggcactggcacccgcactatcattgtgcctccactgaaaactcagcttggtgactgcactgtagcaacccaggcctcaggtctcctgagcaataagactaagccagtcgcttcagtgagtgggcagtcatctggatgctgtatcacccccacagggtatcgagctcaacgcggggggaccagtgcagcacaaccactcaatcttagccagaaccagcagtcatcggcggctccaactcacaggagagaagcagcaccagcccccgcagcagcagcgttgtgccctctctccagcccctacactcagatgcagccg

SEQ ID NO: 39980 - DNA, 598 bp, Homo Sapiens
agaaatatcatggttaccccatttgttaatgagcattaatgttttctgaacacttccaaagattaatcaaacataaatattcattgtctgaaaatgtctttaagatacaattcagaggtccctatttcctttgtacatacacacttagaaagaaaagacagaaaaggaagaggaaggaaggaaatattttgagaatatattgagaagaattaagaaaactcttcaatgaagtgttaacaaccaaaccctacagacggtatcagaaacagcaaatagatattcctctaccctttcacagtgagtgagtgagtacagaagaatgctcatgatagttttgccttcattctactttctgtggacacagagtaatgaatatttaatgggacattaaatatgcccttcaaatctataattttactttggtaaacgagatttaacatgatgtcttttatgctcctaaaacatcttttttcaaactccattccttagaacattcttctactgagatgatccaagaccaaaagtgttctttggtacttgcttataaagtgatagtacatgttagcatataatgtattttgaagagtgaagtaaatgc

SEQ ID NO: 39981 - DNA, 647 bp, Homo Sapiens
atgaagctgagaagcagccacaatgcttcaaaaacactaaacgccaataatatggagacactaatcgaatgtcaatcagagggtgatatcaaggaacatcccctgttggcatcatgtgagagtgaagacagtatttgccagctcattgaagttaagaagagaaagaaggtgctgtcctggccctttctcatgagaaggctctcccctgcatcagatttttctggggctttggagacagacttgaaagcatcgctatttgatcagcccttgtcaattatctgcggtgacagtgacacactccccagacccatccaggacattctcactattctatgccttaaaggcccttcaacggaagggatattcaggagagcagccaacgagaaagcccgtaaggagctgaaggaggagctcaactctggggatgcggtggatctggagaggctccccgtgcacctcctcgctgtggtctttaaggacttcctcagaagtatcccccggaagctactttcaagcgacctctttgaggagtggatgggtgctctggagatgcaggacgaggaggacagaatcgaggccctgaaacaggttgcagataagctcccccggcccaacctcctgctactcaagcacttggtctatgtgct

SEQ ID NO: 39982 - DNA, 652 bp, Homo Sapiens
attctccttgtgtagttcaaaaaaatctcctctggtaatactgaaacaactaatttttcttattttgtttgttcctctttattattaaatactatgtgaattaactctttagtagttggcctggttgaagctctgtgaggagcaaagcagccctctccaggtgaactgcttgactttaccacctgaaggagtatttactgcaagaattaacaaagcaggtgttcctgatccaagcagaaccctgttatttgaagagcctgagaaatcttatcccgtttacaaatgtcctgggagtgcatccaaagtgaaacttgggtatcctcaatactaagaaatctctgagaatgactgggtcttggctctttgatcttacctctactcctctgaaaaacatgattatctaaaattgtgttaggtggatgaaccgcatcaaagacttccagaagccactccagtgaccataagataaatgtcagaatcgcataacccccagtatcaggcaagtgttatcctctcttaaaactctttgtttacaaccatgatctccttttgggaatcattacatttgacttactgcttatttttgttgaatgttaccagtgcttggtgataaaacttgaatgtggctctttgctttggaaaaaaaaaaaaa

SEQ ID NO: 39983 - DNA, 434 bp, Homo Sapiens
ataactggatccccagctattaggcccgtaatcatcctgatcatgctgtcacaaactaaagagaaaataaggaaaaggagagaaaaaaagaaataggttatgaataaaagtgacaataaaacatgagatataaatcaagcttaaaaaaaaaaagcagcacctgtgggccatactaaaagatcccctacttacgtactggttttcatgtatccctgatatagataaaacacataatttggagaaaaataaagtataaaatgtatctatctctcgacttttctgatgaagttataccagaaaagttaattattagatgggcctgccatgtgaaaaccagaaaataacctcgtactcacaagccagtggaagggattcctgatttcactaacaaaaaaaaaaaaaagagagggcgggaacaattttcaaataaacca

SEQ ID NO: 39984 - DNA, 708 bp, Homo Sapiens
  misc_feature (3)..(4): n is a, c, g, or t
  misc_feature (38)..(38): n is a, c, g, or t
  misc_feature (276)..(276): n is a, c, g, or t
  misc_feature (297)..(297): n is a, c, g, or t
  misc_feature (300)..(300): n is a, c, g, or t
  misc_feature (316)..(316): n is a, c, g, or t
  misc_feature (656)..(656): n is a, c, g, or t
  misc_feature (670)..(670): n is a, c, g, or t
  misc_feature (673)..(673): n is a, c, g, or t
ganncccaagtaattcggcacgagctgaaaggcagggnactaaggtgacagctgactctgccggggcggagtgcgtgtcctcccaccgtgctggcgctgaactgactgtccgctgccaagggaagtgacagccgcagccgggctctcagccagcggccgggcgccccgcggaccatgctctccagtacgcagaacgcgggcggctcctatcagcgggtccgcggggcgcttgatacacagaaatgcagtccagagaaaagtgcctcatttttcagnaaagtgacatattcctggttnagnagagtaattactttangctataagagacctttggaaagagaggatctttttgaactaaaggaaagtgattccttctgcactgcgtgtcccatctttgaaaaacaatggagaaaggaagttttaaggaatcaagagaggcaaaaagtaaaggtatcttgttataaagaggcacatatcaagaaaccatctctactctatgcattgtggaacacctttaaatccatcctgattcaagttgccttattcaaagtgtttgctgatattttgtccttcactagcccactcataatgaattataccagaaaagctaattatttgatgggccctgccatgtgaaaaccagaaaataacctcgnactcacaagccagnggnaagggattcctgattttactaaaaaaaaaaaaaaa

SEQ ID NO: 39985 - DNA, 712 bp, Homo Sapiens
cgaaaatatgccgttcagatttgtaaggggatggactatttgggttctcggcaatacgttcaccgggacttggcagcaagaaatgtccttgttgagagtgaacaccaagtgaaaattggagacttcggtttaaccaaagcaattgaaaccgataaggagtattacaccgtcaaggatgaccgggacagccctgtgttttggtatgctccagaatgtttaatgcaatctaaattttatattgcctctgacgtctggtcttttggagtcactctgcatgagctgctgacttactgtgattcagattctagtcccatggctttgttcctgaaaatgataggcccaacccatggccagatgacagtcacaagacttgtgaatacgttaaaagaaggaaaacgcctgccgtgcccacctaactgtccagatgaggtttatcaacttatgaggaaatgctgggaattccaaccatccaatcggacaagctttcagaaccttattgaaggatttgaagcacttttaaaataagaagcatgaataacatttaaattccacagattatcaagtccttctcctgcaacaaatgcccaagtcattttttaaaaatttctaatgaaagaagtttgtgttctgtccaaaaagtcactgaactcatacttcagtacatatacatgtataagggcacactgtagtgcttaatatgtgtaaggacttc

SEQ ID NO: 39986 - DNA, 743 bp, Homo Sapiens
tctggtatgctccaaatcgcaccatcaccgttgatgacaagatgtccctccggctccactaccggatgaggttctatttcaccaattggcatggaaccaacgacaatgagcagtcagtgtggcgtcattctccaaagaagcagaaaaatggctacgagaaaaaaaagattccagatgcaacccctctccttgatgccagctcactggagtatctgtttgctcagggacagtatgatttggtgaaatgcctggctcctattcgagaccccaagaccgagcaggatggacatgatattgagaacgagtgtctagggatggctgtcctggccatctcacactatgccatgatgaagaagatgcagttgccagaactgcccaaggacatcagctacaagcgatatattccagaaacattgaataagtccatcagacagaggaaccttctcaccaggatgcggataaataatgttttcaaggatttcctaaaggaatttaacaacaagaccatttgtgacagcagcgtgtccacgcatgacctgaaggtgaaatacttggctaccttggaaactttgacaaaacattacggtgctgaaatatttgagacttccatgttactgatttcatcagaaaatgagatgaattggtttcattcgaatgacggtggaaacgttctctactacgaatgatggtgactgggaatcttggaatccagtggaggcataaaccaaatgttgtttctgttg

SEQ ID NO: 39987 - DNA, 566 bp, Homo Sapiens
cattggtgctcatttactgtgggctgtaagcatgagtgaattctggttgtgtttcaactgctgtattgcagaacagcctcagcctaaaaggcgacggcggattgacagaagtatgattggagagcccacaaactttgtgcatacagctcatgttggatcaggagacctgttcagtggtttgaattcagttagctccattcagaaccaaatgcagtccaagggaggttatggaggtggaatgcctgccaatgtccagatgcagctcgtggatacgaaggcgggatagccctggtcctttctccaggttattgtgaatttctatattttctctgtccactattctgtaattttttttttgtcctgtgattgcttttattttgaattacaaaaaagaagtgtgatggcaccttgtccaccctgtcgtgattattccagtgagatgttactgttctgctctgaagaagatactgtcagacgaatcctgcatttccttcagctggcatgcatgcctttggactcatggacagagttctttggattgtcactgaattttcaatgtttaatca

SEQ ID NO: 39988 - DNA, 704 bp, Homo Sapiens
gcgtccgctggcatgcatgcctttggactcatggacagagttctttggattgtcactgaattttcaatgtttaatcagtatggatctgatcttcgcatgatcttttttgtgaatgctaacaccattttgcagtttttttttctattttaaacatttttcttttcactgccgaccccctgccttacgattttattggaaagcaaggacctgctattatttgttaatttgccatcatttatgtatattttggaaggtatgagacccacaagcacaatgatcatttttatttgtttgtttgtttgaaacttcagcagaatagatatctgcatgctttatgaagttgttgcttcggtaagagcccatgggatgccagaaattaacatttctttgctgccatgggctgatgatgctgctattagataaagtttagctgtggcaccaagtcacatcattttcatagaaaaagattacttgtagcttattttagaagtatgaccttttggtctgtttgattgattgattagaattgcaataaaagaaaagcttgcattcataaggcattcattctgttgtaaatgttcaatatatttattttgagagcaaggacctgtggttgtaaacaggtgtggttacaggtgtggttatgtatctgagtgttgcggtcatactctcctccagtccaatcctgagcatcttcatcttat

SEQ ID NO: 39989 - DNA, 498 bp, Homo Sapiens
gccaccatcaacccgctgtgcatagaaatgtatgcagacaaagagagcaggggtggtgttctggaaccagaggggacagtggagattaagttccgaaagaaagatctgataaagtccatgagaaggatcgatccagcttacaagaagctcatggaacagctaggggaacctgatctctccgacaaggaccgaaaggacctggagggccggctaaaggctcgcgaggacctgctgctccccatctaccaccaggtggcggtgcagttcgccgacttccatgacacacccggccggatgctggagaagggcgtcatatctgacatcctggagtggaagaccgcacgcaccttcctgtattggcgtctgcgccgcctcctcctggaggaccaggtcaagcatgagatcctgcaggccagcggggagctgaatcacgtgcatatccagtccatgccgcgtcgcttgttcgtggaaacttaccgggctgtcaaggcctacttg

SEQ ID NO: 39990 - DNA, 670 bp, Homo Sapiens
gccaccaaatggagcctgtgcatagaaatgtatgcagacaaagagagcagggtggtgttctggaaccagaggggacagtggagattaagttccgaaagaaagatctgataaagtccatgagaaggatcgatccagcttacaagaagctcatggaacagctaggggaacctgatctctccgacaaggaccgaaaggacctggagggccggctaaaggctcgcgaggacctgctgctccccatctaccaccaggtggcggtgcagttcgccgacttccatgacacacccggccggatgctggagaagggcgtcatatctgacatcctggagtggaagaccgcacgcaccttcctgtattggcgtctgcgccgcctcctcctggaggaccaggtcaagcaggagatcctgcaggccagcggggagctgagtcacgtgcatatccagtccatgctgcgtcgctggttcgtggagacggagggggctgtcaaggcctacttgtgggacaacaaccaggtggttgtgcagtggctggaacagcactggcaggcaggggatggcccgcgctccaccatccgtgagaacatcacgtacctgaagcacgactctgtcctcaagaccatccgaggcctggttgaagaaaaccccgaggtggccgtggactgtgtgatata

SEQ ID NO: 39991 - DNA, 970 bp, Homo Sapiens
tcgaactgcaagccagttggatgaatttcaggaatgcttgtccaagtttactcgatataattcagtacgacctttagccacattgtcatatgctagtgatctctataatggttccagtatagtctctagtattgaatttgaccgggattgtgactattttgcgattgctggagttacaaagaagattaaagtctatgaatatgacactgtcatccaggatgcagtggatattcattaccctgagaatgaaatgacctgcaattcgaaaatcagctgtatcagttggagtagttaccataagaacctgttagctagcagtgattatgaaggcactgttattttatgggatggattcacaggacagaggtcaaaggtctatcaggagcatgagaagaggtgttggagtgttgactttaatttgatggatcctaaactcttggcttcaggttctgatgatgcaaaagtgaagctgtggtctaccaatctagacaactcagtggcaagcattgaggcaaaggctaatgtgtgctgtgttaaattcagcccctcttccagataccatttggctttcggctgtgcagatcactgtgtccactactatgatcttcgtaacactaaacagccaatcatggtattcaaaggacaccgtaaagcagtctcttatgcaaagtttgtgagtggtgaggaaattgtctctgcctcaacagacagtcagctaaaactgtggaatgtagggaaaccatactgcctacgttccttcaagggtcatatcaatgaaaaaaactttgtaggcctggcttccaatggagattatatagcttgtgggagtgaaaataactctctctacctgtactataaaggactttctaagactttgctaacttttaagtttgatacagtcaaaagtgttctcgacaaagaccgacaagcagatgatacaaatgaatttgttagtksygtgtgckggagg

SEQ ID NO: 39992 - DNA, 588 bp, Homo Sapiens
caagttcttgttgatattcgcctctggcaacctgatgcttgctacaaacctattggaaagccttaaaccgggaaatttccatgctatctagaggtttttgatgtcatcttaagaaacacacttaagagcatcagatttactgattgcattttatgctttaagtacgaaagggtttgtgccaatattcactacgtattatgcagtatttatatcttttgtatgtaaaactttaactgatttctgtcattcatcaatgagtagaagtaaatacattatagttgattttgctaaatcttaatttaaaagcctcattttcctagaaatctaattattcagttattcatgacaatatttttttaaaagtaagaaattctgagttgtcttcttggagctgtaggtcttgaagcagcaacgtctttcaggggttggagacagaaacccattctccaatctcagtagttttttcgaaaggctgtgatcatttattgatcgtgatatgacttgttctttcctttcgctgctgcggccgcagccatgagtatgctcaggcttcagaagaggctcgcctctagtgtcctccgctgtggc

SEQ ID NO: 39993 - DNA, 729 bp, Homo Sapiens
gctcacctgttcctagagcaatgtcttcccagcagcagcagcggcagcagcagcagtgcccaccccagagggcccagcagcagcaagtgaagcagccttgtcagccaccccctgttaaatgtcaagagacatgtgcacccaaaaccaaggatccatgtgctccccaggtcaagaagcaatgcccaccgaaaggcaccatcattccagcccagcagaagtgtccctcagcccagcaagcctccaagagtaaacagaagtaaggatggactggatattaccatcatccaccatcctggctaccagatggaaccttctcttcttccttctcctcttccctccagctcttgagcctaccctcctctcacatctcctcctgcccaagatgtaaggaagcattgtaaggatttcttcccatcgtacccttccccacacataccaccttggcttcttctatatcccaccccgatgctctcccaggtgggtgtgagagagacctcattctctgcaggctccagcgtggccactgcttaaagcccatccatttcccaaagtgaggaaagtgtctgggcttcttctggggttccaccctgacaagtagggtcacagaggctggtgcacaggttctgccacattcctctccatgatgccccctgctctgggcttctctcctggtttcccaataaatatgtgcctcatggaaaacaaaaaaaccggcctctgttggcctca

SEQ ID NO: 39994 - DNA, 667 bp, Homo Sapiens
cgcgtccggtgcctgcttccccttcgccttctgccgtgattgtcagtttcctgaggcctccccagccacgcttcctgtacagcctgcagaactgtgagtcaattaaacctcttttcttcataaattacccagtttctcatagttctttatagcagtgtgaaaacagactaatggacccttctggttgaaggaatgcagccattctgcttgtttgactatgtcctttctattcatctctatttcctgggaggtgtttatccaagtgcaataggaggtattggtgaccgcacagtcccctcagtgttctgctagtaaatagttgaaggttgatcattgatcttctgcgttttcagtctggcatggaaaagcccctgtgcaactggtaaagatatcaataagcaccaggaggtatctaaatccaccaggagccataggcatcacgttgacgtccatttaccagtcttccctggcaagattcttctgaattgtgctgccttggccaaaagaggtatgggaggggctgggcgcagtggcttgtgcctgtaatcccaacattttgggaaaccaattcaggtggatcgttagaggtcagtggttcaagaccatcctggccaacgtggtgacatcccatctctactagaaatacaataagttggctgggtttggg

SEQ ID NO: 39995 - DNA, 1070 bp, Homo Sapiens
cccgggatccatgatcctgagactttggaagcaattgcagaaaatgcaaaaggcttggctggaatatcaggagaaaggatttgggtggaactgaaaaaaattcttgttggtaaccatgtaaatcatttgattcaccttatctatgatcttgatgtggctccttatataggtttacctaaacttgctaatgcaagtttagaagaatttgacaaagtcagtaaaaatgttgatggtttttcaccaaagccagtgactcttttggcctcattattcaaagtacaagatgatgtcacaaaattggatttgaggttgaagatcgcgaaagaggagaaaaaccttggcttatttatagttaaaaataggaaagatttaattaaagcaacagatagttcagacccattgaaaccctatcaagacttcattatagattctagggaacctgatgcaactactcgtgtatgtgaactactgaagtaccaaggagagcactgtctcctaaaggaaatgcagcagtggtccattcctccatttcctgtaagtggccatgacatcagaaaagtgggcatttcttcaggaaaagaaattggggctctattacaacagttgcgagaacagtggaaaaaaagtggttaccaaatggaaaaagatgaacttctgagttacataaagaagacctaaaactgatggctactaaaaagcagagcatttctggtaagactaaattttctcccctccctcttaatgaggttttagagactacaccagaataaaagatagtttaggggacctctgtagaacaacaagggtcttattttgtgaattatatatttcaagaactaaacagagatccacctttctggatctgatttatatcactgaaatgtacagttcttttggaatagtttcacctgagaaaacatagttggctattatctatcttaacctgttcaggcttttaaaaaaaactgkttttgcatagggtagtactaagatctttaaaagtggtactgtcttgaagaaaaacgtttwtkkttktttsmatkgaataacrgggtacctaacaaggctgt

SEQ ID NO: 39996 - DNA, 522 bp, Homo Sapiens
gcacgagcttgcccccatcacctgccgcccccatcaaacatgttgggacaatgcccataggaatggacctccttccccgtctccagctgggactggtgtttttttagtctctggagtatgatggttctcatgggtaggatgagatctttggcagaaaggtcttcggtggtgctctgagcctgcgctgcataggactgagcagacccacctcctccagcttgggtggccctgccactcctggttccaagtctctcctttcctggcaggtcttaagggaagattgtacccctcaccctttacatacccagaatcatcagtatgtcacttcctaatttctatcagtgtatctcattatttcatactgttttactaatcctaagtctaaacagatttgctcaaaaggagaccattctattttttaaagtacttagtgatacacgtataagctttgcatggacgaattaaataagcacattgaccttttcttgtacattcagaacctgaacatccatgtgaaaactg

SEQ ID NO: 39997 - DNA, 837 bp, Homo Sapiens
  misc_feature (799)..(799): n is a, c, g, or t
gtgataacacatctaaacagggttagtcagcaacataaaatcaacctaatgacagcagacaacttatccatctgtttttggccaaccttgatgagacctgattttgaaaatcgagagtttctgtctactactaagattcatcaatctgttgttgaaacattcattcagcagtgtcagtttttcttttacaatggagaaattgtagaaacgacaaacattgtggctcctccaccaccttcaaacccaggacagttggtggaaccaatggtgccacttcagttgccgccaccattgcaacctcagctgatacaaccacaattacaaacggatcctcttggtattatatgagtaggaagtgattgcaaacaggctggatttggacaaaaagcaaatctagacatgcatgtttcagggttcagtagtatacttcatgtttcatacagataattcacattcaaaattacattttctctttgaactagatggtattccttattcacttacattacaaatctaagaccatgtgataagcatgactggagaggtttaatttttataaacaaaaatagctataaagtacaaagctgctgctgcatgcaaccttattgcaatcagtatatcattcctgtggcaatttctgtcaccttatattgtgaataaaatttttctatagaaattaaatgatttaaaaactcacctatatgaaacatttaatgcttttcagcctgctttctggctgattttggtatttgatgtgctaatttgggcaacttaatttacattctggcagtcggtgtanatactaaaagcccagttagtatttataatttaggctac

SEQ ID NO: 39998 - DNA, 520 bp, Homo Sapiens
tttttttaaagatcctaacagaacatagcgtaacaatattggtcttccaggtgttactcatttcaattatgtgtagtataccaggacagacctattttcatgtcttatttctttaaagagctgcttcattgggcgggcgccatggctcacgtctgtaatcccagcactttgggaggccgaggcgggtgggttacttgaggtcaggagttcgagaccagcctggcaaacatggcgaaaccccatcttaactaaaaatacaaaaaaattagccgggtgtggtgtcacgcgcctgtaatcccagctacttggggggctcaggcaggagaattgcctgaacccaggaggcggaggttgcagtgagctgagattgggccactgcactccaccctgggcgacagagtgagactcggtctcagaaaaaaaaaaaaaagagctgcttcacatataaatgtctatagctagtagcctggccctttaatgtttaatttgaataaatatatctgttttccgtgaattatct

SEQ ID NO: 39999 - DNA, 581 bp, Homo Sapiens
actcagttgttccagttcccttcacagacatgaaagaactcatagtggaggaaaactctacgaatgtcaaaaatgtgccaaagtctttagatgtcccacgtcccttcaagcacatgaaagagctcacactggagaaagaccttatgaatgtaataaatgtggtaaaaccttcaattatcccagttgttttcgaagacataaaaaaactcatagtggagaaaagccatatgaatgtacaaggtgtggtaaagcctttgggtggtgcagttccctccgaagacatgaaatgactcacactggagaaaaaccctttgattgtaaacagtgtggtaaagtctttactttttcaaattaccttagacttcatgaaagaactcatttggccgggcgtagccagtgctttggcaggaggcagggggatcacctgagcccaggagtttgagaccagcctgggcaacataagaaggccccatatcggctgggtacggtggctcacgcttgtaatcccagcactttgggaggctgaggctggtcttgaactcctgacctcaaggaatccatcctcttcagcctcgcaaagt

SEQ ID NO: 40000 - DNA, 507 bp, Homo Sapiens
ggtaattctcccaatttatttcaaatccatcaaagaactcacactggaaagaggtcctataaatgtagggaaatagtgagagccttcacagtttccagtttctttcgaaaacatggaaaaatgcatactggagaaaaacgctatgaatgtatatactgtggaaaacctatcgattatcccagtttatttcaaattcatgttagaactcacactggagaaaaaccttacaaatgtaaacaatgtggtaaagccttcatttccgcaggttaccttcggacacatgaaatcagatctcacgcgctggagaaatcccaccaatgtcaggaatgtgggaaaaaactcagttgttccagttcccttcacagacatgaaagaactcatagtggaggaaaactctacgaatgtcaaaaatgtgccaaagtctttagatgtcccacgtcccttcaagcacatgaaagagctcacactggagaaagaccttatgaatgtaataaatgtggtaaaacc

SEQ ID NO: 40001 - DNA, 741 bp, Homo Sapiens
  misc_feature (695)..(695): n is a, c, g, or t
gcagcctgtacaggaacatcctgatgtacgggccaccaggcaccgggaagacgctgtttgccaagaaactcgccctgcactcaggcatggactacgccatcatgacaggcggggacgtggcccccatggggcgggaaggcgtgaccgccatgcacaagctctttgactgggccaataccagccggcgcggcctcctgctctttgtggatgaagcggacgccttccttcggaagcgagccaccgagaagataagcgaggacctcagggccacactgaacgccttcctgtaccgcacgggccagcacagcaacaagttcatgctggtcctggccagcaaccaaccagagcagttcgactgggccatcaatgaccgcatcaatgagatggtccacttcgacctgccagggcaggaggaacgggagcgcctggtgagaatgtattttgacaagtatgttcttaagccggccacagaaggaaagcagcgcctgaagctggcccagtttgactacgggaggaagtgctcggaggtcgctcggctgacggagggcatgtcgggccgggagatcgctcagctggccgtgtcctggcaggccacggcgtatgcctccgaggacggggtcctgaccgaggccatgatggacacccgcgtgcaagatgctgtccagcagcaccagcagaagatgtgctggctgaangcggaaaggcctgggcgtggggacaagccctcccatcctgagtccc

SEQ ID NO: 40002 - DNA, 610 bp, Homo Sapiens
cgtccgctccaggtctggttcttacttctcctaaaggcccaggctgtgtggccccgtgtcctgcaggtattgggagatccacagctaagacaccgggacctcctggaagccaaaaatgggaccattgcaatttagagatgtggccatagaattctctctggaggagtggcattgcctggacactgcacagcggaatttatataggaatgtgatgttagagaactacagtaacctggtcttccttggtattactgtttctaagccagacctgatcacctgtctggagcaaggaagaaaacctttgaccatgaagagaaatgagatgatagccaaaccctcagtgagcttccttcaagttcacagtgagagccaaagtcctcttcatgacatataagagactgcacagtgtggctgcttttccataatttttgggacgcacaaatgtctgcatgattttgagaaactaaaattactctcaaagttctctttgcatcagatctgaaatgtctgagagtaatagtttctgttgaatttttttttgttcatttttctgcacagtccattctgtttttattactatctaggcttgaaatatatagtttgaaattat

SEQ ID NO: 40003 - DNA, 918 bp, Homo Sapiens
ctcgctgtccactttcgtctctgagcagcaaatggaaagccaggagccggcagatttgacaggtgtcactgtacagtccccagggaggcacagtgtctgctgggaccggcagaagctgaagggtctcagaggaggaggctgctggttccagcaaatggtgctgaccccactgagactctgatgctgttctttgacaagtttgcaaacatcgtgccctttgactcctgggaccagctcatgaggcagctggacctcacgaaaaatgagatcgatgtggtcagagctggtacagcaggcccaggggatgccttgtatgcaatgctgatgaaatgggtcaacaaaactggacggaacgcctcgatccacaccctgctggatgccttggagaggatggaagagagacatgcaaaagagaagattcaggacctcttggtggactctggaaagttcatctacttagaagatggcacaggctctgccgtgtccttggagtgaaagactctttttaccagaggtttcctcttaggtgttaggagttaatacatataaggtttttttttttttaacatgtttacaaaggtaacttcttagccaggtgtagtgggcccaggccggtaaatcccagacacttggggaggctgaggcggggggatcactggaggtcagaacgttcaagaccaagtctggacaacaatcggtgaaatcgcggcttttacaaacaagaataccacacatcacgcgggattgtgcgggggggggcataaaatactcgggcaacacgggagggctgagcgcagggaaaatcctggaaacccacgaaggatgtgactgtaattggccatgcgcacaacctggaacaagacaagcctgtccaagaaaaatactggaaagtatgccgtaggctcttccacggacttg

SEQ ID NO: 40004 - DNA, 498 bp, Homo Sapiens
gcgcatccctcttttccttccctgggttcagtgtggctgggtaaggaccgtctgtttgtagggctgccaggctgcagcctgctgctccagggagcaccagctgcagctgatccaatacaccaagcctgtgtctccctcttctatcacctctctccaggatctctgctgtctcttggatcccatctgcctagatggaagaggatcctatccgaagctaggataaatgttgtcttactcctctgctatgttctcccagaaaaaattgattacaagttctctgctgtggttgctgcagctccaggaagtccccgcaatgtctcacgttgtctttgaccagtggtccccagtaccaggccagagaagacaactttataatgtcatttgtgttgtgaaaattcttccactgacccaaaatggaaccgtacaaagcctatccgtgtatatggaaaagtctcatgcacctggattaactcagaaaaagtaaagtcctgaaacttc

SEQ ID NO: 40005 - DNA, 587 bp, Homo Sapiens
  misc_feature (568)..(568): n is a, c, g, or t
tattaaaaaacccagaatgctctttgaccgtcacttaaaacctaagacatgtggcgaaattccatccagttctaagtgaaagagtttcagaaggcaggagattttgaattattatccagcagggctggaagcactagatgcagcatgagcacaactattcggctttccttccctattgtttttgtttttttaatgagttttgacgcatgttgttttgattgctattgttgtacatgagaaattcagcattaaagaacactgaagcggtaaggtcactgtggaagaggaagcgtttatactgtaaaagaaggttagatttgcacagtctactgggtaggtattgtaaataataatttttaaaacttgcacaaatcaaaacaaacacaaacaaaattgtattttatcctgttggtgttaagaggtgtttcacttgctgagatttcctgtacattgcaaacaaatacagaatgcaaaccctcaaagctgtattatctggtgtgtttgtcctgtatttacagttgtttttgactatgcaggagctatcagtgctagagtgagcatgcttcanaactgtacatgaagccaat

SEQ ID NO: 40006 - DNA, 897 bp, Homo Sapiens
  misc_feature (26)..(26): n is a, c, g, or t
  misc_feature (606)..(607): n is a, c, g, or t
  misc_feature (610)..(610): n is a, c, g, or t
  misc_feature (613)..(613): n is a, c, g, or t
atggaatcactagttcccttgtacgngtttgaaaaaacggatggaagtaccagactatgaaatggttcaccaggctggtttaacctgcgattattcagaacttcctcaccatatcagcacagaacaagaaatagagtgtcttattcaatctgtgcattatttgctgaaaaatttaccaaatcctactcttgtgacaattgcaaggtcaagtctggatgattactgtccttctgaccaagttgacactattcaagaaaaggtcctcaatatgctacgtgccctctatggaaatctagacctccaagtgtatgcagcagagtctcctccatcttgaaacaaacaaaacattaggctcctgttgtatcttggtttagtaacaggcccttaattaacttatttgtacatgagtcttccagagaacactgttttatattaactttcagttgaaatctttcagatattttgaatctctgaacaaccattgtcagttgtgaatgatggtaaattttttggcatcaagtctcataaccccaactgatagaactgttgcttatctgtcttccttaagtattttttagggttttgttttgttttttttggttgttnngtntgncttcacttttcccccaggtctgttgagctgtatgagattcattcatactccatttattcattcacctaatatttgttgaacacttacatgtaccagacattatttaggtgctgggtatatggtactgaacagaatagcccaggcccctgccccttttagggagaccgcatgagagcacatcccggtcatgagcaatcgttctaagggaaggcccataaccgacctgcctttagccctcagggcttcagggctttatagacaagtacacctcttaactttctttt

SEQ ID NO: 40007 - DNA, 815 bp, Homo Sapiens
gaggctcgtgtttaaatcggcacgcgggatgctttgtaccttgggagctgtgagcaggcctcacgatggcttgggagcactcgttctcccaaggtctgagtcttcatccagccctgcctgtctgtcgcagccttcctcactctgttcctcggccagttaacaagaagatggtgtgaggtgttctccaccagtctctcctgtttgagactgttgacgttatcatactgaggtgttagatcaaatatctctaattgaagaacatgtgaggttgaaagagcaccagccagggcaacatagcgcgaccctgtctctacaaaaaattaaaaagagaacatacaaagttgacatatgagaccctgttgtccccgcctgcagctttgccccagtaacagatgcccgttgctcttgggctggtttcccctgaacacctccaagaggctgcctgccttgccagcacccgtgtcctgagctcctgcagcccagtggctgctgaagttgtgatccctcactcaccctgctagctttgcccttgactcgtcttctctgaacctcagcctcgtgcattgcctggaaccttcttctagcataaatgaaggtttttcctcctacacacattccttcctcggttatttcattcagagaatatttatgaaatgcctactgtgtgcaagtcatccatccttgaaaaggccacttctcagtgagggagagatgttagtggattctgtgaggaatacctgctggagttgaagcgtaaatagctgtctttccctcccgatttaaggtgggtctaacaaagttctatggaatctgac

SEQ ID NO: 40008 - DNA, 851 bp, Homo Sapiens
ctgttcttagcctgaaatctaatgcttgtttttgtacctctcccaggtgggtaacactctaggatgacatgatgttataattttaggggaaatcacatttttaccttatgctgttactgggcagaaccacgttttatgtaaacataccagacatcgggtaacagacagtactttaaatgttataaatttggtgatcagaactattaatagcataaatcgaactcaaatggaagcaaaactgatttcatgcaggtcctgaattttactttgccttaagaagtgccctccccacaatgcaggagaggcacagagtgcactgtcattgacatgttacccgactaaggatcactctgttcataagaaaaaggcctgaagtgactctgtttaataaagtcagtttaattttatctaataatgatcttaagacattcccatgtcaaaatttgaaatatggtaattcagtgataactatctcttctaaagcagccgtaaaccctccccactacccgtctttctcccagctcaccctggctttttttgctgggggtgctggatgcaagcccccagcagcacacctgggatgctcaccctgccgcacagttcagaaggcaagtcctcacctgctcgcaaagacccttcttctccaataaaagactctacttgcctgagtttcctcatcagggctgtcattcagtgatgtatgggggtctgaagaatactgccttctatctgtcttctgtttaccactggctcctctgtaccctccttgcgaacagtcttcttccttttggccagttctgtccgtgaaatctcagaaggctcgggagttgcgctgatgtattctctccttg

SEQ ID NO: 40009 - DNA, 842 bp, Homo Sapiens
gtcctgaattttactttgccttaagaagtgccctccccacaatgcaggagaggcacagagtgcactgtcattgacatgttacccgactaaggatcactctgttcataagaaaaaggcctgaagtgactctgtttaataaagtcagtttaattttatctaataatgatcttaagacattcccatgtcaaaatttgaaatatggtaattcagtgataactatctcttctaaagcagccgtaaaccctccccactacccgtctttctcccagctcaccctggctttttttgctgggggtgctggatgcaagcccccagccagcacacctgggatgctcaccctgccgcacagttcagaaggcaagtcctcacctgctcgcaaagacccttcttctccaataaaagactctacttgcctgagtttcctcatcagggctgtcattcagtgatgtatgggggtctgaagaatactgccttctatctgtcttctgtttaccacttgctcctctgctaccctcctgccgcaaacagtcttcttccttttggcccagttctgtcccgtgaaattctcagaaggcctcgggagctgcgctgatgtattctctccttgtttgatagctcatcatcagtagataagcctacacacttcagagggtgacaggtttcttacttggagactcactgcaccttgattgtagatttgcctcagacactcttggtatggtacagtgccccgagtccagatcttccaggtgccagaagacagcactgtacagtgcgtgtcgcatagaacactcattgttaattatctcatgctgagactgcactgtaaatactgatcagat

SEQ ID NO: 40010 - DNA, 703 bp, Homo Sapiens
gtcaatgctggagaagcaccagatcctgtaattacatctaatgttccatgttttcatagtatcaaaccaaatctgaataatttgaatggaaaaactggagagtttttagcctttcaaactgttcatctaccaccccttccagagcaattacttgaattaggaaataaggcacacaatgatatgcatatagtgcaagctacagaaatacataatattaacataatctccagcaatgctaaagatagtagagatgaggaaaataaaaagtctcataatggagctgaaaccacctctctaccgccaaagacagtttttaaagataaagtaaggagatgttctttgggaatctttttgcctagattgcccaacaagagaaattgtagtgtcactggtattgatgacctggaacagattccagcagacacaactgatataaaatcacttagaaactcagccggtctctagcaaagattcaggcattggatctgttgcaggtaaactgaacctaagtccttctcaatatataaatgaggaaaatcttcctgtatatcctgatgagatcaattcttcagactctattaacatagaaactgaggaaaaggccttgattgagacataccaaaaagagatttcaccatatgaaaactaacatgggaaaaacttgcaatagccaaaaaagaacgtgggtacaagaagaagacga

SEQ ID NO: 40011 - DNA, 690 bp, Homo Sapiens
tagtggcttatctctgatcgctgttacaaactaaattccatgtaagctttcatcaacaaattccaaagtgcctcctacaagggcacagctgtccgtatctcctttggattccatatttttgtttctctccaattcagatattgggagttcttcagatactgactctgcacactatcttttgaacattatgaaaatataatctgtcgggttgttttcatacttcttttttctgcatcagtgataaggcatacatttgcgcagatgagctaggaagttttgagaagtaccttttatgttcagaaagtaacagattaaaggtttttatgggttccaaattggttagtcacttaggtatgcaattataaatgcaaaatagtgccagatctttaactgtatatcagggtcagtttttgttcatgcccaaatcactacaccttcctcattggccttggagtcctactattttgtgccttcatttgtgttacatacatagctgcaagcaaaccatttttcccctttcttttattcaaacaataatttttgaaacaaaaaagaggaaggaaatcagtggcagaaataatcctgctgttattggtgtttgtttaataaaaataatgggacttttttcttaactttttattagctcttcctaagggaaatgtcacatattattatttaaattgtaccttg

SEQ ID NO: 40012 - DNA, 527 bp, Homo Sapiens
acgcgtccggtcactttggaaacaggaatcctctccccaaaatgggtagcaatgggggtacagaggccaaagacgcagctgcatgtcctgcagtgcctgggacgccccgtagtgaagagtgatgtggcccaaatgtcagcagtgccagtgtcagactcctgctaagagacagtatcaagaaagataacttcaaaatacactttctggaggcctggcgcggtggctcaggcctgtaatcccagcactctgttttgccaatgcatgtggatcacctgaggtcaggagttcgagaccagcctggccaactgcctgaaaccccatctctactaaaaatacaaaaatttgccctccttccctgcctgccgggtgcgtgtgagcggctgccctgcggatgctgtcctggacctgttggcaccacagacagttgctctgctgtcattacagggatgggcaggctggcatgggggcagccgctgcccctgcctgggtgttgctgtgtattcctgccggccaggggccactgccag

SEQ ID NO: 40013 - DNA, 597 bp, Homo Sapiens
ccggaaacattaagaagcagtatttttattaactttttgagacatattaaaatacattttgccttagaagactgcttctaaagtaatttttgtaagtaatgagatgggatggtaatctagtaatttgactttatagaaatccctcagtttggcccccaccattctacagagttgtactcaagacagatactgaaaaaatctaataccttcccttgtattttcagcattaccatctatacagaaatggaacactgtatctttatattcctaaaaatggtacttttggcataattaagaaatttttcttcatattatcacaatcatgcccttccattgaattattaattacaattaattactaaaaagcttggtatgtaaaattattctccacaatattaccatgcaagttatctctgaaatttaaaatgttaaagaaaaacatttctatattgaaatatatataatttataatgaaaattatagtagtttgtagtatttcattgaattttagagagatatttcatatatatgtactgtattttggatgtgtaaagcttctatgtattgaaatatttttttacgttttatttattgtac

SEQ ID NO: 40014 - DNA, 336 bp, Homo Sapiens
cacgaggggagcgggccctggggcgaggccatctctgcctgcctccctagcaggcgccagcggtggaggctgagtcgcaggacacatgccggccagttaattcattctcagcaaatgaaggtttgtctaagctgcctgggtatccacgggacaaaaacagcaaactccctcagactttgtccatgtataaacttgaagtggttgtgttgtagggttgcaggttttttgttacgctgctgtcactttctgtccaggagctggcaccccaggtgttctgagaccttgagggacccagacctttgggtccaagagtttcccaaacagccacgcctctca

SEQ ID NO: 40015 - DNA, 744 bp, Homo Sapiens
atttattagagatgaaaagtttaattttacctccagaacacattctgaaacggggtgatagtgaagcaattgcctatgctttctttcatcttcagcactggaaacgaatagaaggtgctcttaatctgttacagtgtacatgggaaggcacttttagaatgattccatacccgttagagaaaggacatctattttacccttatcccagctgcacagagacggctgatagagagctattacctacctttcatcatgtttctgtttacccaaaaaaggagcttcctttgttcatccatttcacagcaggattttgctcttctacagcaatgatagccattctcactcaccagtttcctgaaatcatgggtatttttgctaaagctgtagtaggagttaaaacccaaaaagaaaatgctgattaattatattcccaaaaatgaaaacactgagaaccatggaaaaactagtccttacttggtgctgggactctggtgcccccaaccctgggcatcctcaggctttgaggagaatacacaggatttgaagtcagaagacctaggtttgagttctggctgagccacgcactgttcatgtgaccttggacaaatcaccaaatttttctgaacagcatctgtaaagtgacagtaacccctacctcacagggttgttgtgaggattacatatatgctaaagcattttgcatatgaaaaagcttcttatgaatattgttattcctaggcaaac

SEQ ID NO: 40016 - DNA, 682 bp, Homo Sapiens
  misc_feature (48)..(48): n is a, c, g, or t
  misc_feature (250)..(250): n is a, c, g, or t
  misc_feature (657)..(657): n is a, c, g, or t
  misc_feature (665)..(665): n is a, c, g, or t
  misc_feature (676)..(676): n is a, c, g, or t
acctatgttggtttgccaaaaagaagtgtttaagatatgttttctgtntaaatgaactaattctttatattaaattcctgtctatgcattttgtgaggtacaaactgatgaaacagtgagtgatagagaatttctgccatgcttttaactccaaagtgaaagtctctttctctggattattttaaaattttggcgtgtttaaccattaagaaatgctgtattcttaaatatgaaacagttaatctaaagncttattatttcttctagtaaaataaaatattgttagattagttctcattaaatttattatatgctaaagaataaaactccagttagatttaaaaaaatcccatttacaagcattgcacctttaagaagaaaacaaatatgacagtatggtagctatacttgtgatgtctgacgcatgatggcctatggttttaaaaatagtattgtggaatatatttttggggaataagaatggttgagtgcaacatcatgtattaatatcaaatgaaagacaagggtgctgtatctttgattatttatcaaaaaagtataaatcttttaaggaaaatgttagaattttaaagtttttttttgattgttgaagcatttatcttgttgatttcttaccaaagaaaaaggacgatgtcngtcaagcngcactttttcngaatat

SEQ ID NO: 40017 - DNA, 615 bp, Homo Sapiens
  misc_feature (573)..(573): n is a, c, g, or t
ggaatctatttaaatagaataacaactgatggtgaatcttaccgagctgtagaaaataaaaaattcctctccaaacatgggtagttttatgtcaaaatattggcttttcaagaacaggactcatatcttgatatttaagagatgtttaaaattttaaactttttctaccttctactgtttaaaggttttacacagggtgtatctcacattaaacaaaacaccttttttttcaaaatgaaataccaatgtaaagatctaatttccgggcgctttcagggcactgtaatttcaacaatactggaatcattttggcgctgcttctcattcattttaaggcttctctgaattgtgctcattccaaattaacccatgtatagaatctttcttcatcatctaaatggtgtgttgctgaagttattgtggtatataatcctggattaaagtcaggactttctttctatagaattattttatcaatatttgtgtagtgaggtcctaatcaagaaacttgaacaggataatgtgtctaaaaatattgctgaagttattcttgatcagatagaattaacctanaatgtgaactcttacttactttttgtacatctctattgtaat

SEQ ID NO: 40018 - DNA, 644 bp, Homo Sapiens
  misc_feature (230)..(230): n is a, c, g, or t
  misc_feature (426)..(426): n is a, c, g, or t
  misc_feature (511)..(511): n is a, c, g, or t
  misc_feature (579)..(579): n is a, c, g, or t
  misc_feature (583)..(583): n is a, c, g, or t
  misc_feature (585)..(595): n is a, c, g, or t
  misc_feature (597)..(597): n is a, c, g, or t
  misc_feature (616)..(616): n is a, c, g, or t
  misc_feature (630)..(630): n is a, c, g, or t
  misc_feature (639)..(639): n is a, c, g, or t
tagtaatatagccacaaactggacaagaggctgggtatttgggtttaaaatagattttcttgactctgagcttgtatcagtatttctagcttttgttttgtctgacagtattgcagtcttgaaaatcctgagagctaaaaaactgaaaggaatttttccacaccttgaagtcacagtgttttagagtaaaactattttgtgtacaattgtgtttttaaaatagttagtanatcactatggtatttcaattttctttagttttaattgaaaatgtttgcttttaaaactgataggtattgttggaaagcaggatgaagcctgagccagtggaaaagcttgttacagaaaaaacattttgtgttattgctgtggtgtgcatgatttgcaaagattaagtgcattttctctgtctatactgattattgnatatagaggatgttataaatatacatatacatttttgccattatgtaaatcccatgatttcaactgtaaacatctggccattggngaactttacaaaccattcactgattttgggtaatttaacaatagatatgaaataaaggttaaattccngaanannnnnnnnnnnanaaaaaaaggccccaggctngacttgaaggtcgnggccgttanactag

SEQ ID NO: 40019 - DNA, 681 bp, Homo Sapiens
  misc_feature (600)..(600): n is a, c, g, or t
  misc_feature (664)..(664): n is a, c, g, or t
gccagactctaatacgactcactatagggaaagctggtacgcctgcaggtaccggtccggaattcccgggtcgacccacgcgtccggagcattatcccctttggaaatcagtcattggagggatgatggctggtgttattggccagtttttagccaatccaactgacctagtgaaggttcagatgcaaatggaaggaaaaaggaaactggaaggaaaaccattgcgatttcgtggtgtacatcatgcatttgcaaaaatcttagctgaaggaggaatacgagggctttgggcaggctgggtacccaatatacaaagagcagcactggtgaatatgggagatttaaccacttatgatacagtgaaacactacttggtattgaatacaccacttgaggacaatatcatgactcacggtttatcaagtttatgttctggactggtagcttctattctgggaacaccagccgatgtcatcaaaagcagaataatgaatcaaccacgagataaacaaggaaggggacttttgtataaatcatcgactgactgcttgattcaggctgttcaaggtgaaggattcatgagtctatataaaggctttntaccatcttggctgagaatgaccccttggtcaatggtgttctggcttacttatgaaaaaatcanagagatgagtggagtca

SEQ ID NO: 40020 - DNA, 651 bp, Homo Sapiens
cacgcgtccgaatgcagcaaggcctttaagcagagagcccatcttagtcaacatcaaaatattcatactggtgagaaaccctatgagtttaaggaatgtgggaaggcctttgcttgtttcctaccttaatagaaatcagagaattcacactagtgagaaaccatatcagtgtaaaaaatgtagaaaatcctttattgattgttcaactcttaacaccagagaattcacactggtgagaaaccctttgaatgtcaggaatgtaggaaggcctttaggcagagggcgcatcttactcaacatcaaagaattcctactggtgagaaaccctatgaatgtaatgaatgtgagaaggcctcttcttgtctttcataggtgaaaaagcaccagagaatacatacatgaagggacaaatcttatgtatttgaatagcgtctttttatttaacaatccttatctaacatcaccaaattcacattgcagagaaacttcagaaatataagaaatgtgggaaacacttttacctgtccctcagctatactttttcataacagaatttgtacaggtgagaagcctaatgaaagcccgatatgtgtaaagatctactctcacaatatactcaacattatataatgtatagtgtgattaatatag

SEQ ID NO: 40021 - DNA, 952 bp, Homo Sapiens
gctggtccggtccggaattttcgaatcaggaactcctgacataggtttccacctgcctcggcctcccaaagtgctgggattacaggcatgatccaccatgcctggccagaataatgtttttaaatgcagaaaaggaaatgcatggggttacaagggaaacgaattacactgaagtgtaagctaccaaataatttatgatgtggtagttataggtgtgcatttaatagccagatctacgagtggatgtaataactgctatgatgttgaagtagcataaaacatatattagatatctgcaacaactgtgatgtaacatgaaaatacctgatttctgttgacaaagttactgctagtacaactgtggattgttgtctgcactcgtcattgaaggaaatactaaattttagttttaggctagtgaaattaaagttaatttttcccatccaagttcatgtatcttctgaattctatccgtgaatcccttagaggtctgtgaattgtaggttaagaacccctgccctagctaatcagatccaccaatgtttcaaataggactataacttattcaaaggccaatgatacttcgcataattccattttaatattattcacatttcatgccccaaatttagtaagttacatgtgttatgtgatgctttgttttgatagatttaatccctactcctaaataaaaaagtccagtatttttggtagccctcttttctttcagacaacatccgcagggtcggcccgcccctattaatttcccctcgggggggccccaatgctttacgcgtttacccatgttttttttttgttacacaagggggcccccctaatagtggaggttccctacttattaagcacagggcaccttggccccgccccattttaccaaacagccccttgcacttggggaaaaaaatgggtcagccctctgggagaacccttg

SEQ ID NO: 40022 - DNA, 651 bp, Homo Sapiens
gctggtacgcctgcaggtaccggtccggaattcccgggtcgactactactactactaaattcgcggccgcgtcgacgtttgtttgtttgttttgagacagggtctcgctctgtcacccaggctggagtgtagtggtgcagtcttggctcactgcaacctccacctcctgggctcaagcgattctcatgcctcagcctcccgagtagctgggactacaggtgtgtgccactatgcctggctaatttttgtattttttgtagagacggggttttgccatgttgcccaggctggaagtgtctatgtttaactgcatcttataaaccagcaacaagttttctactgggaattagaatggtgcatacacaatgtattattatcactgtcagatgagcatgcttgaatgtagcatgactgcctctttttgcttttcctagaggttttttttttgcttgttactcatctgttgacctacctgggggaagtagcacccttgcatttcaaaaataaaattgatggcattaaaaaaaaaaaaaaaaaaaaaagtcgacgcggccgcggattttagtgtagtagtagtagtagtaggcggccgctctagaggatccaagcttacgtccgcctgcatgccacgtcatacttttttatagtggc

SEQ ID NO: 40023 - DNA, 749 bp, Homo Sapiens
agcgggcgcggggctgcgagctagggcgggagaaggagcgcggggaggacgtaccttgtgagatgcgagccggccaacagcttgcaagcatgctccgctggacccgagcctggaggctcccgcgtgagggactcggcccccacggccctagcttcgcgagggtgcctgtcgcacccagcagcagcagcggcggccgagggggcgccgagccgaggccgcttccgctttcctacaggcttctggacggggaggcagccctcccggccgtcgtctttttgcacgggctcttcggcagcaaaactaacttcaactccatcgccaagatcttggcccagcagacaggccgtaggggatgaccgggagctcaccacctcttatggcagcccattcttctgtgctcctactgttggaaattcctggagtctccttcctggcattctccgagattgccacccagccaggccagcccttcagagacgtggtcacaaccctggggcctgctcttctctggcagagtggccccaggttcttcatctgggcctcctaggtctggaaactgggcccttcccctccacagggtgtatccccaggctctccacacctttgacctgctgtccctacaagcctttggctgtctacccccagaatggggatatcaacgcagcccgtctcacccagtccccaggtgctgacggtggatgctcgtaacacggtgacagccccaaaagccagacatgagctacgagatc

SEQ ID NO: 40024 - DNA, 1127 bp, Homo Sapiens
  misc_feature (12)..(12): n is a, c, g, or t
  misc_feature (15)..(15): n is a, c, g, or t
  misc_feature (17)..(18): n is a, c, g, or t
  misc_feature (20)..(21): n is a, c, g, or t
  misc_feature (24)..(24): n is a, c, g, or t
  misc_feature (28)..(29): n is a, c, g, or t
aaaaaaaaaaanaananngnnggnaagnngccacaccccctccaaagtaacgaggcctgggtggcgaggccctgcagcagggggacatcaagctagaagagggctgggggggtgtccggctcatccacaagacccaaatccccaggtcccccagcaggaagcagcactcaggcccatgccagtgttgactctaggagagaaagggttaaagcagtcccagccttagcccacctggtgggatggggagtgttaatatctctctggaggacaaatgacagaagggttcatataaacagtatcctgacacagtcatgcttcctggattttggagtcgaggctttctacagaaaagaaagttctgatggccaggcatggtggctcacgcctgtaatcctagcatttttggaggccaaggacagtggatcacctgaggtcaggggttcgagaccagcctggccaacatggtgaaaccctgtctctactaaaaatacaaaaattagccaggcgtggtggtgcatgcctgtaatcccagttactccagaggctaaggcaggagaattgcttgaacctgggaggcagagattgcagtgagccaagactgcgccactgcactcccagccctgggccaacagagtgagactctgttttccccacaaaaaaaaaaaaaacactcccaggccatcctattgtggggtgggcggaaacaaaagaaggttaattgaaaaatgggccaccatgtggtacaataaagcctggtttttcccttggaacccccaaaccctttttccgttgaggggacacaaaaggccgggggataagaaattcattgcccccgtggggcccctctcccccctaattaccccgcgaccgtcccctaaattttaaaaatttttccagaataaaaagccccaagacggtaaacaagcccttggggctttttaaatagggaaatttcggggcattgcacacgtaaccccccgggagaaaatttttaaagcccccggctctataaatccgaaccgcgcgccctttttttttttttttcgtcgcaaccccccaacaggggggacgttttcattgggagaaatccccttttttttttcccaagaacaaaaaaacactctcgt

SEQ ID NO: 40025 - DNA, 659 bp, Homo Sapiens
agccttctcggcattctggtggcagattcactgataaacgtctggatcactctcacagttgtgtccgtggagggagtgataggtttcatgacattatggaaagtagaactggactgcatttctgtgctatgcttaatttatggaattaattacacaattgacaattgtgctccaatgttatccacatttgttctgggcaaggatttcacaagaactaaatgggtaaaaaatgccctggaagtgcatggggtagctaacagagttacctctgctatattgttggtctgattcctcttgcagctgtgccttcaaatctgacctgtacactgttcaggtgcttgtttttaatagcatttgtcaccttctttcactgctttgccattttacctgtgatactgactttcctgccaccctctaagaaaaaaaggaaagagaagaaaaatcctgagaaccgggaggaaattgagtgtgtagaaatggtagatatcgatagtacccgtgtggttgaccaaattacaacagtgtgataatgtctgcttggcatattttcaccttaggtcttatcaagaccaaagagattatgttaatgaaacaattaaattcaaagttcttcccttttttaaagataggaaacaggcattgccaaaaaaaaaaaaaaa

SEQ ID NO: 40026 - DNA, 555 bp, Homo Sapiens
caggacctaggagaccaggttcctctcctctcagatccaagattctggaagcaaactgcacctattttaaattcttcaccacgggggagaatgcacgcatctttcagagaaccacaaagaaaggcctgctgctcttggtgagcctggaggtgttccggcattccgtgatgggccctgctgcagagagtcagcccggagcctcccccggccccacgcctcacctacgagtactcctggtccctgggctgcggcgtgggggccggcctgatcctgctgttgggggccggctgctttctgctgctcacactgccttcctggccctgggggtccctctgtcccaatgcgggggcaccgggccacctagagccacgcgtgagacttctctaagcaaccaccgagccctttgaccttctccattgtacccccaagatctttttgccccatctcctagagaaactgtgttctccctgctcgggggcccatgtttttttacacgcctgcctcctgtccccttatcctttctccctctgtaaatacgtttttctctgtggctgt

SEQ ID NO: 40027 - DNA, 878 bp, Homo Sapiens
  misc_feature (690)..(690): n is a, c, g, or t
agagcggctacttgaagaggaggctgtaaaagaattcattgagcctgaaatagacgagtcttttaaagaagatgaagaagaaagtaaggaggataggaaacttcaggaggaaaataaagagagagcagaagaacaaccttcaacatctacagagaaggaaaaactcattcggttcattggagaagatgaaaatgttcattccaaacctctatttgaaacagatgtgttgtcttcctggagagagtcagctaagcaaggtacattggcccaaaaatatcttgaagcaatggctgtaattgaacatatgcaggagaagttactggaggttgaaaatagagccagacaggcagaggagaagtttgaagatgcatatgagaaacttcatcatacccttataaaaaataaagatctagaggaattagtcatgacatcaagaaaggagtctaaagaagagaaagaaaatcaagatgaaagagaagtaaaagaagaagaagaacaacaagaagaagaagaagtcaggtcagcagaaaattcctcaaaatctccaaagaaaggtcactgaatccaaggcaacctgtggaaagaagaattcagatgtcagtgggagcctccaggtgggaggagagcatgcctaaaccctggtggccattgttctgtactaaggaacaacattccctttgaaaggacatntatttgcctgtgtatttaacttcacagtgccttgcaaagagttgtttaacttgcatggtgccacccaataaatatctgtgccaattgacaccacgacacaaccaaaaacagggggggggcgcaaaaaaacctcgggggggccacagtttagggtgttccccggttttttgggcacaggggccctatag

SEQ ID NO: 40028 - DNA, 416 bp, Homo Sapiens
ctctaccatattgggaccctcaagaggtttgtgctagcccgatgcctccaccgggcacttagaaggcaagaggacaggatctctcaagacacagcacaattcagtctcttaagattagcttcacaatgatggaaattatttcatcaggtggaaagtctgggtctaatagcagactgcacatgagcagagtgacatggtggtggcacttatggtggtggcttgagagccttggggaaattagggccctaacagctagaatcaaagatgataccgcagggccctgtagcaagaaatgggaagcagggggaggggcaggggctcagaacaatattctagaccaactttgactacttcctgtcttagtaatagaccaatacatggctctatttagcagtttttatactgcttgattttgc

SEQ ID NO: 40029 - DNA, 393 bp, Homo Sapiens
aaacaacaaaaaaaaaacaaaactgtagtcaccatgttgtgcaatagatctcctgaacttactcctcctaactgaaatttgtatcctttgaccaccgcctccccctctcccggctggccaggcccagtttggcctgtctgcctcggccccggcctccgtctctagcgcgacctcgggcccagcgctgagggtcacccaaccgccggccttagtgaccccatctatgctgctgacaagccaacctcccgtacggcgcccctcctgactccctgcctgggaccacacacccctgggatagaaagacccttagatgtcttctcacgcaaccccaaactccctgtacagaagggaaacaaacgccaggcacggtggctcatgcctgtaatcccaaca

SEQ ID NO: 40030 - DNA, 792 bp, Homo Sapiens
ggcaacattctttagcatctctgcttcatccttaacttctaaatgggtaggtgagggggagaaaatggtccgtgcatgtttgctgttgcaaggtgtcagcaaccagctgtgatatttattgacgaaattgattccttgttatctcaacggggagatggtgagcatgaatcttctagaaggataaaaacagaatttttagttcaattagatggagcaacaacatcttctgaagatcgtatcctagtggtgggagcaacaaatcggccacaagaaattgatgaggctgcccggagaagattggtgaaaaggctttatattcccctcccagaagcttcagccaggaaacagatagtaattaatctaatgtccaaagagcagtgttgcctcagtgaagaagaaattgaacagattgtacagcagtctgatgcgttttcaggagcagacatgacacagctttgcagggaggcttctcttggtcctattcgcagtttacaaactgtgacattgctaccataacaccggatcaagttcgacccatagcttacattgattttgaaaatgcttttagaactgtgcgactagtgtttctccaaaagatttagagctttatgaaaactggaacaaacttttggttgtggaaagtaagtgggatacttggaatcaagggcatctctgtagtacagcttctttattttttagcatagaaagttggggattgtgttcattgtttttaagatatattctaattctgtgttcaattattaggcgaattttctctggtggtagggtgtc

SEQ ID NO: 40031 - DNA, 809 bp, Homo Sapiens
gggtgcaatatatttaaaaacatggagaggaatgattatcggacactgcgccaggggattatcgacatggtcttagccacagaaatgacaaagcactttgagcatgtcaacaaatttgtcaacagcatcaacaaacccttggcaacactagaagaaaatggggaaactgataaaaaccaggaagtgataaacactatgcttaggactccagagaaccggaccctaatcaaacgaatgctgattaaatgtgctgatgtgtccaatccctgccgacccctgcagtactgcatcgagtgggctgcacgcatttcggaagaatatttttctcagactgatgaagagaagcagcagggcttacctgtggtgatgccagtgtttgacagaaatacctgcagcatccccaaatcccaaatctctttcattgattacttcatcacagacatgtttgatgcttgggatgcctttgtagacctgcctggattaatggagccatcttgacaacgactatttaactactggaaaagggattgggaacaaaatggaatgttgggggaaaccttcccgaaccaccttccttgaaaacacatgggggatacaccccccccgaaacccccttgaatagccttgtggttgccctccccaggtaactttttgggaaaattctcctggaaggaggccgcgcacagggaaacctccctcatggtggtgacctgttttggtgtgagccgtgcagggccaaaaaaacgtggtgcccccgcgctcgggattaccagaccaataaagagccctctgcggtgtagcaaaaaaac

SEQ ID NO: 40032 - DNA, 881 bp, Homo Sapiens
  misc_feature (60)..(60): n is a, c, g, or t
cccttctggtctaacacaatttcctgttggaatactgatgataatcatagcagcactttntacagcatcagcagtcatctcactagttatgttcaaaaaagtacatggactatatcgcacaacaggtgctagttttgagaaggcccaacaggagtttgcaacaggtgtgatgtccaacaaaactgtccagaccgcagctgcaaatgcagcttcaactgcagcatctagtgcagctcagaatgctttcaagggtaaccagatttaagaatcttcaaacaatacactgttaccttttgactgtacctttttctccagttactgtattctacaaatatttttatgttcaaaacacacagtacagacagcatggatatttcctgttcacttgtgcatgggctaaaaccaggaaaacttccttgtcttattactttacctaatagtttcttaatatttcagtgccccttgcagaaaaaatattacatgctaaataaatattctccatatttttgggggatgacattcagtgaattatttcagtggtgacccactgaaaattaataatggtacttatgattaaaaacgcatttaatactaactgcagtagttctttcaagaatctttagagataaggattgcacattggaaaagtaaccatgtttcatccctttttccctattatattgaagaaatagccagcagagcttagggattttaattgcctgcttttagctgtttagtcccaggaagagcctatggcttttgagaaatatgcaaactcgcacctctcctttcttttttagaaactgatttttctaacaaccctattcctgcgccccaatctttatttaaagactagtgttttgcttcgctcttcttattgt

SEQ ID NO: 40033 - DNA, 909 bp, Homo Sapiens
gcccagctccaggccctggcccacaggtgtccccctttggctgtgtgcttggcccagcagctgcctgaggacccagggcaaggcagcagctccgtggagtttgacatggtcaagctggtggactccatgggctgggagctggcctctgtgcggcaggctctctgccagctgcagtgggaccacgagcccaggacaggtgtgcggcgtgggacaggggtgcttgtggagttcagtgagctggccttccaccttcgcagcccgggggacctgaccgctgaggagaaggaccagatatgtgacttcctctatggccgtgtgcaggcccgggagcgccaggccctggcccgtctgcgcagaaccttccaggcctttcacagcgtagccttccccagctgcgggccctgcctggagcagcaggatgaggagcgcagcaccaggctcaaggacctgctcggccgctactttgaggaagaggaagggcaggagccgggaggcatggaggacgcacagggccccgagccagggcaggccagactccaggattgggaggaccaggtccgctgcgacatccgccagttcctgtccctgaggcccagaggagaagttctccagcagggctgtggcccgcatcttccacggcatcggaagcccctgctacccggcccaggtgtacgggcaggaccgacgctttctggagaaaatacctgcacctgagcttccattgccctgggggggctggccacgtgaaaaactcctgcagggtggcccgctgactgtcctgcatttgggggaattccagggaaaactgggcgttgtctaaaggctaaggccattcactgaagcacccggtgcaaaccgggccacagggtgggggcaacaaggaagcttccccaagggccgactcaacaa

SEQ ID NO: 40034 - DNA, 841 bp, Homo Sapiens
gagaacaggagccatcagcactgcacgctgggctggggcacggctctgtgatgtgttagcccaggctggccaccaactctgtgaaactgaggcccacgtctgctttgagggactggactcagaccctactgggactgcctatggagcatccatccctctggctcgggccatggaccctgaagctgaggtcctgctggcatatgagatgaatgggcagcctctgccacgtgaccacggcttccctgtgcgtgtggtggttcctggagtggtgggtgcccgccatgtcaaatggctgggcagagtgagtgtgcagccagaggaaagttacagccactggcaacggcgggattacaaaggcttctctccatctgtggactgggagactgtagattttgactctgctccatccattcaggaacttcctgtccagtccgccatcacagagccccgggatggagagactgtagaatcaggggaggtgaccatcaagggctatgcatggagtggtggtggcagggctgtgatccgggtggatgtgtctctggatgggggcctaacctggcaggtggctaagctggatggagaggaacagcgccccaggaaagcctgggcatggcgtctgtggcagttgaaagcccctgtgccagctggacaaaaggaactgaacattgtttgtaaggctgtggatgatggttacaatgtgcagccagacaccgtggccccaatctggaacctgcgaggtgttctcagcaatgcctggcatcgtgtccatgtctatgtctccccatgagcatggaaagggaccacctccacccccttttccccacccatttaaccctcc

SEQ ID NO: 40035 - DNA, 885 bp, Homo Sapiens
  misc_feature (726)..(726): n is a, c, g, or t
  misc_feature (862)..(862): n is a, c, g, or t
aaaaaggaaataacgaaagaaagggagtacatgggatcaaagatgttgatcttgtctcagaatattgcccaactggaggcccaggtggaaaaggttacaaaggaaaagatttcagctattaatcaactggaggaaattcaaagccagctggcttctcgggaaatggatgtcacaaaggtgtgtggagaaatgcgctatcagctgaataaaaccaacatggagaaggatgaggcagaaaaggagcacagagagttcagagcaaaaactaacagggatcttgaaattaaagatcaggaaatagagaaattgagaatagaactggatgaaagcaaacaacacttggaacaggagcagcagaaggcagccctggccagagaggagtgcctgagactaacagaactgctgggcgaatctgagcaccaactgcacctcaccagacaggaaaaagatagcattcagcagagctttagcaaggaagcaaaggcccaagcccttcaggcccagcaaagagagcaggagctgacacagaagatacagcaaatggaggcccagcatgacaaaactgaaaatgaacagtatttgttgctgacctcccagaatacatttttgacaaagttaaaggaagaatgctgtacattagccaagaaactggaacaaatctctcaaaaaaccagatctgaaatagctcaactcagtcaagaaaaaaggtatacatatgataaattngggaaagttacagagaagaaatgaagaattggaggaacagtgtgtccagcatgggagagtacatgagacgatgaagcaaaggctaaggcagctggataagcacagccaggccacaagccagcagctgggtgcagcntcctcagcaagcagaaccagctt

SEQ ID NO: 40036 - DNA, 653 bp, Homo Sapiens
ttttcccgtttttccagttagagaaatagaggaagttgtcgtgtagttgtcatgtattcagtccacttaagggcagtggggaagcgtttgagacggagctgtggaggctgaatccttgaaggaggaggtgagagaggcacaggtatttttgaataattaccaagcagccgaagaccacccacgaatggttatcttacgactgttacgttacattgtccgcctggtgtggagaatgcattgacaggttctttgcggagccgagataccatgcagacattttgcttgttcaaaccaacaagacccagcaccgcggtctcctggtgccattattatgcagccagcggttctcttgtggagggggcaggtgacgtttcagaagacaccgagctggatgggactacctttctgttcatcaccacacagcagaatttctaatggaagtttgttgtgaatgtaaaggagggagcattctttgctttttaatatacaaaccatggttttttggagcaggattttgtgtaagaatggtgtttacatgcagtgtgttttccccctcaccttcaataaggtttttcaaaaaggaaatggaaactttttaaccaatttgtgaataacttttgtattaaaattttaagaacctacgggctattctc

SEQ ID NO: 40037 - DNA, 515 bp, Homo Sapiens
aagatgtaactgaattgctgcaatctcatgataaaactttaacagatgaggagttgtttcttatggatgcgcaaagaaagtggtttcttgagatggaatctacacctggtgaagatgctgtgaacattgttgaaatgacaacaaaggatttagaatattacataaacttagttgataaagcagcagcagggtttgagaggattgactccaattttgaaagaagctctactgtgggcaaaatgctatcaaacagcatcgcatgctacagagaaatctttcatgaaaggaagagtcaactcatgcgaaaagcttcaccgatgtcttattttaggaaattgccacagccaccccaaccttcagcagccaccaccctgaccagtcagcaaccatcaacctcgaggcaagaccctccaccagcaaaaagagtacgactcaccgaaggctcagattgataatcagcattttttagcaataaagtatttttaaatttaaaaaaaaaaaaaaaaaaaacgcgg

SEQ ID NO: 40038 - DNA, 518 bp, Homo Sapiens
  misc_feature (469)..(469): n is a, c, g, or t
  misc_feature (471)..(491): n is a, c, g, or t
  misc_feature (494)..(494): n is a, c, g, or t
  misc_feature (496)..(496): n is a, c, g, or t
  misc_feature (498)..(499): n is a, c, g, or t
  misc_feature (506)..(506): n is a, c, g, or t
tcatgatgtctgcacttggttgaggtctcctggagcctacaggctctgctgttctccacttctcacctgccatccacgccctgcaagctcatgcaaacaccctttcttcctcctgcggcagagttgttcaggttgcctgggcaggggcttaaacagtgccagcccctgccatcccaaagctattgttaagccccccaggcgtcctccacccacgcccactagcctgccatgtccacagttccttgggctgctgaggggctagtgcagtggtcctgacctctcttatcaagagcacacttctttgctggttgctccttttgagcatatgcgtgtgattatttggaacagttagacttgccacgttgggtcagttttagaaattgtttctagctagagggactggtgtccttccaagtctagcatttggggtatggaaaattgttgtggtgtgtggtaggagtttttgaantnnnnnnnnnnnnnnnnnnnnnttntntnnttttttntttttttttttt

SEQ ID NO: 40039 - DNA, 851 bp, Homo Sapiens
  misc_feature (779)..(779): n is a, c, g, or t
gatccttgaagcaggttcctattcctcattggcaacatggcaaacagatcacaggagtcaaagggccttgctcaaggtccccagcttcagccccaggccctaagccagcgtcagaacagtcaatctgcatttttcatcagtcattctatagtgacatcatcccagactgccttctgtattcccctgtgtacagtctccttctgtttctaggtttagaagttcagaggtgactgtgtttctccatttccacagccaaatgggggaagaggtgaggctaggggagtgctgtgctgattctccagccatggtcagacaggtcacccaggagcctcgaggaaagccctggagggaatcacatgtgtactttttcatgaagctttttgcaaagcacatctgcgatacactagtttattgaactaatgtccaggagtagacgtgattggtggccaagttatttggggacacctaaacagatcagtgacctgaatgacttctcagaacctttaatatgccaatgtgtgtggcaaacttacaagaagggagctaagtatccagcctctcccaaacctctttgaacaaagcttctgtccctcccacacctctcacctcacaggcacatcaggctgcagaatgcgctttagaaagcattgttttagtccaggcacagtggctcacgcctgtaatcccagcactttgggaggccgaagtgggtggatcaccaggttggggagattgagaccatcctgggctaacacagtggaaaccctggtctctactanaaaaaaaaaaaaaagggcgggccgcctcctagataatcccctcggagggggccccaaggcctttacgcggaa

SEQ ID NO: 40040 - DNA, 283 bp, Homo Sapiens
aaaagaaaaaaaaaaatcactgattgcaggtcaccctaacagatataataatgaaaaagtctgagatgttgcgagaattaccaaaatgtgatgcagacacgaaatgagcatgtgctgttggaaaagtggaacagatagacttgctggagacagggttgccacaaagtttcaatttgtaaaaaatgtgatatctatgaaatgcaataaagtgaagtcccctaaaaaaaaaaaaaaaaaaaaaaaaaaaaaaaaaaaaaaaaaaacaaaaaaaaaaaaaaaaaag

SEQ ID NO: 40041 - DNA, 904 bp, Homo Sapiens
  misc_feature (769)..(769): n is a, c, g, or t
  misc_feature (788)..(788): n is a, c, g, or t
  misc_feature (827)..(827): n is a, c, g, or t
  misc_feature (874)..(874): n is a, c, g, or t
  misc_feature (887)..(888): n is a, c, g, or t
agcaacagaaacttcctatgtcacagggtccactatgccaccaaccactgtgatcctgggtcctagccagccacagagccttattgtgacagagagggtgtatgctccagcttctaccttggtagatcagccttatgctaatgaaggtacagttgtggtcactgaaagagtaatacagcctcatgggggtggatcgaatcctctggaaggcactcagcatcttcaagatgtaccttacgtcatggtgagggaaagagagagcttccttgcccccagctcaggtgtgcagcctactctggccatgcctaatatagcagtaggacagaatgtgacagtgacagaaagagttctagcacctgcttccactctgcaatccagttaccagattcccactgaaaattctatgacggctaggaacaccacggtgtctggagctggagtccctggccctctgccagattttggtttagaggaatctggtcattctaattctaccataaccacatcttccaccagagttaccaagcatagcactgtacagcattcttactcctaaacagcagtcagccacaaactgacccagagtttaattagcagtgactaatttcatgtttccaatgtacctgatttttcatgagccttacagacacacagagacacatacacattgatcttaaaatttttctcagtcactgatatgcaaaggaccacactgtctctgcttccaggagtatttttagaaatgttccacaatttactgaagacatanagatgatgctgctgcttangtgccttttagcaagctatgcaaacaatcctgataaaancagatacttagagagtcaatctggcttctgagaatttacccagtgancagagtacctagnntcatcagccggtcagt

SEQ ID NO: 40042 - DNA, 707 bp, Homo Sapiens
gcgtccgcacatatttgtatgctttggcatttacatccacttcaaatgttaaaaaacttatttttaatgttttaggtttaagcagcttgtaatttattgatctacatggcattaattgatttaaccattatacctgaaataattcttcagtgtttgcctttgagcagtgataggttgtgtattttttaattgcctaagagcatatataccaaacactacaaacaattcatatttacagaaaatttaaactattttataaaaactgcacattacatttttggtgaaatatagtgcattctgaggatagcatatttcatataatagaaaaagaagcattctctaggtttgcatgtagctatagtcactatattttgcctttcatatagaaagttttaaagtattatgtttaaaaacatttattggctgggtgtggtggctcacacccagcactttgggaggccgaggcaggcggatcacttgaggtcagcagttcaagactagcctggccaacatggtgaaaccccatctctactaaaaatataaaaattagccaggcgtggtggcgggcgcctgtaatccaagctactggggaggctgaggcaggagaattgcttaaatccaggaggcggaggttgcagtgagccaagattgtgccactgcactccagcctgggtgacagagtaagactccgtctcaataaataaata

SEQ ID NO: 40043 - DNA, 581 bp, Homo Sapiens
gtcttggcccgttctccgcaccgtgcagaggcggcgggctggggagggagcggcgccagcacgaggttcccagccgctgggaagcccctagacgcgccgaggggccgggctacgagcggctgagaaaatgatgcatcctgttgccagcagtaatccagctttctgtgggcctggcaagccttcctgcctcaatgaagatgccatgagagctgctgatcagtttgacatatattcctcccagcaaagcaaatacagccacacagtcaaccacaaaccaatggtttgtcagaggcaagacccattaaatgaaacacacttgcagactacaagtggcagaagcatagaaataaaagatgaactaaagaaaaagaagaatctcaaccgatctggtaagcgtggccggccttcgggaaccaccaaatcagcaggataccggaccagcacaggcagacccctgggaaccaccaacgcagctggatttaagacaagtccaggcagacctttggggacaactaaagctgcgggatacaaagtcagcccaggcagacctccaggtagcattaaagctctatcccgtcttg

SEQ ID NO: 40044 - DNA, 778 bp, Homo Sapiens
ttactgtgttttcaggttgatatctaccaaaggacacaaattgaatggtagactgtaaaactggtataaacagaatgcagtttcccgaccatcagaacccaaatattaagaagcatataggaatccatctatgcatgaaacatgtaaaaaatatgttggttagtttaattaaaaatcttattgtgggtccagtgagaccatctcatccaaaagattttttttcccccaatgatgtttgctttagaagcaagatagaaaggaaaaaaagtattaggtagatatgtatagtagggacagagggaaatctttcttctttcctttctgaaagtaatacttcttgttacacattttatttattgagtttgttctaaataaaatattataaacttcagacttgaaaaaattccacttaactttaaagttacaatgtttgtatttgggattttaaatgcctttgagattaaaatgtagaattgcaggacccaaaaacttttaaaataattaaaattttaaaagagcacatgttgtgttttttgggcttgctattaatgcaaactctgattgcaaatggatgtcatgtttcataccttttttatcaggaaaaaagcagcaagccttcaggtggttcaggtgatgcctgacacaattggagctggactttatgctgctctttacaagtaagagggggttgcattgtatgtgggggactatgtgcactggccgtctaaaacagtggacctccaccaaaattaacttttgccccaaaccatagaagaac

SEQ ID NO: 40045 - DNA, 654 bp, Homo Sapiens
ctaagttgtttttactgttttggaaaatatcttaaatatcctttttgttcctaaaggagaggaaaagttgattaacttctggtttggtttagaaaaagtaatgtttgaaatacgaaggggtttaatgttacaaattttaacactcaaatcaaccttttaataattttctgtgctaagggtccagtatttatttgattatttagtatgtttatgtttcatgacactaatttagtcttttgatacattttacattctgtttactgccacaagcactgtggcaataacttttgaattttaatttttataatagaaaaatgattaggaattgctagatagtgttttgaaagcatatctttttcttcagaacaatgtagacttccaaaatggttaacctaaggggtctttacaaaatgtgttataagttaaacataatttgggaagttttacttttgttttcttctatgaagaaaaaaatgcaggctgggcgcggtggctcacgcctgtaatcctagcactttgggaggccgaggcaggtggatcacctgaggtcagttcaagaccagcctggccaacatggtgaaaccccgtctctactaaaaatacaaaaattagctgggcgtggtggcatgcgcctgtaatcccagctacccagga

SEQ ID NO: 40046 - DNA, 931 bp, Homo Sapiens
tcaatcaggctgacctgcagagcgcaaggccccgagcagagaccaagcccactgaggacctgcggagctgggagaagaagcagcgagccccgctcaggttccagggtgacagccgcctggagcagtctggctgctaccaccattgcgtagatgagaacatcgagaggagaaaccactacttagatctcgccgggatagaaaactacacgtcccaatttgggcctggctccccttccgtggcccagaagtcagaactgcccccccgcacctccaatcccactcgatctcgctcccatgagccggaagccatccacatcccacaccgaaagccccaaggcgtggacccggcctccttccacttccttgacaccccaatcgccaaggtctcagagctccagcaacggctccggggcacccaggacgggagcaagcactttgtgaggtcccccaaggcccagggcaagagtgtgggtgtgggccacgtggccagaggggcaagaaacaagccccctctgggacccgccatccctgcggtgtccccctccgcccacctggctgccagcccggccctcctcccctccctagcccccctcgggcacaagaagcacaagcaccgagccaaggagagccagcagggctgccggggcctgcaggcaccactggcctcaggtggccctgtcctggggcgggagcacctgcgggagctgcccgccttggtggtgtatgagagccaggccgggcagccggtccagagacatgagcaccaccaccaccatgaacatcaccaccattaccaccacttctaccagacataagaccccctttcccaagggccccacccttgcccttatgaaggaaccccaccccccgaacaccacaaggggatttattattcccaattaaattaatggggtatttatggagtggttac

SEQ ID NO: 40047 - DNA, 775 bp, Homo Sapiens
cgcgtccgatcagaatgaaggggaaaaacagccatcatccaacattattgagattgtcgtgtatagtcatcgaatatcagccagttcctgtaattttgtgacacgctctctgccaagcccaccaagtatttcctttatagctaaaagttccatagtactaaggaaataaagcaataaagacagtctcagcagccaggattctggctgaaggaaatgatccgccaccctgagggtggtgatggtagtttctacccatacctcagcctcaggcgagtggcttatagcctccattcatggtgcactttatttatggtactaagataaagactgtcaatccattgatttatctcctcctgtcccccatctaaaatacccatgctgcttttctgagtgttgatgggggttaccagcttgatccactgttgctcttagaaggcccagaaagtctttgggcattgccaagaaatcccggattatgtggaaaaccctcactttctcttcacggctgtaccagaaaatccctaagacagatcttgccgtggactagcaatacctgcaagtgctgccaatgggaactcaatttattcctgggaacctaacgaggagagcccaggcctaggcaggaggcctggaaccctcttggctaaggtgctgttcctgttcctgcaaggtctccagaacccctttggaaatggtgaaggaaccagcccaatagaagtacagagccagctgacaagtccttgtaaagctcactcctcagtccttggcacagcca

SEQ ID NO: 40048 - DNA, 869 bp, Homo Sapiens
  misc_feature (761)..(761): n is a, c, g, or t
agacctatccctctttgttctgttgttatgataaatagccaacttgataaagttgaaggaaggaaattttttgtttcctgtaatgttcagagtgttgatgagaagaccctatactcagaggcgacaagcttatttataaagctgaatcctgctaaaagtctgacataaagagctgctggtgaactccatctcattctcgcccctccagaagaagcagttgtcccccaaatactctgctccctcactgctgaatccctgtagggagaagcctgccaacagtgaccttccgaaacagccttctgaatacaaagaggattcagtttccatcttctcaacttgttaacacagaaacacttcctgcgagcatatcgacaactctcgggccaggcgctgtggctcacacctgtaatcccagcactttaggaggccgaggcaggcggattgcctgagctcaggagttcaagatcagtctgggcaacacgatgaaactccgtctctactaaaatacaaaaaattatccaggcatggtggcgtacgcctgtagtcccagctactcaggaggctgaggcaggagaattgcttgaacccaggaggaagaggttgcagtgagccaagatcatgccacatcactccaacctgggcaacagaacatgaacccatctcaaacaaacaaacaaacaaaaaaaaaaaaactcttgtctccttaggatatgttacctgctccactgcagactagagaaataaatgtgtattggaccttntactgcaaacttgaaatgctagaaaccaagcatgaaggataaatacatggcgggaaacacacaggcatgtgcatatgcatatacattgtaagttagtaagttagaaag

SEQ ID NO: 40049 - DNA, 822 bp, Homo Sapiens
  misc_feature (806)..(806): n is a, c, g, or t
gggagacagtaataaatccagaaaaggttgttatcaggtggcacaaattaaatccatcttgaagacttcacacattaatttggtgaagaacttgacattcttttagaagacttatgatttcaatttgctaccaatgagaagaggcaaatcaacaaatttgtcaatttatgggggctataattatggtatataatgtatctgatagaaaatttgataagaaaatgtaatgaattttatcagatatccaaagtaaaggaaatgttttaaaactgcaacaagagacacagacagtaaaatcaaagtattattaggatgactaaataaattataaagtctgtgagaatatcaaccatagatagttctttctatattatgtttttgcttttgtattttaagctttacttagatattcaaaacctggtatatcaagtctctgttagtactattggcatttagaagactttaccattatttcagtgctaggcattattgattaggtcttggctccactgtttacctcttgctatgtattttctcccggtaaaaatgaattgaaccatttcaactattttctatatttggagaaagtttgtgcccctgtgtttataatttttttacccataagacatcacattatccctttgtaagctacttatctccaaaaaacttcagaaatagaaaactacattttggcaggaaatattgaaaacacagaaaggttgaagttttatttggaaacccagaatatacatactttggctgttttcttcccctcaatattttaccatttggtttttattgggagntaaaaaataagagtac

SEQ ID NO: 40050 - DNA, 433 bp, Homo Sapiens
  misc_feature (46)..(46): n is a, c, g, or t
  misc_feature (197)..(197): n is a, c, g, or t
  misc_feature (225)..(225): n is a, c, g, or t
  misc_feature (240)..(240): n is a, c, g, or t
  misc_feature (273)..(273): n is a, c, g, or t
  misc_feature (313)..(313): n is a, c, g, or t
  misc_feature (327)..(327): n is a, c, g, or t
  misc_feature (355)..(355): n is a, c, g, or t
  misc_feature (372)..(372): n is a, c, g, or t
  misc_feature (375)..(375): n is a, c, g, or t
  misc_feature (411)..(411): n is a, c, g, or t
  misc_feature (413)..(413): n is a, c, g, or t
  misc_feature (418)..(418): n is a, c, g, or t
  misc_feature (426)..(427): n is a, c, g, or t
  misc_feature (430)..(430): n is a, c, g, or t
  misc_feature (432)..(432): n is a, c, g, or t
gatctttttccatccagcagtggagtttagtacttaagagtttgtncccttaaaccagactccctggattaatgctgtgtacccgtgggcaaggtgcctgaattctctatacacctatttcctcatctgtaaaatggcaataatagtaatagtacctaatgtgtggggttgttataagcattgagtaagataaatantataaagcacttagaacagtgcctggancataaaaacacttantaatagctcatagctaacatttcctatttacanttcttctagaaatagccagtattttgttggagtgcctacnatgttagttccttntactagttgctttacatggattatcttnatatcctgttttaaagnttnttcacaggtaccaggttttcatggaattttcctttnantaaanggggaggnnaangnt

SEQ ID NO: 40051 - DNA, 717 bp, Homo Sapiens
taacatttcctatttacatttcttctagaaatagccagtatttgttgagtgcctacatgttagttcctttactagttgctttacatgtattatcttatattctgttttaaagtttcttcacagttacagattttcatgaaattttacttttaataaaagagaagtaaaagtataaagtattcacttttatgttcacagtcttttcctttaggctcatgatggagtatcagaggcatgagtgtgtttaacctaagagccttaatggcttgaatcagaagcactttagtcctttatctgttcagtgtcagcctttcatacatcattttaaatcccatttgactttaagtaagtcacttaatctctctacatgtcaatttcttcagctataaaatgatggtatttcaataaataaatacattaattaaatgatattatactgactaattgggctgttttaaggctcaataagaaaatttctgtgaaaggtctctagaaaatgtaggttcctatacaaataaaagataacattgtgcttatagcttcggtgtttatcatataaagctattctgagttatttgaagagctcacctacttttttttgtttttagtttgttaaattgttttataggcaatgtttttaatctgttttctttaacttacagtgccatcagctcacacttgcaaacctgtggctgttccgttgtagtaggtagcagt

SEQ ID NO: 40052 - DNA, 772 bp, Homo Sapiens
gcatcacggatgcctgcctgtcggtggtagcccagaccttcatggactcctgctctacatccgagcaccgcctggggaaggactcgccctccaacaaactgctctacgccaaggacatccccaactacaagagctgggtggagaggtattatcgagacattgcaaagatggcatccatcagcgaccaggacatggatgcctacctggtggagcagtcccgcctccacgccagcgacttcagcgtcctgagtgcgctcaacgagctgtatttctatgtcaccaagtaccgccaggagattctcacggctctggaccgagatgcctcttgtcggaagcataagttgcggcagaaactggaacagatcatcagcctcgtgtccagcgacagctaaggtggtggaatcggtgaggagggggcttctcagtcctgtgccgtcctcccatccaggggagtggctggctcaagcctgggtccccgggctgagccctggattgggtatcgtggggcaggtcaccctggccacgatgcccccggcacacccaggcccccttcattagtgccttgctttgggccctgcagggggaggggtgacagggcgagcccccaccccagcaagcagcaatacccccaccctcctgccctgtgcccaggtgttgggacagtcccaccctccctgctatttatatccctctgcctatttattgaatcgaacttcgcctctgtctccatctgtaaatatgtgtccccccaccggatgtcgccaccctcact

SEQ ID NO: 40053 - DNA, 713 bp, Homo Sapiens
  misc_feature (486)..(486): n is a, c, g, or t
ggtgttgctatggctacagtgaatgctatgatagcagaatatggctgcagtttggaagacattgttgttgtacttggaccttcagtaggaccttgctgttttactcttccaagggaatcagcagaggcatttcataatcttcatcctgcatgtgtacaactatttgattcaccaaatccctgtatcgacatccgtaaagccacaaggattcttctagaacagggaggaattcttccacagaatattcagggccagaaccaagatctcaacctctgtacatcttgccatcctgacaagtttttctcccatgtccgagatggccttaattttggtacacagattggcttcatatcaattaaagaatgagatacttgactggatttttgtataactgcttcctgcctccttccaaactgactgcaagagagaaatttagctgtttgatttacttaaaaccaaatggattacaatggataattcatcttntgggtatatttttactattattcaaagccaaatgattttcatttaattgtaataataactgacaaaaatcagtatgtcgtagctaatatgtcttatgcatgagaattattcttaaagtttgttctccctgtttattacacagatcaggaatagatttgttcagttcagtatctattggataccctctattggtcaggccattgtgtaaagcatatgtgaattcacca

SEQ ID NO: 40054 - DNA, 666 bp, Homo Sapiens
  misc_feature (655)..(655): n is a, c, g, or t
ctcaaatgcaatgtcaaagagcttgcagtttattttccaggcaatgagtaggcagccaaaaaaaaaaagtaaggatgtttttttttttttcccatggcatcatatttaagaggatggatttaaattgtgtgagaccaaagcatagagactagataagaggcgatcaaaatatttcaaaaagaaataatgaagatccaatgaaggaagtggaaattaaaatagggaagagagtagatggattagagagacatttaagagatggaatcaatagatcctgttactagataatggaagtaagaggtgaggaagagtggaaaagtcattaatgactctaagatttctgcttggctgcttaccaagattggcaacaaagggagggagaaggtttggaaaaagagagaaggataatgagtttgactttacatagaatgaagggcatccagatagaaatctttggttaataattagaaatatagacctagaaattaggaggaaacctgagacagagacaaatatttcaaagcttacaatacagagatgatacctgattctattggagcaggtttgatcatctaggcagaaattaggatgagaaaaaaggagatccaataatacaaccttatagtcacagaagtaagaaaaaaagggtagttgntttgaagaagc

SEQ ID NO: 40055 - DNA, 925 bp, Homo Sapiens
  misc_feature (846)..(846): n is a, c, g, or t
tcgatttcgatatcgcacccgcgtcatttcgcctgagatgaggaaaagactatgtggagaatttgagtatttccggaatcattccctggagcccctcagcacatttctcacctatatgacgtgcagttatatgatagacaatgtgattctgctgatgaatggtgcattgcagaaaaaatctgtgaaagaaattctggggaagtgccaccccttgggccgtttcacagaaatggaagctgtcaacattgcagagacaccttcagatctctttaatgccattctgatcgaaacgccattagctccattcttccaagactgcatgtctgaaaatgctctagatgaactgaatattgaattgctacgcaataaactatacaagtcttaccttgaggcattctataaattctgtaagaatcatggtgatgtcacagcagaagttatgtgtcccattcttgagtttgaggccgacagacgtgcttttatcatcactcttaactcctttggcactgaattgagcaaagaagaccgagagaccctctatccaaccttcggcaaactctatcctgaggggttgcggctgttggctcaagcagaagactttgaccagatgaagaacgtagcggatcattacggagtatacaaacctttatttgaagctgtaggtggcagtgggggaaagacattggaggacgtgttttacgagcgtgaggtacaaatgaatgtgctggcattcaacagacagttccactacgggtgtgttttatgcatatgtaaagctgaaggaacaggaaatttagaaatattgttgtggatagcagaatgtatttcacagaggcatcgaactanaatcaacagttacattcccatttttatacccccagtaaggttctcaaatgtagaaaaattattaatgtttaaaaggaat

SEQ ID NO: 40056 - DNA, 606 bp, Homo Sapiens
  misc_feature (565)..(565): n is a, c, g, or t
tattgcgcttttcagaccggcttaagaaacggcgcaccacgagactatatcccacacctggctcagagggtcctacgcccacggaatctcgctgattgctagcacagcagtctgagatcaaactgcaaggcggcaacgaggctgggggaggggcgcccgccattgcccaggcttgcttaggtaaacaaagcagccgggaagctcgaactgggtggagcccaccacagctcaaggaggcctgcctgcctctgtaggctccacctctgggggcagggcacagacaaacaaaaagacagcagtaacctctgcagacttaagtgtccctgtctgacagctttgaagagagcagtggttctcccagcacgcagctggagatctgagaacgggcagactgcctcctcaagtgggtccctgacccctgacccccgagcagcctaactgggaggcaccccccagcaggggcacactgacacctcacacggcagggtattccaacagacctgcagctgagggtcctgtctgttagaaggaaaactaacaaccagaaaggacatctacaccgaanacccatctgtacatcaccatcatcaaagaccaaaagtagat

SEQ ID NO: 40057 - DNA, 526 bp, Homo Sapiens
  misc_feature (462)..(462): n is a, c, g, or t
ccagctcagagtccagccccaaacctctctcagtgacctctgccctgggacacagggccacccagaccgtgagcttggggcccttcaggctgcccactgaggaggggcagctactgctgaggtctgaccttgcctctcctgatgccccagccacagttgggagagaggcagggtggggggtggctgccctcctggccaaggacactgtcccggggccagtcacaggtttgccagggagggccgtaagacaactcagcattagcactgcccaagccagtctgctgctgtcatattccctgtgtggggacacagtaatgcccactccccctaaggatgtacacgtcccagtccaagaacccgtggccgtgccaccttatgtggcagcagggactctgcaggagggacggagcaggatcacactggatgctctctgtgggcccagtgtcctcacagggtccttangagagggggtgggagggtcagagtcagggggagcctggaagacatagcacagatggctttaaag

SEQ ID NO: 40058 - DNA, 1052 bp, Homo Sapiens
  misc_feature (876)..(876): n is a, c, g, or t
aatttttcggaatcgtcgacccacgcgtccgattacacaccagaaaatgcatagtggagaaaaacgctataaagccagtgactgagaaagtcttcacctggaaatcacaactgggtatgcatcaggtatctaatagcagggaggaggaaggcctgttgctgcaatcattgtacagggggaaatgggtatgagagactgaggcttgagtgaactgaaggcaaacagagccaagtatccttcagtccactggaaagacaagttcctgcatcaccacagtgtatatgcaattctatgcataggaagagcctttagagaaagcatttgagcgaaagtcatgtttggtgacatgattcatacagacctcttgagctcctggaaatagtagaattaagacctgaggagatgactcgtcatctcttatgcttcactttttggataaagaactttttaaattcagtactgattggttcagcatatcctgggacataaaaatactcactactgggaaaaactttttcaaatttctaggttgaggagaagagttttcattgtccaaacactggcagggcactgacatcaaggcagaaaacctacttgggaatgcagatatctgtttttgtgatcattggcacttaagacatagaaaagatttccatgaaaaacttttttcttttcccttgggaagtcctcatggtatatatattttaagtgcaatggaatttttaaatttaaagatataactttatgaattgagaaattaggcctagctctaggctatgttacagaaatatagtcattgaatgatacagacatataaaggtagtagttgtctcattattaattccctgctgggagagcagatgagtcataccctantagaagaatgcatgcctttctaacctatgtcccccaagctgtcatttgcataagctggcagccatagattccctgatccctccgtaactgaccctacgacaatgggactgatccacggcactctagattttcaggctacccaacaacaccctggctttccttgggatttcctgaaa

SEQ ID NO: 40059 - DNA, 966 bp, Homo Sapiens
  misc_feature (619)..(619): n is a, c, g, or t
gacttacggctaggtacgaggctgggtgtgggaaagacactatgaatgtagtaaatgtgggaaagctttcatccagaaagccacactaagtatgcatcagataattcatacaggaaagaaaccttatgcttgtacagaatgtcagaaggcctttactgacagatcgaatctcattaaacaccagaaaatgcatagtggagaaaaacgctataaagccagtgactgagaaagtcttcacctggaaatcacaactgggtatgcatcaggtatctaatagcagggaggaggaaggcctgtgctgcaatcatgtacagggggaaatgggtatgagagactgaggcttgagtgaactgaaggcaaacagagccaactatccttcagtccactggaaagacaagttcctgcatcaccacagtgtatatgcaattctatgcataggaagagcctttagagaaagcatttgagcgaaagtcatgttggtgacatgattcatacagacctcttgagctcctggaaatagtagaattaagacctgaggagatgactcgtcatctcttatgcttcacttttggataaagaactttttaaattcagtactgattggttcagcatatcctgngacataaaaatactcactactgggaaaaactttttcaaaatttctaggttgaggagaagagttttcattgtccaaacactgcagggactgacatcaaggagaaaactactgggaatgcagatatctgttttgtgatcattggcttagacattgaaaagattacatggaaaacttttctttccctgggagtctcatggtatatatttagggccggatttctatttaagattatcttgaatggaatagacactgcatgtcgaaatagctgggtcggttaaaaaaaaaaaaacggctttgggggggaggaaggagcggtcggccttgaagatcgctctgtagctacacaa

SEQ ID NO: 40060 - DNA, 771 bp, Homo Sapiens
tgatataacaagtctagaagttagaactgttgtcattcacataataagattactctgtctccttgggaaaaaaactttatggaggctgtttgtcctctcaatatggttttaagattgaaagtaagaaaacggatttaggatgaaaactctagaactaccctatgctgtttatactgggaaatgctttgtaccaagtagcagtgactagacccacagacatgaaaagcaaccttaggagtaaagtgacccaaacattaaaatgacaggaaagagaaagtagaagcagcaataaatactgccccaactttcctggagcccgaggcctcatccatagctatgatcacttgccctctgaagcttatttttgcttctttggttttaagaattgagaaatatcacattgcccctgatgttttgacagtctcctagtgctcctggtagtgccactaagggaaaaccaaggtgcgcattccttctccctggactttaccttacttgttagtctacgccccactgtttccacccatccccttagccaacctctgtctttttgaattttctgagaatattgtcctatcctcttttatatatggagttctctcctctttatatcctgagactttgacaccagatgtagatatttatctggagctggaaagaaaaattctttttctgtacctcatgcctatctggtaatgtttaatgggttatttctctttgagggtggctttctctggaacattggttagagcagctttgttgtcgtgtttc

SEQ ID NO: 40061 - DNA, 803 bp, Homo Sapiens
  misc_feature (720)..(720): n is a, c, g, or t
  misc_feature (723)..(723): n is a, c, g, or t
  misc_feature (783)..(783): n is a, c, g, or t
ttttgcttcgatgtgctctactgtcacctgtatggataccagcagccccggaccccccgattcaccaacgagccctacccactgtttgtaacatggaagattggtcgagacaaaagattacgtggatgcatgggtactttttctgccatgaatttgcattcaggactcagggagtacacacttaccagtgcccttaaagatagccgttttcccccaatgacaagggatgagctgccacggcttttctgctcagtgtctctgctcactaactttgaagatgtctgtgattatttggactgggaggtgggtgtacatggcattagaatagaattcatcaatgaaaaaggatcaaaacgcaccgccacctacctaccggaggttgcaaaggagcaaggatgggaccatatacagaccatagactccttattgaggaaaggaggatacaaagctccgattactaatgaattcaggaaaaccataaaactgaccaggtatcgtagtgaaaagatgaccctgagctatgctgaataccttgctcatcgccagcatcatcatttccaaaatggcattgggcatccccttccgccatacaaccattattcctgacactgagccgcacaaccagtcactgggcctctctgcagacctcttccaggagaccctacaccttcttggtctagctatctcttttactgtccattttatgatgatagtttccgntgncatggtgaagcttcgacattggcaactaagatcatcatggtaacgggtagaaaaatggcnttttggttaagaaccctggt

SEQ ID NO: 40062 - DNA, 594 bp, Homo Sapiens
gatatcgaattcgtatcggccattatggccggggactgggaatcggagtgggcacctctgtgtttctctagggagtaacattcaacatttaattgaatcgtgtatcctgataggtggattaggaacaggattcattcctttaactttaacttttggctaaacgacatgccttggattgagtgtatatgtcttccccaaattcatatgttgaagcttaaatcctgaatgtgatggttcttggaattgggacctttggaaggttattgggtcttgagggcagagccctcacgaatgggattaaggcccttataagaagagacatggggccaggtgcagtggctcacacctgtaatcccaacattttgggaggccgagaagggtggatcatgaggtcaggagatggagaccatcctggccaacatggtgaaacctcgtctctactaaaaatacaaaaattagctgggcgtggtggtgcgtgcctgtagttccagctacttgggaggctgaggcaggagaatcgcttgaaccaggcagtcggaacttgtagtgagccaagatcacgccactgcactccagctggagtgacagagccaa

SEQ ID NO: 40063 - DNA, 550 bp, Homo Sapiens
ggaagaactttggagcaggaactatggtagtcctctggatttataaggatgttcgcaatattcaaaactccaagcttatactctaataaaaagtcaggatctatagcatgatgctgcgattatctgccttatttgaaagtcatatcaaaaatatcatctctgaatataagtcagcaatccagagtcagaagaggagaaggccacggtacagaaaacgtctaagaagcagcagcagttcattatctagtagtggagcacctagtccaaaagggaagcagaaacaaatgaagttgcagcctaaaaatgaccagaatacctcagtatctcatgccaggactagctctcctttctcatctcctgtttcagatgctgctgaagggctttcactatatctacttgatgatgagccagatgggccattttcttcatcgagcttcggtggatatagccgaagtggaaatagccatgacccaggcaaagccacatcatttcggaatagagtttcgcccagttaacaagatcactcccttgatggggccctctacaatgg

SEQ ID NO: 40064 - DNA, 697 bp, Homo Sapiens
ggaagaaatcatatactgaggtgattcgagatgtgataaatgtgcacatggaagaactcagcaatcattggcaagaagagcaagagaaggcagaggatgatgccgaaaagaatgaagaaaggcgatcagcttcagtagattcacggcagtctggtggaagctatttggatgctgagtgttcacgacatagaagggataggagtagaagcccacataaaagaaaaagaaacaaagataaggataaaaactgtgagtcgagaagaaggaaagagagggatggggaaagacaccatagtcataaaagaagaaagcaaaaaatataaatgaagtacttgtacctatattaattatgcttacgccatgataaccaatatacagatatattaattggaattcctttgcataggagaatgtttttatgatctgtttagtgcttattattttttttatgatctgtttagtgcttattattttccagtaaatatgcttcaaaccatgagtacactattaggccctacaactttgttttccttatattttattagatgatttgcttcctataactgatgttggtttgttcgttttgctaatatatgtatctcaaaattctttaagtcaatatttatcatatgtaaattaaacatgaatacattctcatcttataactacatcttataaataaggctaataaccctta

SEQ ID NO: 40065 - DNA, 545 bp, Homo Sapiens
gctcgacctccaatacaaaaagcagcttcctacacaatgcagccccatacccatacccaacccattgacccatcaagccagcacccatcctttcttggcactctgtatctcagtacacattctaccttcaaaaacagctaagtcaaacgtgtcaaaatagctatttcctcttgagtttgagcatctgcagttgcccagccccaattctttatttggaaataagtattaggagaaacatatctagcatagtgatattgatttgtaatttcctcaaatagacattcactttagatgactaccaaagcttaatagaagcccaggagctcgagaccatcctgggcaacataatgaaacaccatctcttaaaaaaaaaaatacaaaagttagctgggtgtggtggtgtgcacccatagtcccagctactcaggaggctgaggtgggacaattgcttgagcctgggaggtcaaggctgcagtgagctgtgatcacaccactgcattctggcctgggtgacagagttagactgtgtctcataaaaaaaaaaa

SEQ ID NO: 40066 - DNA, 608 bp, Homo Sapiens
  misc_feature (18)..(18): n is a, c, g, or t
cggtccggaattcttcgnaatcgtcgaccccgcgtccgctccgcgtccgggcacacactgtggtcccagctactcgggaggctgagggggaagaattgcttgaacccaggagatggaggttgcaatgagtgaggatcgtgccactgcatccagcctgagcaacagagtgagatcttgtctcaggaaaaaaataaatttaattgctgtggatactgtaaagggtgtttatcgtaacagttcataatattctatttaagaatgcgtgggagaaattttctctggacccagttatgcttttcctgaattgctgtttggtttttaccttaaggacactaaatattcagctgattgtatttttctgtttgtactgatactagaccatttagagcccaatttgtggtctaccttcagcaagtgtttatgtattttgtatgctagtcatgttcttggttctgtcttccttttctacttttattttccttattctcatttttctaagttttaatcgttttatattactataatatctgcatcttgtaagcctttttgtaataaggttgggatataaataaataaggcaatgtatcctttaaaaaaaaaaaaaaaaa

SEQ ID NO: 40067 - DNA, 583 bp, Homo Sapiens
  misc_feature (470)..(470): n is a, c, g, or t
gaagattgttagcacattatctgttgcagttgtttttggaattacctggattctagcatacctgatgctagttaatgatgatagcatcaggatcgtcttcagctacatattctgccttttcaacactacacagggattgcaaatttttatcctgtacactgttagaacaaaagtcttgcagagtgaagcttccaaagtgttgatgttgctatcgtctattgggagaaggaagtcattgccttcagtgacgcggccgaggctgcgtgtaaagatgtataatttcctcaggtcattgccaaccttacatgaacgctttaggctactggaaacctctccgagtactgaggaaatcacactctctgaaagtgacaatgcaaaggaaagcatctagacagtaaaacttacctgttgtgggtctttttaatcacctcgtttgaggtttaatctgtttctctcctttatttcccagncctctcagaaagtcttcctaaatgtattttgctcaggatttaaaatttagttaaaccctgtggttattattattcgcaaaagggacttggagggttttttttttttcaaaaat

SEQ ID NO: 40068 - DNA, 582 bp, Homo Sapiens
catcaccagtgccaaaaggctgtttctgtggctgactttggcagtctctctgccaacgagaccaatggtttcatcagtgcccatgctctgcatcagcacgcggccctacactctgagtgacctgagtgaggatcccggaactgcgtgtgcagcaccagtaaacttgaggggagctatcaggtttgcatagtctttcactggaagtttgaacctttctcactatgacatcagtgatgtcagtatgtatagaactatatcttgatttatcaagagtattttcatttttcaatccataaatgtggaaatgaactatgatcagcagagttgggaactaagattgaactctgtggtgcagctttaagctctgcttctctcttcctcatctcccaatacctcttccccactcccttctttttctattcttttgtgttccccactgccctcactcccaattttaaaacctgtagacagaggccaccagctcaaaaccagcacagatgttctgaactgaatggtgtggcctctttttgtgtaaattccttttgccgtaatggatgcagtggaataacaatgtttacaggt

SEQ ID NO: 40069 - DNA, 715 bp, Homo Sapiens
ggcaagcatgagtttcggagcaacatcccctgtcacctggttgatatctcttgcggattaccctgcagtgccacgctaccatgtgggatgcacaaatgtcagagactctgtcacaaaggggagtgtcttgtggatgagccctgcaagcagccctgcaccacccccagagctgactgtggtcacccgtgtatggcaccctgccataccagctcaccctgccctgtgactgcttgtaaagctaaggtagagctacagtgtgaatgtggacgaagaaaagagatggtgatttgctctgaagcatctagtacttatcaaagaatagctgcaatctccatggcctctaagataacagacatgcagcttggaggttcagtggagatcagcaagttaattaccaaaaaggaagttcatcaagccaggctggagtgtgatgaggagtgttcagccttggaaaggaaaaagagattagcagaggcatttcatatcagtgaggattctgatcctttcaatatacgttcttcagggtcaaaattcagtgatagtttgaaagaagatgccaggaaggacttaaagtttgtcagtgacgttgagaaggaaatggaaaccctcgtggaggccgtgaataagggaaagaatagtaagaaaagccacagcttccctcccatgaacagagaccaccggcggatcatccatgacttggcccaagtttatggga

SEQ ID NO: 40070 - DNA, 788 bp, Homo Sapiens
gcctggcgacggctgcgcctgtgcctactacactggcacaagtggatagagaaaagatctatcagtggatcaatgagctgtccagtcctgagactagggaaaatgctttgctggagctaagtaagaagcgagaatctgttcctgaccttgcacccatgctgtggcattcatttggtactattgcagcacttttacaggaaattgtaaatatttatccatctatcaacccacccaccttgacagcacaccagtctaacagagtttgcaatgctctggcattactgcaatgtgtagcatcacatccagaaaccaggtcagcgtttctcgcagcacacatcccactttttttgtacccctttttgcacactgtcagcaaaacacgtccctttgagtatctccggctcaccagccttggagttattggggccctggtgaaaacagatgaacaagaagtaatcaactttttattaacaacagaaattatccctttatgtttgcgaattatggaatctggaagtgaactttctaaaacagttgccacattcatcctccagaagatcttgttagatgacactggtttggcttatatatgtcagacgtatgagcgtttctcccatgttgccatgatcttgggtaagatggtcctgcgagtatccaaagagccttctgtccgtctgctgaagccatgtagtgagatgttaccttcgactttcagataaccccagggacgtgaagccactcagacagtgcctccctgacagtggaagaaccaacttcgccagtgctaa

SEQ ID NO: 40071 - DNA, 757 bp, Homo Sapiens
  misc_feature (718)..(718): n is a, c, g, or t
  misc_feature (747)..(747): n is a, c, g, or t
ggggagttattgttgggaacatatatgaccaaatcaacaccagttgtacaccttcattttactcgaagaaacctggttctagctgcaggagcttatagtccacaataaaccatcggtattaaagaccttttggaagctactgtttttaaaaagggagactaaaagcaaatacctcagtgattaatatttaagctacagagaatgtttttgtctatatggatctggaagtatgctgcttggaaaaatctgaacaggacagttccacgtttctatagcaaccacatttgactaatttccgttagttgaataagaggtattatgatcatggaggggacatttatggtgctttggattgtgtggaaactatgcattttctgttcaaatgctattttaatttattacatttagaaaaaaagttgatttcaataattcatcctgcttcaagattcaaattcagaaatatactatcatcttgaattttagctgaagaatcctatgagcatgtatgtttctgctgtaaaaacgtagttactgtatggcactcaaaaactatgttaaatgatccactaactttttttttcttggcccatgattaatggaatgtatgtaactaggtagggttcctttcttagatctagaggaagtacagccacccactgacatctgaatttatatacctgttgagttttgagtgcacccaaacactcgataaacaggngaaagaaattttgcttccatgtttctacntcagctaaac

SEQ ID NO: 40072 - DNA, 802 bp, Homo Sapiens
aagaagaggaggaggaagatgaggaagaggaggaagaagaggaggaggaggaggaagaagagcctcagcagcgagggcagggagagaagtcagccacgccctcacggaagattctggaccctaacactggggagccagctcccgtgctgtcctccccacctcctgcagacgtctccaccttcctggcttttccctctccagagaagctgctgcgcctagggcccaagagctccgtgctgatagcccagcagactgacacgtctgaccccgagaaggtggtctctgccttcctaaaggtgtcatctgtgttcaaggacgaagctactgtgaggatggcagtgcaggatgcagtagatgccctgatgcagaaggctttcaactcctcgtccttcaactccaacaccttcctcaccaggctcctcgtgcacatgggtctgctcaagagtgaagacaaggtcaaggccattgccaacctgtacggccccctgatggcgctgaaccacatggtgcagcaggactatttccccaaggcccttgcacccctgctgctggcgttcgtgaccaagcccaacagcgccctggaatcctgctccttcgcccgccacagtctgctgcagacgctgtacaaggtctagactcaaagcctctcccatcccttggcctggaccagtgagctggggagggactcggatgaactgaggcgcagcctacgccattgccttggacaggactctggccacaggcagggcgggtctgtgtcccatgtgtcctgtcagtcccctgagtatgtgtgtgggtgtgg

SEQ ID NO: 40073 - DNA, 862 bp, Homo Sapiens
  misc_feature (783)..(783): n is a, c, g, or t
  misc_feature (799)..(799): n is a, c, g, or t
agaaggagccggaatcagagccagatgagccccagaagccaggaaaaccttcagtcttcactgtcttccagaagtcaccctgtccgtcttccccgccatcacagccatggtgaccagctccaccagtcctgggaagtggagtcagttcttcaaccccatctgctgcttcctcctcttcaacatcatggactggctgggacggagcctgacctcttacttcctgtggccagacgaggacagccggctgctgcccctgctggtctgcctgcggttcctgttcgtgcccctcttcatgctgtgccacgtgccccagaggtcccggctgcccatcctcttcccacaggatgcctacttcatcaccttcatgctgctctttgccgtttctaatggctacctggtgtccctcaccatgtgcctggcgcccaggcaggtgctgccacacgagagggaggtggccggcgccctcatgaccttcttcctggccctgggactttcctgtggagcctccctctccttcctcttcaaggcgctgctctgaagtggcccctccaggctctttggcagcctcttctcgacgtctccttccggagctgagatccagcccagggcgaatggcgagcttggctcaggcctctgcggggtggaggcccctgggcctgaggctgccagcagcgggcaggagctgctcttcatccacttggagtgctgcgggggaagaaatcaccaccggtcattctaaccctcaccagggaatggggggtgactcgcacaagacctcatggnaaagggtgatgactangggaaaaagagggtgcaggggcacggctgctccccaccaccagggtctgcatttggtcatcaa

SEQ ID NO: 40074 - DNA, 672 bp, Homo Sapiens
ccggcttcttctcacatgacaaaaactagcccccatctcaatcatataccaaatctctccctcactaaacgtaagccttctcctcactctctcaatcttatccatcatagcaggcagttgaggtggattaaaccaaacccagctacgcaaaatcttagcatactcctcaattacccacataggatgaataatagcagttctaccgtacaaccctaacataaccattcttaatttaactatttatattatcctaactactaccgcattcctactactcaacttaaactccagcaccacgaccctactactatctcgcacctgaaacaagctaacatgactaacacccttaattccatccaccctcctctccctaggaggcctgcccccgctaaccggctttttgcccaaatgggccattatcgaagaattcacaaaaaacaatagcctcatcatccccaccatcatagccaccatcaccctccttaacctctacttctacctacgcctaatctactccacctcaatcacactactccccatatctaacaacgtaaaaataaaatgacagtttgaacatacaaaacccaccccattcctccccacactcatcgcccttaccacgctactcctacctatctccccttttatactaataatcttataaaaaaaaaa

SEQ ID NO: 40075 - DNA, 630 bp, Homo Sapiens
gttctgttgaatgtggtgttagtaatggggttgtggggttttcttctaagccttctcctatttatgggggtttagtattgattgttagcggtgtggtcgggtgtgttattattctgaattttgggggaggttatatgggtttaatagtttttttaatttatttagggggaatgatggttgtctttggatatactacagcgatggctattgagaagtatcctgaggcatgggggtcaggggttgaggtcttggtgagtgttttagtggggttagcgatggaggtaggattggtgctgtgggtgaaagagtatgatggggtggtggttgtggtaaactttaatagtgtaggaagctgaataatttatgaaggagaggggtcagggttgattcgggaggatcctattggtgcgggggctttgtatgattatgggcgttgattagtagtagttactggttgaacattgtttgttggtgtatatattgtaattgagattgctcgggggaataggttatgtgattaggagtagggttaggatgagtgggaagaagaaagagaggaagtaaagtctaattatgcctttttgggttgaggtgatgatggaggtggagattaatgatgaactgatgaga

SEQ ID NO: 40076 - DNA, 610 bp, Homo Sapiens
cccacgcgtccgcccacgcgtccggtcccaggttgcaacaaggacagtgtcagagcaggctgtaaaaaatgtggctaccctggtcacctgacttttgaatgccgcaattttctccgagtagaccctaaaagggacatagttttggatgtcagcagtacaagtagtgaagatagcgatgaagagaatgaagaactgaataaattgcaggcattacaggaaaaaagaataaatgaagaagaggaaaagaagaaagaaaaaagcaaagaaaaaatcaaattgaaaaaaaaaaggaaaaggtcttactcatccagttccactgaagaggacacttcaaaacaaaagaaacaaaaatatcagaagaaagaaaagaaaaaagaaaaaaagagtaaatcaaaaaaagggaaacatcacaaaaaggaaaaaaagaagagaaaaaaggaaaagcattcttctacacctaatagttctgaattctccagaaagtaactgagactttggcttaagccgttaaatttaaaaatttgtttttaaaacgtgtttgcccttccttggaatttgctatatattatgctttgcaataaatcacagccttttccatatagacattttt

SEQ ID NO: 40077 - DNA, 577 bp, Homo Sapiens
agatttcatgcggacaccaatagactccacagcagctccaggagcccagacaccggcggccagaagcaaggctaggagctgctgcagccatgtcggccctcagcctcctcattctgggcctgctcacggcagtgccacctgccagctgtcagcaaggcctggggaaccttcagccctggatgcagggccttatcgcggtggccgtgttcctggtcctcgttgcaatcgcctttgcagtcaaccacttctggtgccaggaggagccggagcctgcacacatgatcctgaccgtcggaaacaaggcagatggagtcctggtgggaacagatggaaggtactcttcgatggcggccagtttcaggtccagtgagcatgagaatgcctatgagaatgtgcccgaggaggaaggcaaggtccgcagcaccccgatgtaaccttctctgtggctccaaccccaagactcccaggcacatgggatggatgtccagtgctaccacccaagccccctccttctttgtgtggaatctgcaatagtgggctgactccctccagccccatgccggccctacccgccctt

SEQ ID NO: 40078 - DNA, 583 bp, Homo Sapiens
agcgccttgccttctcttaggctttgaagcatttttgtctgtgctccctgatcttcatgtcaccaccatgaagttcttagcagtcctggtactcttgggagtttccatctttctggtctctgcccagaatccgacaacagctgctccagctgacacgtatccagctactggtcctgctgatgatgaagcccctgatgctgaaaccactgctgctgcaaccactgcgaccactgctgctcctaccactgcaaccaccgctgcttctaccactgctcgtaaagacattccagttttacccaaatgggttggggatctcccgaatggtagagtgtgtccctgagatggaatcagcttgagtcttctgcaattggtcacaactattcatgcttcctgtgatttcatccaactacttaccttgcctacgatatcccctttatctctaatcagtttattttctttcaaataaaaaataactatgagcaacaaaaaaaaaaaaaaccaaatgggggccggcctacccttgtaaaaagggggggaggcgctggtctatttccagcccatttcctgaaaaaaaaaagaaggg

SEQ ID NO: 40079 - DNA, 555 bp, Homo Sapiens
gcacgagggggcggcgtcaacacggacaaggtgcagtgctttgaccccaaggaggaccggtggagcctgcggtcaccagcacccttctcacagcggtgtctcgaggctgtctcccttgaggacaccatctatgtcatggggggtctcatgagcaaaatcttcacctatgatccaggcacagatgtgtggggggaggcagctgtcctccccagccctgtggaaagctgtggagtcactgtgtgtgacgggaaggtccacatccttggcgggcgggatgatcgcggagaaagcaccgataaggtcttcacctttgaccccagcagtgggcaggtggaggtccagccatccctgcagcgctgcaccagctcccacggctgtgtcaccatcatccagagcttgggcaggtgattcagatttggacagcctgagccaggaggcggagaggcaggcggagctcagatgcacactctgctccctcatggcacctccacgcaaacagcccttaacttaatggtcccttttcttgtataaataaaatcttgttgggtctgtgtt

SEQ ID NO: 40080 - DNA, 759 bp, Homo Sapiens
  misc_feature (657)..(657): n is a, c, g, or t
  misc_feature (709)..(709): n is a, c, g, or t
  misc_feature (753)..(753): n is a, c, g, or t
gagtccaaatgcctcgtgcggagcttcctgaaatagtgctggaagacgtgaacgagaaggaatgcctcatgctcaagcagctctggagctcctccaaaggccttgactcccttttcagctacctgcaggacaaaatttatgaagtctgaggggccccagctcacgggcccccaacttccagctctgccctgtgtttcggaaaccagagcacagtgtctgccccggccaaggagtttgtcaaggtgtctctttatacgtagggttgtgtccatttcctcgtgtcctttggttgctcctccttggtttgattttgtgtaatggatggaaaacgcagcatacttggcctcccccacctccctgcccttcctggccagagagctgtccaaggctgtatcttcccagggctccgccaagcaccgctgtcctttccccacttgctgaaatgcaccatgacggtccaggaaggggaagaccactttcacattcttctgactcaggctgtgtctacacagtgcctctgacttggagacttggccatcatggctctctctggttgtatttagatcgggtgtcagaggacgaccaatcttagggaatttccagaccaatgagcaaaatgattgtgcacacctggcctcagtctcctttccgacgcanatctgtgtgactattagggcttggtcttaaaacccaattgagtgatttgcanacccagatattgtacatttagaaatgttttgttaaatatatatntttaaa

SEQ ID NO: 40081 - DNA, 887 bp, Homo Sapiens
cttttcctgctgctatccagagaaatcagcctcagcgccctgaaagcttccttttccgagcaggtgtcagggcagaaaccaacaaaggtcatgcttcaccccttcctccatctgctgcacctaccactgattctacagattccataacaggacagaattcaagacagagagaagaagagctggaattaatagaccaactgcgtaaacatattgagtaccggttgaaagtgtctctaccttgtgatctcggagcagctctaactgacggtgttgttctttgccatttggccaatcatgtgcgacctcgatctgtcccaagcattcatgttccctcaccagctgtagtaagttgataatcctaaaaagccttggctattcatcagacatttgttaagcacagtggacagacatttcttaagcattgtgctagatattaaggatacagatataaagagtccagtctctaccttcctggtctcacttctactcgagaagaaatagacatgtatacagctacttacagcagtgcgataaatgtaagaraggcatgtamagtgtgtgttatagggatataaraaggggcmamttaamtcmammtggagagttmagggaagcmttcmcagaamgggmaaaatwttgaactaattcttgaagtttaagaaggaattttcaagawktamagagaggggagggggmmwtmaargcataggatttctagattmagaagctaaggaaartttggcttttaattaaggaattggwaawtgttaaaatggrtmgtgmaaagggtkktataaaatggwargggkcatghtagaracgtgagmkggggmgtggtacaaagscttatgacagtgtgagggaaktttaaaagtaaagaaataagg

SEQ ID NO: 40082 - DNA, 916 bp, Homo Sapiens
  misc_feature (902)..(903): n is a, c, g, or t
gagaaactacgtacgagaaagcaaaatttctagtttgatgcatgttccaccttccctcttcacggaacctaatgaaatatcccagtatttaccaataaaggaagcagtttgtgagaagctaatatttccagaaagaattgatcctaacccagcagactcacaaaaaagtacacaagtggaataaaatgtgatacaacatatactcactatggaatctgactggacaccttggctatttgtaaggggttatttttattatgagaattaattgccttgtttatgtacagattttctgtagccttaaaggaaaaaaaaataaagatcgttacaggcaggtttcactcaactgctgtttgtactgtctgtcttcacattcatattccagatttatattttctggagttaaatttggatgatttctaaattatcacaaagtgggacctcagcagtagtgatgtgtgtgtctcatgagcagtgagcacagtctgcattcatcatgaaacactatcttctaccaggaggaggttaatgtaaatcaccaaatcccaatgccttgtgactttcataggattcctgatcatgcatgttgatgtactggctcttcactttgggctttctgatgtttattcacacctttggagagttgcaacttgccacatacgaaattagtctcatagtgtagtgaacttcaaccccaaaattttaaaaatgtatttccccccagttttaaattgcctttgaaatttaaaaaaaaaaatttagacttagtaccagaaaccaaaatacctagatttttggagaacttattacatacatagaaacatgaatatgggttaccactgttgtgtgtgtaggatgttagaaatatctgtccttcatctttagtcgcttttcttaaatgnngggtttacttatc

SEQ ID NO: 40083 - DNA, 853 bp, Homo Sapiens
attgtaaagtgagcaaccattgctagtaattctttaatgtgtataaattcaatttcaggtataacaaatgtgatcatgacatgaaaatattctagaatagatactgtattaaatattgccatgtttacaatatgtaatatgtttttagccgatggatttaaacatgtagattcaactagaatccatttgtgatatttgtaaataaaggtagaaatattagatccatttctgcagaacttactgtacagtttagttggagtgtagcactgaagaactgtcagctcagcgttgactgaggagatagtgaaaatagcctatacacagcatcttgtgaaaagtactggcagccgtggttgcagcaaataatagggcaaaaaaaataataatagggtggtcggttccctttcatctccctcttctgaaaggaaaaaattgaattggaacgttcaagtccagtttgtgttcagtcataaaactgggccagttgttaaccttacagaatgagtcatgtggccagaccttcaagtccaaggccttcagacactaaggatgggaaaatgggtatttttctttggagaaaagctggaaatataaacatggcatttttaggtaaagtttcttccactagttgaattttcatgcagatatttttccttaacgttggtgccagtcaagcaaagagtattatgatggaaaagaccagtccaagccccatcgctccggagtgggagccagtgttcttgctaattgtttctttctgcactaaccactcagatgtctaatttaattgttttgcagtcaaatactggatttgtaaccttcagggctgacatgctgcccagtttgcttcatc

SEQ ID NO: 40084 - DNA, 974 bp, Homo Sapiens
ggtcagtgcggctggattttggggatgtgctcctggccacaggggggcccctgaggttgcaggtctgggatcaggactctggcagggacgatgacctccttggcacctgtgatcaggctcccaagtctggttcccatgaggtgagatgcaacctgaatcatggccacctaaaattccgctatcatgccaggtgcttgccccacctgggaggaggcacctgcctggactatgtcccccaaatgcttctgggggagcctccaggaaaccggagtggggccgtgtggtgagaacagtgagcttggaaaggaccagtatgcttggactgaaggggttctcacagtgggagccagggctgtcttcgtattcccattagaccaagcttgtccaacccgaggcccgcatgcggcccaggatggctttgaatgcggcccaacgcaaattcgcaaactttcttaaaacattatgagtttctttttgctattttttttttttttttttagctcatcggctatcgttagtgctagtggattttacatgtggcccaacacaattcttcttccaacgtggcccagagaagccaaaagattggatacgcatcagacagatggaaaagggagattcagactgtttttcagggaggtggctgggtttacacgctaatcccgattcaccctgtccaaactgcctaagccctccgccattctcaagccctgcagtcacagctacacagatcacagcttcagccaggagctgggcagaaagccaagaggctgttcccaccaggctgctcagggctggtcttttaggaccctttccttggaccccctatggtgggggcaaaactttctttggccttaatgggagcccatcaacttcaactgctcgtggcttctttgcccacatgcttttcccctgaaaaaaaatggagggccggccctgacctggcctcacaatgaaactaaacttgttaaggg

SEQ ID NO: 40085 - DNA, 485 bp, Homo Sapiens
aactatagtaacttaatactctaaacaatagttcactccatttggtcctttctccacagatgtaattatgttttcaactcaggaactatggcaaggaactttccccagatcaaattctattaacgctgagatacaagtcatccatgcacagccactatcataccctttattctcactgaaaggcagaactcagaacctgttattttatgtctgtaatcatgtactttggcatcttttggaggaaaggggcaggataactcactggaatgtacagtattttgctagtgcatttcaaggaatggaatcttctccagtatgaaattaccagatataaaataatgtaatgatgctgaggatataagcttttagaaggtaatttgatggtatttctttctcgaatgaaaagctgctggtttaccctcaaccctattcattagcattaccatgagtgaatttatatctaattatttccacttgccctgttc

SEQ ID NO: 40086 - DNA, 733 bp, Homo Sapiens
caaatcctttatatgatacagaaagatgcaaggtattccagtgtgatctgactaaagatgatcttctggatcatgtaccgccagagtctgtggatgttgttatgttgatatttgtgctgtcagctgttcatcctgataagatgcaccttgtcttacaaaacatttacaaggtattaaaaccaggcaaaagtgtcttgtttcgtgactacggactgtatgatcatgccatgcttaggtttaaagccagcagcaaacttggagaaaacttttatgttagacaagatgggaccagatcatatttttttactgatgacttcctggctcagctctttatggacacaggttatgaagaagtggtaaacgagtatgtgtttcgagagacggtgaataaaaaagaaggcctgtgtgtgccaagagttttccttcagagcaaatttctaaagcctcctaagaacccatctcctgtggtcctgggcctggatcctaagtcctgacctttcatgaggttggcatttataccttcccttgaagaggaaaatttaaaatcactctttcgtctgggtgcggtggctcatgcctgtaatcccagcacttcgggaggccgaggttgggggatcatctgaggtcaggagtttgagaccagcctggccaacatggtgagaccccatctctactaaaaatacaaaaaaattagctgggcatggtggcgagtgcctgtggtcccagctactca

SEQ ID NO: 40087 - DNA, 806 bp, Homo Sapiens
gggagacagattgaaccatcatttgtcttccgaacatttgacgaatttcaggaacttcacaataagctcagtattatttttccactttggaagttaccaggctttcctaataggatggttctaggaagaacacacataaaagatgtagcagccaaaaggaaaattgagttaaacagttacttacagagtttgatgaatgcttcaacggatgtagcagagtgtgatcttgtttgtactttcttccaccctttacttcgtgatgagaaagctgaagggatagctaggtctgcagatgcaggttccttcagtcctactccaggccaaataggaggagctgtgaaattatccatctcttaccgaaatggtactcttttcatcatggtgatgcatatcaaagatcttgttactgaagatggagctgacccaaatccatatgtcaaaacatacctacttccagataaccacaaaacatccaaacgtaaaaccaaaatttcacgaaaaacgaggaatccgacattcaatgaaatgcttgtatacagtggatatagcaaagaaaccctaagacagcgagaacttcaactaagtgtactcagtgcagaatctctgcgggagaattttttcttgggtggagtaaccctgcctttgaaagatttcaacttgagcaaagagacggttaaatggtatcagctgactgcggcaacatacttgtaaactagtgaatgtttgagctttggaagcatgaacagttataaacgtgcatgcatacatgcacacacacacagacacacacacacacacttgttaat

SEQ ID NO: 40088 - DNA, 622 bp, Homo Sapiens
atggcttatttaataaatggaaggttcataggagaaaaattttagctttctactttatatcatatacaaaaataaaatccaactaaagaccagaatataaaaagcaaaattttaaaactatgatgaaagtagaatccgttactttagggtaacaagatttctttaaaaaacatgtaaacatggaatagtctgttgaattttggtgtattggcctcacaggcacccacaaatgtacacaaagagatatatatcactgtgttcctgaatcatggtttgtattgcccaaaattggatataacaaatttttatcaattgtggaatagatgaataaatgtgatcatttctgtgataaaatacagaatttagaaacaaaatctacctatagttatatggatagattacaatatataatattgagagaaaaaattaaaatgcacaaaggaacacagtataacatttgtataatttaataagatcttgcaaagaacagtactgtgtattggtcatggatccatatatgacttggttgccttttgggatgtgggaaaggtttggtggggagttgttatatttatctgtaatatttctttaataaaagagtgaaagcaaaaaaaaaaaaaaa

SEQ ID NO: 40089 - DNA, 656 bp, Homo Sapiens
  misc_feature (615)..(654): n is a, c, g, or t
tggacaagccccgtcgctctcccacactgcgctacaggaggagtaggagccggtctcccagaaggcggagtcgatctcccaaaaggagaagcccctcccctcgccgagaaaggcatcggagcaagagtccaagacgtcaccgcagcaggtcccgagatcggcggcacagatcccgttccaagtccccaggtcatcaccgtagtcacagacacaggagccactcaaagtctcccgaaaggtctaagaagagccacaagaagagccggagagggaatgagtaatggactcagtttggttttagtccacatggcctcctgtggatatgaggatatctgtatgtggaaggattaagatctcccccaggcagctataagaatattttagtttttttcttatcaagtttctcaacctttatttttaatgaaggaggtgctgagttttgtatctttttaatcataatcaacatcagtttttgacccaactaaccttgactgtattcaaacttatgagagtataaaggatctggaggttggggatatgactgacaaggaaaggctgtggccacctgatgaccctttccctttttattaaaccggacacacctgtttcccaaannnnnnnnnnnnnnnnnnnnnnnnnnnnnnnnnnnnnnnnaa

SEQ ID NO: 40090 - DNA, 404 bp, Homo Sapiens
cttttttttgttgagttgtagttctttatacattctggatattaactccttaccaaatatatgctttttacatattacctcccagtccataggttgctttttcgctctgttgattgtgtcctttgatgaaattttaagttttgatgtactgttgactctttctgtctgtgggttctgtattcatggatcgaagcaaccatggatcaaaagtatttggagcatccatggattgcagtgatcattaatcaaaaatatttggaaaacaaaaagggtagttgcatctgtactaaacatgaacagacattttttcttgtcattattccctaaactatatagtataataaatatttacatagcatttaaaaaaaaaaaaaaaaaaaaagcctacagccgcgcctcgtgcc

SEQ ID NO: 40091 - DNA, 918 bp, Homo Sapiens
  misc_feature (801)..(801): n is a, c, g, or t
attggactgatttgtctcttgagaagaaatcgtgtccttactgcccagcaacatttgaaacaggtgttgggttatcaaatcatgtcagggggcatcttcacagagcaggattaagctatgaagcccgtcatgttgtatcaccagaacaaatagccacaagtgacaaaatgcagcatttcaaaagaactggcacaggaacacctgttaaacgagttagaaaagctatagagaagtctgaaaccacttctgaacacacttgtcagctctgtggtggttggtttgatactaaaattggattatcaaatcatgttagaggccacttgaaaagacttggaaagacgaaatgggatgctcacaaatctccaatctgtgttctgaatgagatgatgcaaaatgaagaaaaatatgaaaaaatcttaaaggcattgaacagtcgtcgtattattcccagaccatttgtagctcaaaaacttgcatcaagtgatgactttatatctcaaaatgttatacctcttgaagcataccgtaatggcctaaagactgaagctctgtcagtgtctgcatcagaagaagaagggctgaatttcttaaatgaatatgatgaaacaaaaccagaactgcccagtgggaaaaagaatcagtctcttacactcatagaacttcttaaaaataaaaggatgggagaagaaaggaattctgctatttctcctcaaaagatccataatcagacagcaagaaagagattcgttcagaaatgcgttcttccattaaatgaggatagtcccgttgatgtatcagccnccaaaaaatgggctttgactatgcactcagcccttagattgtaagccaaaggaaatcaagggtcaagaatcttgggaaccaggaagaaaatgcttaccattaccttatggggggctg

SEQ ID NO: 40092 - DNA, 539 bp, Homo Sapiens
  misc_feature (531)..(531): n is a, c, g, or t
taaggtagcgaggcctgggtggcgaattcggcacgaggctggacaggatactccaagcgggcctggacgtggagcgtctctccctcaggaatttcttccatcatttccattccaagcgaggcatgtggagccgtcgccagatgaagacgctgtagccggagggtgtccgcggggcccagcactccccgctctggactagcagtggctccccagggccctgctactgttcagggatggggagtggggtgacggctggaccccaagaggcctcgaagctgacggcccactccacctggagctgtcccctcacagaggcaggttccggggctcctgtctctgcctcctcggccttcagaagggaggactttgagagagaggccaggagggaccacttgctcagtcgagaacgggaagagctcctgagaaggacgggtcaggaaggagagatctgactgagcgacaccatcctcatccatgaaggtgcacgcccacatcccccaagcgctcctcacaccaagcgctgaccaccanaccctctt

SEQ ID NO: 40093 - DNA, 509 bp, Homo Sapiens
ccgtctgctggagcagcaggaggacttcgccggcaagacagcccagtaccggcaggagatgcggcacctgcaccaggtgctgaaggacaagcaggaggtgctggaccaggcgctgcagcagaacagagaaatggaaggtgaacttgaagttatttgggaatctaccttcagggaaaaccgaagaatccgagaacttctccaggacacactcacgaggacaggcgtgcaggacaaccccagagctctggtggcccccagcctcaatggcgtctctcaggcagacctgctggacggctgcgatgtctgctcctatgacctgaagtctcttgcccccacctgccagaatctgcgggagcccgtggtgtagcctcctctggcctgaaaggtctgcctcacacaggccttccctgcagggcagcccatggtggcagccggaggtgcgtaagcccactgaacgctgcagggcagggaagaaataaatggtctcatagtttaatccattgataaca

SEQ ID NO: 40094 - DNA, 776 bp, Homo Sapiens
ctaggaggacgattaattcttctccttgaatatgggctggacaaagagaaaaatggtagctcaacagtggagacacctggacagcactttaaccaagtgatcaaagttaatatcgccaattatgtatgtgctcccggatgtgatgttatgagaaaggtacactatacctctgtggaattcctccccaaaacctattatctcaatctatccatagaaaacactggacaaatgcaaactgagggatattctaaaagaaaacagatcactactcttcaaaagttacaaggccatcaaagacaaggaaacaaactttcacagactgaaggagactataattaaatgcgatatggtacccaaactggattatgtaagtaaaaaaactggggaaataaaatgtataattcagttaatggtattataccaatgtacttttatttttgataaatgtaccctggttatgtaatatactaagattagagaaagctggatgaagggtatccggaactctgtatttttaccactcctttgtaagtttaaaattacttaaaaatatattaaaaatgtatatttacctttgtactgggttgagtaaaaaactgactttagaatgttaacattttagatggcgaaattagaagtaattcaatttttaggcaaatgttcttaatttacttataattaacatgttttacttgtgtaataataaatttaaaaaccctgattttattggaaaagaataaaccactttacacggcaaacagatctacctccccatc

SEQ ID NO: 40095 - DNA, 353 bp, Homo Sapiens
ttcaatttctacacagagagaccagaccattttagaaaaagataaaaagttaactgaactaaaggcagactttcagtaccaagagtcaaatttgagaacaaaaatgaacagtatggaaaaagcccacaaagaaactgtggaacaacttcaggccaaaaacagagaactactcaaacaggtcgcagcattaccaagagtcaaatttgagaacaaaaatgaacgttcaatttctacacttcccagaaccaatttgatggtatctgctttctaacaattttttactggctcttcatcagtatatgtgataaaacaaaatcctcttctttcatttgtttttgtgtgtagaaattgaa

SEQ ID NO: 40096 - DNA, 406 bp, Homo Sapiens
ggaggcatagttatcaagggtaatgattcataggtgtgggcaagacaagtcaaagcaccagtgtctcaactaagaaagaagatgagacaatcacaaggcccatcccctcggaagaaacatccacaggaataaacattacaacggtggctattccattggtgctccttgtagtcctggtgtttgctggaatggggatctttgcagcctttagaaagaagaagaaaggaagtccgtatggatcagcagaggctcagaaaacagactgttggaagcagattaaatatcccttggccagacatcagtcagctgagtttaccatcagctatgataatgagaaggagatgacacaaaagttagatctcatcacaagtgatatggcagattaccagcagcccctcatgattgg

SEQ ID NO: 40097 - DNA, 398 bp, Homo Sapiens
  misc_feature (125)..(125): n is a, c, g, or t
  misc_feature (133)..(133): n is a, c, g, or t
  misc_feature (350)..(350): n is a, c, g, or t
cttagttgttttttaaaaattatgtacattttaagtattttgcaatgaagaaattcatgcaaacaagaaaaacacattttttataccatcaaatttgtgtagcatgtaataaaaataactatttntattaaanttaggtaaacttcagcactttgggaggccgaggtgggaggttcacttgagcccaggagtttgcgaccagcctgggcagaatagcaagacccagtctctaacatatacatatacatatagatatatatgtaatatagaagggttattgtgtgttatattactttccagggacattcaaatgttttacattactttaagaatctttacttggtataagnacaaagtataagggtttaaaagttgtttttattaaacatactatataa

SEQ ID NO: 40098 - DNA, 573 bp, Homo Sapiens
cttacagagatggcttatagcttactgaagagtgaagctttgaagtttcatctctataaccttgttcctggtataccaacaatggaacactttcatcagttttactgttatcttgtctatgaatttgacaagttttggtttgaagaagaaccagaaagcattatgtatttcaatttgtatagagagaagtttcatgaaaagattaaaggacttttactggattgtaatgtagcacttactttaaaagtataaatcatccactgtatcttctatttctaccacattttgcacattcaacagaatttatatgttgtaataggaattatctgatcaattacactcttatatataatttcctacaaaaatatttcagaaattctatttaagaaagctagtggacaatcagtgtatgtttacaattgtttatacactgttctccaaaggtaccttatccttccaaagatcccctctgtagagtcatgcgaactacagtttggaacttgggacttagcccgttggtgtaaaagtataaatcaggtatttgtattaaattgattaaaatgtgtaaaatca

SEQ ID NO: 40099 - DNA, 909 bp, Homo Sapiens
  misc_feature (887)..(889): n is a, c, g, or t
  misc_feature (892)..(892): n is a, c, g, or t
  misc_feature (896)..(903): n is a, c, g, or t
  misc_feature (905)..(905): n is a, c, g, or t
  misc_feature (907)..(907): n is a, c, g, or t
gcaggagctgtggcggttttcctaatcctgcgaatatgggtagtgcttcgttccatggacgttacgccccgggagtctctcagtatcttggtagtggctgggtccggtgggcataccactgagatcctgaggctgcttgggagcttgtccaatgcctactcacctagacattatgtcattgctgacactgatgaaatgagtgccaataaaataaattcttttgaactagatcgagctgatagagaccctagtaacatgtataccaaatactacattcaccgaattccaagaagccgggaggttcagcagtcctggccctccaccgttttcaccaccttgcactccatgtggctctcctttcccctaattcacagggtgaagccagatttggtgttgtgtaacggaccaggaacatgtgttcctatctgtgtatctgcccttctccttgggatactaggaataaagaaagtgatcattgtctacgttgaaagcatctgccgtgtagaaacgttatccatgtccggaaagattctgtttcatctctcagattacttcattgttcagtggccggctctgaaagaaaagtatcccaaatcggtgtaccttgggcgaattgtttgacaaatggcaactgacttctttagaattttgcagttaacagtagtatgtactcaaattggggggaaaaaaaccctacatgtttcttgtaaaggcgtctgacagtcctgagaattattgatggtaaggaataaaaaatgtacagatgactcagtgaagaaactgaggcttctcttatgaaacaaacattgataaacgtaactactaaatgtttatgcctctgtaaaccaaatttcttttctagataaaaaatgtattactacctggcnnnaanaaannnnnnnnananag

SEQ ID NO: 40100 - DNA, 614 bp, Homo Sapiens
cttgtttgggagctcacccctttctcctgtttctcacttttggaataggaatctctatcctgtgcctgtctcatattttggaaatacatgactagtttggttttcaccggttcggagctgaagaagaattttgcctcagcatgaattgagtctcatccatatctgagtgatgtgatattgagatgacactttggagtttgagtttaaacattaggcttcatgctggaattaactgagacttttgaggcctttgggatgagatgaatatattttacatgtgatgacatggattttgggggccagaggtgtaatgttttggctgagtgtatgccacctcagattcatatgttgaaaccttacccccgtgccccccctctcccccacaatgtgatggtatttggaggccctgtctctggtggtttttaggattggaggacatcatgaagatggaggccttgtaattgggattagtttcctgataggaatccctagagagctagctttgcccttcaccatgagagggtgcagtgagaagatagctatctttgaaccgggaagcaggcccttaccagacatggactatgccagtgccttgatattggacttcccagcct

SEQ ID NO: 40101 - DNA, 905 bp, Homo Sapiens
ccacgcgtccggctgtagaagcacgcgacgctggcgcgcgagggccgcctgtgcaagcgcgaggtgcagctgcgcctgtcctacgtgtacgactggtccgcgccgccctcgcagtgctgccagagaagggagggcatcccctgagccgccgcggcccggccctccgggacacctgcttcacccggcggcgccttggggcaggtgccgagcgggcgcactacgcccgggccccaaggcccccgtcccgcagccacgcttgtggtcgctgcgtcccggtctgcgtttgggagacccctgggggttgccggggcagcgcgccgtgtccaggtggaggtgcccgttcctggacctcagcgagcctgagccgggcccggccgcacgctgacccccgtgctgtccccgaccggctcacggggctgggctccgatcttccgtgtctcttatcagtggcgtttctcacgtctgcgtctcagatctaacgtggtttcacatcaatccgctttcatgggattttggtctctgtccagtgacttcgtggtaaatgtaactcagtgtttgcttgcgacttatttataaatattgtaagtttgtgtcgatgagtgtaagttggcagtgcccacgtctcggtttttttacatgatttaaggaaagacttttatgtcagaacttggtgcctgtaccgtcaaccccgcctgctgcccgtgtttaaacgcaggagaaactttaaaactggccatctattcttttcagggtacaaggccactgaaacccattggttttctttctgaaagagaactttccttttcaaggcgttcccatggggcccccccccccacccggggacgggggcctgctttaatttaagaactctgcccccacggttcccgggaattcgaaacccccgg

SEQ ID NO: 40102 - DNA, 472 bp, Homo Sapiens
cttgtgttaggaaaactatcggctccctgtataataaatcaagccaggtcctccaagtggtaattcatgaaaaatatccccactaccaccaccaaggggaagaaaggactcagaagagaggacttgaggccatgaggtctggcctcttccctccccatctggagactctttctcccttgctggctttgggcccaagtttgatgtttatgaggatgattgctggtttctcttacacatagcagagctcactcagttctcacagtagccaaatgaagcagttatgtgttgtcctgttttccagaccaggactgaaatccagagagggtcaggaatttggccccatgatgaagccaaatctgaacccatgtcctcacttcaaggttatcaatcttggattgtgatgctattggtacttgagaataccccttatctgagtataaagaatccttgagttttgaaaaaaaaaaaaaaa

SEQ ID NO: 40103 - DNA, 587 bp, Homo Sapiens
ggaaccccagttgacagtttaaaagcactttcacacctctcctcgcttcctcaaaaagatcacagagggaggagctctgagaacagtctccttcaacagctcggccaagcagaactgctgtacctctgaccacttgtgttaggaaaactatcggctccctgtataataaatcaagccaggtcctccaagtggtaattcatgaaaaatatccccactaccaccaccaaggggaagaaaggactcagaagagaggacttgaggccatgaggtctggcctcttccctccccatctggagactctttctcccttgctggctttgggcccaagtttgatgtttatgaggatgattgctggtttcccttacacatagcagagctcactcagttctcacagtagccaaatgaagcagttatgtgttgtccagttttccagaccaggactgaaatccagagagggtcaggaatttggccccatgatgaagccaaatctgaacccatgtcctcacttcaaggttatcaatcttggattgtgatgctattggtacttgagaataccccttatctgagtataaagaatccttgagttt

SEQ ID NO: 40104 - DNA, 586 bp, Homo Sapiens
atctgccaccgcagtctggttggagctgttgtcttgtatgctcagcgaggcccggagagacccgggagagagctaggccgagtccaccgcccgagtctgctgcccgagcccgcgttacgcacaaagccgccgatccccggcctggggtgagcagagcgaccaccgcccgggagcagcgcggcgagacgcacggtgcgccctatgcccccgcgcccccaccgcccccgccgcggcagccgaagcgcagcgagagaacgcgccaccgcggggcccgggtgcagctagcgaccctctcgccacctgcgcgcagcccgaggtgagcagtgagcggcgagcgggagggcagcgaggcgttcgcgggccccctcctgctgcccgggcccggcccgctcatggcggccatccgcaagaagctggtggtggtgggcgacggcgcgtgtggcaagacgtgcctgctgatcgtgttcagtaaggacgagttccccgaggtgtacgtgcccaccgtcttcgagaactatgtggccgacattgaggtggacggcaagcaggtggagctggcgctgtgggacacggcgggccaggagga

SEQ ID NO: 40105 - DNA, 539 bp, Homo Sapiens
ccggcgccctggctgggcggctcttctccacgcaggagcgcgccgccatgcagagccacatggagcgggcggtgtgggcggcccggcgggcagcagcgcggggcttgcgggccgtgggggccgtggtagtggacccggcctcggaccgcgtgctggccaccggccacgactgcagctgcgcggacaaccccctcctgcacgccgtcatggtgtgcgtggacctcgtggcgcgcggccagggccgcggcacctacgacttcagacccttccccgcctgctccttcgccccggccgctgccccccaggccgtccgcgcaggcgccgtgcgtaaactggacgcagacgaggacggcctcccctacctgtgcaccggctacgacctgtacgtgacccgcgagccctgcgccatgtgcgccatggccttggtgcacgcacgcatcctgcgcgtcttctacggtgcgccctcgcccgacggcgccctgggcacccgctttcgcatccacgcacgggccgacctcaaccaccgcttccaggtgttt

SEQ ID NO: 40106 - DNA, 678 bp, Homo Sapiens
tggtagtggacccggcctcggaccgcgtgctggccaccggccacgactgcagctgcgcggacaaccccctcctgcacgccgtcatggtgtgcgtggacctcgtggcgcgcggcagggccgcggcacctacgacttcagacccttccccgcctgctccttcgccccggccgctgccccccaggccgtccgcgcaggcgccgtgcgtaaactggacgcagacgaggacggcctcccctacctgtgcactggctacgacctgtacgtgacccgcgagccctgcgccatgtgcgccatggccctggtgcacgcacgcatcctgcgcgtcttctacggtgcgccctcgcccgacggcgccctgggcacccgcttccgcatccacgcacggcccgacctcaaccaccgcttccaggtgttccgcggggtgctggaggagcagtgccgctggctggacccccgacacgtaggcgccgccctcctgcctccggacccttcccgctcccggccgtggggcgcccctcctggacttccgggcctcggatttcttccgcacaagcctgaccgtggatttcagggacacataccgctccagcgggggagcacgggtgctgccttccgtgcggatcgagctttcctggactcggtcattggggccaccccgtgccaagcggttgcccttct

SEQ ID NO: 40107 - DNA, 144 bp, Homo Sapiens
cagatgactccaaggaagctcagatgcctgcagtcattaggttttagcgtcccatgagccttggtatcaagaggccacaagagtgggaccccaggggctcccctcccatcttgagctcttcctgaataaagcctcatacccctg

SEQ ID NO: 40108 - DNA, 761 bp, Homo Sapiens
  misc_feature (728)..(728): n is a, c, g, or t
  misc_feature (749)..(749): n is a, c, g, or t
gcggccgctcttacatcccacatccagtttgtcagaaaagcctattagagataccttgaaaatgcacccagaatctggccgtttcttggcacctccaccattgcccccggcctaagaagctctcttatcttgcatcttgggctggactcctacaacagccacaacttccctgctggtctcccagcttctagccttcccccatctcctgtcgttttcgacacagcagccagaaggatcctttaaaaacagaggttgatcctgtcgttcctcaaaatcctccaatgcttttcctactgcactcagagtaaaagccagtctctgccttagatgctctgggatcctgtaccctctttggtctcatgtcctacaatctgcattctggccataatggtcttctctgctgttccttgaacattccaggaacattccccccatcccctcgtggcctcaggactggctgcttcctttggtatgctattctgatacacactaagcaccctccctcacctgttataaaaaattcgctgggaggccaataggctgaaatggctcctgcactttgggttcctaagtcagcaaactgaaactcaactcagagtgaaagtgttgtgtgtaacctaggagcaggaaacttcagcttaaccagtcagaaactaccgactaacctctaacaagagatttatggtcagttaacctctaaatatgaactttccactctaaccaatcanatagtttctttgtcttgctcncagagacaccct

SEQ ID NO: 40109 - DNA, 688 bp, Homo Sapiens
actgcactccagcctgggcaacagagcaagaccccatctctaaataaatgttttaaaaataaaaataaatgttttggataaaaccccatattaataataagtattttacattattatctggcatagactgttatatatagcatattattgttgaaatacaaaacaatatgtatccgtactgtatgtgatatagtgccattttcagtaactgctgtacacacagcaactcagatgaaactcaaggaaattcttcagagcaaaaacagccaatcttgaaaacatacatgtagcaggattccatttatgtaacattggtgaaataatgtaattatagagatggaaaacagattaaaggttaccaggggtttaggttagggatggtgagggggtggttcatacgagggagtcctgtggtgttgaaaaccatctgtcagcctgactggtggttacacagggctatacatgaagttaaaattgtgtagagttaggtacacaaaggagtacagatgtaactggggaaactgagtatgttctgtagactgtaccaatgtcaatttctgcgtcctgatgctgtgctgtagtgtataaggtgttaacactgggggaggctggggcaagggtacccaggacctccctagacaaccctcctatgcaacctcctgtgaatctataattacttcaaaataaa

SEQ ID NO: 40110 - DNA, 635 bp, Homo Sapiens
gcagcttgaagtaggagacccagcgcccctaggagcagggaacctggggcctgaactcatcaaggaaagcaatgccaatcctatcttcatgcgcaaggacaccaagatgagtttccagtggcggattcgaaacctcccctatcctaaggatgtctatagtgtctctgtggaccagaaggagcgctgcatcattgtcagaacaaccaacaagaagtactacaagaagttctccattcctgatctagatagacaccagctacctctggatgacgccttgctgagctttgcccacgccaactgcaccctgatcatctcttaccagaagccaaaggaggttgtggtggccgagtctgagctacagaaggaactaaagaaggtgaagacagcccacagcaacgatggggactgcaagacccagtagttggcccctgagccttatacctccaccacagggggtgccgtgagacttcaaggcttggcccttcttgaccacggcagcctcctgtcttctaggagctatcaagggtctctaagaactgggcatggggcactcctagccagtgagtcatggtcatatttcctgagtaaagtcattctgagttacttactgcaaaaaaaaaaaaaaaaaaaaaagg

SEQ ID NO: 40111 - DNA, 652 bp, Homo Sapiens
  misc_feature (20)..(20): n is a, c, g, or t
  misc_feature (229)..(229): n is a, c, g, or t
cctgagggtactcactcggnggttgtccggcagcaccgaagggcaatggccgaattgaatataaacaaagaatatgacatctgttgggcctcacaaggaccagggccttctggaggagtggcactaccccacctggcagcacctagacctgagctctacaaaaacacactgcttcactttgttttaggacttagttcaagaacacattcaaatggtgcatgtgtttgtnacttttcaacagtagaccaagaatctaacatcactctcagtaatatagagaccggaatacatggtttataggaaatgatcaaatgatccaaaaaaactccacattttttaagaagttggaatttgatttcatgcataactgtattaaaacattaaatagaaataatgtcatttgaatgaaaatcttatcacattaaattcactgtgaagacagcatacttaaatttttattttgaaaagtctaaaaggcttagatttttaaaatttaataactatttctacaaattttctatttttcttgaggtgattctcaactagcaattggaactcctaggctctattaacataattctttattgtaaacgtatctaatgctaaaagtaataaaatggtagttttctgagacctgtgaaaaaaaaaaaaa

SEQ ID NO: 40112 - DNA, 451 bp, Homo Sapiens
ccgcacccagccttggttctccctttcttcatctggataaggaaggctggactgcaccttctctacaggctgagttggacattcgcagatctaccctcccaacctgcattctgcctcaagcagcaacgcccaccccaggctcaggccacatggagaagccacccctagttccagtggtggatgtggcacctcggcctggccaatcagagctcccttgtcctaggttcctagtgattggttcgagatggacacgtgacccaatgagcggcctttcctgggagttctaccaggagcatcaggaaggttgagctgggtgtatgggaaccaggccggggcgaggggttccaggggggacctgagaacattgcgtggagccctggatccaactgtacctgacactagccaatttcatttcttcagtttcatggacccctaaattatgatttttgcc

SEQ ID NO: 40113 - DNA, 420 bp, Homo Sapiens
cgcgtccggggggagctatggaagtgacccaaggctgcccactggagacgcctctccctgcagtcccccgagaggtgggagactcgcggaaggccccgtccccagcggagtccagaccccacaacttcaggagctctttcccggcagcagagatctgcaggctgcctcttctgccccggagctggggtgcactggggacccccgtggtggggaccttggcagtgtggacatgagcagagcgatggagcagtctcctgccctctcccctgtcctgatggcactctgttgtattttcttactgaagttcagtgataactctgagcagtttcattgtgatcactgtaaatggtaatcagttggaattctcctaaatgtcttccagacactagtaaaaaaagacctgaaaattgaaaaaaaaaa

SEQ ID NO: 40114 - DNA, 606 bp, Homo Sapiens
aatgggtagatatgattgaggatgcagcccatgagactgttcccattatgctggtaggaaacaaggctgacattcgtgacactgctgctacagagggacaaaaatgtgtcccagggcactttggagagaaactggccatgacgtatggggcattattctgtgaaacaagtgccaaagatggttctaacatagtggaggctgttctgcaccttgctcgagaagtgaaaaagagaactgacaaggatgacagcagatccattaccaatctaaccgggaccaattccaaaaagtcaccacagatgaagaattgttgcaatggctaaatcccaaacatccttggcctgtgaagtcttcatttccagaatactgaatttgtgtgacttatttggctcttaacagagtggcacatcctactgacactgtcctatggagagttacagtgcaggaaacctgaacccagctctcaggtccctctggaactttggctcttctttgttttgtctcagtgagtgatttgggccctctggctaaatagactagtcatgtccttacaggtcttaaaagataacatgtaaatgtttttaaaatggtaaaaaaaaaaaaaaa

SEQ ID NO: 40115 - DNA, 693 bp, Homo Sapiens
  misc_feature (654)..(654): n is a, c, g, or t
  misc_feature (682)..(682): n is a, c, g, or t
ggggcgtgcgttggggcctcagcctttatctccactctgcggagattcacgcctggaaaacgctcttctgagaggatctgtggaggtcaacccaggagagagaagacaggactgaagcactgaaagggtcctgccgttaagggcgcaggattgtatagaatatataatagcagtagcagctctgtttacggagcattaaccttacgtggagttatttcctgcatttcctcctttcgtctttacaaggtagccgtttggcgtcgtgagagattgggtctctccacattgccccggctgctctccaacccctgagttcaagtgattcacctcccttggcctcccaaagtactgggattacaggcgtgagccaccgtgcctggctgagaagatggatttaagacatattttggagcggaaagtgaccagaagaggtgtgcagtttccaggcctggcccatacagacctccaacaggtgctcccctgtgctgttactccttctgccaactggaagcagatggtgaccaggctctggagaggcaaggcctgaagatgggagattcctaagtggaggagaactgtgccttactgacctaatatccactcagtattgttatgtgagaataaataaactttgtgtgaccgttaaaaaaaaanaaaaaaaaaaaaaaaaaaaaaaaaaaanaaaaaaaaaaa

SEQ ID NO: 40116 - DNA, 1072 bp, Homo Sapiens
  misc_feature (714)..(714): n is a, c, g, or t
  misc_feature (718)..(718): n is a, c, g, or t
  misc_feature (793)..(794): n is a, c, g, or t
tcttgccatgctgctgctgctggtgctggccgctgtggggattgtggctggagggcttcttggctctgctcagggccctcccaagccaaggctgcagacgctgcgaatgaccctcccgagcccccacatgccccggcccaaccaaaccatcctggtggacgtggcccggaacgcggcgaccatcacagtgaccccacctcagagcaaccacagctgggcggtgctgttcgacgggcagagcggctgcatctgttaccgccctgaggagcaccaggtctgcttcctccgcctgatggaggacagtgatcgggagaccctgcggctgctggtggatacctccaaggtccaagaggcttgggtccccagccaggacacccaccacacccaggagctgctggcagtgcaggggagcctcgaagtggaccccgcccaggcgggggctttggtgcagcgcctgtgcatgaggacccccatctactgggcccggcgagcagaggcggcccggagacagcggctgatttatctctgcatcgacatctgcttcccgagcaacatctgcgtgtcagtctgcttttattacctcccagactgagcccccgacctggcccagcctggcccgtccccaatccagtgggctggccaggccacctgcaccagggaggacagctgctggcagggactaatacacccttccacctgggcaaagaaaaaggngcanaggaaaaaaaaacggcccccgaacaacaaacggacgcgggggcgagcgcagccggcagcacagaaaaccaaaccnnggggggggggccgcctttaaaaaattccccccggggggcccccgattacaccggcacccggtttttttttggccaaagggggccccccaaaaggggggcctaaatttaacttttacgccttgtggcccccctttttaacaccctccgccccggggaaaaaccgggaaaacatggcgcacatttttcgaggaagccccccccatccggggggggggccgtcatttactggaaccgccctattctcaccgaggttagaggccctccgggggggaataaaa

SEQ ID NO: 40117 - DNA, 961 bp, Homo Sapiens
attctcctgcctcagccacggcaccttgcaaatatcagctccttggaacaggtgaagttccaggtaccaatgccaatcagaggaaggcagtttggttcaggctttggagttagaaacacctgaagttgaatctgggctctgttgcttccttctttcatgggctagagcacgactctttacctctctcttggcctcaatttcctcacctgtaaaatagatgaggaagctgctcacttattattgtctcgttctgaaagcttggaaagctacatcgaagatgagctcttcattcagctttgatttgacctgtacccctggtgggggattgcactggcaacatttgggtctcagcaaaaaaaccaagcacacacatctttccttccatttattgaaaaacatctttgtaagatccattcattgaaaaacataatccatttattgaaaaatatctttgtaagatcacctgctaaatatgaaaatctgacttgaatttgtactctttaaagttgcgtatctgctctagtgggcaggacctagggcttaaaggggaacttcctttctccatttctaagaactgggactctaaaatgagaagctggttgtctgaagtaaccctgcaggtgtggttgggggaaaggcctgttttcttggatgaagggaactaaactaagcatatcaaacgccctggtcttaacccagtttttatttcccctggaagattagaaattccttttaaaaaggagctaggggaagctgggtaaatagggaaagtgccctttcctttataacctacctttttggcaaaagcttccataatttataatacaaagcctcccctaaggggaatacacctggtttagccttggcaaacattttccctatggctttcatattttttccttgggtggcctttccaagaacaggccagggaaacacgcgtttaaataatacgggggctact

SEQ ID NO: 40118 - DNA, 499 bp, Homo Sapiens
cccaagtttcctgacttcttccatcctctggaaatcagctgtgtttgctgaggataatggcctcaagatccatctgtgttcctacaaaagagatgatcttgttcttttttatgattgcacatcttttgttctaacgtttggtccttcaccttggttcctgacagaaggattcctaaatcccttggaattttctgcatgataggagcgtcctttgttctcatgaggtgactcttggtgggctccttatttggggactggtcaccaaaaatacctaactatggttggaagcttagtgctttcagccccattccccatcctctggggtggggagcagagctggagctcgatcatgcctgcgtgacaaagcctccagaaaaatccttgaaagacaggacatggagagctgctgggttggcgaacacatccatgtgccgggaggatggtgcaccccaactccacaaggacccttccagacctcaccctgtgtatctcttcatct

SEQ ID NO: 40119 - DNA, 209 bp, Homo Sapiens
cttagtgcctctgggccctcctgggcccaagggcctactgggagatgcagtcccttccccactgccccttaggtcagatgctgctgagcgggggtccccggggcccggtcccccagccgggcctgcagcccagcgtcatggaggacgacatcctcatggatctcatctgaatccccaacacccaataaagttcctttttaacacaagaa

SEQ ID NO: 40120 - DNA, 856 bp, Homo Sapiens
ccgggatcgcccggatcgcccgctttcgcacccagttcacgcgccacagctaggtgtccccgagccgcgcgcgcgcccgcgacgctactcctcgccctgggcgcggtgctgtggmctgcggctggcgcctgggagcttacgattttgcacaccaacgacgtgcacagccggctggagcagaccagcgaggactccagcaagtgcgtcaacgccagccgctgcatgggtggcgtggctcggctcttcaccaaggttcagcagatccgccgcgccgaacccaacgtgctgctgctggacgccggcgaccagtaccagggcactatctggttcaccgtgtacaagggcgccgaggtggcgcacttcatgaacgccctgcgctacgatgccatggcactgggaaatcatgaatttkataatggtgtggaaggactgatcgagccactcctcaaagaggccaaatttccaattctgagtgcaaacattaaagcaaaggggccactagcatctcaaatatcaggactttatttgccatataaagttcttcctgttggtgatgaagttgtgggaatcgttggatacacttccaaagaaaccccttttctctcaaatccagggacaaatttaktgtttgaagatgaaatcactgcattacaacctgaagtagataagttaaaaactctaaatgtgaacaaaattattgcactgggacattcgggttttgaaatggataaactcatcgctcagaaagtgaggggtgtggacgtcgtggtgggaggacactccaacacatttctttwcacaggcaatccaccttycaaagaggtgcctgctgggaagtacccattcawagwcactt

SEQ ID NO: 40121 - DNA, 797 bp, Homo Sapiens
agcgcccaggcctgcttttcctaccagacctgccttcagccccctttgtgccgcgggacgcccagcggcacgacgtggagctcctggagagcagcttccctgccattttgcgggacttcggggctgtgagctgggacttctcagggactacccctccgcctcggggctggtccccacctctggcccccgggtgctaccagctcctgctgtaccaagcaggccggtgccaacccagcaactgccgccggtgcccgggggcctatcgggcactgagggggcttcgaagctttatgagtgccaacaccttcggcaatgccggcttttccgttctcctgcctggggcccggctcgagggccgctgtgggcccaccaatgcccgggtcagatgccatctgggcctaaagatccctcctggctgtgagctggtggtcggcggtgagccccagtgctgggctgaggggcactgtctactggtggacgactcttttctacacacagtggctcacaatggctcccccgaagatgggcctcgagtggtcttcatcgtggacctctggcaccccaacgtggcaggggctgagcgccaggccctcgactttgtcttcgccccagacccttgaaggaaggtgctcccttcacacacccaggctggagagacactgcgctcaggcacggcttgatggtagccaggacctcctctctactgcgggggtgggcggggcggaggatgggaactggctagtgagcactgaaatataaattctgaatcctctcctaagaacaacaaaacacaacaa

SEQ ID NO: 40122 - DNA, 804 bp, Homo Sapiens
  misc_feature (619)..(619): n is a, c, g, or t
  misc_feature (742)..(745): n is a, c, g, or t
ggcgctggctgcgcaggtgtgagcagcagcagcgggcgcaggcgaccagggagagctggctgcaggagcgggagcgggagtgccagtcgcaggaggagctgctgctgcggagccggggcgagctggacctccagctccaggagtaccagcacagcctggagcggctgagggagggccagcgcctggtggagagggagcaggcgaggatgcgggcccagcagagcctgctgggccactggaagcacggccggcagaggagcctgcccgcggtgctccttccgggtggccccgaggtaatggaacttaatcgatctgagagtttatgtcatgaaaactcattcttcatcaatgaagctttagtacaaatgtcatttaacactttcaacaaactgaatccatcagttatccatcaggatgccacttaccctacaactcaatctcattctgacttggtgaggactagtgaacatcaagtagacctcaaggtggacccttctcagccttcgaatgtcagtcacaaactgtggacagccgctggttccggccatcagatacttcctttccatgaaagcagcaaggattcttgtaaaaatggtaattaacactttaaacatcatcntgtatagtttgaacaagaagttgtcccctctgaatggttggctcttggtgtagagtgaatcaaagtcctccctagcatggggaataaatcgggtactggatgaagcctggaaaaaaaaacaannnnaaaggggcgggcccgctctaaaggaatccccttcgagggggcccaaagcttacgccgta

SEQ ID NO: 40123 - DNA, 623 bp, Homo Sapiens
gtccgcagggcagccgcgtgctctaccacttcctcagcagccagcaactggagaacatctggtggcagcgggacggccgcctgctcgtcagctgtcactctgacggcagctactgccagtggcccgtgtccagcgaagcccagcaaccagagcccctccgcagcctcgtgccttacggtccctttccttgcaaagcgattaccagaatcctctggctgaccactaggcaggggttgcccttcaccatcttccagggtggcatgccacgggccagctacggggaccgccactgcatctcagtgatccacgatggccagcagacggccttcgacttcacctcccgtgtcatcggcttcactgtcctcacagaggcagaccctgcagccacctttgacgacccctatgccctggtggtgctggctgaggaggagctggtggtgattgacctgcagacagcaggctggccaccggtccagctgccctacctggcttctctgcactgttccgccatcacctgctctcaccacgtctccaacatcccgctgaagctgtgggagcggatcattgccgccggcagccggcagaacgcacacttctccctgcgtgtgcctcccgccgagcgg

SEQ ID NO: 40124 - DNA, 504 bp, Homo Sapiens
agagaagtgtcaatatcctttttaacctgactcatcgaggtgagactagagttgtcacagcccaccgtggccactaacgtgtctttgtttcacagactgtgtgatcaagtaaatgtgctgtagatctttgcctcattcacagcggaggtgagagttagaatttatacctattgttcatgccacgtttctcctcatggatgcacgcatcccctattatttgttttttttaataatgtcacgagcaccaatgagcttactacccaacttcaaaactaggactctaacaataacttctgtcatatctcatcctgtaacgcccccaccttcgctccttccgccaagataattatcactttaaattgtgtgcgtgtgtattctcatttcttatgtgatggtaaaaatgcctttattttgtttggttttaatgcatagaaaggacatcaagctgtatgtaataattcagtaattatgtttatataatattaaattgctaatatttgccca

SEQ ID NO: 40125 - DNA, 534 bp, Homo Sapiens
cccacgcgtccgcggacgcgtgggcttctacaacgagtaccctggcggctccagtgagctggacaagatcatcaacgggggcgagctcttcctcaccgtgctcctcaatcctgtgagtgctccacagcccatggctgctggtgagaaggggctgctgcacagcctgtctgcagctgacacaggcttcctggagccaggaaagggtggagaggcatgagtgagtgcctggcagttgggagacccactctccagcactggccctgcctcggctgtgtgaccttggctaaagaatccgagcatgctttttttttcctttcctaatcatgtactttaatacaaaagtgttggcatttttatgcatgttcccttcagtctttgctcatgtgtgtatacacacatacacagatacacacacatatatgaacaacatttgagttttctaggtctcgctttccttatttgtaaaatgcaaacaattacctctgctttaataatattaaataaacttcaagtggtggttgtttaaaaaaaaaa

SEQ ID NO: 40126 - DNA, 546 bp, Homo Sapiens
gcacgagaacaaacattatttctgactgcaatttttttcccccaaatttaaagcaatccctggctttaaatgacaaggcacctaccaatgttcttgggtcactgaagaagctactaccatgagcctgggcatagaattttaggagataaaaggatgaatttctgtgactgccagtcagatcttaacaggtttctgttgagccagaatctgtttcagatccaagatggagaggaacactatggaaacttcccaggtgactttcagagcagttgtttcaaacacatcattgtccttttaggggaaccagtttttagaaggttgtgaattggctttttcacaaagcatgattatcttcctggctgatccaggagaaaattacaacagaaaaataatggttgtggattttgaaacaaagcaaggtaaagcctttttttttttcaccttgcattggcaaaactacctcttcagtgtttttaacttttgattcaaaagcatcttaccaataaggataaatatcatatacatcgttatgaaaatattgctatg

SEQ ID NO: 40127 - DNA, 583 bp, Homo Sapiens
ataaacagtatcagatagtagaaagagtaatagctgtgaagacaagtaaatctacattgggtcaaacagattttccagctcatagtcggaagccggcaccctcaaatgagcccgaatatctatgtaaatggatgggactcccctattcagagtgtagctgggaagatgaagccctcattggaaagaaattccagaattgcattgacagcttccacagtaggaacaactcaaaaaccatcccaacaagagaatgcaaggccctgaagcagagaccacgatttgtagctttaaagaaacaacctgcatatttaggaggggagaatctggaacttcgagattatcagctagaaggtctaaactggctagctcattcctggtgcaagtaggtagaaaaatatgagtgcaattttccttactgtttctggcttctttattgttagatgtcaagaattttttttttttcttttttcacacccttattgtatctcaaccaagaaatctttatgctgcatattacagaaataaaagatgattgagagaaatgcttcctgggagtttttatgtatgtgtaataccattttat

SEQ ID NO: 40128 - DNA, 859 bp, Homo Sapiens
ctctctctctcttcctttcttctctctctcctgtctcggctgttgtgggttgcaggttgggtgctgctgttgtggtccttcccagaaactgccagtagagggcagcctgggcatcctaatgcttactctggttgttacacaaagaaaatattggggtcactggcgagcccacccacactcaccagaatctccactgtagtccccctaacaaacagcccttcacttcctcttccacttcagcaatttgtattttgatgccattggcctcagatcagagtgttttaaatcatcacgccctggcttatccctggtcgagccaggacacggggtgcttcagtgggtctgtcaccctctctccttgaagcatgttgcttttatttatttacttttactctcaccctgctcctgtaccagcaggggccacttcaaagccaaggtacagggtgataacttgtggtccagcatcagttttctccacttctttctcccactcacccccagcaaggtgcctggggagacttgagcagatgtttcattttggcctggccagtggctgaaagccaggcctccaatgcactgtgacctctggcttccccagcagctttcccagagaggcagaggggccttccacagcccgggttctcctgctgcctcctgcctgctgcagctgcaggcattctgaggggcaacgtggaggaagggccagggatgcatgggattttaattgtttcatcacaccttccccgtggcaaagaaacagtcagtcctcttcaggtgtcttctggatttctggtgatggacagagaaatctttttacagtttcaaatttatgttcacaaataaaaattgcatttttttt

SEQ ID NO: 40129 - DNA, 408 bp, Homo Sapiens
ttttttttttgagactgagtctctctctccagcctgggcaacagagtgagactccatctcgaaaaacaaacaaacaaacaaaaaacagaatggcacattgatgagcattcattgattgattctttagtttttttatgttctctaaagaatttttaagatttaaagaagcatgtgctatttatttgtaggaaatcctcagaaaaggtacaaataaaaaataaaaattatccataattaataccagagattataattgttaattattatggtgttttctttgctagtatttaagatcattattaagatcacatacacatttttgcttactatcattagcatttgatgatatgatttttttaatttttatacattgttttaatggctgcacgatatttcattgtgtacaaa

SEQ ID NO: 40130 - DNA, 631 bp, Homo Sapiens
cgcgtccgacatcatcgaattcattcaggagagaaaccctttgaatgtaatgagtgtggaaaagccttctctcggatgtcatacctcactgtacattatagaactcattcaggagagaaaccctatgagtgtactgaatgtggaaaaaaattctaccacaaatcagcattcaacagccatcagagaattcataggagaggcaatatgaatgtaatagatgtgggaaggcttctctgaagtcagacctcattttatatcagagaaccctttcagtatagtgaatcagaaactcctgcctgaagtcaaacaccttgtacatcagagagttcacacaggttagtgtggacatccccttgtgtgttggactcataatctgaagactcacagaatggaaaccatgattataacaagaccacatggtataacaatactagactatagacaagtaaaaatttataaatattaagaatgtatatacatgtcaccatggattggaactgttttgcatatcagggaaatcatagccaaggggaaatctatcagtataaggaatgtggaagacataatcctttggaaactgttaatactaaaagatatgtttctgatacaatagcaaacttgaaaaaaaaaa

SEQ ID NO: 40131 - DNA, 456 bp, Homo Sapiens
tttttttttttttttttcctcttttcatgataataatgttaaacctgacagctaaattgccaatacatactatgaataagatcttggtcttggaataaggtcatattcttcctttctaaggggaaacccgtaggatttttgtgcatccaatttgcagttcagttcagttaattatgccattgtagaccttccgtttgaggcttgcaaaattgtatattatccataaagcagccaccatgattttttaaaattatcattgaagccattcaccggagatgtcagcgtctgttggactccgctcacatcgagacaagaccgccacctgtcagaacagccactgcttctccacatttgatcctggctcggagcaatgcctgtctatatctttaaaagagaaaaaaaataaaatgacttgaattgttaaaaaaaaaaaaaaaaaaaaaaaagccctcgtgc

SEQ ID NO: 40132 - DNA, 555 bp, Homo Sapiens
atctaaacatttttctttcttttttcagggacaataattttgactatttggagtttcgcctttggattggcctgtggtccgccttcctatgtctcattttggtagccactgatgccagcttcttggttcaatacttcacacgtttcacggaggagggcttttcctctctgattagcttcatctttatctatgatgctttcaagaagatgatcaagcttgcagattactaccccatcaactccaacttcaaagtgggctacaacactctcttttcctgtacctgtgtgccacctgacccaggtgagggcattacgctttgtgtttatgctcgctttgtatttggaggaaggtgtaggctccatgcttgcaaattttcaacatgctgtcatggtcctcaggaattagtcttgtttttttctctgaaaaactctgctactgaatttgatgtctcattgcctgaggtattttagctgtatgattcaaccaggaaggagaccaggagctctggaatgtgaacataaccaactcaatattttgaaattaactcaaactgtg

SEQ ID NO: 40133 - DNA, 602 bp, Homo Sapiens
gtcaaaatgcatagacctaaagaagctgttctttcatgcagtcaagctctgaagatcgtagataatcttggtgcgtctggtaacagtctttatcagaggaatctttgtcttcatttgaaagcagaggctttgattaaactctcagattatgactcttcagaggaagcaattcgtacgcttgatcagatttctgatgcagataatatcccaggacttttggttctcaaaagcttggcctatcggaacaaaggttcatttgatgaagctgcaaagattatggaagaccttctctcttcttaccctgacctagctgaagttcatgcccttgaggctttgattcatttcaccaaaaaggactatctacaagcagaaaaatgttttcagagagctcttgagaaagataccgaagttgcagaatatcattaccaacttggattaacatactggttcatgggtgaagagacaagaaaagataaaacaaaggctcttacccactttctgaaggctgcaagactggatacatatatgggcaaagttttctgctatttaggtcattattatagagacgtagtgggagataaaaacagagctcgtggatgtta

SEQ ID NO: 40134 - DNA, 689 bp, Homo Sapiens
  misc_feature (680)..(680): n is a, c, g, or t
  misc_feature (683)..(684): n is a, c, g, or t
  misc_feature (686)..(686): n is a, c, g, or t
  misc_feature (688)..(689): n is a, c, g, or t
gaccggaccgaaggagtagaaagaattctctactgaggcccagctgttcctctccttgaaaagtcaaggcttggttcaagccagatagcacctgaggacagaacatatcaggagccaagttacaccctgtttaaccctgccttcaaagggacgactctgtaagattctctgctacttattcaagttgacacgatgcccttcacactccacctgaggtcccgccttccctctgccataaggagtttgattctacaaaagaaaccaaacatcagaaatacatccagcatggctggagagctccgaccagccagcctggtggtcctgcccaggtcccttgctccagcttttgaaagattctgccaggtcaacactggtcctctacccctgctgggccagagtgagccagaaaagtggatgctgccccctcaaggtgctatctcagagaccagcctcagggaccttcacagtgcctggcacagaacctcactcatgactgttgctcaggaacgagctgccctccccactgttctgactccttcccctatcacctggcgcctgtcctggctgagatctttgagatcatggagaaagtccagccctggagaaatcccactggctctgccatctgtccactccatcgcccaagccagaaacccgcctgtacaggattaagaaaaaanaannanann

SEQ ID NO: 40135 - DNA, 1055 bp, Homo Sapiens
  misc_feature (836)..(836): n is a, c, g, or t
  misc_feature (938)..(938): n is a, c, g, or t
  misc_feature (989)..(989): n is a, c, g, or t
  misc_feature (996)..(996): n is a, c, g, or t
ctgctgtggagctggtcgcaggcggtgtgtgccggtcgcctagtcaggagaactagtcctcgactcacggtgagggaatggaccgacacgggtattgtaccgctgagggaaaggagcgggactccggacctccaggaggtagggagtgaggccagtaggaccggcgcgcctccggggggattcctcccgggcgttgagttgccaacctgggacccgaggaagatcggcgtggtggtgtgctttttgttgttgttaaccctcctcggatttctcgaatttcacaccactgtccatatgcgatgatgtttgtttgcccttgacgcacttactcatggatggtacttcttcagcctcgttagacagcctggtgatggaggatgaagaaaccatgtgcttttcattcagttctggacttagtctcccttttcttccttcagcaagttatttttgttagttccttatcaaaaagtgtacataaaaattaggcaactccaaacatgcctccagggttaatgtgtgaaataataagataatatatgtaaagtggaattagctcctaggcatagggaaagtgcagaatattgccgtgttgtcatttacagttctgttgatgtcgataacgtttgtgggtgtaattggtagtgttctgtccctccaaggagttaataaaacaaagcaaacataggcctgttaggtttctgtggctactgaatatttgtttctcaaacacttgactgatatttgataattgaatgcagcagaaatacggacgattaaagtccacaaataatttccaaagtttactttgatctagtaggtttttaccctttaccctnaggggtaaagcacgaataaattacccggaagggatctactttggggttttcccttttcctttcacattttgtgggactccctggggggatcccagggaagtnaatttcagaaaatggactggttccaaaaggcccatggcaaaagccccgggncgccggntggggttaaccgcctttggttaatcccccagcggcgttttgggggaaaggcccaaaagg

SEQ ID NO: 40136 - DNA, 471 bp, Homo Sapiens
cgggtttatgtgaaacgaagcatcatagatattttccctggctctgatagcattttttataaagcagggccaaatttaatctactgaaggacttgtctccctcctctgtgtgccttttgatcactcagcaatcaccaaggcggcctcttgatcggcattcccctgcagcgtgcgggaccgcaggggctgtgtttcatgtacttgtcagtgcttgttagcacctgcctgcctgaacatcatcaatgcccaataattgtttgtttcagtgctgaataaatgaatgaatgaatgcttacatttgtgtagcagttctattttttttcctccattcatcataacagcttgtgaagttgagtagagctagaattgaggctcagagaacttgtgacttgcctgcggtcagattttcagtgggagagctggtctggagcttgtgtttgccagctgcaagtccattttattcctgctcta

SEQ ID NO: 40137 - DNA, 455 bp, Homo Sapiens
ttcggcacgaggctgatgtcagtcatttcaggctaggccagtgtcagagcagtccctgaagcagaagtggatggaaagaggtgaatgatttctaatattcaacattcattaatttaacatcaactatgttaagggtaatgatatagcagttaaccaagaccaacatggtgtctgcttggttgatgcttgaaataaggtgacctggccccagccacccgggtcgcaggagctgaaagggctgtaacaagtaggcagtgaatagtcttcaaacttgttacttgcatacctccctacaaattttggaaaaaccatgagactctgattgattttttaaaagaatatctaaaatcattatgtttaaatagcctcaaaagaagcattttattatgtattgtaaatattggcattttaaaatgttattcggtcttttaaatgtatccagtgaaatgttggta

SEQ ID NO: 40138 - DNA, 735 bp, Homo Sapiens
  misc_feature (714)..(714): n is a, c, g, or t
acaaaaggggctgcatcgtaatccgatacacagccccgtggcacatggtcttcttctccgagtcactgggtatcccttcacttcgtgttttggcccagaagctgctcgagctgctctttgattatgagattgagaaggagcccctgctcttccatgtcttcagcaacggtggcgtcatgctgtaccgctacgtgctggagctcctgcagacccgtcgcttctgccgcctgcgtgtggtgggcaccatctttgacagcgctcctggtgacagcaacctggtaggggctctgcgggccctggcagccatcctggagcgccgggccgccatgctgcgcctgttgctgctggtggcctttgccctggtggtcgtcctgttccacgtcctgcttgctcccatcacagccctcttccacacccacttctatgacaggctacaggacgcgggctctcgctggcccgagctctacctctactcgagggctgacgaagtagtcctggccagagacatagaacgcatggtggaggcacgcctggcacgccgggtcctggcgcgttctgtggatttcgtgtcatctgcacacgtcagccacctccgtgactaccctacttactacacaagcctctgtgtcgacttcatgcgcaactgcgtccgctgctgagggcattgctccatctcacctctgctcccagaaataatgcctgacacctccccanaaaaaaaaaaaaaaaaaatgg

SEQ ID NO: 40139 - DNA, 1654 bp, Homo Sapiens
gcctgtgggaaaaagggaaattttcattacgttcagggtgcagaaaagccctgtgtttccggaggacggcgcagacatccactccgacctctttatttctatagctcaggctcttcttgggggaacagccagagcccagggcctgtacgagacgatcaacgtgacgatcccccctgggactcagacagaccagaagattcggatgggtgggaaaggcatcccccggattaacagctacggctacggagaccactacatccacattcaagataccggagttccaaagaggctaacgagccggcagcagagcctgatcctgagctacgccgaggacgagacagatgtggaggggacggtgaacggcgtcaccctcaccagctctggaaaaagatccactggaaactaggccgggaagcagcagcccctccaagggccagggcacctgggagacgggaggattccagaacagcagcactgagctcccacccgcagagcctctggacggccttggcaacagcaaaatcatgggacaacacctctctccacggaaaggtcacagtggacagcccgggcagtaggatgcagccccagaggctggtggcagtttcctgtccattggtaggtgacggcccctggctcaggcagagggagatggttagactcttgcagggctaaaactctaatttggaattgaatattgtggatatcttagttaaaggccatgcttacagcttagaaatgaagccttaagctgcatcaagttacgaagtgattaatttccttctcagcaaacctccgggaggttccagaatgagttcttcctgacaggttgtcttcactgggagcgtggggcccccaggccccaccagcaccgtcctcccctaatgaggggccctgccgaggcatcagctgctctgctcagttagtttttattcccggggtaccaagcagctgcacagtcggtgcctgggaggcacgtagaggcccagagagtccctgggggttctgctctgaccgtgtgggtggtgatccttgtcaggatgtacagtccttgctcccaccccatccaggatggccgcctgtccctgactattgagtcctgttgttgtaagccaggcatggagggctcctgcccttctgctgagccacagcccattgcagcactgtgctggccagacttcagctgccttgggaactgaagccctgccactgttgctagtcaggggcttggttctcccacttacactgttgacatctattttctgaagtgtgtttaaattattcagtgctaatcattgttttttcctttgtaaatgttgattcagaaaaggaaagcacaggctaagcagttgaaggttccccaccattcagtgagagcagaacccccattccccagcctctgctggtagcatgtcgcagtttccatgtgtttcaggatcttcgggctgtcgttagacaggttaatgaagaacacttctcaacagtttcctttttgttttcctttataattcactaaaataaagcatctattagtgtctgatttaggaatgtaaaatgattctgtattaatgtaaataagattatctattgcaaaaagatatttcaaacctaaaaaaaaaaaaaaaaaaaaattcctgcggccgcaagggaattc

SEQ ID NO: 40140 - DNA, 766 bp, Homo Sapiens
aaataaggaaactggggccattacaatgtaccgagaaggaaggaagaaggccaacctgcaggatctcaagcataatggatacaagggctcgccacgggccttgcctgagccatgtgcagagctggggtccagcggtctgcttccttggagccagtgtggatggttacagcccatccatttggtgcagttgtacttggtctgttatattcaatcaaggtttaatagatagggctgggcatggtggctcatgcacacctgtaatcctagcactttgggaggctgaggcgggaggattgcttgagcctcggagttccaggctggagtacaccaactactccagcctgagcgacagagtaagaccttatcttttaaaaaagaaaagaaaaatttaaacgggtttgatagatataaatttggacccaagagcccttccttttttttaatcctgaggttttatgctgaggaaatttctttcaaatctggaaaacctcggggccaggcgcagtggctcacgcctgtaattccagcacttgggaggccaaggcaggcggttcacgaggtcaggagatcgagaccatcctggctaacacagtgaaactccgtctctactaaaaatacaaaaaactagctgggcgtggtggtgggcgcctataagtcccagctactcaggaggctgaggcaggagaatggcatgaacccaggaggcggagcttgcagtgagccgaggtcacgccatgcactcagctgggcacagagcagatcatcc

SEQ ID NO: 40141 - DNA, 1066 bp, Homo Sapiens
gaagcagtttgaacaggggaagatccagctgctcatcagcacggacgccaccgcgcgaggcatcgacgtgcagggtgtggagctggtggtgaactacgacgccccccagtacctgagaacctacgtgcaccgggttgggaggacagctcgcgctgggaaaactggacaggccttcacactgctcctgaaagtgcaggagaggagattcctccgaatgctaactgaagctggggcacctgagttgcagcggcacgagctctccagcaagctgctgcagccgctggttcctcggtacgaggaggccctgtcccagctggaggagtctgtcaaggaagagcgcaagcagagggcggcctaggctggggctcagagggccggagggactgaacgctcaccaccctgaccctccttccagagcagtgctgatcactggatcctgtatgtgaggaaaggaatcccccagtggacacagccttcctccccaagcacgtggtctctgcgccaggcagcccgggcgtcagagctcaagcacctgccccgactggagacttcagggcttgtcactttcagagtgtggaggtcaggatggctgcgggcaatgaagccttagtaaaacggtgaaaagtactcccagacggacgcgggcacccgtcatgcttttgctgagagttgggggcattaaccttgagctaatgttaaaaatcaagctcttggccaggcatggtggctcatgcctgtaattccagcactttgggaggcccaggcgggtggatcacctgaagtcaccagttcgagaccagccctgaccacatggagagaccctgtctctactaaaaatacaaaattagcccaggcgtgggtggtgcatgcccggtaatccagctactttgggaggcttgagcaagaaaatggccttgaacccgggaaagggggaggttccatggaactgaaaattgccccactggccttccagccgggggaacaagaaacaaaattccgtttcaaaaaaaaaaaatttcccgggccccggtggcccaaggcctggaatccccccccctttggggag

SEQ ID NO: 40142 - DNA, 833 bp, Homo Sapiens
cgggatagacacgctgtggcggctgcctgaagctagtgagtcgcggcgccgcgcacttgtggttgggtcagtgccgcgcgccgctcggtcgttaccgcgaggcgctggtggccttcaggctggacggcgcgggtcagccctggtttgccggcttctgggtctttgaacagccgcgatgtcgatcttcacccccaccaaccagatccgcctaaccaatgtggccgtggtacggatgaagcgcgccaggaagcgcttcgaaatcgcctgctacagaaacaaggtcgtcggctggcggagcggcttggaaaaagaccttgatgaagttctgcagacccactcagtgtttgtaaatgtttcctaaggtcaggttgccaagaaggaagatctcatcagtgcgtttggaacagatgaccaaactgaaatctattttgactaaaggagaagttcaagtatcagataaagacacacacaactggagcagatgtttagggacattgcaattattgtggcagacaaatgtgtgactcctgaaacaaagagaccatacaccgtgatccttattgagagagccatgaaggacatccactatttggtgaaaaccaacaggagtacaaaacagcaggctttggaagtgataaagcagttaaaagagaaaatgaagatagaacgtgctcacatgaggcttcagttcatccttccagtgaatgaaggcaagaagctgaaagaaaagctcaagccactgatcaaggtcatagaaagtaaagattatggccaacagttagaaatcgtatgtctgattgacctgggctgcttccgagaaattgatgagctaa

SEQ ID NO: 40143 - DNA, 1046 bp, Homo Sapiens
  misc_feature (1004)..(1004): n is a, c, g, or t
gagtcgcagcgctttgctcgtgaccctgggatcagagcacccatcaggcttccattactgtgggctccctaagaagaccatggagagcttggggactcccccaggaaggccgtgaagctggggattccccctaggaaagccatgaggaagctggggactccccaagaaggccatgaggaagccagaaattggaggtggtaggaagtggtactgatcaatgatggccagcaggactcatctcctgcctaactggacaggaagcctggcacccacttctgtcttcccctggaactgggcactggcgtacactggtatccctcctaaagaagtgactcacctgactgatcagcaagaagcctagattgcaggcctcaccatggatggtcttcctagttgcctggggaaaccctggaatgggcatcaggagaaagcaacaagaatccagtccttcccactcacactactctgttcctcttcccagagacatcgatttcactttcaaagagctggaagggaagatgcagtcagcaactgccctgcatttttttattttattggcctagggggccatttaaaagacccaaaacctaaaaagccttaaagggccatttccgaaaataatggggggtggcgggctgggtggaaagggaaccaaaagtggaaagaagatggggggaattcccaggggggcttcaagggggttcgaacacgcccttctcccccttggagaattcacccaaagcccccaatgggggatgggctgggggaaacattctcggggcgaagactttcaatcccggggggggtcctgggggctataaaagcttgatataactttgtcacccaggttcaccccaatccttcttcaccctttgtggggacctggggggaaagaaatcaccccccatcttctattctcttctcgggaaaagaatgaccagggaattttccctctctatacgggagacacggcgcgaaaggggggtttccactatctcaaactncgggatgaccatccgagataaaatctctgtggtcggcgttcg

SEQ ID NO: 40144 - DNA, 882 bp, Homo Sapiens
cttctatatcagcatccacaaccgtttggccaccagtgtggtggaagataatttttccacgaaaaatggggtcaggagggaatgctttcagaggcattagattctcattaggagaccacaacctagatccttcgcatctgcacttcacaatagggttcctgctcttttgagaatccaatgccactgctgatctgacaggaggcagagctcaggcgttaatgcttgttggttggcctgcttgcctcctgctgtgcggccctgttcctaccaggccaggaccagtaccccggtccatggatgggggttgaaaaaccttgttctatatgacctaaaaggaggtcatcactctacactcttgattttgcaatggatgttcaatattcccagtaaacttaagatatatcaatccaaatgaatattgatcaatcagatgagaaacatctttgtgctactgttagaagtatatacttttagcccagatcctagcctccagttttaaccctccatttgcataggaaatcaggatccctgggcctatgggtttctgtattcagttaggaaattacctatctctggaaataaactttttaggactatcttgttgatatttgattccacagaagacggtgatggttattagtgaaaagaacttctctggtgtttccctctttctagaatatattcattcaggttcatgtggttatgcttcctgggggtcaagcttagatcaatgacattgctttttgatattttcttatgggaatttgcaatcttcggtgggcaatacctaaaaatctggggtggatatccttcaaagtatggggggaaatacattaaaaaggtttccgaaggggaataaggttaaaaagagaccctaagggg

SEQ ID NO: 40145 - DNA, 989 bp, Homo Sapiens
  misc_feature (92)..(92): n is a, c, g, or t
tcagctcctttgaataaacctgcccaccaccaagaacccatacatgactttcttttcattgtatcaaagtaatgtgtccaccggtgtgagcnccagcaactcacttcttcctcagacatctctaaagctggaaagattttgagggacaatatggtttccttcaccccacaccaatgttatgaatgagaccagcagaccaacagcaaacacctagaaggaacagctgttcttcatgggtgactgctgtgaaaccaacaggatggcctcttttctatttaatcctaagagtgggcataaggtaaaatattgggtaggtcctttggagttctagactcagtttgagattacagaagatatgctcaacatcctcctttgacctggtcccagtttcaccatatttgctagatgctttatagtctctggtaaggaggtgtacaattctctgattttatttcagtttttagggaattttattttgttcatttcaacaagaaaaattacataaacaggtaacagctccactcaaagctgttttaaatgaacaaaatattggactttgtgaacaaatatgatactttttctttctgcaattattggctagcaatcttattttactaaatctatactgacaaatttaatttggtccatttatttgagtttaaagactatttcaaactctccccagtgaaacagttatgggccattgctatcctcaaaagaactaaatatataaatagcagctttcctcaaaaaagatgataaagtcttcttttccctttagagcataaatttcagtggcaggtaaaactattttagcaacaatatgctcacttcttccatgatatgtttttcttccctactaagttgaaagttttctcagttccatagccactcacaagttttctctmctaactgragtdgcctcytctgckggtattaggmattactttagatgattctgttcagcycytgtttgaggaggtttaatt

SEQ ID NO: 40146 - DNA, 537 bp, Homo Sapiens
tattggctagcaatcttattttactaaatctatactgacaaatttaatttggtccatttatttgagtttaaagactatttcaaactctccccagtgaaacagtcatgggccattgctatcctcaaaagaactaaatatataaatagcagctttcctcaaaaaagatgataaagtcttcttttccctttagagcataaatttcagtggcaggtaaaactattttagcaacaatatgctcacttcttccatgatatgtttttcttccctactaagttgaaagtttttctcagtttccatagccactcacaagtttttctctacctaactgaagttgccctcttctgctggtcattaagacattaacttttagaatgatttctgtttcagcctcttgttttgaaggcaggcttttaatttcctcagagaaattgcaatggaacgaaaatttgttctctcttttacatatgtacacttgtataagagatgtaatgtttttaaataaaatttttaattcatgcaaaaaaaaaaaaaaaaaaa

SEQ ID NO: 40147 - DNA, 837 bp, Homo Sapiens
agcggactgcagcactctggttctgcctaattggcctgatatgccaagccctgtgctctgaagacggccacaagagaaggatccttactctgggcctgggatttctcgttatcccatttctccccgcgagtaacctgttcttccgagtgggcttcgtggtcgcagagcgtgtcctctacctccccagcgttgggtactgtgtgctgctgactttggattcggagccctgagcaaacataccaagaaaaagaaactcattgccgctgtcgtgctgggaatcttattcatcaacacgctgagatgtgtgctgcgcagcggcgagtggcggagtgaggaacagcttttcagaagtgctctgtctgtgtgtcccctcaatgctaaggttcactacaacattggcaaaaacctggctgataaaggcaaccagacagctgccgtcagatactaccgggaagctgtaagattaaatcccaagtatgttcatgccatgaataatcttggaaatatcttaaaagaaaggaatgagctacaggaagctgaggagctgctgtctttggctgttcaaatacagccagactttgccgctgcgtggatgaatctaggcatagtgcagaatagcctgaaacggtttgaagcagcagagcaaagttaccggacagcaattaaacacagaaggaaatacccagactgttactacaacctcgggcgtctggtaagcgcggggtgccctgtgcctgtggaaggaaagatgggttatttacttatttataataaaatgacatagtgagaccaactagccataccttttattaaagtctttcacatgtttctatctag

SEQ ID NO: 40148 - DNA, 582 bp, Homo Sapiens
ggtcgcggagcgtgtcctctacctccccagcattgggtactgtgtgctgctgacttttggattcggagccctgagcaaacataccaagaaaaagaaactcattgccgctgtcgtgctgggaatcttattcatcaacacgctgagatgtgtgctgcgcagcggcgagtggcggagtgaggaacagcttttcagaagtgctctgtctgtgtgtcccctcaatgctaaggttcactacaacattggcaaaaacctggctgataaaggcaaccagacagctgccatcagatactaccgggaagctgtaagattaaatcccaagtatgttcatgccatgaataatcttggaaatatcttaaaagaaaggaatgagctacaggaagctgaggagctgctgtctttggctgttcaaatacagccagactttgccgctgcgtggatgaatctaggcatagtgcagaatagcctgaaacggtttgaagcagcagagcaaagttaccggacagcaattaaacacagaaggaaatacccagactgttactacaacctcgggcgtctgtatgcagatctcaatcgccacgtgga

SEQ ID NO: 40149 - DNA, 1051 bp, Homo Sapiens
  misc_feature (936)..(936): n is a, c, g, or t
  misc_feature (956)..(957): n is a, c, g, or t
  misc_feature (980)..(980): n is a, c, g, or t
  misc_feature (983)..(983): n is a, c, g, or t
cgggagcagcagcgtggacgcggctggcgctggcgccatgaacccgctgtaaggcgcaggctgtgcagcacggggtgcgggggaggaggaggaggacgccgcggtgaagttctccgccatgaacctgaggggcctcttccaggacttcaacccgagtaaattcctcatctatgcctgtctgctgctgttctctgtgctgctggcccttcgtttggatggcatcatacagtggagttactgggctgtctttgctccaatatggctgtggaagttaatggtcattgttggagcctcagttggaactggagtctgggcacgaaatcctcaatatcgagcagaaggagaaacgtgtgtggagtttaaagccatgttgattgcagtgggcatccacttgctcttgttgatgtttgaagttctggtctgtgacagaatcgagagaggaagccatttctggctcctggtcttcatgccgctgttctttgtttccccggtgtctgttgcagcttgcgtttggggctttcgacatgacaggtcactagagttagaaatcctgtgttctgtcaacattctccagtttatattcattgccttaagactggacaagatcatccactggccctggcttgtatgtaacttttaaaatccttaaataaagttcttttttattataaaagtaattcatattcactgtacaaagcttggaaaagacggacaagcagaagtaatagcctaatagtcacccataatcccaccatggggagataacatggttagtgtttttatgtctgtgttttatacaaacagtttggatataactgtgtgcaccattttgtatccctgatttttttggttttaatggtgtatcataaacattttatcatgtttaataaaaggtctttataaaaaaaaaaaaaaaagggcgggccgctctaaaantatcccctcgagggggcccnnagcttacgcgttacccagctttnttnttggtacaagtgggccccccctattaggggagggccgtaattattaagcctagggaaacttggcccgg

SEQ ID NO: 40150 - DNA, 492 bp, Homo Sapiens
agggaagcagttagacggctgccgggcggcggctgccgcgcggcacacaatatttatttaattgcccaactaccactgatgaagatatattggagtgactgctgaaattgcctttttgtttttaaccagaggacagtccatttgtttcacttctttttgctttccttactgctatgagctttactgaacggctgaaaaacttggaaaataaaatggacatgctgtagtcttgaacataatttttttaaggaaaacttaaagtgccagagtgaaagccagaatggcatccagagagaggctctttgaactttggatgctttattgtacaaagaaagatccagattacctgaagctgtggttggacacttttgtttctagctatgaacaatttttagacgttgactttgaaaagctgcctaccagggtagatgatatgcctccaggaatatctctgcttcctgataatattctgcaggttctgaggatccagct

SEQ ID NO: 40151 - DNA, 752 bp, Homo Sapiens
gtcattctacttaattaacttagtcataaggacaaagccttagtatatttktgcsacatacatgtdatgtataaatktdactgttgaataatacaagtattcattgctgactgarttcttaaractttgggaatagaaaaracacatttatkaatggatgctaaagtgattcctgagaaaaataatgtgtatggttaatatggaaaacctttggtaatgtgatttgggtataagartactaaaaccagagtacagggtgtgaatcatgtaccaggagggattttatttttaaatatctttattgaggtataattgaratacaataaactgtacatatttrargtacccaatctgataagttttgtcatatkyatacagccattaaatcatcacyataagyawtgtwatgaacatattcatcactctcaaagtttcatagtacctctttgtgatcccttcttacttaatcctycttgccaccccaccatcaccagaccactgatctgctttctttatgatcagtttgctacaaatgaaatcacataatatgaaccttttttggtctagcttttgtcacttagcatagtaattttgtgatttgtctatattgttgcawttatgaataartcatttatctgctgctgagtagaactgcattttatgaatatatcaakttgtttatkcttttgatgatggrcwttaatakttctaggctwttatgaataaagtttccatgaacaaccwatgtaaaa

SEQ ID NO: 40152 - DNA, 583 bp, Homo Sapiens
catccacagctgtgaaacaagttgtcaagaatctgaacgaacgatataaattctgcatcaccatgtgcaagaaacttacagaaaagctgaatcgattcttctctgacaaacagaggtttattgatgaaatcaacagtgtgactgcagagaaactcatctataattgtgctgtagaaatggttcagtctgcagccctggatgagatgtttcagcagaccgaagatattgtttatcgctatcataaggcagcccttcttttggaaggcctaagtaggattctacaggaccctgcagatattgaaaatgtgcataaatataaatgtagtattgagagaagactgtcggcgctctgccatagcaccgcaaccgtgtgagcagcaggctcatcccgtggaccggtggtgggaacgtgaggaagaggggaaggaaggaagagcttttccatttggtgctccaatgtctcctgctggacccatctgcctagtggaaggcagcaaaatttcaagaaacaggtgaggttgagcagcttggtgcaaccccatggggccctggagttggagctcaacagcaatggatttcagag

SEQ ID NO: 40153 - DNA, 876 bp, Homo Sapiens
  misc_feature (564)..(564): n is a, c, g, or t
gcactcgctcttttcattcacgaaggtagtgaggcctagtggaaagccatggagagcgctctccccgccgcggttcctgtactgggtcggcgcgggcaccgtggcctacctagccctgcgtatttcgtactcgctcttcacggccctccggtctgggggagtggggaatgaggcgggggtcggcccgggctcggagaatgggcagttgtcacaggtagtactgatggaattggaaaatcatatgcagaagagttagcaaagcatggaatgaaggtggtccttatcagcagatcaaaggataaacttgaccaggtttccagtgaaataagcaattatacttgagacctgaattacaatatggcaaagactcttaactaacttctactcaatcaaccagatggataaaccaatgctgttcatttgttgtggtaaaacatactaactgatgtccccagttttgctgaccatttgtggccaggaagcttctgtgtataatgcttatatacttttatcctccacaaatcaaatgtgtttacttatttaagagtcaattgtgtgtttgtntccaaacttatgttgggtatactttttattaatattctgtgaaaatgatgaactattagtgtaaaggctagagtaagtcctataaactaagtgaatgtctaaaaagtgggtgaatcctcttgaaattggcggaattttggtgcagagcagtgacttgggggacttcaaagaattgggccgtggtaatgtcgagggggggttaaagaggccaagcaaatggggggcaaaagggcgggcaaaggggccgggggagtattttggtggagggaaaaaaagggcgttgggggggggtagggatggtgcagacggagt

SEQ ID NO: 40154 - DNA, 372 bp, Homo Sapiens
gagcccgcggcggaccctcccgcgccccctctcgctctgcctctccctctgcctctgcctctgcctggccgcggctctgggaagtgcgcagtccgctcttgcccctgttctttgcttctcgttttgttggtgaagatatcacagggatgtctgcattcaacctgctgcatttggtgacaaagagccagccagtagcccttcgagcctgtgggcttccctcagggtcgtgtagggataaaaagaactgtaaggtggtcttttcccagcaggaactgaggaagcggctaacacccctgcagtaccatgtcactcaggagaaagggaccgaaagtgcctttgaaggagaatacacacatcacaaagatcctggaa

SEQ ID NO: 40155 - DNA, 591 bp, Homo Sapiens
  misc_feature (393)..(393): n is a, c, g, or t
ggcacgagagaatacacacatcacaaagatcctggaatatataaatgtgttgtttgtggaactccattgtttaagtcagaaaccaaatttgactccggttcaggttggccttcattccacgatgtgatcaattctgaggcaatcacattcacagatgacttttcctatgggatgcacagggtggaaacaagctgctctcagtgtggtgctcaccttgggcacatttttgatgatgggcctcgtccaactgggaaaagatactgcataaattcggctgccttgtcttttacacctgcggatagcagtggcaccgccgagggaggcagtggggtcgccagcccggcccaggcagacaaagcggagctctagagtaatggagagtgatggaaacanaggtgtactttaatgcacagcttattaaaaaaatcaaaattgttatcttaatagatatattttttcaaaaactataagggcagttttgtgctattgatattttttcttcttttgcttaaacagaagccctggccatccatgtattttgcaattgactagatcaagaactgtttatagctttagcaaatggagacagct

SEQ ID NO: 40156 - DNA, 779 bp, Homo Sapiens
taatgtccctgcctgggatttgatgattcttacatgctatggaacttgatctttatcagtaaaacaatctgtggttgagtcaagtagtaaagcaaatgtacttcctaaagatcaggaccaaagattgccagggagcactacagaaaaaaatagtgaaactagttctctaatggacatagaaaatgtaattctggcaaaaatccatgaagatgatgaagaccactcagatgcaatattaaaatctgacaaatttcatcaggacttattttttatggaacgggttctgatggaaaatatatttcagcccaaacttgcagcttatcgtcagcttcctgttttaaatgaacctgaacctgaagagcctgaagatgttttagaaagtgcaaaacatgaagaggtagaggaagaatctaagaaggaggaggaagaagaaatacatgcagaagaatcaacaatacccgccaacttggaacgactttggtctttttcctgtgacttaaccaaaggcctcaatgtgagcagccttgcctggaataaaacaaatccggatcttttggctgttggctatgggcactttggatttaaagagcaaaaaagaggactggcttgctgctggtcaataaagaatcccatggtaacccaaacaagaataagaagcatttttatctggctgttgacaaaattctcataaaatatataattacatgtaataattaaataaaggctagaaaactgtaaaaaaagaaaaaaaaaatggcctccttgccctcagcggtggg

SEQ ID NO: 40157 - DNA, 760 bp, Homo Sapiens
aggcataatgtccactgcctgggatttgtatgattcttacaatgctatggaacttgtatctttatcagtaaaacaatctgtggttgagtcaagtagtaaagcaaatgtacttcctaaagatcaggaccaaagattgccagggagcactacagaaaaaaatagtgaaactagttctctaatggacatagaaaatgtaattctggcaaaaatccatgaagatgaggaagaccactcagatgcaatattaaaatctgacaaatttcatcaggacttattttttatggaacgggttctgatggaaaatatatttcagcccaaacttgcagcttatcgtcagcttcctgttttaaaagaacctgaacctgaagagcctgaagatgttttagaaagtgcaaaacatgaagaggtagaggaagaatctaagaaggaggaggaagaagaaatacatgcagaagaatcaacaatacccgccaacttggaacgactttggtctttttcctgtgacttaaccaaaggcctcaatgtgaacagccttgcctggaataaaacaaatccagatcttttggctggtggctatgggcactttggatttaaagagcaaaaaagaggactggcttgctgctggtcaataaagaatcccatggtaacccaaacaagaataagaagcatttttatctggctgttgacaaaattctcataagatatataactacatggaataattaaataaagtctagaaaattttataaaaaaaaaaaaa

SEQ ID NO: 40158 - DNA, 541 bp, Homo Sapiens
cgtatcggccattatggccggggaggaatccttatcaatcatcaatgaaaaagtaccttttagtgatacaaaatatagtcagtacaacgctctgaacgttccactccacaataggagacaccagctgaagatgcgagatattgctgggcaggccctggcttttgttcaggatcttgtgacggctcttctaaactttcatacctacacagaacagaggattcaaatttttcctgttgattctgccattgacactatatctccattgaatcagaagttctcacaataccttcatgaaaatgcgtcctatgtccgccctcttgaggaaggaatgcttcatttatttgaaagtatcactgaggatactgtgactgtcttggggacaactgtgaaattgaaaactttttcagaacacttaacctcctacatatgttttcttaggaagattcttccctatcagttaaaaagtttagaagaagaatgtgaatcctctctttgcacatctgcgttaagagccaggaatctatagctgtcccaggacatg

SEQ ID NO: 40159 - DNA, 864 bp, Homo Sapiens
ggctttcaatgcaaaggttagtgatccacttattggaggaacatacatgacccttttaaataccgtgtccaatctgggaggaaactggccttctacagtagctctttggcttgtagatcccctcacagtaaaagagtgtgtaggagcatcaaaccagaattgtcgaacacctgatgctgttgagctttgcaaaaaactgggtggctcatgtgttacagccctggatggttattatgtggagtccattatttgtgttttcattggatttggttggtggttctttcttggtccaaaatttaaaaagttacaggatgaaggatcatcttcgtggaaatgcaaaaggaacaattaatatatatgctactggacattctagcaaggtaattgtagtttagttttaattcggagagcaatgataatcagtgcacaggagtataaaatattattttaaacagcgaaattaataatataaaatgccaaatggttgaaaaaatagaaacctttctgtatatttgatcatatttttttttggccttgtcaatgtatttaaagtttacttaaggtcaggaaattctaaaacaacttttctggcctgtgtaatttgatgtatatcttttaaatttactgaccaaagcatgttttaagctgcaagtgcagtagtcacgggtggtaaccatgtagtcaggtatggtaattagtacctatcactgctgagcgtgtatttaaaacttttggtacatatttaacatggagaagaggtgatattcaggtactaacaaactagtctggcattgttggcagttaaaatcttattgggaattgtaaattaggtcaatttactgtgggaattggtgagaaaggaat

SEQ ID NO: 40160 - DNA, 949 bp, Homo Sapiens
  misc_feature (772)..(772): n is a, c, g, or t
  misc_feature (868)..(868): n is a, c, g, or t
  misc_feature (915)..(915): n is a, c, g, or t
tggcctggatgagtctgacctcgacaaggtcttccacttgcccaccaccactttcatcgggggacaggaatcagcacttcctctgcgggagatcatccgtcggctggagatggcctactgccagcatattggggtggagttcatgttcatcaatgacctggagcagtgccagtggatccggcagaagtttgagacccctgggatcatgcagttcacaaatgaggagaaacggaccctgctggccaggcttgtgcggtccaccaggtttgaggagttcctacagcggaagtggtcctctgagaagcgctttggtctagaaggctgcgaggtactgatccctgccctcaagaccatcattgacaagtctagtgagaatggcgtggactacgtgatcatgggcatgccacacagagggcggctgaacgtgcttgcaaatgtcatcaggaaggagctggaacagatcttctgtcaattcgattcaaagctggaggcagctgatgagggctccggagatgtgaagtaccacctgggcatgtatcaccgcaggatcaatcgtgtcaccgacaggaacattaccttgtccttggtggccaacccttcccaccttgaggccgctgaccccgtggtgatgggcaagaccaaagccgaacagttttactgtggcgacactgaagggaaaaaggtaaggcccaaagagaggcgtgcaaggcagatcgtcaaggccccatgttccagcatggagttccgctcaccacataaccagagcccctgngtgcatctagactttaaaaaatatttaaagtcgggcggggcgcagtgtctcaccgcctgtaatcccagccacttttgggaagcccgaggtgggccnaatcccttgaaattccggggagttgggaaaaccagccctgaaccaancatgggaggaaacttcccatcttctaacttaaac

SEQ ID NO: 40161 - DNA, 582 bp, Homo Sapiens
tggcccatgcacagtccctggtagaagcacagcccaacgtggacgagctcgtggaggaccacctggcagtgcagtcgctcatcagggcatatcaggtcaggggtcaccacattgcaaaacttgatcctctcggaattagttgtgtaaattttgatgatgctccagtaactgtttcttcaaacgtggggttctatggcctggatgagtctgacctcgacaaggtcttccacttgcccaccaccactttcatcgggggacaggaatcagcacttcctctgcgggagatcatccgtcggctggagggctccggagatgtgaagtaccacctgggcatgtatcaccgcaggatcaatcgtgtcaccgacaggaacattaccttgtccttggtggccaacccttcccaccttgaggccgctgaccccgtggtgatgggcaagaccaaagccgaacagttttactgtggcgacactgaagggaaaaaggtcatgtccatcctgttgcatggggatgctgcatttgctggccagggcattgtgtacgagaccttccacctcagcgacctgccatcctacacaactcatg

SEQ ID NO: 40162 - DNA, 669 bp, Homo Sapiens
cagcgaactgtaaccaggggaagagactaaataacagagcccctctaggagaagccacgggatcccggcggcaaggagaacagaacactgaagactctagaaaagcaaagccggatttctggaaagtgcagaattcttttggttctttggttccagagagagagaagatgcttgtgccaggtggcaccagagtttgccaattgatccttcttattctgtgtgtacatgcaaagattggaccatgttacatgaaatagtgccagctggaggttctttgccagcaccatgccaagtgaaataatatatttactctctctattatacaccagtgtgtgcctgcagcagcctccacagccacgatgggtttgtttctgttttcttgggtggggagcagggacgggcggagggaggagagcaggtttcagatccttacttgccgagccgtttgtttaggtagagaagacaagtccaaagagtgtgtgggctttcctgtttctaaactttcgctactataaaaccaaaaaaaggaattgagatttcaccaaccccagtgcccagaagagggaaggggagtggctggagggagcaggggtgggacagtgtatcaaataagcagtatttaatcacctctggcgggggcctcgtgcaagggagactgacaccaagaac

SEQ ID NO: 40163 - DNA, 514 bp, Homo Sapiens
ttaacttgtacttattttgcttgaagcatcacttgaaaaggtttactcctattcataatttaattgtaattataataaaccatatcattttattaaaagtcaaaacaataaaaaattttgcacttcacagttataagcacaaataggttccagcaaccaaaattgaagaaatcttgaactttgaccgtctttacctaaagattaggttaaaatttgagtgagaacgcattctctctgcatgatttctctgctctacaaatgttttaactgcctctttgaaggtggagaagtcatggtagcgtttgaaatcatcacagacatgttacataccttttccttgagtatacgctccccaaaattgtttcacaaaaagaatgaaaataattttatgtttttggcctgctatttatatcttggctttctgaacatatattaaatttgacaagaaactgtattttatgttccattagccttagtatgtgttttcaaaatatttattttaaaatgttgactc

SEQ ID NO: 40164 - DNA, 1100 bp, Homo Sapiens
aggcagaatccagtatctcctccaccagtaatgagcagctaaaggtcactcaagaaccaagagcaaagaaaggacgacgtaatcaaagtgtggagcccaaaaaggaagaaccagagcctgaaacagaagcagtaagttctagccaggaaatacccacgatgcctcagcccatcgaaaaagtctccgtgtcaactcagacaaagaagttaagtgcctcttcaccaagaatgctgcatcggagcacccagaccacaaacgacggcgtgtgtcagagcatgtgccatgacaaatacaccaagatcttcaatgacttcaaagaccggatgaagtcggaccacaagcgggagacagagcgtgttgtccgagaagctctggagaagctgcgttctgaaatggaagaagaaaagagacaagctgtaaataaagctgtagccaacatgcagggtgagatggacagaaaatgtaagcaagtaaaggaaaagtgtaaggaggaatttgtagaagaaatcaagaagctggcaacacagcacaagcaactgatttctcagaccaagaagaagcagtggtgctacaactgtgaggaggaggccatgtaccactgctgctggaacacatcctactgctccatcaagtgccagcagggagcactggcacgcggagcacaagcgcactgcggcggcaaagatgaagttggccttccggagtaccagatgaataatctttagaacagggggattggggtcaagaaggcagatgtgtacaaatgggtgacaattgggacagagttaaacaattgtggaaaaaatggagagaagaaaaatctggtaagaccacccaagaatcagggggggaaaaaaaaagaacagggggggcaagtataaaaaaataatgagagaaatgatggatatcgacagatgaaaactaataggatcaagaagatgaaagaaacaaattaatagacgaaacagagccaacaaacagagtgacaagtgaaaacgggaacaaaaaacaaacgataaagagacgtcgactcagaagatcgagtagaaagatggatacatagtctttccttgtatctttgtgtatttattatcgtctgc

SEQ ID NO: 40165 - DNA, 828 bp, Homo Sapiens
  misc_feature (496)..(496): n is a, c, g, or t
gacttttgtataaatcatcgactgactgcttgattcaggctgttcaaggtgaaggattcatgagtctatataaaggctttttaccatcttggctgagaatgtgatctggtcggatctcacaaggccatccaatgagaccccgcacagcattttctaaagaagaatcgaagcctgaccactttcaccttgggcaagaaggtttggcctttgagttgctattctatgctgaagagcctgcttagaggaggagtaccaggagggagccagcatttcagatctgaagtagacgataggaatgtggaagaacacatacatagtgcttaagaaatacatttaacctgttatgtcagtatttatcaatgaagtttgataattcacttttctgtcattgttaaagcgtacatactgtaaattaaagggaggtgaatggaaattaatgaataaacattttgagtttccctagtgttgaaggaaggtgtactttttcttgtcaganagataaaaaaaatcaagttgagatgatgtttgaatttcaagaaaagaggctgctttctgtcagtgccctctcattagatctgtgttaattagttagcactccactgcacatgctaatgacttcctctgacagccacacaccgaatcttgatgaaaaaagagaagagcatttgccttggttacataagtctggttacaagcccagaatatgtttgcctagccttctcaaaggagtttgtaaatattatttaaaggaaccttaccaacctttaattttgtgaatttaaaaaaccttccagccctgggtaaataagaattcccctttttttttaa

SEQ ID NO: 40166 - DNA, 914 bp, Homo Sapiens
gctattaggtgactatagaacacgtggtacaaaaagcaggctgggtaccgggtccggaattcccgggatatcgcgattatagtcatagaaacctcaaatatttgtgttaagtgatcttcctggagtaagagaaaaagaaaatcttgtccaagcctttaagacagcactgccttctctggaactaaaattacaattgaagtaaaataatgtgtcttatttcagtataaaggatcatttgaaactgttgattccaaacatcaactaatattatatagtcatcagtagaattataaggatgccatatcatgacattttagaagtggagagtgcatcatatgtagaaaataaatattcagacgtggctcattaatgttactaagttggaagtgagaatttatgaacattaattcattttaagaaaagtgcagccaggcgcggtggctcatgcctgtaatcctagcactttgggaggccaaggcgggcggatcacctgaggtcgggagttcaagaccaaccatggccaacatggtgaaaccccgtctctactagaggaacaaagttagctgggtgtggtggtgcacgcctttgatcccagctactctggaggctgaggcaggagaatcacttgacttgggaggtggaggttgcagggacccgagattgtgccactgcactccagcctgggtgacagagcgagactgtctcaaaaaaaaaagacataaaacggaacaatgtgaaacctaggtaacttttgaatctctaagtatatccacttgaagtatgtaactctatagatatctcctggatgtcagaatatttagcaactccttacaggttctgggtcccacaagatgttctcattattacgagtatttcacatttaacctttaaaggttgggaaagcatactaccat

SEQ ID NO: 40167 - DNA, 462 bp, Homo Sapiens
ttgagaaccagtggaacttaacttctaatccacgtatccttgattattcaaagaaaaacaaaacacggtcaacaggcagtggaactcctcactccaatgtgatattcctgagagaatattgacttatcgtcacttcgtctctgggacaagtattgaacataggggaagccttatataaaattgttcaataaacaaaagatgtctttaacatgtgtttgagatctttcttctcatgattccatgttaggtacaacaactatgaccgggctgtcatcaataccgttccttatgatgtcgtccatcgctggtatacagcacaccggactctaacgatagagttgaggagacctgagaatgagttttgggtcaaactaaagcctggcagggtgggtcctaatctctaaagatgtcaagcaagcttgtaatactgaagcagtgaagaacgggtacttacttaatatg

SEQ ID NO: 40168 - DNA, 591 bp, Homo Sapiens
atgctggccctcaccttggcaaaggcagattctcccaggactgcactcctctgctctgcctggctgctcactgcctccttctctgcccagcagcacaagggcagtttgcaggttcaccagacactctctgtggaaatggaccaagtattgaaggctctcagctttccaaagaaaaaggctgcactactctcagctgccatcttatgcttcctgcggacagccctgcgacaaagcttttcctctgccctggtagccctggtgccctcaggggcccagccactgccagccaccaaggacactgtcctagctccactgcgaatgtcgcaagtccggtccctggtcattgggctgcagaacctcctggtgcagaaggaccctctattgtcccaggcctgtgttggctgcctggaggccttgcttgactacctggatgcccggagcccagacattgctctccacgtggcctcccagccttggaatcggtttttgctgtttaccctcttggatgctggagagaattccttcctcagacctgagattttgaggctcatgaccctgctccagagcatgggacacctggctgaccacagc

SEQ ID NO: 40169 - DNA, 738 bp, Homo Sapiens
atagtaatagggtttatctctggctaccaaactcctactggcctttcgcctgtgaaagcaggaacatgccagccaaactgctcaagaaatctgccagcgtacagggcttcttcctgaaccattacctttctaagtatcaagcagccatgagccacttgctcgagatgtgtgtgagcggagacctggtttgtgaggtggaccttggagatctgtctccagagggcaggtttactggcctggagtccatattccgtgctgtcaattatatgtacatgggaaaaaacactggaaaaattgtagttgaattacctcactctgtcaacagtaagctgtaaaaacagaacaatgacataaatcaagggcagaacagacaaatgggcactttatgtctcagaattactcaaatcaatttatttttagttggtaactggactataatatttcttaaaacaaaagtaaggtgttaactgaataggtctctccttctcctcctcctcctcctcttcccttggggaaaacaaacaaattgtgctattaaaacttccctccagtggctaagagggaaaacgcttacattcaattctttagtcagtggatggtctcgtcccagatgttatggttccaggcaactaaattcattcctgatgccagatctgatcgagtcagtatgtcttcagcttgatcaagatcttaaaatcagttttgaaagtggttcccgactatcttggctttgggaga

SEQ ID NO: 40170 - DNA, 713 bp, Homo Sapiens
agaaagcaaatgtgacctgtgtcactacgtgactgtggcacacgccttgttcttggccaaagaccaaattccttggcatgccttccagcaccctgcaaaatgagaccctcgtggccttccccagcctcttctagagccgtgatgcctccctgttgaagctctggtgacaccagcctttctcccaggccaggctccttcctgtcttcctgcattcacccagacagctccctctgcctgaaccttccatctcgccacccctccttccttgaccagcagatcccagctcacgtcacacttggttgggtcctcacatctttcacacttccaccagcctgcactactccctcaaagcacacgtcatgtttcttcatccggcagcctggatgttttttccctgtttaatgattgacgtacttagcagctatctctcagtgaactgtgagggtaaaggctatacttgtcttgttcaccttgggatgatgcctcatgatatgtcagggcgtgggacatctagtaggtgcttgacataatttcactgaattaatgacagagccagtgggaagatacagaaaaagaggggctgggctgggcgcggtggttcacgcctgtaatcccagcactttgggaggccaaggagggtggatcacctgaggtcaggagttagaggccagcctggcgaaaccccatctctactaaaaatacaaaatccaggg

SEQ ID NO: 40171 - DNA, 251 bp, Homo Sapiens
  misc_feature (100)..(100): n is a, c, g, or t
ctaaatatataaaaagacttataaaaactagaattttatccaaacattttgtgcaactaatgctaaaatattttaagttaaattttctttttcttttttnttttttttttaaagcaaaataagtttaaaagggaatctgtggcattcaaccgataaacagaagatcactaagagatgaaaaaaagctactcttggagctcacttcccccaacaagagcaccacattcctaacccctaaggcagcacacaga

SEQ ID NO: 40172 - DNA, 914 bp, Homo Sapiens
ggaattggaacagaaggaccacatgtgggccttgttcaagccagtgaacatcccaaaatagaattttacttgaaaaactttacatcagccaaagatgttttgtttgccataaaggaagtaggtttcagagggggtaattccaatacaggaaaagccttgaagcatactgctcagaaattcttcacggtagatgctggagtaagaaaagggatccccaaagtggtggtggtatttattgatggttggccttctgatgacatcgaggaagcaggcattgtggccagagagtttggtgtcaatgtatttatagtttctgtggccaagcctatccctgaagaactggggatggttcaggatgtcacatttgttgacaaggctgtctgtcggaataatggcttcttctcttaccacatgcccaactggtttggcaccacaaaatacgtaaagcctctggtacagaagctgtgcagtcatgaacaaatgatgtgcagcaagacctgttataactcagtgaacattgcctttctaattgatggctccagcagtgttggagatagcaatttccgcctcatgcttgaatttgtttccaacatagccaagacttttgaaatctcggacattggtgccaagatagctgctgtacagtttacttatgatcagcgcacggagttcagtttcactgactatagcaccaaagagaatgtcctagctgtcatcagaaacatccgctatatgagtggtggaacagctactggtgatgccatttccttcactgttagaaatgtgtttggccctataagggagagccccaacaagaacttcctagtaattgtcacagatgggcagtcctatgatgatgtccaggccctgcagctgctgcacatgatgcaggaatcactatcttctctgttggt

SEQ ID NO: 40173 - DNA, 965 bp, Homo Sapiens
ctttgtcagaatgtaaacaggtgtctgataaagctgtttctctccagcgaaagcttcggaaagaacagtcattgcattatggttcggttcttcttataactgaattaccagaggatggttgtactgaagaagatgtgagaaaattatttcaaccatttgggaaagtgaatgatgtcctaattgttccatatagaaaagaggcttacctagaaatggaatttaaagaggcaattactgcaattatgaagtacattgaaacaacacctcttacgataaaaggaaaaagtgtgaaaatatgtgttccaggaaagaaaaaagcacagaacaaagaggtgaagaaaaagactttagagtcaaagaaagtatctgcatctaccttaaaaagagatgcagatgcttcaaaagctgttgaaattgttacttcaacttctgctgccaaaactggacaagccaaggcatctgtagccaaagtaaacaaatctacagggaaatcagcaagttctgtaaaatctgtggtaacggtagctgttaaaggtaataaagcttcaatcaaaacagcaaaatctggtggaaagaagtctctagaagccaaamagactgggaatgtcaaaaacaaagactctaacaaacctgtgactataccagaaaactctgaaataaagaccagtattgaagtcaaagccactgaaaactgtgctaaagaagctatttctgatgctgctttggaggccacagagaatgaaccacttaacaaggaaacagaagaaatgtgtgtgatgcttgtctctaatttgcctaataaaggatattctgtagaagaagtttatgamttagcaaaacaatttkggkgggttaaaggrtatmttgattttatcatctcataaaaaggcatatatagaaataaatargaaagctgctgagtctatggtaaaatttatwccygcytcccagtattgrtggrtgga

SEQ ID NO: 40174 - DNA, 787 bp, Homo Sapiens
agcgggtgattgtaagaggacatttggtgccaaagaagacatgtataggataaacacagatgcacaacaaatggaaatactagcagaattggagctctgccgaagattatacaaattgcattttcaattgctgcttctgttccaggcctactgtaaacttatcaaccaagtaaatacgataaaaaatgaagcagaggtcatcaacatgtcagaggaacttgcccaactggaaagtatcctcaaagaagctgagtccgcttccgaaaacgaagaaattgacatttccaaagctgcacaaactactatagaaactgccattcattctttaattgaaactttgaaaaataaagaatttatatcagctgtagcacaagtcaaagctttcagatctctctggcccagtgatatctttggcagttgtgaagatgaccctgtacagacactgttacatatatatttccatcatcagacgctgggccagacaggaagctttgcagttataggctctaacctggacatgtcagaagccaactacaaactgatggaacttaatctggaaataagagagtctctacgcatggtgcaatcataccaacttctagcacaggccaaaccaatgggaaatatggtgagcactggattctgagacacttcaggccttttaggaaagaaactaaactgaagatgatgaagaatattaaccaagcaccttttaatggacccttgcttcactgataactttctggcagcatctactttttagtgtaactaatgtcaactgtatcct

SEQ ID NO: 40175 - DNA, 312 bp, Homo Sapiens
  misc_feature (2)..(2): n is a, c, g, or t
  misc_feature (59)..(59): n is a, c, g, or t
  misc_feature (67)..(67): n is a, c, g, or t
  misc_feature (269)..(269): n is a, c, g, or t
tnataacttgcctaattgctatgctgaaagagactgcaggagaaataggcatctatctntgcatctnttttccccaccatgcctttggagttgccaagatggaagccaagaaggatctagaagaacaaagaatatggtagtagatgagccacagccaggtgcccatgtactaatcatgataacctgacatgccattctcaaaatgctgagttgttaatttcttgtcatctttaaatatatatatataggctgggcttggtggctcacanctgtaattccagcactttgggaggctgaggtgggtggtcattt

SEQ ID NO: 40176 - DNA, 713 bp, Homo Sapiens
  misc_feature (403)..(403): n is a, c, g, or t
caaggctggagatagaagcttctaaaacgattagagggaacggttcctggtgctcacacagggccaggaacagtgccagttcctatcagcacaccagaaaactcgtagttcacgggcactgagtagcgtactcaggaaaatctttgcctcattagcagaaaatatttagcccttgactgggtgctgctccacacccaccttacaaatcatgaaagcaagacccaaaggggtcaaactctttccaactaacttaactgcatcccaggataaagccctagaaaatgggtagaaataaacaaaaaaagagcacctaacaatataaattcacaatgtctggcatccagtcaaatatgcatgcaaaaagataggaaagcagtgacccataatggaggaaaataatcanatgaagatgacctagaatgtgacacagatgttagaataagcatggaaggactttaaaacatttattatgagtgtattctgtaaagaggtacatagagacccagatcaaagttttaaaacgcatgaaaaaatgtggattaaggcgaagaatgcacgtggatggggattaatagtggattaaatattaccaaaagaaaaaaatgggtgaactttgaagacagaggcatggaaactaccaacaaattgaacttacacggaataaaacatttacaaaaacacaaagggcacccagtggacctgtggggaaaatt

SEQ ID NO: 40177 - DNA, 412 bp, Homo Sapiens
  misc_feature (403)..(403): n is a, c, g, or t
  misc_feature (406)..(406): n is a, c, g, or t
ctagagtgtgacttcttgggaagtgttcccctcagtggtactgctggggcaacgtccaataccaagaatgatgtatagcatatttcatcttcctacactactctctggaaagactgagccaattacggggtcatctgtaaagtctaagtgctgcagtttccctacgaccattggattttgtttgtagtttgatattgtcttactgtcccttgaagttgtaatttgtaattctttagttttcaagagggactctacatgtttccttgtgatgatggccttgagttactcatgtgtacactgcctatttatccccattgagcccccactgcccgaacatgttgatggcattttatatagtaagctgtcagttacttaatgtacaaatattcttccattctatggntgncgggta

SEQ ID NO: 40178 - DNA, 416 bp, Homo Sapiens
gcagaaacatcgaatgaatgctgaaattcctagtctggtttcttcagtggtgtgtttgtgttttagtacaacctgcaaaagagttactccattgtctaaaaatgcaaatgagaatttccaaatatacaaaatgcctccaagctcaaatagctataactgtaccaaagacatggaagaaaccaaaagatcggacccgaaccactgaagagatgttagaggcagaattggagcttaaagctgaagaggagctttccattgacaaagtacttgaatctgaacaagataaaatgagccaggggtttcatcctgaaagagacccctctgacctaaaaaaagtgaaagctgtggaagaaaatggagaagaagctgagccagtacgtaatggtgctgagagtgtttctgagggtgaaggaata

SEQ ID NO: 40179 - DNA, 745 bp, Homo Sapiens
  misc_feature (716)..(716): n is a, c, g, or t
agaggtaatcccaacaaatgaaaatgatgatgatatatgcaagaaaccctgtagtgtagcacctaatgatattccactggtttctagtactaacctaattaatgaaataaatggagttagcgaaaaattatcagccacggagagcattgtggaaatagtaaaacaggaagtattgccattgactcttgaattggagattctcgaaaatcccccagaagaaatgaaactggagtgtatcccagctcccatcaccccttccacagttccttcctttcctccaactcctccaactcctccagcttctcctcctcacactccagtcattgttcctgctgctgccactactgttagttctccgagtgctgccatcacagtccagagagtcctagaggaggacgagagcataagaacttgccttagtgaagatgcaaaagagattcagaacaaaatggaggtagaagcagatgggcaaacagaagagattttggattctcaaaacttaaattcaagaaggagccctgtcccagctcaaatagctataactgtaccaaagacatggaagaaaccaaaagatcggacccgaaccactgaagagatgttagaggcagaattggagcttaaagctgaagaggagctttccattgacaaagtacttgaatctgaacaagataaaatgagccaggggtttcatcctgaaagagacccctctgacctanaaaaagtgaaagctgtggaagaaatggag

SEQ ID NO: 40180 - DNA, 770 bp, Homo Sapiens
ccgggagcctggggcccaggactgcagcggcttcggaagttggagaccgtgctcctcagtctgcggttcccgcagatacagccgctgccccggaggtggggccagtgctgcgacctctctatatggatgtgcaagctacaactcctctggacccccgggtgcttgatgccatgctcccttacctaatcaactactatgggaacccacactcccggacacatgcttatggctgggagagtgaggcagccatggaacgtgctcgtcagcaagtagcatctctgattggagctgatcctcgtgagatcatttttactagtggtgctactgaatccaacaacatagcaattaagggggtggcccgattctacaggtcacggaaaaagcacttgatcaccacccagacagaacacaaatgtgtcttggactcctgccgttcactggaagctgagggctttcaggtcacctacctcccagtgcagaagagtgggatcattgacctaaaggaactagaggctgctatccagccagatactagcctggtgtcagtcatgactgtgaacaatgagattggagtgaagcagcctattgcagaaatagggcggatttgcagttccagaaaggtatatttccatactgatgcagcccaggctgttggaaaaatcccacttgatgtcaatgacatgaaaattgatctcatgagcattagtggtcacaaaatctacggtcccaaaggggttggtgccatctacatccgtcgccggccccgtgtg

SEQ ID NO: 40181 - DNA, 865 bp, Homo Sapiens
gagggtggtgggctacaagggcagcgtggaccacgagaactgggtgtccaactacaacgccctgcgggctgctgccggcatccagccgccaggctacctcatccatgagtctgcctgctggagtgacacgctgcagcgctggttcttcctgccgcgccgcgccagccaggagcgctacagcgagaaggacgacgagcgcaagggcgccaacctgctgctgagcgcctcccctgacttcggcgacatcgctgtgagccacgtcggggcggtggtccccactcacggcttctcgtccttcaagttcatccccaacagcgacgaccagatcattgtggccctcaaatccgaggaggacagcggcagagtcgcctcctacatcatggccttcacgctggacgggcgcttcctgttgccggagaccaagatcggaagcgtgaaatacgaaggcatcgagttcatttaactcaaaacggaaacactgagcaaggccatcaggactcagcttttataaaaacaagaggagtgcactttagtatagtattgttctttttggaactgtgcctgggttggaggtctggacagggagcccagtcccgggccccatagtggtgccgggcactggacccccgggacccacggaggccgcggtctgaactgctttccatgctgccatctggtgggtgatttcggtccacttcagggcattgactcaagggcctgccttaactgggctgggtcgaatcttccatccgacctcgtttgatttacatttccatatgtacataaggtccagtgaactatccctagagctcctacccatatgtcagggcctaatgactcagcctgaagaacgcagtgaccatgc

SEQ ID NO: 40182 - DNA, 596 bp, Homo Sapiens
  misc_feature (519)..(519): n is a, c, g, or t
  misc_feature (581)..(581): n is a, c, g, or t
atgcagatccacatccagcagatcgggccgggcatggtacagcagatccagaccgtgtgcatcgagtgcaagggccagggtgagcgcatcaaccccaaggaccgctgcgagagctgcagcggggccaaggtgatccgtgagaagaagattatcgaggtacatgttgaaaaaggtatgaaagatgggcaaaagatactatttcgtggagaaggagatcaggagcctgagctggagcctggtgatgtcataattgtgcttgatcagaaggatcatagtgtctttcagagacgaggccatgacttgatcatgaaaatgaaaattcagctttctgaagctctttgtggcttcaagaagacgataaaaacattggacaatcgaattcttgttattacatccaaagcaggtgaggtgataaagcacggggacctgagatgcgtgcgcgatgaaggaatgcccatctacaaagcacccctggaaaaagggattctgatcatacagtttttagtaatctttcctganaaacactggctttctctggaaaagcttcctcagctggaagctttactccctcctcgacaganagtgaggattacaga

SEQ ID NO: 40183 - DNA, 882 bp, Homo Sapiens
  misc_feature (23)..(23): n is a, c, g, or t
  misc_feature (807)..(807): n is a, c, g, or t
  misc_feature (841)..(841): n is a, c, g, or t
  misc_feature (853)..(853): n is a, c, g, or t
ttctcatctcacctattttaagnatatcccatttttgctgagtttaaacagtgtctttctaaagctttgcacctcatgaagacatatactgtgaacacactacagaccctcacaagtcagttactgaaaagggatccttcatctgtacctaatgcagacaatgccttcacattattttatgtgaaatttcgagctgctgcccccaaagtcagaactcttattgaacaaatagaactgcggtctgaaaaaatacctgaataccaacaactgctaaatgatatccaccagtgttaccttgatcagcgggagctccttttgggccctagtattgcttgcactgttgcagagttaaccagccaaaataatagagatcactgtgccttggttcgtagtggctgtgccttcatggttcatgtctgccaggatgaacaccaactttacaatgaatttttcacaaaaccaacatcaaaattagatgagcttttggagaaactgtgtgtgtcattgtatgatgtcttcaggccattgatcattcatgttattcacttagagactctgtcggaactttgtgggattcttaaaaatgaagtgcttgaagatcatgtgcagaacaatgctgagcaactgggggcatttgcagctggagtcaagcagatgttagaagatgtacaggagcggctcgtctaccgaacccacatctatattcagacggacatcacgggctataaaccagctcctggagatctggcatatcccgataagttagtcatgatggagcaattgcacagagtttgaaagatgaacagnagaaggtaccttcagaagcttcattttcagatgntcacttagaagnaggagagtctaacagtctgacaaaatctg

SEQ ID NO: 40184 - DNA, 728 bp, Homo Sapiens
  misc_feature (618)..(618): n is a, c, g, or t
atgtagaagcgggctccggcgtcccactctcccttccatatgggcttagcgtctgggtcactgagaacgacgtctgaatagggccctgggtccttgccatggatgaatgtggttcccgcatccgccggcgggtgtctctccccaaaaggaaccgtccaagcttggggtgtatttttggcgctcccaccgcggccgagctcgagcccggagatgaggggaaagaggaggaggaaatggtggctgagaacaggaggcggaaaaccgcgggcgtactgccggttgagcctaatgacagtgaagtggacatgtttggtgactatgatagctttactgaaaactcctttatagctcaagttgacgacctggaacaaaaatatatgcaactccctgaacataagaaacatgctacagactttgccactgaaaatctttgctcggaaagtatcaaaaacaaactcagcattactaccataggcaaccttactgaattacaaactgataagcacacagagaaccagagtggatatgaaggtgtcactattgaacctggagctgatcttttgtatgatgtaccttcctcacaggctatatactttgaaaatttgcagaactcttcanatgatttgggtgatcattctatgaaagaaagggattggaagtcatcctctcacaacactgtgaatgaggaactgccccataattgcatagagcaacccagcaaatgatga

SEQ ID NO: 40185 - DNA, 422 bp, Homo Sapiens
gcacgagcaacactgtgaatgaggaactgccccataattgcatagagcaaccccagcaaaatgatgagtcctcttccaaagtcagaactagttcagatatgaacaggagaaaaagtattaaagatcatctaaaaaatgccatgactggaaatgcgaaggcccagacaccaatattttctagaagtaaacagctcaaagacactctcctatctgaggaaattaatgttgctaagaaaacaattgagtcatcatcaaatgaccttggtcctttttattcattacccagcaaagtgagagacctttatgcccaattcaagggaattgaaaaattatatggtaatgctttttgctggaataaaaaaatttttttcctatcattaccataatattagtgcaagtaaatagaagcaaatgctttcatg

SEQ ID NO: 40186 - DNA, 988 bp, Homo Sapiens
gcacagcatctcggggggccaggccggtggcaggagttcctcatggccgaggagtctctgcctggcacgctgctgaagctggcggcacaggggctgggcatgcaggccgcctgcaccctgacgcgcctctgctgggcctgggagctcagtgacctgcacctgctgcagagcctcatggcccagagctgcagctcggccctgcgcacatccgtgccccacggggcgcttgtggaggccgcctgcgccttttgtttccatctgaccctcctgcacctgcggcacagtcctcccgcctactagcgggcccgctgtggctctgttggtcaccgtcacggcctacacggccgggcccttcacgtctgccttcttcaaccctgccctggccgcctctgtgacctttgcctgctcgggacacaccttactggagtacgtgcaggtgtactggctgggccctctgacagggatggtcctggctgtgctgctgcaccagggccgccttccccaccttttccagaggaaccttgttctaccggccagaagaacaagtaccgagcaccccgagggaagccggcccggcctcaggggacacccagaccctgcaaaagggggtcagtgtccgggagcctgggcgcagtggtgttgagggggccacattccagctgagtggccttgctctgtgtgagccccgtgccgagggcccctggcttggtagctgggaccctgggaaaccttctggtagctaaggagcggaactccctggggccccacgttccccccaggaaacggccagtgggggcgaacgtaaaacccaagtatcgtaacgaagaacgcacagcggcccagcagcaacagcaacacacatggcgggggcccgccctaagacatatacccgcgacgaggggggggcacgcaacagtatagccgggcacgcacaggctctcgtgtgtccaaccctggcggtccacacacacgacaccggccagcgcgc

SEQ ID NO: 40187 - DNA, 605 bp, Homo Sapiens
atgatgatccacggcttccagagcagccaccgggatttctgcttcgggccctggaagctgacggcgtccaagacccacatcatgaagtcggcggatgtggagaaattagccgatgaattacatatgccatctctccctgaaatgatgtttggagacaacgttttaagaatccagcatgggtctggctttggaattgagttcaatgctacagatgcgttaagatgtgtaaacaactaccaaggaatgcttaaagtggcctgtgctgaagagtggcaagaaagcaggacggagggtgaacactccaaagaggttattaaaccatatgattggacctatacaacagattataagggaaccttacttggagaatctcttaagttaaaggttgtacctacaacagatcatatagatacagaaaaattgaaagccagagaacagattaagttttttgaagaagttctcctttttgaggatgaacttcatgatcatggagtttcaagcctgagtgtgaagattcctggtggcgggcacctgtacccaactttcttgtacaaagttggcattataagaaagcattgcttatcaatttgtttgcacgaacaggt

SEQ ID NO: 40188 - DNA, 735 bp, Homo Sapiens
ggagtgacaacaacggctaggtgcgaggctgggtggcgggtatttcagacgtcttgacttgcccagtaacttacctggattgattctttcttctgagcactgtaacaagtattcaaagattccccgccactgtatgtctgaagatagcaaatatgttttaatacaaatgttatgggacaatatgaagttacatcaggatccgggacagcccttgtacattctctggaatgcacacacccaaaaatatccaatggtccatttattgcaaaaaagtgataactcatttaaccaggaactgttgaaaagtatggtaaaaagcattaaaatgaatgatgtctatggaccaatgagtcagattttagagacactgaataagtgtccacattttaaaagacagaggagtttatacagagaaatactatttctctcacttgtggcactgggaagagaaaacattgatatagatgcttttgataaagagtacaagatggcatacgatcgtctcacacctagtcaagtcaagagtacacacaactgtgatagaccaccaagtacaggggtgatggaatgtcgaaaaacctttggagaaccttatctttaagatgtatttgtatgtgtaaacattcaatgtatattgtatagtcagtgtattaaaataacactttttagactctaaatattttttcttcaattcttgaaaaatacacttgtcaactggtccaaagactcagacgg

SEQ ID NO: 40189 - DNA, 361 bp, Homo Sapiens
  misc_feature (9)..(9): n is a, c, g, or t
  misc_feature (317)..(317): n is a, c, g, or t
ctgtcaccngccttgactcatttggaaacctggaggtcagtcccccagtgaccgtgaacggcaagacatacccgcttggccgcatcctcatcgggagcagctttcctctgtaagagaagccaggctggggctaggggctgtgggagtggggaagtcactgtttctcttttggggtggcctgggttgctcacacatggagcaagtggctgggggaattattccctcccacgacttcctgttaagaggccgacactcttggaaagaaaatcaagctagcctttatatctttgtgtgatttaggatctaatatataactnaataaacaactcttttccccaaaaaaaaaaaaaaaaaaaaggac

SEQ ID NO: 40190 - DNA, 876 bp, Homo Sapiens
  misc_feature (502)..(502): n is a, c, g, or t
acccgttcttcggccacgctatatcccatcctgggccggcggaagctctaccatgtggtcaagtacacggggggctccgcggagctgctgttcttcgtggaaggcctctgtttccccgacgagggcttctcaggcctggtctccatccatgtcagcctgctggagtacatggcccaggacattcccctgactcccatcttcacggacaccgtgatattccggattgctccgtggatcatgacccccaacatcctgcctcccgtgtcggtgtttgtgtgctgcatgaaggataattacctgttcctgaaagaggtgaagaaccttgtggagaaaaccaactgtgagctgaaggtctgcttccagtacctaaaccgaggcgatcgctggatccaggatgaaattgagtttggctacatcgaggccccccataaaggcttccccgtggtgctggactctccccgagatggaaacctaaaggacttccctgtgaaggagctcctgngcccagattttggctacgtgacccgggagcccctctttgagtctgtcaccagccttgactcatttggaaacctggaggtcagtcccccagtgaccgtgaacggcaagacatacccgcttggccgcatcctcatcgggagcagctttcctctgtctggcggtcggaggatgaccaaggtggtgcgtgacttcctgaaggccagcaggtccaggcccccggggagctctactcagcactgctgcctgtggccccgtggatggtttatgttctttggccccatccccggacaaagaaattcctgcttctcagggccagcccttggcctctttcagctttttccggagaacctaaagcacccccattgagagagccat

SEQ ID NO: 40191 - DNA, 731 bp, Homo Sapiens
catgattaaagaaaaactgtgttacgtgggatataatattgagcaagagcagaaactggccttagaaaccacagtattagttgaatcttatacactcccagatggacgtatcatcaaagttgggggagagagatttgaagcaccagaagctttatttcagcctcacttgatcaatgttgaaggagttggtgttgctgaattgctttttaacacaattcaggcagctgacattgataccagatctgaattctacaaacacattgtgctttctggagggtctactatgtatcctggcctgccatcacggttggaacgagaacttaaacagctttacttagaacgagttttgaagggtgatgtggaaaaactttctaaatttaagatccgcattgaagacccaccccgcagaaagcacatggtattcctgggtggtgcagttctagcggatatcatgaaagacaaagacaacttttggatgacccgacaagagtaccaagaaaagggtgtccgtgtgctagagaaacttggtgtgactgttcgataaactccaaagcttgttcccatcatacccgtaatgctttcttttttcctttattgccaatctttgaactcattcaactccaggacatggaagaggcctctctctgccctttgactggaaaggtcaagttttattctggtgtcttggggaagctttgttaaatttttggtaatggggggaaatctgagtt

SEQ ID NO: 40192 - DNA, 601 bp, Homo Sapiens
atggacacctatgtttttaaagatagttctcagaaagacctgctgaattttactggcacaattcctgtgatgtatcagggtaatacatataacataccaattcgtttctggattttggattctcaccctttcgctccccctatttgcttcttgaagccaactgcaaatatgggaatcttagtcggaaaacatgtggatgctcaaggcagaatatatttgccctatctccaaaactggagccatcctaaatctgtcattgttggattaattaaagaaatgattgccaagtttcaagaggaacttcccatgtattctctatcatcatctgatgaggcacggcaggtagacttgctagcctatattgcaaaaatcactgaaggtgtttcagatacaaattcaaagagctgggcaaatcatgagaataaaacagtcaataaaattactgtggttggaggtggagaactcggtattgcctgcacattagcaatttcagcaaaggtggagtctcgctctgttacccaggctggagtgtacccaactttcttgtacaaagttggcattataagaaagcattgcttatcaatttgttgcaacgaacagg

SEQ ID NO: 40193 - DNA, 861 bp, Homo Sapiens
tcccgggatctcgacctgttcggctctcttcaagaagttggctcctctgggtggacagacttccggcaggacgaccctcgagctggctgcaagccaggaggggaaggcgttaggggtggccatcaacatttattgggtggcagtgccagatgttgtgccgggtcgtgtcattcgcttagcacccaatttcatctgctgcttgcggctatggattcacactgctgtcctctaagactgcggatgttacgaaagtctgggggatgggactcaacaaagattctcagcttggatttcacaggagccggaaagataaaacgaggggctacgagtatgtgttggagccctcacccgtctccctgcctctggacagacctcaggagacacgggtgctgcaggtctcctgcggccgagctcactctcttttgttgactgacagggaaggagtcttcagcatgggaaacaattcttatgggcaatgtggaagaaaggtggtcgaaaatgaaatttacagtgaaagtcacagagtccacaggatgcaggacttcgatggccaggtggtccaggtcgcctgtggtcaggatcatagtctgttcctgacggataaaggagaagtctattcttgtggatggggtgctgatgggcaaacaggtctgggtcactacaatatcaccagctcgcccaccaagctgggtggagacctggcgggagtgaacgttatccaagttgccacctacggtgattgctgcctggccgtgtccgccgacggaggactttttggttggggaaactcggagtacctgcagctggcctctgtcactgactccacacaggtgaatgtgccccgctgcttacacttctcag

SEQ ID NO: 40194 - DNA, 688 bp, Homo Sapiens
aaggggaagattttccttttgtgtttcattcaatgcctgaatttggagctgctataaacaaaggaaagttgcgtggcaaagtggatccagtgttaattgtaggttctgggcttactgccgctgacgcagtactgtgtgcttacaacagtaatatccctgtgattcatgtgtttcgcagacgagtaactgatccaagcttaattttcaaacagcttcccaaaaagctgtatcctgaatatcataaagtctatcatatgatgtgtactcagtcatattctgtagactcaaatcttttatctgattataccagctttcccgagcaccgtgtgctttcctttaagtcggacatgaaatgtgttctccaaagcgtttctggattgaagaaaatatttaagctgtctgcagcagtagtattgataggttctcatcctaatctgtcttttctgaaggatcaagggtgttacctaggccataagtcaagccagccaatcacatgtaagggtaatcctgtggaaatagatacatatacctatgagtgtattaaagaagccaacctttttgcattgggtcctttggttggagacaattttgttcgatttttaaagggaggggcgctgggtgttacacgctgtttagctaccagacagaagaaaaagcatttgtttgttgaaagaggaggaggagatgg

SEQ ID NO: 40195 - DNA, 517 bp, Homo Sapiens
tatatccaagagaatggaaaacatgtgcacacaggcacttgtacatgaatatttatggaagcattattcacaatagccaaaaagtggaaacagtccaaatggccatcaagatgaatgaataaataaaatgtagtgtgtgcatgcagtggaatattatttgcccataaaaagaaatgaagcactgatgcaggctgcaacatggatgaacttgaaagctttatgctacgtgaaagaagccagtcataaaaggtcacctactgttattcctttcataggaaatatccagataggcaagtccatagagacagagaggagaggagtggttgccaggggctgggcaaggagaatgagagtgaccgctaatgggtgtggcatttctttgtgaggtaatgaaaatgttctgtattagatagtggtgatcattgcacaactctgtgaatgtactaaaaatcattgaattgtacactttgaaagaattatatagtatgtaattatatctcagtttaaaaaaaaaaaa

SEQ ID NO: 40196 - DNA, 659 bp, Homo Sapiens
atgggggctgcggtgtttttcggctgcactttcgtcgcgttcggcccggccttcgcgcttttcttgatcactgtggctggggacccgcttcgcgttatcatcctggtcgcaggggcatttttctggctggtctccctgctcctggcctctgtggtctggttcatcttggtccatgtgaccgaccggtcagatgcccggctccagtacggcctcctgatttttggtgctgctgtctctgtccttctacaggaggtgttccgctttgcctactacaagctgcttaagaaggcagatgaggggttagcatcgctgagtgaggacggaagatcacccatctccatccgccagatggcctatgtttctggtctctccttcggtatcatcagtggtgtcttctctgttatcaatattttggctgatgcacttgggccaggtgtggttgggatccatggagactcaccctattacttcctgacttcagcctttctgacagcagccattatcctgctccataccttttggggagttgtgttctttgatgcctgtgagaggagacggtactgggctttgggcctggtggttgggagtcacctactgacatcgggactgacattcctgaacccctggtatgaggccagcctgctgcccatctatgcagt

SEQ ID NO: 40197 - DNA, 1012 bp, Homo Sapiens
  misc_feature (630)..(652): n is a, c, g, or t
  misc_feature (654)..(681): n is a, c, g, or t
  misc_feature (683)..(689): n is a, c, g, or t
  misc_feature (691)..(693): n is a, c, g, or t
  misc_feature (695)..(696): n is a, c, g, or t
  misc_feature (698)..(700): n is a, c, g, or t
  misc_feature (702)..(704): n is a, c, g, or t
  misc_feature (714)..(714): n is a, c, g, or t
  misc_feature (716)..(716): n is a, c, g, or t
  misc_feature (736)..(736): n is a, c, g, or t
  misc_feature (740)..(740): n is a, c, g, or t
  misc_feature (746)..(747): n is a, c, g, or t
  misc_feature (751)..(751): n is a, c, g, or t
  misc_feature (762)..(762): n is a, c, g, or t
  misc_feature (799)..(799): n is a, c, g, or t
  misc_feature (809)..(809): n is a, c, g, or t
  misc_feature (812)..(814): n is a, c, g, or t
  misc_feature (858)..(858): n is a, c, g, or t
  misc_feature (863)..(863): n is a, c, g, or t
  misc_feature (874)..(874): n is a, c, g, or t
  misc_feature (903)..(903): n is a, c, g, or t
  misc_feature (908)..(911): n is a, c, g, or t
  misc_feature (950)..(950): n is a, c, g, or t
  misc_feature (958)..(958): n is a, c, g, or t
  misc_feature (968)..(968): n is a, c, g, or t
  misc_feature (991)..(991): n is a, c, g, or t
gcggccctgttccccgcagccgcctggaccccgccaaggtgctgggcactgcgctgtgcccgcgcatccacgaggtgcccctgctggagccccttgtgtgcaagaagatcgcccaggagcggctcacagtcctcctgttcctggaggactgcatcatcactgcctgccaggagggcctcatctgcacctgggcccggccgggcaaggcgggcatctcctcccaaccaggcaactccccgagtggcacagtggtgtgaagccatggatatcgggcccccccaaccccatgcccccagcctcctagccataaccctccctgctgacctcacagatcaacgtattaacaagactaaccatgatggatggactgctccagtccccccacctgcacaaaatttgggggccccccagactggcccggacacgggcgatgtaatagcccttgtggcctcagccttgtcccccacccactgccaagtacaatgacctcttcctctgaaacatcagtgttaccctcatccctgtccccagcatgtgactggtcactcctggggagagactccccgcccctgccacaagagccccaggtctgcagtgtgcccctcagttgaggggcaggggcccgggggnnnnnnnnnnnnnnnnnnnnnnngnnnnnnnnnnnnnnnnnnnnnnnnnnnngnnnnnnngnnngnngnnngnnngggggggggngngggggggggggggggggggngggngggggnngggnggggggggggnggggggggggggggggggggggggggggggggggggngggggggggnggnnnggggggggggggggggggggcgggggggggggggggggcggggnggggnggggggggggnggggggggggggggggggggggggggcgnggggnnnngccgccggggggcgggggggcgcccgccggccgggcggncggcgggncggcgcgcgnccggcggggcgggcgcgcgcccncccccgccgccgcgcgcgccc

SEQ ID NO: 40198 - DNA, 752 bp, Homo Sapiens
ccttattgtacatgtgaggattcattcaggtgataaaccttacgaatgcaatgtttgtggaaaagccttctctcagagctcatctctcactgtgcatgtgagaagccatacaggggagaagccctatggttgtaatgaatgtgggaaagctttctctcagttctcaacccttgctctgcatttgagaatacacacaggtaagaagccttatcagtgcagtgaatgtgggaaagctttcagccagaagtcacaccacattagacaccagaaaattcatactcactaaaaaccccatgaaagccttgaaagtgggaaagctttcattagaaatttgcacctcatcatgccccagaaataatccttctgaagcaaagcaccacgaatgaggttaactttaacaagtactaaaaacttaagggacaccagaaaatttgtactgaagagaaagacatgcatatgattaaaaccctgtgtccaacagagaaacctgcagcagagataatggtgaaagtttaggcacattttcactaaaagtgggaacagaaaatggaggcctgttttttattgctaccaccatagatctggagatcttcgccagtaacaagaaaaattaagttgtaaatattggaaaggaacagacaaaaatagatgacatggtcatctacaactaatattaagactcctgtggtattgattgagcagagcagaagagatttcaaaaaaagacctatgcatttattagaatttggaat

SEQ ID NO: 40199 - DNA, 739 bp, Homo Sapiens
  misc_feature (673)..(673): n is a, c, g, or t
ggggcagcccagctagcagaaagtaaaacagatgagttgatcaaagatgctcccaccactcagcatgataagagtggagagtggcaagaaacaagtggagaaatacagtgggtgtcaactgaaaagactgatggtacagaagagaaacataagaaggaggaggaggatgaagaacttgacctcaataaagcccttcagcatgccggcaaacacatggaggattgcattgtggcctcctacacggcactacttcttgggtgtctctgccaggaaagtccaatcaatgtaaccactgtgcgggaatatctgccagaaggagacttttcaataatgacagagatgctcaaaaaatttttgagttttatgaatctcacttgtgctgttggaacaactggccagaaatctatctctagagtgattgaatatttggaacattgctagctgctttacctttgcttcaggtgctcggtaatgctggagctatccttagacaaagaaaagtcaagtcatgaaagaagtccttgaagatataccaagaacattcatcagtatcattcgtgtttggatttttaaggccacctgatttcttcgtcatgcattcggcatttgctaaatgacagttactacatcaatctgcaactatcaaaaatggaggggaaaaggttcaggctgntaacaattccatggcagtatttaaatacatttactttggggagagtttataccctcccctttggtt

SEQ ID NO: 40200 - DNA, 723 bp, Homo Sapiens
aaatcaacacattgagtcaagaaaaatgaaacacagaaacactctaaataaaagaagataagtcttcagaaaccaaccctaatgaaatgaagatatgtgattaacctgacaggaaattaaaaagagcaaccataaagagtctcatgggagcaatgcatgaacaaactgagaattttcataaagaaataaaagataacaaaaagtataaagttgaagaatacaataactggactcaaaaatttaatgtgtccaacagaagaatcgatgaagcagaagaaagggctatcaaacttgtagataggccattggaaatcatgtaatgtgaggagaaaaaagaaaaaagattgaagatagtttaagagacttttgagacatcctcaaaggggaataatttatacattaccagatggagaagatagagggaaaaggacagaaaacatatttgaagaaataatgtcagaaaacctcataattctggcaaggaaatagaaatttagatctaagaatctcgaacatcaggtatgatgaatccaaggagactcacaccaaaacatattgtaattaaataaaggttaaagacaatcttcagagcagcaagggaatagtctcttcttacatacaaaatgatccacggaagactgtcagcagacttcacccagaaaactttcacgccagaaaggcagtcgtgatatatacaaagaaaaaaagaaaagcgggaaaaaa

SEQ ID NO: 40201 - DNA, 654 bp, Homo Sapiens
cagaaatacaaaaaaaattctaaaacttgtatggaactacaaaagacattaaataatcaaagtaatcttgagcaacaaggacacagctggaggcatcactctacctgattttgtaatccattatcaaaaaaactgtggtaccagcataaaaacagattcactgaccagtggaacaggaaagcccagacataactcatacatttccatccaattgatttttgacaaaagtggcacacagaatggggagaggacaaataaataaataaattgttttgagatatctgtatatctatatgtgaaattgaaccattttctcatagcatatagaaaaatcaactcaaaatggattaaagcctgaaatgttgcctttgaaactgtaaaactactagtagaaaatataggggaaaagctctatgatgttgttctgggcaatgatttcttggatacatccttaaaagcatgggcagcaaaaacagccagacaactatcaggggacctgcccagatagtcacataggttcttttctattttccctaagcattggccgggttgagaaataaaggggcagaggtccaaaagaaagaaattttaaagcttggcattcttgggagacaatacatgtcggtagggttcgtgatgccccccgagccgtaa

SEQ ID NO: 40202 - DNA, 724 bp, Homo Sapiens
cgcgtccggcccattctcagtagctgatgcagtaatatattcagtttatctatgcattgctggggtcttgatataagatggaaacagtgtttcttatctaaagttttgattatcagcaagttgaatggacactttagttatttaaataaagatttttgaccaaaatccagaaaatggtatgagagaaaaataaattccagctagtttaatagatttttaaatgtcaatctgattttagcctcttagagagtgctaactagctggtaatgtttacttttaattccttgttaaaatgaggcaataatttgcaagatttttgtatataagtgtaaattcttcatatctttttagatctaattcaatattttctgactacttctgccatgtataataccatttttgtgcatgcttgatgtgacattcataaattgtaccactatgactttatccatgtaaaatagctatttattgaattttcttttaaaagctggatttactgggttttttttttctctcagtttaaacatcttaacagagaatttgttactgtttattaaaagaattgcatttggaagcaagaaaacaaccggatttgcaatcatgtgaagaaacaataatgcctttattatcaagtgttaagcacaattcttataacaaactgtgataaattctttttgttttttttttcctttgccccattattttcttatgaacaaaccaaaaa

SEQ ID NO: 40203 - DNA, 832 bp, Homo Sapiens
agccatcgccgctgctcacacctttctactgaagcatcctgatgacgaaatgatgaagaggaacatggcatattataagagcctgcctggtgccgaggactacattaaagacctggaaaccaagtcatatgaaagcctgttcatccgagcagtgcgggcatacaacggtgagaactggagaacatccatcacagacatggagctggcccttcccgacttcttcaaagccttttacgagtgtctcgcagcctgcgagggttccagggagatcaaggacttcaaggatttctacctttccatagcagatcattatgtagaagttctggaatgcaaaatacagtgtgaagagaacctcaccccagttataggaggctatccggttgagaaatttgtggctaccatgtatcattacttgcagtttgcctattataagttgaacgacctgaagaatgcagccccctgtgcagtcagctatctgctctttgatcagaatgacaaggtcatgcagcagaacctggtgtattaccagtaccacagggacacgtggggcctctcagatgagcacttccagcccagacctgaagcagttcagttctttaatgtgaccacactccagaaggagctgtatgactttgctaaggaaaatataatggatgatgatgagggagaagttgtggaatatgtggatgacctcttggaactggaggagaccagctagcccacagcaaccaaagagacttcctcttggcgttcaggaaacacagattctttgtccttttccaacagcccaggctgttgatacctcagagccttctctttactctccaaagtg

SEQ ID NO: 40204 - DNA, 1084 bp, Homo Sapiens
agggtcagagtgcagacctgagaccactgctcaccgacttcagactccagtttatctgtgccccagcttcctcacttagtctcagaagacttaggctgaggcctcagaaggagatctccatcctttgtccagagcagaacaggatggccatgtcccaggaatcattgaccttcaaggacgtgtttgtggacttcaccctggaggagtggcagcaactggactctgcccagaagaacctctacagggatgtcatgcttgagaactacagccacctggtgtccgtggggtatctagttgcgaaccagatgtgatcttcaggttgggaccaggtgaagagtcctggatggcagatggggggaccccggtacgacctgtgcagaagtctggcaagttgatgagcagatagatcactacaaggaaagccaagacaaacttccttggcaagctgcattcataggcaaggaaacactgaaggatgaaagcggtcaagaatccagaacatgtagaaaaagcatttatctgagcacagaatttgattctgtaaggcaaagactccctaaatattattcgtgggaaaaggcattcaaaacatcatttaaactttcttggtcaaaatggaagctatgtaagaaagaaagatgatggatgtaaagcatattggaaagtatgcttccattataatcttcataaagctcaacctgcagagagattttttgaccctaatcaacgagggaaagccctccaccaaaagcaagcccttagaaaaagtcagagaagtcaaactggggagaaactctacaaatgtactgaatgtggaaaagtgtttatccagaaagcaaacttagttgtacatcaaagaactcacaccggagagaaaccttatgaatgctgcgaatgtgcaaaagccttcagccagaagtcaaccctcatagcacaccagagaactcacacaggggagagccctatgaatgcagtaatgtggaaaaactttatcmgragthactctgattaaamatagaaattcatatggggrggmcyataatgmggtttkktagaagccttagtdggagkwaayytaattaaa

SEQ ID NO: 40205 - DNA, 626 bp, Homo Sapiens
ggtcccgacagaccttttagtgtccacctgcggggtgcgattcacccgtattcagaacctaaagcagcacatgctcatccactcaggaattaaaccatttcagtgtgaccgctgtgggaaaaagttcaccagggcttactcgctaaagatgcatcgcctaaagcatgaagtgatttcctagtaccggactacttaaaccaggaacaagaagagacccttgttcaatatgatcttggagaacacggttttgaaagcaactcctctgttcaaatgcctgtcatttcacaggtctcctcaacccagaattgtgaaagcacttttcccttggggtctcttggtgggctggcagaaaaagaggaagaagtgccagagcagccaaagagcagtgcttgtgctgaggcaaccagagatgaccccccaaaatcagagctgtcttctataactattgagtagttttgtgatttggcttcagttttgttttttggaaagtgcctgtgcttggtcttgtacatttaaatttaatttaattttttaaacaaaaaaagcccgggtgggagggaggggggaaattgagaaaagaatttccctttttactttctgagccctgaaactgattttatttttcc

SEQ ID NO: 40206 - DNA, 493 bp, Homo Sapiens
gaaagagcaagaggaaagaaaaaagaaaagaaggaaagaagaataaagaagagaaacgtgtaagaatggtttgcagattgattggttaaaagtgtttttagcacatccccaaccctgaaaacttcgcattaagagccaagcacaatgttggtagctccaagatattctgactgtgttctcagaatgagggattacccatcactgggtattccttcccaagtagaaactttagattttcactggtaatacacattgccaagttttatgggaaatctgaatatactgtgaaaatgcatatctggttagttgtctgctgcccagatcttatcaataccagtaactaaccagtatttaacataaaatgatacaaataaaggcctttttctatttcagtgagggtacatttttcttgatatatatgtactttaaggattggatctgtttatggatctgttttaggaaacagatttgcaagggataattgtatatatag

SEQ ID NO: 40207 - DNA, 918 bp, Homo Sapiens
aagaatttcagcgagttttctgatgtgccattttttgtctttttaaaaatatacatattataaatgtaatagtttgacacattaatgaccctaagacctgcgtatgtgaagcagctatgagtgctgtgatttgtttttaaaaatttttacacttcttgttgaaatatatatgcatataaatatatctatatctatatctatatctaaaacactcctggaccattaacgtaaattaaatgtcttaagagatatggagcccttttaaacttgtcatctttatgcaaggtgacatttataaatattccttcgagctttgttttcataaaatgtaaactatgtaacattatgtatagttcagtaatttgaatgtttgttcaatataatgaactagaaggaatgcaattttctgtagatgaatgaaccaaatggtaaccattaaacaattgcatttatatgttgcaatacatttcagaaggagcgttcactctgcagggaataaggtacctcctttagcaccttagtgcaattcattgtggtgctatttgtttttacctgaatgtttgttactaatcttcctttcatagaacctctatttttgttttctaaacttgagttgagtccttgtatggtcatcataaggtaatggtcagcatgtttacaagatattcctcttccaaatctcagcactttaaaaaaaaaatcccagaattttttaacaacctttgcttccctaagttaagtaaccaccatccgggtctggataatatcggtgaggattacgtagaaaaatcatgggatgcattgggtggttcaggttttgagaaagacgaattagccacattatttggggacaaccccctaacgattttttagctcccgttccaactaggattagcacacatttccttgcctgaccac

SEQ ID NO: 40208 - DNA, 705 bp, Homo Sapiens
gtgttttatgaattgatcaatgagccatacattttggctaggatgtatattttaataactacaaaaaaagagagtttaaaaaactattaagggtctgtctttaaaccacctaatagaggaatttaaaagtgaaggttgcagttgctagattttgccttggctaccttcagattcccacaatacttgtacataatgaactgtgcatgcttttacattctctaagggcttaacttcttaggcactgtaagactataagaacgcagtaatagccataactggatttccttggttctcctgttttaaaatctgagccttaatgtagttttaatatatcctttttgtattacttttctttattagtagcctaataaagaagactttgagtatcttttgctctcctctagatgcgttttaaaaactattccaaatttaattgatattgtattgagtttttcagggttattttaggcctgatttgataacaatgcgttgttttggtgcctccattaatgttgtattaacatcaatgggtcttttaaattgattaatcatgtcatcgaatcataccttctgattttctgtgatcatccaacggttaagtctttgccgttattgtcaatatatcaaccaaattttaaataactttttttacttgtgtattactatattcaaccgtcccagatataacaatatttgtatttcacc

SEQ ID NO: 40209 - DNA, 754 bp, Homo Sapiens
  misc_feature (638)..(638): n is a, c, g, or t
  misc_feature (753)..(753): n is a, c, g, or t
acctggcctttcattatcaaaagtcccaagcaatataaaaacctttctttcatggatgctatgaataagtttaaatggactaaaaaggaaggtctctccttcaacaagctggtcctcagcctgccagtgaatgtgagatgttccaagacagacaatgctgagtggtcgattcaaggaatgacagcattacctccagatatagaaagaccctataaagcagaacctttggtgtgtggcacgtcttcttcctcttccctgcacagagatttctccatcaacttgcttgtttgccttctgctactcagctgcacgctgagcaccaagagcttgtgatcaaaattctgttggacttgacaatgttttctatgatctgaacctgtcatttgaagtacaggttaaagactgtgtccactttgggcatgaagagtgtggagacttttcttccccattttccctccctcctttttcctttccatgttacatgagagacatcaatcaggttctcttctctttcttagaaatatctgatgttatatatacatggtcaataaaataaaactggcctgatttaagataaccattttaaaaaattgggctgtcatgtgggaataaaagaattctttctttcctactacatnctgttttatttaaatactcattggtgctatttcactttttgacttgacttttatatttctttaaaaaattccttccttttaaaaatataaaagggactactgttcattccagttnt

SEQ ID NO: 40210 - DNA, 528 bp, Homo Sapiens
ataagtagtgctttgagggcccttttgcaaacaatggcctccaagaacatttcccagtgcatgactcctgatcagctgatgacattatgcaaagcaggcattcatagtagtaatgtcggggttagagtgaatgtcgttagcattttaggaatcactggcagcgtccttgccaaagaagatggtacacttgaaactcttaagaacattgggtgctttctgcttgaagttaccaccaaagatccttcccttgtggtagcaggagaagctttggatgccctctttgatgtttttgcagatggtaaagaagccgaaagagcctcgattcaaattaaattattatctgctctgaaagaattccagccggtctttaaaatgaagatacgtaaagaagggagaggtaactatagcacagatcagctgtgtgttcttgacaatgtgaaaatgaatttgcgaagatttattgcttatcaagaaactgttgagaaaagactgacttcttaaacaatccaaaaaagaaaccagttcttc

SEQ ID NO: 40211 - DNA, 1121 bp, Homo Sapiens
  misc_feature (776)..(776): n is a, c, g, or t
  misc_feature (864)..(864): n is a, c, g, or t
  misc_feature (899)..(899): n is a, c, g, or t
  misc_feature (969)..(969): n is a, c, g, or t
  misc_feature (988)..(989): n is a, c, g, or t
  misc_feature (1021)..(1021): n is a, c, g, or t
  misc_feature (1053)..(1053): n is a, c, g, or t
  misc_feature (1064)..(1064): n is a, c, g, or t
  misc_feature (1067)..(1068): n is a, c, g, or t
  misc_feature (1090)..(1090): n is a, c, g, or t
tttccggatatcgtcgaccacgcgtccggcccggctggctgctggtgggaggccggcgactgagtaagatgaagatccagtttcagacatgagactcgttgggtgatcatttcattgagatcaacctgaatgaccaggtgtaaagtgcaagagtaatatgctatgactgaggaagaagcagaatgggaaagcataaatgtgctattgatgatgcatggcttaaaacctttgtctctagtcaaaagaacagatctcaaagatctcatcatttttgacaaacagtcatcacaaaggatgagacagaatttgaaattgttggtggaagaaacatcatgtcaacagaacatgatacaggagcttatagaaactaatcaacagcttagaaatgaacttcagctagagcaaagccgagcagccaatcaagaacaacgagctaatgacttggaacaaattatggaaagtgtgaaatccaaaattggtgaattggaggatgaatcactaaatagggcttgccaccaacagaataaaataaaagatcttcaaaaggagcagaaaactttgcaggtgaagtgccagcattataagaaaaaacgaacggagcaagaagaaactattgcttctttgcaaatggaagtctgtagattaaaaaaggaggaagaagatcgcattgtcactcaaaacagagtgtttgcctatctgtgcaaaagagttcctcataccgtcttggatagacagttgctttgtctaattgattactatgaaatctaaattagaanaattcatacacaaaggcaatataaagaagatgaaagtcagtcagaagaagaaaacgactaccagaatctggatgcctcaccaacttantaaggcctttttatgtcattacagaaatcactcanggaaaatcaaatctagattgatgcacttttcagtgaaaagctgaacctccaaaagaatttggaaccaggnctacgcagcatgaatttanngacttataacagcaggtggaagaagctggaanaaagcccctaagaaaaacgtccaattacaggnagcttatttantcnntagaaagggctgaggaccccgnagaaggaaagatggagccccagcacatatta

SEQ ID NO: 40212 - DNA, 547 bp, Homo Sapiens
gcacgagctctctctctctctctctctctctctctagcagtataagaatttcatgtcatccatttgtaacagtctttttgaagcattgtttcctggatcttcctactcgactagattttcagctttaaccattttaggttcaatagctgaagtttttcatgtcccagaaggcagaatttatacagtatatcagctgagtcatgatattgatgttggtcgtttccaaacactaatggaatgttttaccagcacttttgaagacgtgaaaattttagcatttgatcttctgatgaagttatcaaaaacagctgtacattttcaggattcggggaaactgcaaggcttatttcaggcagcattggagctcagcacaagcaccaaaccatacgactgtgtgacagcttcctacctgctgaacttcttaatctggcaggatgctctaccgtcatccttgtctgcctacttaactcagcaagttgcatgtgataatggagataggcctgctgctgtggtggaaaggaacacattaatggttatcaaatgcttg

SEQ ID NO: 40213 - DNA, 729 bp, Homo Sapiens
agctttgtctgccatagcaatcagcagaacgcctgttctcatgaacttcatgatgagaggctcttgggtgacaattggtgtgacctttgcagccatggttggagctggaatgctggtacgatcaataccatatgaccagagcccaggcccaaagcatcttgcttggttgctacattctggtgtgatgggtgcagtggtggctcctctgacaatattagggggtcctcttctcatcagagctgcatggtacacagctggcattgtgggaggcctctccactgtggccatgtgtgcgcccagtgaaaagtttctgaacatgggtgcacccctgggagtgggcctggggtctcgtctttgtgtcctcattgggatctatgtttcttccacctaccaccgtggctggtgccactctttactcagtggcaatgtacggtggattagttcttttcagcatgttccttctgtatgatacccagaaagtaatcaagcgtgcagaagtatcaccaatgtatggagttcaaaaatatgatcccattaactcgatgctgagtatctacatggatacatttaaatatatttatgcgagttgcaactatgctggcaactggaggcaacagaaagaaatgaagtgactcagcttcttggttctctgctacatcaaatatcttgtttactggggcagatatgcattaaatagttgtacaagcagtttcgttgaagtttagaaga

SEQ ID NO: 40214 - DNA, 958 bp, Homo Sapiens
tcctgagccaggcctggccgccggagacggcgcggactctctgggaggccggcggtcctcgggtgtagagggagacagctgcccgggggcacgggcgagcgcctctgggggtcctggatccgagacccgcggccccggggtggcggtgacgctggagtcatgcgggcttggctgggccgggctcttggggcagccaggcgccgctgctggcgtctaggccacaccaccctgaacgcgcccgctcgcctctgatctgttgaagctaagcagggtcgggactggttagtacttggatgggattccgcctggtaatagcggtaccgtagcttttggcttcccgctccctccttctwwcccccttttgtctccgtgcttcccaactgcrccccgcctctgcwccccgttgaccgcccccgtgccccagccgaagcccaggacctcctcctgaagatccgccactgcagcaccgccaggcagcagcatcccacctcttccgactcgcggcagccccacccaacccgggcgggacgggaccgaccccgagggtgcaggcgcgggttccctgaggtcccgggtctcttcacgctccccggactcccaggcaattgtattcattcattcagcgtcactgcaaccgtccaagccggtgggaggggcgagcaggggcagcgggtgccacagaccccagccaagacctccgctccagaacccgagggctgctttccccagaggaaggacattttcttcgccagccacgaagaaatccgtccctgtgcaccctgtttcccaatgccaccgacttcgtgtaaactccagtccagaggacaggagagagacccaggcctcgccccgtggacaggctcggcgccacggctcccgccagacacacgagcacactctacaaatctcgggggccaccgcatcaaggagacaraaagaagcaaamaaaggaaggacc

SEQ ID NO: 40215 - DNA, 475 bp, Homo Sapiens
  misc_feature (10)..(10): n is a, c, g, or t
  misc_feature (395)..(395): n is a, c, g, or t
  misc_feature (435)..(435): n is a, c, g, or t
ctcgtcaccncaaatcataccaacactgaaaagaagagacaataagaagcattctttctttcaacatcacagacattggcaactctaggatgtctatacagagggataaaaaggggtggcagttggctgggcgtggtggctcatgcctgtaatcccggcactttgggaggcccagggaggtggatcacttgaggtcaggagttccagactgacagtctggccaccatggtgaaaccccgtttctaataaaaatacagaaaaattagctgtgctggtggtgggtgcttgaattcccagcttcttgggaggctgagacaggagaatcgcttgaacttaggtggcggaggttgccgttgagcttgagattcacgttcactgggacgacaaagtgagantctgtcttcaaaaaaaaagggagggggttggttggcaggntttccgaagggagggacttggaggttttttggtttagctt

SEQ ID NO: 40216 - DNA, 481 bp, Homo Sapiens
gttaggaggagctgtacatcatccaaggggcgctggagctccgcaccaagacggtggaggacgtgatgaccccactccgggactgcttcatgatcaccggcgaagccatcctggacttcaacaccatgtctgagatcatggagagcggctacacccgcattccagtgtttgaaggggagcgctccaatatcgtggacctgctgtttgtcaaagactgggccttcgtggatcccgatgactgtacccccctgaaaaccatcaccaaattttataaccaccccttgcactttgttttcaatgacaccaagtgggacgctatgctggaagaatttaagaaaggtaaatctcacctggctatcgtgcagcgggtaaacaatgagggagaaggggatccattttatgaagttctgggaatcgtcaccttagaagatgtgattgaagaaatcatcaaatctgagattcttgatgaaacagatttata

SEQ ID NO: 40217 - DNA, 493 bp, Homo Sapiens
gagctgtagttattcatccttctgtacaaaatgaaaagtttggaaattgtttgccctgataccttgaaaaagaagccagaatatttatttgcttcatcaacttcagtgtatatcattttgtgttattttatacgaaaacatgtttattattttcatttttgtaaaaggaagtaaaaggtcaacattttctctcatgtaccaaccttgtttgtatttctattttctgtaatgtttaagtatgatgttgaagaaattcacattctcttatagtttggatgggaagactattgactatttcagaaacagacttatttcagaggcttattgttttctctgtatttacctaatattttataacttttatgaatcagaataatgtccttcataaatttgtttaattgaagtcatctacttctaacaggacagatcacaactatttgaggtttacaaattacatctttgataagggaaatggtttcgtgacatgtcacag

SEQ ID NO: 40218 - DNA, 810 bp, Homo Sapiens
cgccaatctagaatactctgcgaatgtcttcggatggtagccactcagcccattcctaaaggccatgagattttcaacacttatgggcaaatggctaactggcaactgattcatatgtacggtttgttgaaccatatcctgacaacacagatgacacagctgacattcagatggtgacagttcgtgaggcagcattacagggaacaaaaactgaagctgaaaggcacctagtgtacgagcgctgggatttcctatgcaaactggagatggtaggggaagagggagcctttgtgatagggagggaggaggtgctgactgaagaggagctgaccaccacactaaaggtactgtgcatgcctgctgaggagttcagagagcttaaagaccaggatggagggggagatgataaaagggaagagggcagcctgacgatcacaaatattcccaagctcaaagcatcgtggagacagctgcttcaaaacagtgttctactgactttgcagacctatgccacagacttaaaaactgaccaaggtttactcagtaataaggaagtctatgcgaaactcagctggagggaacagcaagccttacaggttcgctatggtcagaagatgatcttacatcagtgttggaactgacaagttagcagtttccctgttccctgaaggaacagcaataagaactttattctaagctaatactcattgatgtttgaaaaagaggaaaattggatctttctttttgcttaactaaaccaccaagaggaaaagtaggcaaagtggtgtgctaggattactcaggtaaagg

SEQ ID NO: 40219 - DNA, 435 bp, Homo Sapiens
  misc_feature (397)..(397): n is a, c, g, or t
ggaaaggactcctgacctggctcttccagaatgaggatggattttccatatgaaggagccgggggcaggaccttctgggtagagcgtgaaaagaacacagtatgtgtggagagcgggaaatgtgttgaactgtctagaaaacagagccacaggaatgcgtgtgagggcttgggctgtacagtggagagtgccctccctggccaggagttggacattcatcccaccacaagaccccatgaagagttcctcaacagctctgtgtcctcatcaaacctgtgtttgcagaacagtggaggaagagagctgaaggaggggagaggccctgcacctgccaggccctggctagactacaagggtgagcactgagccatgctctcggggaaccttcactggagtngagggcagtgagaatgtttaaaacaaaaaaaaaaaaaa

SEQ ID NO: 40220 - DNA, 341 bp, Homo Sapiens
ttttttttttttttttttgagacggagtcttgctctgtctccaaacaaaacaaaaaaagctgggggaggccaggcacagtggagagcgggaaattgtgttgaactgtctagaaaacagagccacaggaatgcgtgttgagggcttgggctgtacagtggagagtgccctccctggccagggagttggacattcatcccaccacaagaccccatgaagagttcctcaacagctctgtgtcctcatcaaacctgtgtttgcagaacagtggaggaagagagctgaaggaggggagaggccctgcacctgccaggccctggcctagactacaagggcctcgtgc

SEQ ID NO: 40221 - DNA, 921 bp, Homo Sapiens
atgaaacgcttgaaggtgcagctgaagcgttccatgccggatctgaaagccattcatagcttggatagcagcttgtgcagagactggattgtcgtagctaacaaaaccaaagcacttgctcagattggctttcagatcggcatgaaacgcttgaaggtgcagctgaagcgttccaaaaaacgacagcaaaccttactgatcctaaccccagaggctccctgctctcattttagctttcttagggtaagtcccacgagccagcctgtctcaacagggaaggcagaggaggaccacattgccaacttttaccaagagagacggttatttttacaataaggcctccatgtccccacccacttcccctacccagtttgccataattaaaacttgggctacttgtttctatgagtaattcctcctccagttgtgccactgtattgctccttgttttgcgatttgaatctccttttacctttttggtttaatttttttcattttgctttcttttaaagagaagcatatacacaaataaatggcatcttgagaatttaaaaggcaaacaaacaaacgctaatgtgcaattctaactctgaaaccactggtgccccgagagcactgctggagaattcacccctccttgccccggcggcccggcccccggaggggagggcccggtgcttaggaggttaacctggtggggctaagagaggggagaaagcccagagaagcacttaatccaaacaaacgtctttccactacatcgtgttggttaactaagtaggatttactcagggtttcaagaactggatttttggccgagatacacggtggcatggaacggtattagtcagcggtacgcacacgattagatcgtcaaagccgttaaaaaaggggcaccgtctccaaattctaactaaaagg

SEQ ID NO: 40222 - DNA, 578 bp, Homo Sapiens
gtgctattaaagaagaagatctcgtggtctgggttgatcctctggatggaaccaaggaatataccgaaggtcttcttgacaatgtaacagttcttattggaattgcttatgaaggaaaagccatagcaggagttattaaccagccatattacaactatgaggcaggaccagatgctgtgttggggaggacaatctggggagttttaggtttaggcgcctttgggtttcagctgaaagaagtccctgctgggaaacacattatcacaactactcgatcccatagcaacaagttggttactgactgtgttgctgctatgaaccccgatgctgtgctgcgagtaggaggagcaggaaataagattattcagctgattgaaggcaaagcctctgcttatgtatttgcaagtcctggttgtaagaagtgggatacttgtgctccagaagttattttacatgctgtgggaggcaagttaaccgatatccatgggaatgttcttcagtaccacaaggatgtgaagcatatgaactctgcaggagtcctggccacactgaggaattatgactactatgcaagccga

SEQ ID NO: 40223 - DNA, 789 bp, Homo Sapiens
gtttcggtccggaatcccgggacggacttcgcctacgactcagatgtcaccgggtgcgcatcaatgtacctccacacagagggcttctctgggccctctccaggtgacggggccatgggctatggctatgagaaacctctgcgaccattcccagatgatgtctgcgttgtccctgagaaatttgaaggagacatcaagcaggaaggggtcggtgcatttcgagaggggccgccctaccagcgccggggtgccctgcagctgtggcaatttctggtggccttgctggatgacccaacaaatgcccatttcattgcctggacgggccggggaatggagttcaagctcattgagcctgaggaggtcgccaggctctggggcatccagaagaaccggccagccatgaattacgacaagctgagccgctcgctccgatactattatgagaaaggcatcatgcagaaggtggctggtgagcgttacgtgtacaagtttgtgtgtgagcccgaggccctcttctctttggccttcccggacaatcagcgtccagctctcaaggctgagtttgaccggcctgtcagtgaggaggacacagtccctttgtcccacttggatgagagccccgcctacctcccagagctggctggccccgcccagccatttggccccaagggtggctactcttactagcccccagcggctgttccccctgccgcaggtgggtgctgccctgtgtacatataaatgaatctggtgttggggaaaccttcatctgaaacccacagatgtctc

SEQ ID NO: 40224 - DNA, 677 bp, Homo Sapiens
ttttttttttttttttttaagtagagacaaggtctcactacattgcccaggttggtctcaaactcctgagctcaagcagtcttcccaccttggcctcctaaagtgtggaaattatagcatgaaccactgtcaggctcttttgtcagtcctatcaacctctaacatcctcgcaccagacaggacaggtgtctgtactgaaactttattacaaaattataaagcagagctctgtaacaaaataatacacatttgggtttgctttaacctccaagtaagtctgagaaaatcttaataaaagccacttgaagtaacaattcacatccaagagatttccacaaatttatacaatgtatattgagcactagttcctgtacagcttattcttattagtttggatccaactattccaatgtattatgaaccagtcagctatctgtcttttgaaacaagtcttaactgaaatctcagagtaatcagcaaaagctacggaataattctaagaattagatgtttccatatcattaaaaccaaggatccatgaggggcagaagggaggattcaaagatttaaaaaaaatcaaattttagaccttggttaaatattaactggaatgggatcttggaactcccaactttaatttggtgtaataaaaatgatgcaaaaaaaaacctcgtgcc

SEQ ID NO: 40225 - DNA, 731 bp, Homo Sapiens
gctcgaggaagaacatctacagtgaggagctgcgtgagaccaagcgccgtcatgagacccgactggtggagattgacaatgggaagcagcgtgagtttgagagccggctggcggatgcgctgcaggaactgcgggcccagcatgaggaccaggtggagcagtataagaaggagctggagaagacttattctgccaagctggacaatgccaggcagtctgctgagaggaacagcaacctggtgggggctgcccacgaggagctgcagcagtcgcgcatccgcatcgacagcctctctgcccagctcagccagctccagaagcagctggcagccaaggaggcgaagcttcgagacctggaggactcactggcccgtgagcgggacaccagccggcggctgctggcggaaaaggagcgggagatggccgagatgcgggcaaggatgcagcagcagctggacgagtaccaggagcttctggacatcaagctggccctggacatggagatccacgcctaccgcaagctcttggagggcgaggaggagaggctacgcctgtcccccagccctacctcgcagcgcagccgtggccgtgcttcctctcactcatcccagacacagggtggggggcagcgtcaccaaaaagcgcaaactggagtccactgagagccgcagcagcttctcacagcacgcacgcactagcgggcgcgtggccgtggaggaggtggatgagga

SEQ ID NO: 40226 - DNA, 401 bp, Homo Sapiens
acgggttttggagtccccacccacctcataggaacaatgggagaaaggaggagttttcggtgatctcttgtatgtcccttatagaagaggggtcccgagcgcggatgcgtgaggattatgacagcgtggagcaggatggcgatgaacccggaccacaacgctgtgagtaataatggaacctgtgaggtatccgtgtctgtggtagtagttagaaaccaataaaatagttaaacgcagtaggaatgggttcagagatagcttaaacaatctgagtccgcactcactctattcctgtgagcctgcttaaagtgtctctcatgtactcatacaacttccccccgtcccccaacagctgttgaaggctggattctctttgtaactggagtccatgaggaagccac

SEQ ID NO: 40227 - DNA, 800 bp, Homo Sapiens; identical to SEQ ID NO: 4938
  misc_feature (716)..(716): n is a, c, g, or t

SEQ ID NO: 40228 - DNA, 897 bp, Homo Sapiens
ccaatgctgctgcagcagctgctgcagctgctgctggccgagtgggtatgcctggagtctcaactggtggcaatacagtcctgttggttagcaatttaaatgaagaggtgtttatggagatgtgcagcgtgtgaagattttatacaataagaaagacagcgctctaatacagatggctgatggaaaccaatcacaacttgccatgaatcatcttaatggacagaaaatgtatggaaaaattattcgtgttactctgtctaaacatcagactgtacagctacctcgagagggacttgatgatcaagggctaacaaaagattttggtaattccccattgcatcgttttaagaaacctggatccaaaaattttcaaaacatttttcctccttctgccacccttcacctatctaatatccctccatcagtagcagaagaggatctacgaacactgttcgctaacactgggggcactgtgaaagcatttaagttttttcaagatcacaaaatggctcttcttcagatggcaacagtggaagaagctattcaggccttgattgatcttcataattataaccttggagaaaaccatcatctgagagtgtctttctccaagtcaacaatttaaaaatgggaagatgaagattgggggtgaatcacattgttcaatgtcatcacctatttgactgttcagaaaagtgggggaccagagtttgatttttttttggtttttgtttttttgggggtttcttttttttttttccatggcggttatcatttcccttgggttataaaatggaaaatggccattatgttaaagggcaaaagttggttaaactggccattaatttcatccgggttcctaaaggggaaaaccccattttttggcccgggttttaa

SEQ ID NO: 40229 - DNA, 758 bp, Homo Sapiens
  misc_feature (591)..(591): n is a, c, g, or t
  misc_feature (712)..(712): n is a, c, g, or t
aggttgtttgagaacttctactttggctccctaaagctgaattcaattcacatctctcagaggttcaccgtagacagctttggaaactacgcttcctgtggacaaattgacttctcctgaggtggatcttggaaagcactagaaactaaacatcttcaccaggtgctgaagaaaagtgtcttcgttttaattgccaagcagggatgtggacatttggatggtgacttccctgggtggttccccatagattcaccattgcctctaatggtgtctacacccgtcatactaccagctgagatggtggtgggcataaggagaatttgtgcctataacccttagtgtgttctggttttttttcttttaatttttaaattgtcgtaaaatactcataaaacatactgtcttcaccatttttaagtgcacagttcagtaacgttaactgttaatacattcataatgctgtgtggccgtcaccgccgtccatctccataggcttctcagcttgtaaaatggaaactgtacccattaaacagtaattcccactcctcccagcccccgcagccaccattctgctttctgtctctctggttntgactattctcagtatctcatataagtggaatcatacagtgacttgtctttttgtgactggcttatttcacttagcataatgtcctcaaggttcatccatgttgtgtcaggtgacaggatnttcttcctgtattatacattatatggaatgttccgatacatgtgcg

SEQ ID NO: 40230 - DNA, 1136 bp, Homo Sapiens
  misc_feature (855)..(855): n is a, c, g, or t
  misc_feature (926)..(926): n is a, c, g, or t
  misc_feature (931)..(931): n is a, c, g, or t
  misc_feature (974)..(974): n is a, c, g, or t
  misc_feature (990)..(990): n is a, c, g, or t
  misc_feature (1014)..(1016): n is a, c, g, or t
  misc_feature (1018)..(1018): n is a, c, g, or t
  misc_feature (1020)..(1020): n is a, c, g, or t
  misc_feature (1023)..(1023): n is a, c, g, or t
atgaggatcccaccggggacaaactctataaatgtgaacactgtgggaaggcttttacctcttccagatcattccaaggtcatttgaggacgcacactggagagaaaccttatgagtgtaaacaatgtgggaaagccttcacttggtcctcaacgtttagagaacatgtgagaattcacacgcaagagcagctctataaatgtgaacaatgtgggaaggcttttacctcttccagatcattccgaggtcatttgaggacgcacactggagagaagccttatgagtgtaaacaatgtggaaaaaccttcacttggtcctcaacgtttagagaacatgtgagaattcacacgcaagagcagctccataaatgtgaacactgtgggaaggcctttacctcttccagagcattccaaggtcatttgaggatgcacactggagagaagccttatgagtgtaaacaatgtggaaaaaccttcacttggtcctcaaccttacataatcatgtgaggatgcacactggagagaaacctcacaaatgtaaacaatgtgggatgtccttcaagtggcactcctccttccggaaccatctgaggatgcacacaggacagaaatcccacgaatgtcagtcatactcaaaagccttcagttgccaagtcattctttctaaaaccagtgagagcacacactaaagagaaattctataactttaatggggtaacctcacattaattcatgtataatgctccagaaaattcacaccagggagagaaatcttacaagtatgatattggtctttgtcaatacctcatttgtaaaacagaccccattagtcgtgaattttccagctctttcaanaataaatgttttatgtgagaaaataattctctaagtcctctttcagctatagtacctaagtttttaatagnttagnggttttggctccttaaatattttcattttccgactgtattagnacccatggggatttgnagcatactttgacatggaccaaannntntnttnttaatttttttttttgaaaaattcttgtttgttcccccaattttgggggggcaaggggggcaaattcccttccttgaaagttccgccttcccaggttcccgcctttttctgcc

SEQ ID NO: 40231 - DNA, 635 bp, Homo Sapiens
atgcatggatcgcctgtggaagtgaagatacagtccagatcctcacctcccaccatgccacccctcccaccaataaatcctggaggaccgaggccagtgtccttcactcctactgcattaagcaatggcatcaaccattctcctcctaccctgaatggtgccccatcaccgccacagagattcagcaatggtcctgcctcctccacatcatctgcactcacaaatcagcaattgccagccacttgtggtgctcgacaactcagcaagttgaaacgctttcttaccactctgcaacagtttggcaatgacatctcccctgagattggggagaaggtgcggactcttgttcttgcactggtgaactcaacagtgacaattgaggaattccactgtaagctccaagaagccacaaactttccccttcgtccttttgtgattccatttctcaaggccaacctgcccctgctgcagcgggaactgctgcactgcgctcgggcggccaagcagaccccatcccagtacctggctcagcacgaacaccttctgctcaacacaagcattgcatcgcctgctgactcgtcagagttgctcatggaggtgcacggaaatgggaagaagcccagtccagagagctg

SEQ ID NO: 40232 - DNA, 406 bp, Homo Sapiens
gcacgaggattaatggaactacttttgttttgctatgcttttaaagttctaagacaaccctcttctactaccaggttggtctagataactgtggtatgtcttcaagtttctagatgttcataagttcttttattacctaaaacttttcttcttaaatttcagaacaaaacagaaaactttcacagtgcaggttgagtatgccatatctgaaatgtattggatcagttttttggattttggactttttcagattttggaatattcacagagtacataccagttgagcatcccaaattcaaaatctgaaatgctccagtgagcatttcttttgagcatcacgttggcatttgaaaaagttatagaccgggcatggtggctcacgcctgtactcccagcactttgggag

SEQ ID NO: 40233 - DNA, 582 bp, Homo Sapiens
gagacagcagggagcccgtctgggccagactcttctgaggatgcttgtgaggatgacagtcgcttgcagctggctcaaacagaggcctgccaggatgtggccagaatagagggcattgctgaagaccctaaggtgtttctttccagcaagtcaaagacagagccgttgatttcaccaggctgtgaccgtatacctcctgcattgatttctgagggtaaatattcacaggctcagaggaaagaactccgtttgccacttcgggatgcttctgaggcgttgcccacagaccaacttgagaacaatgaattaaatgagctgcagcagcctgatcttacagacagtgatggaaaatcaccacaggcgcaggctgactcagacggttctgagaatgtgctctgtggaaataatcaaatatctgacttaggcatactgcttccagaggtgtgtatggccccagaggaaaagggagataaagacgaccaactcaacaaagaaacagaagactatttgaacagccttttagaaaagatgtttaaaagatactgaagattccctttcctatgaagataaccaagacgacga

SEQ ID NO: 40234 - DNA, 697 bp, Homo Sapiens
gctgctcagggccaagcatgacagtttggctaggggagctgcttcagattggaaagctgttggatgcaaggtgttgtaaaccgactgtccaagttactgaaacctgggggaatgctgttatttcgagactatggaagatatgataagactcagcttcgttttaaaaagggacattgtttatctgaaaatttttatgttcgaggagatggtaccagagcatatttctttacaaaaggggaagtccacagtatgttctgcaaagccagtttagatgaaaagcaaaatctggttgatcgccgcttacaagttaataggaaaaaacaagtgaaaatgcaccgagtgtggattcaaggcaaattccagaaaccattgcaccagactcagaatagctccaatatggtatctacactcctttcacaagactgaactttgtaacatgttaaggtacaaagccagaggactgtgctattcaaggactactgtaagtctattgtttctcaaaagacaatgagaaaaaaagaagagaatttgtatttcctgccgttttgtcataggtgagctcctttgtgcattttaagcacatgtaagtggttcagcacagtatgcctttttctgtgctttgaaaacttgatatgctcaagcttgtttgaatttattacatctaaccattttgcttgttccttgatttttataagca

SEQ ID NO: 40235 - DNA, 590 bp, Homo Sapiens
tttttttttttttttcttcttctgctttcgggagtctagcagttctcgctcaccaaccccaaagcagaagaagaagaaaaagaagaaagatagaggacgcaggtcagagagcagctctcctcgacgggagagaaagaaaagctcaaagaagaagaagcacaggtcagaatctgagtccaagaaacgtaagcataggtctcccactccaaagagcaaacgtaaatctaaggacaaaaagcgaaagcggtctcgaagtacaacaccagcccccaagagccgccgggcccaccgttcaacttctgctgactctgcttcctcctccgatacttcccgcagtcggtctcgaagtgctgcagctaaaactcatacaactgccttggctgggcgaagtccttcccctgcttcagggcgacgcggggagggagatgcgcctttcagtgaaccaggtactaccagcacacaacggcctagtagcccggagactgctacgaaacagcctagcagcccttatgaagacaaagataaagacaagaaggagaaatctgcaactcgacctagcccctctccggaaaggagcagcacaggcccag

SEQ ID NO: 40236 - DNA, 1136 bp, Homo Sapiens
  misc_feature (19)..(19): n is a, c, g, or t
  misc_feature (49)..(49): n is a, c, g, or t
cgggatcgagcccgagcgnaccgagccgcagccgcagccgggcggcggngcgagaggcggcggcggcgggcgggccgcgggcagtcagtcgggcggcggcggcggcggcggcggcggcgatgcggcggccccgctgagtccgcccgctcctggcgccgggagccagccgcgcgatggcggcccgggccgggcggcagcatgcggasggcgaggagctggacggcttcgagggcgaggcctcgagcacctccatgatctcgggcgccagcagcccgtaccagcccaccaccgagccggtgagccagcgccgcggagctggccggcctgcgctgcgaccccgactacctgcgcggcgcstcggccgcctcaaggtcgcccaagtkatcttggccctgattgcattcatctgcatagagaccatcatggcatgctccccgtgtgaaggcctctacttttttgagtttgtgagcwgcagtgcgtttgtggtgactggcgtcttgctgattatgttcagtctcaacctgcacatgaggatcccccagatcaactggaatctgacagatttggtcaacactggactcagcgctttccttttctttattgcttcaatcgtactggctgctttaaaccatagagccggagcagaaattgctgccgtgatatttggcttcttggcgactgcggcatatgcagtgaacacattcctggcagtgcagaaatggagagtcagcgtccgccagcagagcaccaatgactacatccgagcccgcacggagtccagggatgtggacagtcgccctgagatccagcgcctggacacgtgaggacctgcctggatcctcctccctcccgtcctcgtgcctgtctctcagtcaagttttctttcccttgtcctgtcagatttccatgtgattyagttgaattttgtyctctttggtaaaagttcattttgggaaagggttyccgagtkgcccagtgggcgggtccgcggtggagttgggaggcccacgttcctcarcgttttgggstgtggagcmrcsggsgtyactkcccaartycactttaagkyttwcttcccycaaaaaaagmttcttttwwtyttaacaaccttttkttttttttttttaaaaaawttt

SEQ ID NO: 40237 - DNA, 566 bp, Homo Sapiens
gaaatacgaagagacccggcaagaagttttggagatgaggaaaattgtagctgaatatgaaaagactattgctcaaatgattgaagatgaacaaaggacaagtatgacctctcagaagagcttccagcaactgaccatggagaaggaacaggccctggctgaccttaactctgtggaaaggtccctttctgatctcttcaggagatatgagaacctgaaaggtgttctggaagggttcaagaagaatgaagaagccttgaagaaatgtgctcaggattacttagccagagttaaacaagaggagcagcgataccaggccctgaaaatccacgcagaagagaaactggacaaagccaatgaagagattgctcaggttcgaacaaaagcaaaggctgagagtgcagctctccatgctggactccgcaaagagcagatgaaggtggagtccctggaaagggccctgcagcagaagaaccaagaaattgaagaactgacaaaaatctgtgatgagctgattgcaaagctgggaaagactgactgagacactccccctgttagctcaacag

SEQ ID NO: 40238 - DNA, 588 bp, Homo Sapiens
gagacgcaggctggctgggctctcctgctggctgccctggaggatttcaacatgtcccaggatttgctccaccctcgagggcagccagacagcgtcgccaggcaatgaggaaagcagagacaggagaggaaggcctcactcacccactgcgtcgagggctgcagaacacagcggggtcctgtccaggcccagggacatctttgcaagccagacacacttcctcttgagacctcgttctctcggagtgagccaaacacacttcccaaaacgtccccagccacagctgggatgccgatggaaaggcatctgccataaaagaaaagcaaaagataaaaagcccaaccgatgtggggatagagaggcggaagagcagtcaggcttgaggagctggcgcttgtaatgtttatccgtttaaacatttcgtcctcctggtacacgaagggaactgtctgcccaggagcctgagcctcaggctgttggagaagcatctgatgcctttttctttgctgggggtcttctacgtgaggttccttgacgttgtttaaggtcaactccaccaaatacagcaaccagctggggcttgaatgg

SEQ ID NO: 40239 - DNA, 736 bp, Homo Sapiens
  misc_feature (692)..(692): n is a, c, g, or t
gggacatagagctgtgtctatggttttgatgtggacaatggcacatctgcgggacggagtcccttggatcccatgaccagcccaggatccgggctaattctccaagcaaattttgtccacagtcaacgacgggagtccttcctgtatcgatccgacagcgattatgacctctctccaaagtctatgtcccggaactcctccattgccagtgatatacacggagatgacttgattgtgactccatttgctcaggtcttggccagtctgcgaactgtacgaaacaactttgctgcattaactaatttgcaagatcgagcacctagcaaaagatcacccatgtgcaaccaaccatccatcaacaaagccaccataacagtattttccatgcaccttatatatggcatgcatacgctctggaggtaaaatgtgactactggttcaagaaatttacaaaaccctcccttgctgtttctctttactggaaactgttgagggtactggaaataaaggagaaggccaatgtatctaagaccagtggatcagagaggagcccaagaaccttcatcatttccacagaaagggcagcagaggaaattaacctggccttttgtcatgctattatttctcaagatccagatggtacctgtcattaatgtatccctgagaactcagtttcctctgaaggcacaaanaataatttgaccatctccatcatttgatccacacacaatttatt

SEQ ID NO: 40240 - DNA, 671 bp, Homo Sapiens
cccgtcatttaaacatgcttgaaaggccgtcaactccagggctctcgaaatatcggccagctagctcccgatctgctttaataccccagcactcagcaggctgtgacagcacacccaccaccaaaaccccagtggagttcggaacttgcacggaagggaacaggtaaagaacaagcacctttggagatgagtatgcatccagcggcaagcgctccactctcagatctttactaaggaatctacagcctccaaacacagtgaccaccatcaccaccatcaccatgagcacaagaaaaagaagaacgcaagcataaacataagcacaaacacaagcataagcatgacagtaaagaaaaggacaaggagcctttcactttctccagccctgccagtggcaggtctattcgttctccttccctttcagactgagaaggggacataaagacctttcctttcatgtccagaagaactgtatgtaactaatcgcttgtgtcctctgtgaagaattataacaagggaggggggacacggattcgcctctcctacagaaattctgaattcatttaagttctaagcatttgatttatgttattatacagttgggatctacattaggaaatgtgtctgtagtctgaataactatatcatccgctgtttctccccaaaacaca

SEQ ID NO: 40241 - DNA, 695 bp, Homo Sapiens
agagaactcatgaatgtaatgaagatgggaagatatttatcaaattcaggcttcattcagcatctgagagttcacaccagggagaaatcatgtatgtactgcatgtggtaaagccttcagtcatagctcagccattgctcagcatcagataattcacaccagagagaaaccctctgaatgtgacgaatgaagaaaaggtattagtgttaaactcttaatcgactcctgcaaatctataccagtgagaaatcttacaaatgtattgaatgtggcaaatttttcatgctattagtattttcataccttagtcacatttggagaattcacatgggaataaaattccattgctgcaatgaatgtgaaaaagccatcagtcaaagaaactaccttgtttagtatcaaattcacgccatgcaaaaagattataaatgtaataagcatgtatgtgtgtgaggagattcagtcataacccaacgctcattcaacatcaaagaatttatacctaagagaacttatttgggtgtagtaaatggcagatctttcaataggagtttaactagtctttgtcatatcagaatatccatagtagacaagaatttgatgtaacgcaaatggaaaaactcgacaccacatttcaggctttacccaacatcgaaataatggagagaaaattggtgattatttggttatgaaat

SEQ ID NO: 40242 - DNA, 906 bp, Homo Sapiens
  misc_feature (680)..(680): n is a, c, g, or t
  misc_feature (757)..(757): n is a, c, g, or t
gaaaaggattcaatgatttttgattgtactgaatgctatgatccagttactaaacagtggacaactgtagcttcgatgaatcatccccgctgcggcttaggagtgtgtgtgtgttatggggctatctatgctttgggtggatgggttggagctgagatagggaacaccattgaacgatttgatcctgatgaaaataaatgggaagtagttggtaacatggctgtgtcacgctactactttgggtgctgtgaaatgcaaggtttaatttatgtaattgggggcatcagcaatgaaggaatagaacttcgttcttttgaagtctatgatccactttctaagcgttggtctccacttcctccaatgggaaccaggagagcatatcttggtgtggctgcactcaatgactgcatctattctgttggaggatggaatgagacccaagatgctcttcatactgtagaaaaatattcctttgaagaggaaaagtgggttgaagttgcctcaatgaaagtgcctagagcaggcatgtgtggttgtggcagtcaatggtcttctgtatgtttctgggaggtcgatcttccagccatgattttttggctccaggtaccttggactcagttgaagtttataaccctcattcagatacatggacagaaattggtaacatgatcaccagtcgntgtgaaaggggggcgtttgctgtgctatgaaaatataaagcataacagagcacaaggaacattttttgaaaatgcanggaccctgacctttttgcaaagccaaaccatagaattttgggtggataaagacccctctggttttctggtgaggttttcccatggaattttggggaagataaaatggacttaacgaagggctggggcgccaattggccctcatggccct

SEQ ID NO: 40243 - DNA, 613 bp, Homo Sapiens
gtaaaactggttgtacaatcatgatgttagtaatagtaatttttttcttaaattaatttacccttaagagtatgttagatttgattatctgataatgattatttaaatattcctatctgcttataaaatggctgctataataataataatgcagatgatgttatataaggtatatcagacctacaggctgctggcaggatttgtcagataatcaagccacactaactatggaaaatgagcagcattttaaatgctttctagtgaaaaattataatctacttaaactctaatcagaaaaaaagaatattctcaaaaaaatctattatgaaagtcaataaaatagataatttaacaaaagtacaggattagaacatgcttatacctattaacaagaacaaaatttctaatgctgctcaagtggaaagggtattgctaaaaggatgtttccaaaaatcttgtatataagatagcaacagtgattgatgataatactgtacttcatcttacttgccactaaataacattttataattcctcaaagtaaaattgagaaatctttaagtttttttcaagtaacataatctatctttgtatcattcatatttgggaatat

SEQ ID NO: 40244 - DNA, 778 bp, Homo Sapiens
gggaagatgaagattttaaagagcagactagacttctcaaggctagcatcccattctctgtggttggatccaatcagttgattgaagccaaaggaaagaaggtcagaggccgcctctacccctggggtgttgtggaagtggagaacccagagcacaatgactttctgaagctgagaaccatgctcatcacccacatgcaggatctccaggaggtgacccaggaccttcattatgaaaacttccgttctgagagactcaagagaggcggcaggaaagtggagaatgaggacatgaataaagaccagatcttgctggaaaaagaagctgagctccgccgcatgcaagagatgattgcaaggatgcaggcgcagatgcagatgcagatgcagggcggggatggcgatggcggggctctcgggcaccacgtgtaaggtgatgtgcacatatcaagaagtcagagaaaacactttcctggataaaaaagaaaacattccagatgcatgatccagctgtgtgttttcaatccttgggagggtgccatccacattttaacagtacctgtgcctgagaatttaatttttaaaagacttttgatgtgtttttgtatgaagtacttttaacgtatgtatttcattgctgggtcacactctgtgttttgggaggggaatgtcttccttttctttctccctaaccactaatgttagaattgatttccaagaatcggcatgtatacttaatactgaatttctttgatttaactgacttaacacctgactaa

SEQ ID NO: 40245 - DNA, 1054 bp, Homo Sapiens
  misc_feature (717)..(717): n is a, c, g, or t
gtcgctggcaaagagatctactcggataccttagagagcacgcccatgctggagaaggagaagtttccgcaggactacttccccgagtgcaaatggtcaagaaaaggcttcatccggacgaggtggtgcattgcagactgtgcctttgacttggtgaatatccatcttttccatgatgcttccaatctggtcgcctgggaaacaagcccttccgtgtactcgggaatccggcacaaggcactgggctacgtgctggacagaatcattgatcagcgattcgagaaggtttcctactttgtatttggtgatttcaacttccggctggattccaagtccgtcgtggagacgctctgcacaaaagccaccatgcagacggtccgggccgccgacaccaatgaagtggtgaagctcatatttcgtgagtcggacaacgaccggaaggttatgctccagttagaaaagaaactcttcgactacttcaaccaggaggttttccgagacaacaacggcaccgcgctcttggagtttgacaaggagttgtctgtctttaaggacagactgtatgaactggacatctcgttccctcccagctacccgtacagtgaggacgcccgccagggtgagcagtacatgaacacccggtgcccagcctggtgtgaccgcatcctcatgtccccgtctgccaaggagctggtgctgcggtcggagaccgaaganaaagttgtcacctatgaccacattgggcccaacgtctgcatgggagaccacaagcccgtgttcctggccttccgatcatgcccggggcaggtaacctcctgccatgggcaaaatggtggggcttgcacgacctggcgggaaaaaaagcctccgccccaaaagacccctcctgagcccccctggaacccgggaccgaataccccccccttaaacccgcatccgacaccctctcccgccccacttcgcaaaaggggcagccccaccttttccgtcaaacgccccgagccctgccggaaacaacccgcccatagccccccctgactcgcgccccggcatc

SEQ ID NO: 40246 - DNA, 663 bp, Homo Sapiens
  misc_feature (506)..(506): n is a, c, g, or t
  misc_feature (611)..(611): n is a, c, g, or t
  misc_feature (632)..(632): n is a, c, g, or t
  misc_feature (643)..(643): n is a, c, g, or t
  misc_feature (662)..(662): n is a, c, g, or t
gaaggactggaaggtggcggtggtgaaggtgcaggccgttggggcggctcagaggcaggtgactatgaaaggcttatatttccaacagagttccacagatgaagaaataacatttgtatttcaagaaaaggaagatcttcctgttacagaggataactttgtgaaacttcaagttaaagcttgtgctctgagccagataaatacaaagcttctggcagaaatgaagatgaaaaaggatttatttcctgttgggagagaaattgctggaattgtattagatgttggaagcaaggtatcattctttcaaccagatgatgaagtagttggaattttgcccctggactctgaagaccctggactttgtgaagttgttagagtacatgagcattacttggttcataaaccagaaaaggtcacatggacggaagcagcaggaagcattcgggatggagtgcgtgcctatacagctctgcattatctttctcatctctctcctggaaaatcantgctgataatggatggagcaagtgcatttggtacaatagctattcagttagcacatcatagaggagccaaagtgatttcaacagcaatgcagccttgaagataancaatgccttgaaaagattcanacctcccatancccgagtgatttgatgtanc

SEQ ID NO: 40247 - DNA, 373 bp, Homo Sapiens
cgcgttttttttttttttttttggtatttttagtagagatggggtttcaccatattggccaggctggtcttgaactcttgacctcaagtgatccaccctcctcagcctcccaaactgctaggattacaggcgtgagccaccgcgcctggccttcataactgttgacatacaagcattacagtaaaaattagactggaaagactatgccttgatttcaactttaatcacaattaatttattctttctttaaaaaaaaaatgtaatcccagaactttgggaggccaagtcgggtggatcacctgaggtcaggaattggagaccagcctggccaacatggtgaaacctgtctccagtaaaaatgcaattagccagg

SEQ ID NO: 40248 - DNA, 746 bp, Homo Sapiens
ctgctcacctggtgtggagggactctgcgagcgaggaggtcttcaccaccatggcctccgtctgccacacgctgatggtgcagcaccgcatgatggtacccaaagtcaggcttctctacagtttagcctttaatgccaggtttctgagacatctttggtttctaatatcttccatgtcaacacggatgatcacagggtctatggtaccgttgcttcaggtgatatccaggggttctcctatgtcttttgaagattctagtcgaatcatcccactcttttacctttttagctccttgtttagtcattcactaatttccatacatgataacgaattcttcggtgatcccatagaagttgtaggtcaaagacaatcatcaatgatgccttttactttagaagagctgataatgttgtctcgatgccttcgagatgcatgcctggggatcatcaagttggcttatccagaaaccaagccagaagttcgagaagaatatattacagcatttcagagtattggagttactactagctctgaaatgcaacaatgcatacagatggaacagaaaagatggattcagttatttaaggttatcaccaatctagtgaaaatgttgaagtccagagacacgaggagaaatttttgtcctccaaaccactggctgtcagaacaagaagatattaaagcagataaggtcactcagctctatgtgtcagcatccagacatgtgtggaggttccggcggatg

SEQ ID NO: 40249 - DNA, 755 bp, Homo Sapiens
ggaagatgccttcaaatcgaatgcatgggaagaaacttccatgaaaattgctacaggtgtgaggactgcaggatcctcctgtctgtcgagcccacggaccaaggctgctaccccctgaacaaccatctcttctgcaagccatgccatgtgaagcggagtgctgcggggtgctgctgagagtgcccgctgggcagtgaacagaccactagccccggctggggcccttccctgacttggtttcccttcctaacctgctcttgcacactttccttctgagcctccatggagaccagcctgcaagccggcccagcctgtccaggatacagtggggctgagcacccccaggccttccactcctctaccctctgggcaccagaaggctcctggaccatgagcttcacccccagaattccctgctgaccctgccccacttccagggaaaagctgggggaggttggacccctctcactgactagctgtctggtaggggtgctaggaccagcctcgcctgtggggttgagctgtttgaggacaaactccaaggtcccttaaaaagtgccttttagaggctgggcatggtggctcacgcttgtaatcccagcactttgggaggccaaggtgggtggatcacctgaggtcaggagttcaagaccagcctggccaacatggtgaaaccctgtctctactaaaatacaaaaatagccagcatggtagcaggtgctgtatccagctctggggaaactgagcagagaatg

SEQ ID NO: 40250 - DNA, 389 bp, Homo Sapiens
ctgctgtctcgtgggatgccacactggtgacccaggagttcttcaacccaagcacacctgtcaatgccaggtatgaatttggcccatccctgttcgtgggctgggcctcagctggcctgggcgtgctgggcggctccttcctctgctgcacatgcccggagccagatagacccaacagcagcccacagccctatcgggctggaccctctgctgctgcccgagaaccagttgttaaattgcccgcctccgccaagggccccctgcgtgtgtaatgtccagtctccagccaggctctgtcccctgccatacctagactgtgtgtttcatatttttttgggaagagaagtgaacatccagccccgacgggtaaaagaaagtgtaaattatgt

SEQ ID NO: 40251 - DNA, 904 bp, Homo Sapiens
  misc_feature (20)..(20): n is a, c, g, or t
  misc_feature (741)..(741): n is a, c, g, or t
  misc_feature (768)..(769): n is a, c, g, or t
  misc_feature (780)..(780): n is a, c, g, or t
  misc_feature (824)..(824): n is a, c, g, or t
  misc_feature (846)..(846): n is a, c, g, or t
  misc_feature (856)..(856): n is a, c, g, or t
  misc_feature (879)..(879): n is a, c, g, or t
cccggtagcacgtatagacnccaacagttcagcccacagtccctatcggcctggaccctctgctgctgcccgagagtacgtctgagctccgcctgccctggccagccccccacccagtggcccccttgcccagcatccagccagcctcgcagcaccctgggcagggccactggggcataggatgggcataggtgctctgagcagcttgtcctcaacacaagcacccaccctgcaatctgagacccagatcctcagagagacaccagaggcaggacccagcccccaggcatacacacagatgcaggtccaggcacggtcttgtctgcacagcctggtgggcaccagcatgcatccctggagacaggccctcaggcaccagcccggctgtttactcactgaagagctgcgtgggtgtctgctacgtgctgggccctagagatagagcagtggccaagacgtaccttagtacccaggtccttggggtgagcagaaaccttcaccctccccagtcccatgggctcctcacagcaaccccacaagggcagtgccgggatgctgaacgttcacacaaggacagggagggtctgagtttaggtctcaggttcttccagtgcgcccagggctgggggccacctacacagatggtgaggtcggaccatggcgcccctgcccccgggaatgggccccaggcagggctgctgtgagggccaaggtctggccacgctggccagtacccatgtnccggcctgaatgcacagcccctgcccnncgacccacagntcaactcactaaccagctctttctcttttgactttcagaccagntgttaaattgccccgcctccgncaagggcccnctgggttgtgtaatggtcagttncccaggcaggctctgtcccctgcct

SEQ ID NO: 40252 - DNA, 579 bp, Homo Sapiens
gtactgtgctactctttgattctactttccattgacctcactagccctcatgtgaagaataaaatgtcaaaaagggaatttattcgaaatacccgtcgcgctgctcaaaatattagtgaagattttgtagggcatctttatgacaatatctaccttattggccatgtggctgcataaaaagcacaattgctaggacttcagtttttacttcagactaaagctacccaaggacttagcagatatgggggttacatcagtgctggtcattgtagcctgagtatacaatcaagcttcagtgtgcaacctttttttcttttgccattttctattttagtaatttccttggggaactaaataattttgcagaatttttcctaattttgtttatcacgttttgcacaaagcagagccactgtctaacacagctgttaacgaatgataaactgacattatactctaaaagatggtgtatttgtgcattagatttgcctgaaaaactttatgcatttgcattctttatacagataccatgtgatgtgtacatatttgactgaagagatgtataggcattattatttt

SEQ ID NO: 40253 - DNA, 853 bp, Homo Sapiens
ctagtgcaaacatctgaagagctgtacacccacaagggtgactatttcccctgagtggccgtgttgtcccagtgccctggttcagtgtctcctgagtggatgacaggtcttcattctctatcttgaatgtattatggttactaatagttttataatggaggtctaagaattaaagttgtgtgggagtttcaggacaaaggaaggctaaaagtttgtcaagacgttgagcgtattttggttacctatgagaagggttgtgacagtgtacagtggcagctgttggccacgctgcagaaatgagctggagctcatgggttttcagctacatttttcataactttgtagtacatccatcttgagtaaattaagccacaatttggtacctagggtctcaaactaaaatttatttttataaatgaattttaaaagaaaaaatatctacttcttttaaagttagaagaaaattaacctgctgacaggcaacatttttggggtgctttctgcactagttttccttgtaaatgatttgagtgagtaggtttggtttctgacgaaagtagactggagggtagcattgtatgcctcaaatgtctcagtgtgtttggctcatacgtgggctatactttattattttggtatgcttacaaatgactaaccaatcaaattgtcattaatgtttggaaaatctgttaatgcacatgcacaataatttcctgaaagccataggacatgtctgtagtcagcaccacgatagcaccgtttcatgaaaggcatggcggctgcatttcataccacatcaaaatacagtaacatttctatactaaattaacagtaatacctcaaaactgctccg

SEQ ID NO: 40254 - DNA, 480 bp, Homo Sapiens
cggccggggggtgtttctgtatgagaacgcccggagtggggcagaggcggaacccgaggaccaggacgagggggagtggggcctggaccaggagcaggtgttctccttgggggatggcgtcagcggcggtttctttggcattagggacagcagcttcctgtagcgaggaagcgtgttgtcttacaagtcatccccgcagcagcccattggatgctttgctgtaaatacttacccggtcagcttggttttgaacctcagagaccatccactgtctttgacacctagaaggtggaaaaaggaaagagattcgagaagtgagagagggtcgggggcggtggctcctgtctataatcgcagcactttgggaggccgaggtgggcagatcagctgaggtcaggagatcgagaccagcctggccaacatggcgaaaccccgtctctactaaaaatacaaaaattagccaggactgatggcatgtgc

SEQ ID NO: 40255 - DNA, 723 bp, Homo Sapiens
ctttttctcaggacatctctggcaggtgcatttgtgcctgcccagcagttccagctgtggcaaaagtctcttccatggacaagtgtttgcacgggggttcagctgtgcccgcccccaggctgtgccccaccacagattctgccaaggatcagaactcatgtgaaacaaacagctgacgtcctctctcgatctgcaagcctttcaccaaccaaatagttgcctctctcgtcaccaaactggaacctcacaccagccggcaaaggaaggaagaaaggttttagagctgtgtgttctttctctggctttgattcttctttgagttctcttacttgccacgtacaggaccattatttatgagtgaaaagttgtagcacattccttttgcaggtctgagctaagcccctgaaagcagggtaatgctcataaaaggactgttcccgcggccccaaggtgcctgttgttcacacttaagggaagtttataaagctactggccccagatgctcagggtaaggagcaccaaagctgaggctggctcagagatctccagagaagctgcagcctgccctggccctggctctggccctggcccacattgcacatggaaacccaaaggcatatatctgcgtatgtgtggtacttagtcacatctttgtcaacaaactgttcgtttttaagttacaaatttgaatttaatgttgtcatcatcgtcatgtgtttcccc

SEQ ID NO: 40256 - DNA, 602 bp, Homo Sapiens
cgcgtccggccaaatttcttatgactgctgatgatgacatatttattcacatgccaaatctgattgagtaccttcaaagtttagaacaaattggtgttcaagacttttggattggtcgtgttcatcgtggtgcccctcccattagagataaaagcagcaaatactacgtgtcctatgaaatgtaccagtggccagcttaccctgactacacagccggagctgcctatgtaatctccggtgatgtagctgccaaagtctatgaggcatcacagacactaaattcaagtctttacatagacgatgtgttcatgggcctctgtgccaataaaatagggatagtaccgcaggaccatgtgtttttttctggagagggtaaaactccttatcatccctgcatctatgaaaaaatgatgacatctcatggacacttagaagatctccaggacctttggaagaatgctacagatcctaaagtaaaaaccatttccaaaggtttttttggtcaaatatactgcagattaatgaagataattctcctttgtaaaattagctatgtggacacatacccttgtagggctgcgtttatctaatagtacttgaat

SEQ ID NO: 40257 - DNA, 438 bp, Homo Sapiens
aagattcagagggaagaaggaaaatccagaggagacataagaagcccctggcagaagaagaggcagaccccacgctgacaggccccaggaagcagacgctttctccatccagctggccgtcatgccgctccttgccggtacccactgcttgccctgttcccagcagctcctgcttgtcttgtggccagaacggccataagcggatgctcctaatgacaaccctgctgcgtgccacctcatttcatcctcacagccacctcaggaaactcaggggaattggcttcatagtacagggggaaacaaaggcccagagagggtagctaccttgcctgagatcacacagctaggaaatgtgaagcctggacttgaacccagctctgtttgattccaaaatccaaggaagcctatgggaatattaaatgtcatcattgtgtttgt

SEQ ID NO: 40258 - DNA, 816 bp, Homo Sapiens
tgaagatgagtgagcgggccgcctcgctgagcaccatggtgcccctgcctcgcagcgcctactggcagcacatcacacggcagcacagcacgggacagctctaccgcttgcaagatgtttccagccctctgaagcttcatcgaacagagacttttccagcctacagatctgagcactgacagtaactgccaagaattgttaacacacttgtgatgtgtcagccacagattcacccaggaggtcacagaatgacagcaagggaaatgacgaccaagagaagaagcttaaagtcctggctaattgtgtggtcattggaaaactctgcaatacaataattttctttattttctttttcttttttaaattcttagtgtaattgaaacgtgctctatagatattgactctgtgttccctcttttacagctggacagaaagaagtcaatgtcacgaaatgattttctattgtagatactttgtcccttgcacttctctgaatctgtccttttgtggattcttgtgattttccttccaagtgtttcagttgtatgacagtcagtattgacaataaaatggcttttaattatttgttatttgtttacaccctattcctcagttattattactgtggttctgattaactactggaaattatatttgattatatcaccaattagttaaatcagtgcttcgactcactcttatctgttctgttcaaaactatttgttcaaagaacccgttagtgttgtttacagggttacagtttctctcacatgctttcctcacccctttaccccctttttgaaagcctttatttt

SEQ ID NO: 40259 - DNA, 884 bp, Homo Sapiens
  misc_feature (15)..(15): n is a, c, g, or t
  misc_feature (668)..(668): n is a, c, g, or t
  misc_feature (835)..(835): n is a, c, g, or t
  misc_feature (837)..(838): n is a, c, g, or t
actaaattaaatganagtttgaattagaggtaatttatgttttatatacagatttcaagacatttgctaattttgtagtttcatgtgattagtttccaaaggttacagataataaagaaatcagaaatggtacctttttaagaattgcatatttttttagacacaactattagcacattaagagggaagcaaagttactgtctatttaaaactgcaagcagttaactctcttaactcccttattacctaaacttgtctggctcccaggaacagccttatagagagagggagtattgtattgggaagaaaatgttactgaactattgactgaaagtaaatttagataaaatacagcttttttccttatgggcatttgttttgtttcaagtcatcataaactaggtattgcattgctatccgtggatacagacgcttagctcttaaaagattttttttttatgtaaactgttgaatatttgaaatagtccacttcaccttaatgggtcttgtctatcttcattagtcttcaaagaaaaaccatttgctaccaaagtaaatcagtattttgaatgtgcttctcttgttttttgtttattagctagttcctgtaagcatttccaccagaacttgaggcaaatcgtaaggaagctgtttcttttaaaacacanaccaccaccaaaaatttaaatgtacatattgcttaagtatttggctgtttttattttttaaaaggtataaacaccaaaaaaaaaattaacattgtatgaagatggaaaataagaagatgcactttctgtaactttgtctaaggatttaaatactaacttatgaactncnnattgattgaacttaaactatcgctttcttactggtaaaatatatgc

SEQ ID NO: 40260 - DNA, 795 bp, Homo Sapiens
tctagcgaggtgacagcgtagaaccaggacaaggtgtttttctcaaggctcatacagattctgaaaatcatggtccctagaacattttgtaaagagacaggttacttggtacttattgctgttatgctggtgtctcgaacatattgtgatgtttggatgattcaaaatgggacactaattaaaagtggtatcattggtcgtagcaggaaagatttcaagagatacttactcaacttcatcgctgccatgcctcttatctctctggttaataacttcttgaagtatgggttaaatgagcttaaactgtgcttccgagtaaggctcactaaatacctctatgaggagtatcttcaagctttcacatattataaaatggggaatctggacaacagaatagctaatccagaccagctgcttacacaagatgtagaaaaattttgtaacagtgtagtcgatctgtattcaaatcttagtaagccatttttagacatagttttgtatatctttaagttaacgagtgcaattggagctcagggcccagcgagcatgatggcctacttggttgtttctgggctattcctaactcgacttcgaagacccattggtaagatgacaataactgagcaaaagtatgaaggagaatatagatatgttaattctcggctcatcacaaacagtgaagaaattgccttttacaatgggaataaaagagaaaagcagacagtccactcagtctttccgaaaaactggtggaaacacctacataaatttccattttggtttcggtttttcaat

SEQ ID NO: 40261 - DNA, 1073 bp, Homo Sapiens
agcattttcacttaaacatttgtgaaaagcaccaagttttctctacttgctaagagttgtttaacatcaactaatagtgacttctttattgtttctaatgttgtacggaacaggatgctgaaaacgccattcaacagatgggtggccagtggcttggtggaagacaaatcagaactaactgggcaacccgaaagcctcccgctccaaagagtacatatgagtgtaggtgtattggagaagaaaaggaaatgtggaattttggagaaaaatacgctagattttaaatgttagagctgttcccggagacttattgcagaaatagatgagaagcaaatcaagactactattcaaaaatgtacttagttttcatttttgtaattataaataatattatttctaatgtcaagtctcctattaaatagaaaatactgggtaattttttagacattcgtgggggaggtttaatcctgaactgaagtataatatgtgtaatataagcattttgatcaaggttaatgttacctttacagtagtgtagtgaatgctacttttctctttctgcacattttatttaatgaattaaagacataaaccttttctctcaccagcaaataccaaacagctatcatatgatgaggttgtaaatcagtctagtccaagcaactgtactgtatactgtggaggtgttacttctgggctaacaggtatgggagccttccctgtgtggcattaattttttaaagtgcaaagcttaatatttgtaggatttttatataacttagtgtgatttgtttgttttggtttttwgtctaacagaacaactaatgcgtcagactttttcaccatttggacaaataatggraattcgagtccttccagataaaggrwatccattgttcggtagggatggtttttaaaaaaacattttcttggtaatgwactgggaaacmgaaaataataaaadaaavacttttcctccaaawadtttttgamattwcccgkttyttaaaatstccgtgggwwaaaaagkgraatttgsggggggggggcccgccgtttcccrccccttgggg

SEQ ID NO: 40262 - DNA, 649 bp, Homo Sapiens
  misc_feature (608)..(608): n is a, c, g, or t
  misc_feature (618)..(618): n is a, c, g, or t
  misc_feature (625)..(625): n is a, c, g, or t
  misc_feature (644)..(645): n is a, c, g, or t
atggaggacgagatggccaagactctatacgtcggtaacctttccagagatgtgacagaagctctaattctgcaactctttagccagattggaccttgtaaaaactgcaaaatgattatggatacagctggaaatgatccctattgttttgtggagtttcatgagcatcgtcatgcagctgcagcattagctgctatgaatggacggaagataatgggtaaggaagtcaaagtgaattgggcaacaacccctagcagtcaaaagaaagatacaagcagtagtaccgttgtcagcacacagcgttcacaagatcatttccatgtctttgttggtgatctcagcccagaaattacaactgaagatataaaagctgcttttgcaccatttggaagaatatcagatgcccgagtggtaaaagacatggcaacaggaaagtctaagggatatggctttgtctcctttttcaacaaatgggatgctgaaaacgccattcaacagatgggtggccagtggcttggtggaagacaaatcagaactaactgggcaacccgaaagcctcccgctccaaagagtacatatgagtgtaggtgtattggagaagaaagganatgtggattntggaganaatacgctagatttacccnnactt

SEQ ID NO: 40263 - DNA, 539 bp, Homo Sapiens
gaggcaagcggcacaagctcacaactaaaagtgtctgccatggaaaaggagttgtcataagggtgttggccttgccagggccttcctgggtgaggcgaagaagggaaggaaaggccttggaaagcagtcgttgcgccagacagcccagggaagagcggcagcctgaggacctagggccacctgctgttccctgggattcatgtccttctggggaggagggaggacccaggacaatggctgctgttcatgatctggagatggagagcatgaatctgaatatggggagagagatgaaagaagagctggaggaagaggagaaaatgagagaggatgggggaggtaaagatcgggccaagagtaaaaaggtccacaggattgtctcaaaatggatgctgcccgaaaagtcccgaggaacatacttggagagagctaactgcttcccgcctcccgtgttcatcatctccatcagcctggccgagctggcagtgtttatttactatgctgtgtggaagcctcagaaacagtggatcacgttggac

SEQ ID NO: 40264 - DNA, 538 bp, Homo Sapiens
atgaatctgaatatggggagagagatgaaagaagagctggaggaagaggagaaaatgagagaggatgggggaggtaaagatcgggccaagagtaaaaaggtccacaggattgtctcaaaatggatgctgcccgaaaagtcccgaggaacatacttggagagagctaactgcttcccgcctcccgtgttcatcatctccatcagcctggccgagctggcagtgtttatttactatgctgtgtggaagcctcagaaacagtggatcacgttggacacaggcatcttggagagtccctttatctacagtcctgagaagagggaggaagcctggaggtttatctcatacatgctggtacatgctgggtacccaactttcttgtacaaagttggcattataagaaagcattgcttatcaatttgttgcaacgaacaggtcactatcagtcaaaataaaatcattatttgccatccagctgatatcccctatagtgagtcgtattacatggtcatagctgtttcctggcagctctggcccgtgt

SEQ ID NO: 40265 - DNA, 582 bp, Homo Sapiens
tgcacagtgctgtcagaacggccgatctccagcccaagatgattccagcagtggtcttgctcttactccttttggttgaacaagcagcggccctgggagagcctcagctctgctatatcctggatgccatcctgtttctgtatggaattgtcctcaccctcctctactgtcgactgaagatccaagtgcgaaaggcagctataaccagctatgagaaatcagatggtgtttacacgggcctgagcaccaggaaccaggagacttacgagactctgaagcatgagaaaccaccacagtagctttagaatagatgcggtcatattcttctttggcttctggttcttccagccctcatggttggcatcacatatgcctgcatgccattaacaccagctggccctacccctataatgatcctgtgtcctaaattaatatacaccagtggttcctcctccctgttaaagactaatgctcagatgctgtttacggatatttatattctagtctcactctcttgtcccacccttcttctcttccccattcccaactccagctaaaatatgggaagggagaacccccaat

SEQ ID NO: 40266 - DNA, 578 bp, Homo Sapiens
atgtctggctaatttttgtatttttagtagaaatggggtttcgccacgttggccaggctggtcttgaactcctgacctcaggtgatccacccacctcggcctcccaaagtgttgggattacaggcgtgagccaccgcacccggcccttgtgtacatttttataagagaatttttttagctaggagttcagaatttttaaagtaccatttgaatgatcttaatttttctttcatgacaacacattccaaaatgaatcatgcttatgtactaagagggaaaatgtatttaagttaagggtgagagacttaagttataggtgaccttagagacctaaggtgagagacttgacacatggaaggagtaacattagggtctacctctacctcaatttagttagcgatttactacaatttcagagctttaacaaaagataaaaataaatcgtcaccaattgttattgcttctcatctttcatttttcaatgaacaagtaaggtattttcattcttatttttaggattttagtttttagtgtatggtacaaatgaacacagtttatattctaattcttactgcagc

SEQ ID NO: 40267 - DNA, 827 bp, Homo Sapiens
  misc_feature (12)..(12): n is a, c, g, or t
  misc_feature (228)..(228): n is a, c, g, or t
  misc_feature (278)..(278): n is a, c, g, or t
  misc_feature (741)..(741): n is a, c, g, or t
atggttgaattntgtgataatcccaaaactgcagctcatgtcaatgcttggcaagggaagaaggatcagacagctgctagtcttttaattaaatgtggagaaaggaggaaaaagaactaggagtaaaacgtgataaaaatgggaagatcatgatacaaaaaaacctctatttactagctttcaagaagagcaaaaaatcatcccactgcctgctaactgcccatctantgcggttatggatgtttctgagaatattagagcaaaaatttatgctatantgggcaaactagatttgaaaatttacctggcctatctgctgaagatttgtcacccttgtggtatcatacatagatatctgtgattttaaaatgggagaaatatggaatgaaatatatgaagaaataaaattagaaaaattaagaccagtcactacagataaaaaagcttggaagctattacaacagcatcagaaaatattggaaagatggttgttctctgcaaaggtgatataatgaaagccaagcatgcccaagacatgcaaaaatgaacaaaaagtatatgcaaaaatacagggccagcacaagcaaagagagctggctaataaatcatgggaagatttctgtggtagaacatcaaagctaaaacgttaaagaaagcaaaaaggcttcaagaaaaggtataggaagcctccagatacataaaagacacaaaatgaatatttcacaaacacatatttaaggncttaacacaaggtgcctctggtggggtagtaacagggaaagcatcctggccgattagtagggagactcggggtgatagggatattg

SEQ ID NO: 40268 - DNA, 551 bp, Homo Sapiens
ctcaatagtgccattgggaccctagcaaccaggtgtacctgagctacaataacgtctcctccttgaagatgcttgtggccaaggacaactgggtgctgtcctcggagatcagtcaggtccgcctgtacactctggaggatgacaagttcctctccttccacatggagatggtggtgcatgtggatgcagcccaggccttcctgctgctctcggacctgcgtcagaggccagagtgggacaagcactaccggagcgtggagctagtgcagcaggtagacgaggacgacgccatctaccacgtcaccagccctgccctcggaggtcacacaaagccccaggacttcgtgatcctggcctcgaggcggaagccttgtgacaatggggacccctatgtcatcgcgctgaggtcggtcacgctgcccacacaccgagagacgccagagtacagacgcggagagaccctctgctcaggcttctgcctctggcgcgagggggaccagctgaccaagtgctgctgggttagggtctccctgactgagctggtctcggca

SEQ ID NO: 40269 - DNA, 1413 bp, Homo Sapiens
gcgaataggcacagttacccccagcaaggtcagtaggtctccaaggacttgtgtccccgctgctgctcatctgatcactgagaagaggaggcctgtgtgggaacacacggtcattctaggggccttcccctgccctccagcaccctactggacacacccccagcgcatggagaagaaactgcagtgcagtacctgcggggaacaccgtcaagttccgctgtccagctgcaggcaacccacgcccaccatccgctggcttaaggatggacaggcctttcatggggagaaccgcattggaggcattcggctgcgccatcagcactggagtctcgtgatggagagcgtggtgccctcggaccgcggcacatacacctgcctggtagagaacgctgtgggcagcatccgttataacctaccttgctagatgtgctggcagcggtccccgcaccgtgccatcctgcaggccgggctccctggacaacacacagccgtggtgggcagcgacgtggatgcttgctgtgcaaggtgtacagctgatgccagccccacatccagtggttgaagcacatcgtcatcaacggcagcagcttcggagcgaggttccctatgtgcagtctaagactgcgacatcatagtcagaggtggaggcttgtactgggaacgtgtagcgaagagcagcgatacacctgctgtcggatcctcggcttactacagtcgctgagcagcgggcagcgaagagaccacattgtcgaacgccgaagcaagtattcgggaactgtagttggccgcgcatatgtcctatggcaaggtaagagcgagggcccacggacggaactactcgactaatattcattttgttctccttttcctgtgcgcgtgcttttcgtcatctataaagaatcaaaacgagagaacgaaaacaaaatacaaaaaacgaagagagagaagaaggagcggaaaagaaggaagaagaggaaaagcaaagaaaaacactggaaacgaaagagaaagagagagaaaaaaaagagataacgagagcaaaaaagaagagagaaacaaaaaaaaaagaaaaaaaaagcaagaaggaaaaagagaagagaaggagcaggaggcaaaagggaaggagagaaaaggagaaaagcaggagggaggggagaaggaggagcagaagccaaccacaggaagaatgagatgaagaagaaagaagaaggcaggggcgcggggcgggagaagaaaaagacacacagcagagagggggaaaacaaaaggaaaaaaaaacagaagagagaagtaaacagacagaagggaaaacaaaaaaaaggcagagacaaagaagacaagagaacaaaaacacaaaagagagacacaaacaggaacgagaagaagaaaaaaagaaaaaacgaaacaggcaag

SEQ ID NO: 40270 - DNA, 718 bp, Homo Sapiens
  misc_feature (5)..(5): n is a, c, g, or t
aaccntcctccaaaacgcctccataacaccagtaaagtccaaaacctctaccgaagacctcatgaatttagaacaaggcatgtccccaattaccatggcaacctttgccagagcacagaccccagagtcttgtggttctctaactccagaaaggacaatgtcccctattcaggttttggctgtgactggttcagctagctctcctgagcagggacgctccccagaaccaacagaaatcagtgccaagcatgcgatattcagagtctccccagaccggcagtcatcatggcagtttcagcgttcaaacagcaatagctcaagtgtgataactactgaggataataaaatccacattcacttaggaagtccttacatgcaagctgtagccagccctgtgagacctgccagcccttcagcaccactgcaggataaccgaactcaaggcttaattaacggggcactaaacaaaacaaccaataaagtcaccagcagtattactatcacaccaacagccacacctcttcctcgacaatcacaaattacagtaagtaatatatataactgaccacgctcaccctcatccagtccatactgatatttttgcaaggaactcaatccttttttaatcatccctccatatcccccaagactgactgaactcgtactttgggaaggtttgtgcatgaactatacaagagtatctgaaactaactggtgc

SEQ ID NO: 40271 - DNA, 571 bp, Homo Sapiens
atattttgttgagatatggcagaattcgtttatatggctggtaacatgtaaaatctatatcagcaaaagggtctacctttaaaataagcaataacaaagaagaaaaccaaattattgttcaaatttaggtttaaacttttgaagcaaactttttttatccttgtgcactgcaggcctggtactcagattttgctatgaggttaatgaagtaccaagctgtgcttgaataacgatatgttttctcagattttctgttgtacagtttaatttagcagtccatatcacattgcaaaagtagcaatgacctcataaaatacctcttcaaaatgcttaaattcatttcacacattaattttatctcagtcttgaagccaattcagtaggtgcattggaatcaagcctggctacctgcatgctgttccttttcttttcttcttttagccattttgctaagagacacagtcttctcatcacttcgtttctcctattttgttttactagttttaagatcagagttcactttctttggactctgcctatattttcttacctgaacttttgcaagttttca

SEQ ID NO: 40272 - DNA, 748 bp, Homo Sapiens
cttttcaagatacaacaaaagcagaagttacaagaatattgcggagaggttggaaagcaggatttaacctctagttctcttgttctcagagaacagcaggttgatagtagattatgtctctaggtagagacagatacatgagaagagcctccaaaactggaagcccatcataaggcatgagaatgtttaactataaagccttttattagttctttgatagctaagatggttgttggagaaagtgcttaagccactgtttatgttgctgcctcctctctcaaaaccagccaagatctgttcacacacctctgtggctgtctttccctgaaacatggtaactcaagactgcctgcctaggtttcttagattaattattcacataaattttgtttaatattggttgaacaagaaatctgactttaaaagattattaaggagaatattccttaactatactggcttgatttgaaacaggctcttattgccatttaaactgccagaaatctttgccaaggtcctggttaaaaaaattggaaacggttttcttagccccagctttaaaagctagagatctcagagaaatagctggcttaacaatgacagaacagcctaaaatttgtgcctacaccatgttctgagagtcgttcacatcaaattcttatcttttccaagccagtaagttggcttctccattcctggggtctgatattcttgacaatcatcagcaacaaagatcacagcactttcc

SEQ ID NO: 40273 - DNA, 656 bp, Homo Sapiens
tctactcaggtgacatcatcagtggcctccgagatgaaaccaacttcacagtgatcatcaacccttcaggggtagtgatgtggtacctgtatcccatcaagaacctggagatgtcccagcagtgaggagctgggacatgtgacaggctgtggtggcaccactgagcctagaccatggagccttggcatgcccagggcaagtggggaggttctctgctccccaggcctgctcggtgactgaccccatcatacccaaagtgcaatctcacggccaggttctatgccctgtccaagcgtaaaccctcttggaaacttcttttggggcaattttcctgtggccttcctggcctctacttccatgtgcgcagccccacagacgttgctgagcaactcgccagcctcctgagctccatgcccatcaggactctagcctctgaccttgctgttgactctgaaatcaggatttggaagttttcgaattaggagtagagagatctgacctcttgccaggaatgcccatggatcatgtgattggcttttctacccatagagggccttgcagcctgataccacctgggagtgagggtcacaaaggagaccttggctccctcaggtcaccaataaacctgttctttaatcaaaaaaaaaaaaaaaaaa

SEQ ID NO: 40274 - DNA, 496 bp, Homo Sapiens
gagatgctaaagaattagacagcaaatcaaaaggcctccagtggataatagatacaacgatagcttatcccaaagctgaacctatagatattcaaacctggatccttggatacaggaaaccaacagtcacacatgtacattacaggatctttccaattaaagatgtacccctggagactgatgaccttaccacttggctctatcagcggtttgttgaaaaagaagacctcttatcacatttttatgaaacaggagcttttccaccttccaagggccataaggaagctgtttccagggagatgaccctcagcaacttgtggatatttctcatacagtcttttgcatttttgtcaggctatatgtggtacaacatcattcagtatttttaccattgcctgttttaggaattgacgtggacttgtcaaggtcaccgtaggagttcagactttctttcataagtgtgcattattttacatgtgcaaatcagaatatattt

SEQ ID NO: 40275 - DNA, 879 bp, Homo Sapiens
  misc_feature (8)..(8): n is a, c, g, or t
gctgctgnatcatgcattcgctggctccatttcttatccttgttttaaaaattgttgaaggtgacacaccttctctccctgagagatatccaaaagaactaaatgccatcatggaaagcatgttgaacaagaatccttcattaagaccatctgctatcgaaattttaaaaatcccttaccttgatgagcagctacagaacctaatgtgtagatattcagaaatgactctggaagacaaaaatttggattgtcagaaggaggctgctcatataattaatgccatgcaaaaaaggatccacctgcagactctgagggcactgtcagaagtacagaaaatgacgccaagagaaaggatgcggctgaggaagctccaggcggctgatgagaaagccaggaagctgaaaaagattgtggaagaaaaatatgaagaaaatagcaaacgaatgcaagaattgagatctcggaactttcagcagctgagtgttgatgtactccatgaaaaaacacatttaaaaggaatggaagaaaaggaggagcaacctgagggaagactttcttgttcaccccaggacgaggatgaagagaggtggcaaggcagggaagaggaatctgatgaaccaactttagagaacctgcctgagtctcagcctattccttccatggacctccacgaacttgaatcaattgtagaggatgccacatctgaccttggataccatgagatcccagaagacccacttgtggctgaagagtactacgctgatgcatttgattcctattgtgaagagagtgatgaggaggaagaagaaatagcgttagaaagaccagagaaagaaatcaggatgagggatcccagcctgctttacagacaaccacagg

SEQ ID NO: 40276 - DNA, 551 bp, Homo Sapiens
gggccacatcatcagtgagcagcaggccaagtctctgctcaagaacgagaacacccgcaagtaattgtgcagcttcctctcattccctgctacttgtctcatgtcctggcaacaggaaaaaaagaattctgcctcctgtgtcagatccctgtttgcccttctggcctcttctgggcatcagcaaaggaatataaggaagttcttgggcctggtgtggtggctcacacctgtaatccaagcactttaagaggccgaggtgggcagatcacctgaggtcaggagttcaagaccagcctggccaacatggtgaaaccctgtctctactaaaaatacaaaaaattagccgggcgtggtggcaggcacctgtaatcccagccactagagagcctgaggcaggagaatcccttgaacctgggaggcagagattgcagtgagctgagattgcagtgagctgagatcacgccactgcactccagcctgggcaacaagagcaaaactccgtcacaaaaaaaaaaaaaagttctcttaggaactgtttcctgtgaagatag

SEQ ID NO: 40277 - DNA, 768 bp, Homo Sapiens
  misc_feature (133)..(133): n is a, c, g, or t
  misc_feature (768)..(768): n is a, c, g, or t
aagaaactcatctccagatgagactttggacttgggactttcgagttaatgctttggaggactattgcgaaggcttgactgtattttgaaatgttacaatggccaacattggaataaatggaaatcattctcntggaaacctagtgaaacaacactttttgctctccgaatggcaacatggaatcaaatcttagatccttgggtatatattcttctacgaaaggctgtccttaagaatctctataagcttgccagtcaatgctgtggagtgcatgtcatcagcttacatatttgggagcttagttccattaaaaattccttaaaggttgctgctatttctgagtcaccagttgcagagaaatcagcaagcacctagcttaataggacagtaaatctgtgtggggctagaacaaaattaagacatgtttggcaatatttcagttagttaaatacctgtagcctaactggaaaattcaggcttcatcatgtagtttgaagatactattgtcagattcaggttttgaaatttgtcaaataaacaggataactgtacatttttcacttgtttttgccaatgggaggtagacacaataaaataatgccatgggagtcacactgaaagcaattttgagcttatctgtcttatttatgctttgagtgaatcatctgttgaggtctaatgcctttacttggcctatttgccagaaacatcttaatgcaccctgcatagtgaaatggttattttgagatcaccgtctgtagctaccn

SEQ ID NO: 40278 - DNA, 582 bp, Homo Sapiens
caagaagcacaccggaattctccctagttttagacttggatgaaacactagtgcattgtagtctaaatgagctagaagatgcagcacttacttttccagtccttttccaagatgtcatttatcaggtttatgtgagattaagaccatttttcagggaattcctggaacgaatgtctcagatgtatgagatcattctttttactgcttctaagaaggtgtatgcagacaagttactgaacatactagaccctaaaaagcaactggtcaggcaccggcttttccgtgaacattgtgtttgtgtacaaggaaactatataaaggacttaaatattcttggaagagatctttcaaaaactataataattgacaactcaccacaagcctttgcatatcagctttctaatggaatccctatagaaagttggtttatggataaaaatgacaatgaactcctaaaattgattccattcctggagaagcttgtagaactgaatgaagatgttcgaccacacatcagagacagatttcgcttgcatgatttgctgcccccagattaagtacaaagacttgtcaaatcactga

SEQ ID NO: 40279 - DNA, 222 bp, Homo Sapiens
tctgaaatctaaagatgagtaatttggggttttgtaatgccaactgcaagtaattacaatattttaaaaatccatttattttacataagattttttgctttgcttttggatgggggaggtgttgttgctgttatttttaatgtgaacagtgttcttgctttgtacctggagagctctttctcaaatgtgttaggaattttccatattattaaaatgcaattt

SEQ ID NO: 40280 - DNA, 747 bp, Homo Sapiens
aaaacctacccaagaagcctatcagaatgaattaaagattgaaagtgtagaacgttccttcattctctcagccagttctgccacagaaagggatgaatggctagaagcgatttccagggcaatagaagagtatgccaagaaaagaatcaccttctgtcctagtaggagtcttgatgaggcagactcagaaaataaagaagaagttagtcctcttggatcgaaggctcccatctggattcctgataccagagccacaatgtgtatgatctgcacaagcgaattcactctcacctggagacgacaccactgccgggcctgtggaaagattgtatgccaagcttgttcgtctaataagtatggcttagattacctgaaaaatcaaccagcaagagtatgtgaacattgtttccaagaactgcagaaattagatcaccagcactcccctaggattggatctcctggaaatcacaaatctccttcaagtgccttatcatcagtcttacatagcattccatcagggaggaaacagaaaaaaatcccagctgctctcaaagaagtatcagcaaacacagaggattcttctatgagtggctacttgtacagatcaaagggcaataaaaaaccctggaaacacttttggtttgtcataaaaaataaagtactatatacatatgctgcaagtgaggacgtggccgctttggagagtcagcctttattaggattcactggttattcaagttaaagatg

SEQ ID NO: 40281 - DNA, 853 bp, Homo Sapiens
  misc_feature (70)..(70): n is a, c, g, or t
  misc_feature (79)..(79): n is a, c, g, or t
  misc_feature (135)..(135): n is a, c, g, or t
  misc_feature (561)..(561): n is a, c, g, or t
  misc_feature (722)..(722): n is a, c, g, or t
ggagttggtggatgggtgggcatggaacaggatgggcagagaaagggtagtgtgtgagggagctgagtangccaggtangcgattggaagagtgagcaggacacagaggggaggggaatgttttggcaagtttangggcacaggagatgtagtcgttccagggctgggggaggtgggagggatcacgcctataggtgtgggcacatgaaacgacctggaacttgcttcacagccctgaggaaggtggacttacataagcagctgtattccattagatgagtgggatttagggaacgcagaaggcacatccctttggaatggaagcttaggggttctcaggtgatagggagaggtggctgttaacagtgggctgcttggacacgcgtgtgcatgtgcacgcatgctggtgtgcatgctgggctgcctggcaaatctggtggtggtgggattcctcaaggagaaaacattccctcttgcaatggcaagaactaggggcagttctctgtccctcctcccaacccctcctttcccctgcccttgtcctgatgcctcaaggcttanagagaaacattgtatccagaccgagggctctgctgcttctttccagaaagtgattggcaaggctttgggagagaagagcagttctgcagctggccttgttccttcatcatcccccttccttgtgcattatgcacttgctgctgcctcctgggctctgatanaaaggcaggggttgttaaccctgaattgggtgaaagctttaggtaacccggacctgtccgtgccaaccttcctcttcccatttaggggacaatgggggccctaaaaggggttccccatcctcttggggaac

SEQ ID NO: 40282 - DNA, 1110 bp, Homo Sapiens
  misc_feature (748)..(748): n is a, c, g, or t
agagaaaaggagtgcagaattgcctgatgctgtgggacctattgttcagttacaagagaaactttatgtgcctgtaaaagaatacccagatgaggagcaaaatagaggcaagcccaattgggagcatctaaatgaagatttacatgtactaatcactgtggaagatgctcagaacagagcagaaatcaaattgaagagagcagttgaagaagtgaagaaattattggtacctgcagcagaaggagaagacagcctgaagaagatgcagctgatggagcttgcgattctgaatggcacctacagagatgccaacattaaatcaccagcccttgccttttctcttgcagcaacagcccaggctgctccaaggatcattactgggcctgcgccggttctcccaccagctgccctgcgtactcctacgccagctggccctaccataatgcctttgatcagacaaatacagaccgctgtcatgccaaacggaactcctcacccaactgctgcaatagttcctccagggcccgaagctggtttaatctatacaccctatgagtacccctacacattggcaccagctacatcaatccttgagtatcctattgaacctagtggtgtattaggtgcggtggctactaaagttcgaaggcacgatatgcgtgtccatccttaccaaaggattgtgaccgcagaccgagccgccaccggcaactaacctatgaccttctgacctctgaactcttcaccncatgatgacctgaccatgcctgcctgctgatcagttaactggtaatcgccttttgcttgcctgtcgtcagtgcagcgagctgaggcacttgtccgttcgtcttaccatctaccccaacaaaagacaaagaaattgttgtcctccactcagctttttttttttttttcctgtttgggggaaggtggtctagaaactgcacgtgatagtaagtaaagcaattagggcccaattctccccacagcctggatcatcttttaaatacccaccccaagccaacgggaaaaaaggcctccctttaaaaaggggaaaacaaaggcccttacttaccccaaggacagaggccgttatcggtgagaaacttt

SEQ ID NO: 40283 - DNA, 864 bp, Homo Sapiens
gaattccgggatcagaaaactccaaattaaggaaggtgaaatatgaggaaacagtattttatgggttgcagtacattcttaataagtacttaaaaggtaaagtagtaaccaaagagaaaatccaggaagccaaagatgtctacaaagaacatttccaagatgatgtctttaatgaaaagggatggaactacattcttgagaagtatgatgggcatcttccaatagaaataaaagctgttcctgagggctttgtcattcccagaggaaatgttctcttcacggtggaaaacacagatccagagtgttactggcttacaaattggattgagactattcttgttcagtcctggtatccaatcacagtggccacaaattctagagagcagaagaaaatattggccaaatatttgttagaaacttctggtaacttagatggtctggaatacaagttacatgattttggctacagaggagtctcttcccaagagactgctggcataggagcatctgctcacttggttaacttcaaaggaacagatacagtagcaggacttgctctaattaaaaaatattatggaacgaaagatcctgttccaggctattctgttccagcagcagaacacagtaccataacagcttgggggaaagaccatgaaaaagatgcttttgaacatattgtaacacagttttcatcagtgcctgtatctgtggtcagcgatagctatgacatttataatgcgtgtgagaaaatatggggtgaagatctaagacatttaatagtatcgagaagtacacaggcaccactaataatcagacctgattctggaaaccctcttgacactgtgttaaaggttttggagattt

SEQ ID NO: 40284 - DNA, 732 bp, Homo Sapiens
  misc_feature (543)..(543): n is a, c, g, or t
  misc_feature (564)..(564): n is a, c, g, or t
  misc_feature (567)..(567): n is a, c, g, or t
  misc_feature (605)..(605): n is a, c, g, or t
  misc_feature (618)..(618): n is a, c, g, or t
  misc_feature (671)..(671): n is a, c, g, or t
  misc_feature (685)..(685): n is a, c, g, or t
  misc_feature (698)..(698): n is a, c, g, or t
  misc_feature (716)..(716): n is a, c, g, or t
ctgtgctgtttcacaaaataaaaaacatgaatagcacgctcacgtttgtcactctgagtggagaactaagggccagacgagcagaggatggcatcgtcctggacttgcctctttatccagcccacccccaggacttccatgaagtagaggacttgataaagactgccataggcaacacactggtccaggacatctgttattctccagatacccaaaagctcctcgtccgcctcagtgacgtttacaacaggtcgtttctggagaacctgaaagtgaacacggagaatctgctgcaagttgaaaacacagggaaggtgaaagggcttattcttacccttaaaggagagcctggtgggcagacccaagcatttgacttttactcaagatattttgcaccgtgggttggtgtggctgaagacccagtgacagggtctgcacacgctgttctcagcagctactggtcccagcatctggggaagaaagaaatgcatgcttttcagtgttcccgccgaggaggagagctgggaatttcccttcgtccanacggaagggttgacattagangangtgcagctgttgttttagaaggcacactgacagcctanaagtggttatgcngtgatgctgctgtctctaaccaccaagtattttctgcttaaaaagaaatgttnggggctgcctttancaaatgtgcgtantaatctacttaatcctcntgttaaaaaaaaaaaa

SEQ ID NO: 40285 - DNA, 744 bp, Homo Sapiens
gctgaattagccaccaagtacgcaaacttttcagagggagcttgcaagcctggctatgcttcagccttgatgacggccatcttcccccggttctccaagccagcacccatgttcctggatgactcctttcgcaagtgggctagaatccgggagttcgtgccgccttttgggatcaaaggtcaagacaatctgatcaaagccatcttgtcagtcaccaaagagtaccgcctgacccctgccttggacagcctccgctgccgccgctgcatcatcgtgggcaatggaggcgttcttgccaacaagtctctggggtcacgaattgacgactatgacattgtggtgaggcccaggctctgagtgggcctgctctctgtagactgaattcagcaccagtgaaaggctttgagaaggacgtgggcagcaaaacgacactgcgcatcacctaccccgagggcgccatgcagcggcctgagcagtacgagcgcgattctctctttgtcctcgccggcttcaagtggcaggactttaagtggttgaaatacatcgtctacaaggagagagtgagtgcatcggatggcttctggaaatctgtggccactcgagtgcccaaggagccccctgagattcgaatcctcaacccatatttcatccaggaggccgcttcaccctcattggcctgcccttcaacaatggcctcatgggccgggggaacatccctacccttggcagtgtggcagtgaccag

SEQ ID NO: 40286 - DNA, 1047 bp, Homo Sapiens
  misc_feature (5)..(5): n is a, c, g, or t
  misc_feature (800)..(800): n is a, c, g, or t
  misc_feature (833)..(833): n is a, c, g, or t
  misc_feature (922)..(922): n is a, c, g, or t
  misc_feature (944)..(944): n is a, c, g, or t
  misc_feature (965)..(965): n is a, c, g, or t
  misc_feature (1007)..(1007): n is a, c, g, or t
gagcncatggggggaaagcagcgggacgaggatgactaggcctacgggaagccagtcaaatacgacccctcctttcgaggccccatcaagaacagaagctgcacagatgtcatctgctgcgtcctcttcctgctcttcattctaggttacatcgtggtggggattgtggcctggttgtatggagacccccggcaagtcctctaccccaggaactctactggggcctactgtggcatgggggagaacaaagataagccgtatctcctgtacttcaacatcttcagctgcatcctgtccagcaacatcatctcagttgctgagaacggcctacagtgccccacaccccaggtgtgtgtgtcctcctgcccggaggacccatggactgtgggaaaaaacgagttctcacagactgttggggaagtcttctatacaaaaaacaggaacttttgtctgccaggggtaccctggaatatgacggtgatcacaagcctgcaacaggaactctgccccagtttcctcctcccctctgctccagctctgggacgctgctttccatggaccaacattactccaccggcgctcccagggatcaccaatgacaccaccatacagcaggggatcagcggtcttattgacagcctcaatgcccgagacatcagtgttaagatctttgaagattttgcccagtcctggtattggattcttgttgccctgggggtggctctggtcttgagcctactgtttatcttgcttctgcgcctggtggctgggcccctggtgctggtgctgatcctgggagntgctggcgtgctggcatatggcatctactactngctgggaggagtaccgagtgcttgcgggacaagggcgccctccatctcccagcttggggtttcaccaccaaacctcagtgccctaccanaagcgtgcagggaaaacttggnctggcccgcccctgaaatccnggtttggccggtggctttgaaagccatccctggctggctggngggctcaatccttcctggcggggaaagcggaaatttcgta

SEQ ID NO: 40287 - DNA, 1057 bp, Homo Sapiens
tgttttcaggccgggtctggcttggtcttcccccgtaaggaaatggccggggagctccaggggacccaggcgccgtcgcttcggcggagctgggctgaccagccaggacagcggggtaaacccgaacaattctgcgcgaggtagggaggccatggcgtccggcagtaactggctctccggggtgaatgtcgtgctggtgatggbctacgggagcctggacttgaaagaggagattgatattcgactctccagggttcaggatatcaagtatgagccccagctccttgcagatgatgatgctagactactacaactggaaacccagggaaatcaaagttgctacaactatctgtataggatgaaagctctggatgccattcgtacctctgagatcccatttcattctgaaggccggcatccccgttccttaatgggcaagaatttccgctcctacctgctggatctgcgaaacactagtacgcctttcaagggtgtacgcaaagcactcattgatacccttttggatggctatgaaacagcccgctatgggacaggggtctttggccagaatgagtacctacgctatcaggaggccctgagtgagctggccactgcgtgagtttggaggggaacgtgtcagagggagctggtacagtagtgttggactgttgccacagtgcagtgaccttcataaagcatataaacaaaatccatgataccataagagttgtcaggttctagactattagatcagtctcttacattagaaagcagatgcggccgggcacagtggttcacgcctataatcccagcactttgggaggscgaggcgggaggatcatctgaggttgggaatccgagaccagcctgaccaacatggagaaacccgttctctactaaaawacaaattagccgggsgtgkkgggmtgcttgtaatctagcttytgggaggctgrgcaggrgatytytkaaccgggagsggggttgcggkaccaaatctbcattwwayccacctggcacaaaataaatytkttyaaaaaaaaaaaaaaaraasaga

SEQ ID NO: 40288 - DNA, 748 bp, Homo Sapiens
ggaaatggccggggagctccagggacccaggcgccgtcgcttcggcggagcctgggctgaccagccaggacagcggggtaaacccgaacaattctgcgcgaggtagggaggccatggcgtccggcagtaactggctctccggggtgaatgtcgtgctggtgatggcctacgggagcctggtgtttgtactgctatttatttttgtgaagaggcaaatcatgcgctttgcaatgaaatctcgaaggggacctcatgtccctgtgggacacaatgcccccaaggacttgaaagaggagattgatattcgactctccagggttcaggatatcaagtatgagccccagctccttgcagatgatgatgctagactactacaactggaaacccagggaaatcaaagttgctacaactatctgtataggatgaaagctctggatgccattcgtacctctgagatcccatttcattctgaaggccggcatccccgttccttaatgggcaagaatttccgctcctacctgctggatctgcgaaacactagtaccgcctttcaagggtgtacgcaaagcactcattgatacccttttggatggctattgaaaccagcccgctatggggacagggggtctttggccagactgagtacctacgctatcacggaggcctgagtgacgctggccactgcggtcacgccacgaatcggagctctcaaggacatcaaccagtcagcagccaagacctactcatc

SEQ ID NO: 40289 - DNA, 731 bp, Homo Sapiens
ggattcccgggacttgggaatagaagttcctgaagggtatgggattcacctctacttcacccatctggacattgagctgtcagagaactgtgcgtatgactcagtgcagataatctcaggagacactgaagaagggaggctctgtggacagaggagcagtaacaatccccactctccaattgtggaagagttccaagtcccatacaacaaactccaggtgatctttaagtcagacttttccaatgaagagcgttttacggggtttgctgcatactatgttgccacagacataaatgaatgcacagattttgtagatgtcccttgtagccacttctgcaacaatttcattggtggttacttctgctcctgccccccggaatatttcctccatgatgacatgaagaattgcggagttaattgcagtggggatgtattcactgcactgattggggagattgcaagtcccaattatcccaaaccatatccagagaactcaaggtgtgaataccagatccggttggagaaagggttccaagtggtggtgaccttgcggagagaagattttgatgtggaagcagctgactcagcgggaaactgccttgacagtttagttttttgttgcaggagatcggcaatttggtccttactgtggtcatggattccctggccctctaaatattgaaaccaagagtaatgctcttgatatcttctttcaacggatctacagggca

SEQ ID NO: 40290 - DNA, 933 bp, Homo Sapiens
ggacgcggcgggcggctccgggaggcgacgggacccccaggccggcagccgagtgaagaggcaggaactgtctacaaatgctccggctccgaagccccgagggaaagagcatctttcacggagcaccaggaattgacgacggtggaatttgctcagatcccctgaggccggttctttgagtttctgtctggccctccgggagaaccgtcccaaagttaactttgaaaacactcacaggagagggaaggctgtggggtccttcgcttctcaaaccccagatgcccccggaaagaacaccgccccccaccaccaccacaaccagatgtttttaaaaagagatgctaagcaaaaggcctgattatgaggaatgagccaaagtcatgcaaggcgtggggcgctatgggactgcgcagtgacgacccagtgaagtagatgccttgacgattcccatttcacggatgagacgactccggcacagagaagtcagagggcctgtcctgggtcacacagccacaggcggcccccagaacgggacttcagggtgcaccactgcaccccagcagagacctccgcctggcacacagggaatgctggagcaatacttaaatagcatggcagcttttcgtgtttggaagccttcagaatcatttcctaccctctcaaggaacccattctttagaggtacacaccgttcctgtcagagaggctatcttcccagtgctaaatgattttttgatgccctggaaattaaatttccactccaatttctgcatttgaggagatttttcctgtacgctgaactctgtcaaaagaggtataatggaaaagagggtaattctggggacccttttggaagacacgccccttggatttgggaagccctattacatttccgggaaggggttgggctttaaaaagggtgtgatacatcct

SEQ ID NO: 40291 - DNA, 814 bp, Homo Sapiens
  misc_feature (568)..(568): n is a, c, g, or t
  misc_feature (808)..(808): n is a, c, g, or t
agcttaaaaagctgcacgcaagtgttaaacttctgtaggaggaatactgttggcgtcaaaagcattgctgtttcaacaatggccaagaacaaattaagagggccgaagtccaggaatgtatttcacatagccagccaaaaaaactttaaggctaaaaacaaagcaaaaccagttaccactaatcttaagaaggttcttcatttttcctagaaaggtaaggatggtttcaagcatttgtctaaaaaaatataaaaaaaaaggaagaaaaataacctccctttcttgaaaacaaatgttgaaaagaaataaacattttaactacaaaaaaaaaaaaaaaaaaaaaaaaaaaaaaaaaaaaaaaaggggggggcccccaaaaattccccccggggggccccattccccccccccgtttttgtgttccaaagggggccccccataagatgggaggcgcgtatatttaatagcccaagaaggcacgggcgccggcattttaaacaccggctggtcgctggggaaagaccggcgctacgcgctgggcgcactcttgtggaaagggagggaccgnccttccactctccgggggggggggggacccaatagtggggggccacaatctaccccctcagaggagggatattatagcggccctcggaggggcaacaactttacacttttccaggcggggctattcgtgcgcgttaacccccagccggcaaatgcccctggcgcgctgggaacaaattttggcccgaccgcgagattgcttttgggacctttttttttcgcggacttggttttataaagncgcata

SEQ ID NO: 40292 - DNA, 794 bp, Homo Sapiens
  misc_feature (684)..(684): n is a, c, g, or t
ggtccatctggtgatccaaaccctcagagccagtctctagcccatgaccagcactcaccccttccaccagcaacatgtgattaattttctcattagtggtatcacactataccagccatttgagccagcaaccttttctgttggctaactcactggccagctctcaccagcggtgtctggggaagtagttctctttgtatgaagcatacctgtgccagagctgtggttgaggaggagccagttttaggttcgaagaagccattggctcctcacttagccattagacttgaataggatttccttggggtgggttggtctgtcattacccagccttctctgagcatcctaggaaatcacagattgttaaaggaaatgccgcttcactgctgaagacaccatctggcgacagcaaatgcaaaagaggggactctagggtcttcacttttctggggaaatgttcacgacttctcaaggtacgcttagaccatatgtgcattcaggggactcttgtctttgccagcactcctcaggtgagcccgggatggctatctgaaatgtctggaaaatagagtcccttccccaaacatctgacatggccactaaatctttagacttgccttatagatccttccatatcatccccaagtgccccttctgcctcagtcctgttcctctgggcaatanctctagggaaaagaaggtattagactgctgtgccaaattccgagcaactactttaaatgctctagaggattcttagccagtcctgtgaaagtgggccctcctccgggggg

SEQ ID NO: 40293 - DNA, 868 bp, Homo Sapiens
  misc_feature (826)..(826): n is a, c, g, or t
  misc_feature (828)..(828): n is a, c, g, or t
  misc_feature (830)..(830): n is a, c, g, or t
  misc_feature (832)..(833): n is a, c, g, or t
  misc_feature (838)..(841): n is a, c, g, or t
  misc_feature (853)..(853): n is a, c, g, or t
ggtccggaattcctcgggataaggagagcaggtacagcgtgggcagcgccagagagcccttccctaccctgccccgcccatgtgcctccaccctgacctggagagaccacctgtagggacaaagaagtgaacttggagcaggtccaccggcgcatgaacagcctcatggatgaagacattgctcacaagcagatttccccagcgtcgattgagctctcggccctggagatggggggcctggctcccacccagaccttggagccgacacgggagtaccagaacacccagctctcggtcagcacctttctgccagagcagagcagccatggcaccagccggacactctcatcagggcccagcagcaacctgccgctgccgctgagcagctcggcgaccatgccctccatgcagtgcaaacacaggtcacccaacggggggctgttccggcagagcccggtgaagacccccatccccatgtccttccagcccgtgcctggaggcgtccttccagaggctctggacacctcccacgggacctccatctgactgcgccgcctgccctcctgcccaccctcccacccacccgaccagcagagctttttaatacaagaaaacaacaacacaaaccacacacactcgcacacacacacatacacagagactctttcatttttcttgtacatatgtgtaaataatgacagaatggagtggggtaaaagtgtattttgaatattcccaattttcgaagtcagtaaaaaaacacaaaaactgtatgaatgactttgtaaattttgttctatatgaataaaaaggcaattacttgtgnananannaaaannnnaaaaaaaaaaanaaaaaaaaaaggggg

SEQ ID NO: 40294 - DNA, 682 bp, Homo Sapiens
cccacgcgtccgcccacgcgtccgggaccagactgggagcaagtctgataaggaaacagaaaagggagcatctcgaatagatgaaaaatcatcaaaggccaaagtgaatgatttcttagctgagatttttaagaagattggctctaaagaaaacactaaagagggactagcagagttatatgaatataagaagaaatactcagatgctgacattgaaccatttctgaaaaattcctcacagttcttccagagctatgtcgaaagaggccttcgggtgattgagatggagagggagggcaaaggtcgtatttccacttcaacaggcatctcccctcagatggaagtcacatgtgtgcccacgcccacaagcacagtgtcctccataggtaacacaaatggggaagaagtggggccatctgtctacttggaaaggctaaagatcctccgacagcgatgtggtctggacaacacaaagcaagatgaccgacctcctttgacctctttgctctccaaaccagcagttcctactgtcgcctcttccacagacatgctccacagcaaactctctcagctccgggagtcacgggagcagcaccagcattcagacctggattctaaccagactcactcttcaggaactgtgacctcctcctcctccacagctaacatagacgacttgaaa

SEQ ID NO: 40295 - DNA, 511 bp, Homo Sapiens
gaggactcaggggtcagccccacttgctctgaccactgcccctaccagagcccaccaagcaaggccaaccggcagctctgttcccgcagccgctcaagctctggctcttcaccctgccactcctggtcaccagccactcgaaggaacttcagatgtgagagcagagggccgtgttcagacagaacgccaagcatccggcacgccaggaagcggcgggaaaaggccattggggaaggccgcgtggtgtacattcaaaatctctccagcgacatgagctcccgagagctgaagaggcgctttgaagtgtttggtgagattgaggagtgcgaggtgctgacaagaaataggagaggcgagaagtacggcttcatcacctaccggtgttctgagcacgcggccctctctttgacaaagggcgctgccctgaggaagcgcaacgagccctccttccagctgagctacggagggctccggcacttctgctggcccagatacactgactacgattcca

SEQ ID NO: 40296 - DNA, 303 bp, Homo Sapiens
gggggacgaggagggaagcctctgtgctgctcacctgcccaaagcccagctcagcgggtacgcagtggaggcgacaaggaaccaatcacaactacagaggtttctctgatcctcctccactcccgctgcttccacttgactaagcttaaaaaaactgcttttgccatggctcatcggagtttatacttatttcttacaaaatgtttcctgttatttgctggaccagtcccaaagaacaggcagatgttcttattagaagatcagccgaaaagaaaaacaaaacacgtccgacgacacccttgg

SEQ ID NO: 40297 - DNA, 437 bp, Homo Sapiens
ctgtgttacctttcaagtttatctcaataaccaggtcatcagggacccattgttctcttcagaaccctatctgggagagaaggcgaaccacctccgggtttccatcatgtcaaggtcacaggcatccatgtgtgcaaaccatctgccccagctgcctccacagactgctgtctccttgtcctcctcggccctgccccacttcagggctgctgtgagatggaattccaggaaagaacttcaggtgtctggaccctttctatctagataatatttttagattcttctgctccctagtgacctacctgggggcaaagaaattgcaaggacttttttttaagggtcagagttttcaaaacaaaagcatcttccctagaaatttttgtgaattgtttgcacttgtgcctgttttaaattaaattgagtgttcaaagccaaaa

SEQ ID NO: 40298 - DNA, 486 bp, Homo Sapiens
ttttttttttttttttgggttgttttcaggttttctgtttttctttttttgcggttgagtcttaaccactttgcccaggctggtcttcacctcagaggctctagtcatcctccttccttggcttcccaaagtactgggattacaggcgtgagccactgtgcccagccatggcagtttcttagattaaatatacacttactatataacccatccattccaatcctagctgtttacccaagagaaatgaaaacatgtgatctcataaaatcttgtatgagaatgtttacagtagctgttttttgtaatcacccaaacttggaaacagcccaatgtcttctaactggtgaatggataaaaaaaaaaactgtgctctattcataccatggaatactgttcactatttacaaaggaactactgatataaaccacaacatgggccgggtgcagtggctcatgcctgtaatcccaacactttgggaggctgag

SEQ ID NO: 40299 - DNA, 991 bp, Homo Sapiens
  misc_feature (807)..(807): n is a, c, g, or t
  misc_feature (887)..(887): n is a, c, g, or t
atttattaatggactttttctaatagtaatagcgttttttgtgtttatggagtcagtggctagattgattgatcctccagaattagacactcacatgttaacaccagtctcagttggagggctgatagtaaaccttattggtatctgtgcctttagccatgcccatagccatgcccatggagcttctcaaggaagctgtcactcatctgatcacagccattcacaccatatgcatggacacagtgaccatgggcatggtcacagccacggatctgcgggtggaggcatgaatgctaacatgaggggtgtatttctacatgttttggcagatacacttggcagcattggtgtgatcgtatccacagttcttatagagcagtttggatggttcatcgctgacccactctgttctctttttattgctatattaatatttctcagtgttgttccactgattaaagatgcctgccaggttctactcctgagattgccaccagaatatgaaaaagaactacatattgctttagaaaagatacagaaaattgaaggattaatatcataccgagaccctcatttttggcgtcattctgctagtattgtggcaggaacaattcatatacaggtgacatctgatgtgctagaacaaagaatagtacagcaggttacaggaatacttaaagatgctggagtaaacaatttaacaattcaagtggaaaaggaggcatactttcaacatatgtctggcctaagtactggatttcatgatgttctggctatgacaaaaccaatggaatccatgaaatactngcaagatggtaactacatcatgtgagataactcaagaattacccctggagaataaccaatgaagattaaatggactccgnatttggtaatattggccagaagggataaaaattaacccctttaactggtccagaaacaggaggttcccttactaattgggatcaaggggaatcttttctttgga

SEQ ID NO: 40300 - DNA, 877 bp, Homo Sapiens
gcacgggggagaagccctacgcgtgcacgcagtgcggcaaagccttccgctggaagtccaactttaatttgcacaagaagaaccacatggtggagaagacctacgaatgtaaagaatgcgggaaatcctttggcgatctcgtgtcccggaggaaacacatgaggattcacatcgtcaagaaacccgtggaatgtcggcagtgcgggaagaccttccgaaaccagtccatccttaagactcacatgaactctcacactggagagaaaccatacgggtgcgatctctgcgggaaagctttcagcgcgagttcaaacctcaccgcacacaggaagatacacacgcaagagagacgctacgaatgcgccgcctgcgggaaagtcttcggtgactatttatcccggcggaggcacatgagcgttcaccttgtaaagaaacgagttgagtgtaggcagtgtggcaaggccttcaggaaccagtcaacgctgaagacgcacatgcgaagccacacgggggagaaaccgtacgaatgcgatcactgtgggaaggccttcagcataggctccaacctgaatgtgcacaggcggatccacaccggggagaagccctacgaatgccttgtctgcgggaaagccttcagcgaccactcatccctcaggagccacgtgaaaactcaccggggagagaagctctttgtgtcatccgtgtgggaaaaggctccagtgagcgcgcctgctttagagacacaggatgattcagaccggaaacagacctcgtgggtgtcaagaggaagcctctgctgagctcgcaccttacttgggtgcaaaagaatccacggacttgggagaagtccagttcctgtaaaaactggcgaccacga

SEQ ID NO: 40301 - DNA, 842 bp, Homo Sapiens
  misc_feature (683)..(683): n is a, c, g, or t
gccgctgccacccgggctttgagggctcagcgtgccagtgcgagaggaccactgagggctgcctgaacccgcggcgtgttgagtgtagtggtcgtggccggtgccgctgcaacgtatgcgagtgccattcaggctaccagctgcctctgtgccaggagtgccccggctgcccctcaccctgtggcaagtacatctcctgcgccgagtgcctgaagttcgaaaagggcccctttgggaagaactgcagcgcggcgtgtccgggcctgcagctgtcgaacaaccccgtgaagggcaggacctgcaaggagagggactcagagggctgctgggtggcctacacgctggagcagcaggacgggatggaccgctacctcatctatgtggatgagagccgagagtgtgtggcaggccccaacatcgccgccatcgtcgggggcaccgtggcaggcatcgtgctgatcggcattctcctgctggtcatctggaaggctctgatccacctgagcgacctccgggagtacaggcgctttgagaaggagaagctcaagtcccagtggaacaatgataatccccttttcaagagcgccaccacgacggtcatgaaccccaagtttgctgagagttaggagcacttggtgaagacaaggccgtcaggacccaccatgtctgccccatcacgcggncgagacatggcttgccacagcttcttgaggatgtcaccaattaaccagaaatccagttattttcccccctccaaatgacagccatgggccggcccggtgcttctggggggctcgttccgggggacagctcccctctggactggcaacagtctttgcatg

SEQ ID NO: 40302 - DNA, 1060 bp, Homo Sapiens
  misc_feature (984)..(984): n is a, c, g, or t
tgcaactcacgcaaggatgtaaagccagaaaacaagcagtaactgctatgcctgacaaaactgttgctgcacacatctgtactcgtcaatcaacaaaacctgatgcaaaaaacagaaaaggggtgatgtaggagatggtcaggttggtaggagaagctataaggaaagacgcaattggaaggtcgggaggttttccaaagcttcaggagagaataaagctgaaggcagctttattaattaattctcttaccctgaggctgagggcgaacagtaggtagcaagggagtgtaaaggaatttatctagataagtttgtttacttatgccctccggaaatcatgcaagactgctccctgcaaaggggggcgacaatgttcattactcacaaattgtgttggcttcaggcctttggtattctgtctctactgaataaatacaaatggttccagcctatcaggactgcactctcttctcggctgcactaaagctggcactcccccagccgttctcatgcaaaatacctgtgtcagaatactcctttcatccatcactcagccagagtcttcaggacagactcggcatgggacttgtccaaaaaattctaatcaaaagaggaaaattttggaatatgccaggaatagtggaattttattttttacatttttttataggcccatatgctctatctcaagaaacaagatgattgtaacatgtccatgattaaactattggcagattattgctgtgttaatctctgtagtctaatgagttctttgttctgttctgctgccttttacgtttttcttgtcctttcaaaagtgtttcttgaaagaaacaaagcgaataggcagttagcacagcacagctacccctttaccaaccagtctatggaaaacacccctcatccaaaatatggggttagtttagaatctaactgggggcatttaagatgaatcccacctcactttctggtcactttcagcancccagggggcattgagccaaatattccatttcgtggggttatttagggaggaaacttttaaaactcctgttttggt

SEQ ID NO: 40303 - DNA, 1046 bp, Homo Sapiens
gtaggagatggtcaggttggtaggagaagctataaggaaagacgcaattggaaggtcgggaggttttccaaagcttcaggagagaataaagctgaaggcagctttattaattaattctcttaccctgaggctgagggcgaacagtaggtagcaagggagtgtaaaggaatttatctagataagtttgtttacttatgccctccggaaatcatgcaagactgctccctgcaaaggggggcgacaatgttcattactcacaaattgtgttggcttcaggcctttggtattctgtctctactgaataaatacaaatggttccagcctatcaggactgcactctcttctcggctgcactaaagctggcactcccccagccgttctcatgcaaaatacctgtgtcagaatactcctttcatccatcactcagccagagtcttcaggacagactcggcatgggacttgtccaaaaaaattctaatcaaaagaggaaaatttgggaatatgccaggaatagtggaattttattttttaaatttttttataggcccatatgctctatctcaagaaacaagatgattgtaacatgtccatgattaactattggcaggattattgctgtgttaatctctgtagtctaaatgagttccttggttctggttctgcttgccttttacgttttcctgtgtccctttcaaaaaggtgtccttgaacagacaccaaagcgaatagggccagttaggcaacagcacaagtacgccttaccaagcagtctatgggaagaacccctcatccaaatcaaggggttaggtaaagaaatcttaactgggggcaacttacggaatgcagttcccgtccagtgtcgggatcactttagaaaggcccgaggggattgaggcccaaattattcagattctgtgataataagggggggaaacgtgcaacaccctagttgggtattactataacgacacattcatatatccccatacattcaagatgaaatgcccacacggaattggaaatattcaggggcgatagatatcacc

SEQ ID NO: 40304 - DNA, 585 bp, Homo Sapiens
gcttgaaggctctggcttaacagagaaagagactaatgtgtccaatcatttttaaaaatcatccatgaaaaagtgtcttgagttgtggacccattagcaagtgacattgtcacatcagaactcatgaaactgatgtaaggcaattaatttgcttctgtttttaggtctgggagggcaaaaaagaggtgggtgggatgaaacatgttttggggggggatgcactgaaaatctgagaactatttacctatcactctagttttgaagcaaagatggacttcagtggggaggggccaaaaccgttgttgtgttaaaatttattttattaaattttgtgccagtattttttttcttaaaaatcgtcttaagctctaaggtggtctcagtattgcaatatcatgtaagtttgtttttatttgccggctgaggattctgtcacaatgaaagaaaactgtttatatagaccccattggaaaagcaaaacgctctcactgagatcagggatcccaaattcatgggacttatataagaaggacaattaatgctgatttgggtacaggggaattatgtgtgtgaatgtcatctaca

SEQ ID NO: 40305 - DNA, 497 bp, Homo Sapiens
cacgagggagactttgacctgtgtcgagagactatccagcctttcatgaataaaacaaacgagacccagacttccctcaatggggtctaccagcccccaattcacttccagaacagtgaattctatggcttctccgaattctactactgcaccgaggatgtgttacgaatggggggagactacaatgctgctaaatttactaaagctgcaaaggattattgtgcaacaaagtggtccattttgcgggaacgctttgaccgaggactgtacgcctctcatgctgacctccacaggcttaagtatcagtgcttcaaatcggcctggatgtttgaggtgtttcataggggcttttcgtttcctgtcaactataaaagcttaaagactgccttgcaagtttacgacaaggaggttcagtggacccttggagccatcctctacaggacccgctttctaccattaagaaagctcctgctgcttctgtaccccgcctgtccctc

SEQ ID NO: 40306 - DNA, 660 bp, Homo Sapiens
cgtcgaccccgcgtccggggaagagaagaacctgaaagtgctctatcagttccggggtgtcctgcatcaggtgatggtgctggacagtgaggccctccggataccaaagcagtcccacaggatcgatacagatggataaactgccaagaaccagatttttaaaaggccgcaaaaaatcttttcctgggagtctacaaatttggaaatgaaaaaacccagacatcagatgtttttattttatattattattatagaaggtggtaccattatcaattatgtgaagggacatgcagacaccccagcttttgagggtgctgggggtaggactgaggcagccccactgggaaccagactgcagcctggcccatggctgttttcccaaggatcagttcctggagggaagggctctggccctgactccgctgtgtcccgagcacacgtgctgaccgcagcccgccgccctgtagttcttggctgggtctggaggtgtctgtggagcaccctgccctcaccacaggagcgtgagccacttctgcagtccacgctgaacatgggaaacaacctgaaaagcaggcaggcctcccggtcagggagcctctgctgtgctggcttcccatgaccacctcctcctgctgaaatattactgcttgaatctggagc

SEQ ID NO: 40307 - DNA, 712 bp, Homo Sapiens
ggcggacccaacacagcagtgcagcattggaagaaaacaatctctctcttcgacatacactatcagacatggaatacagactaaaagaactggaatattgtaaacgtaatttagagcaagagaatcaaaaccttagaatgcaggtttctgagacttgcacaggcccaatgttgcaggctaaaatggatgagattggcaaccactacacggagatggtaaaaaacttgaggatggagaaagatagagagatctgcagactgaggtcccaattaaaccagtaccataaagatgtttcaaagagagaaggaagttgtagtgacttccaatttaagcttcatgaactgacaagcttgctggaagagaaggattccctcataaagcgtcagtcagaggaactctccaagttgcggcaagaaatatattcctctcataaccaaccctccactggtggaaggactactattaccactaaaaagtacaggacacaatatccaatcctaggcctcctatatgatgactacgaatatataccaccaggtagagaaacacagactattgtgattgagaaaacagaagacaaatacacttgtccatgaatggatccactttaaagtattacaactcaaagccgttttttttgtgtgtgtgtgtctctgcattagtactttgttattttcccatcactaaaggccaatcagaaatttggaccatg

SEQ ID NO: 40308 - DNA, 698 bp, Homo Sapiens
tctaatagaagattcctctgttcagaaggatggtctcaatcagacaactataccagtttctcctccaagtactacaaagccatcgagggcaagtactgcttcaccatgtaataataacataaatgcagctacagctgtggctctacaggaaccccgaaagttaagttatgctgaagtgtgccagaagccccctaaagagccatcttcagttcttgtgcagccactacgggaacttcgctccaatgtggtgtctcccaccaaaaatgaagacaatggagctcctgagaactccgttgagaaaccacatgagaagccagaagcaagggctagtaaggattattctggcttccgaggcaatataatccccaggggagcagcaggaaaaatcagggaacagagacgccagtttagccatagggctatacctcagggagtgactcgacgtaatggcaaagagcaatatgtgccacccagatcaccaaagtaaaaaacaacaaaactattcaaaaacttcactctcttcccattaaacttgaactgtggctatattgaactgttttggaggggagggggtagccaggaaggaaacaagagaaagtacgtccatttcattatggattttggagttgtgagtgataggatcccaaaattcatctctaatgtggtttttaaatgctggaggattccaatcaatataa

SEQ ID NO: 40309 - DNA, 691 bp, Homo Sapiens
ggaggaggagacagaggaggacagtgacctgtcagattatggtgatgatgtggatgggaggaaagacgccttggctgaaccatgtttcatgttgattggggagatttttgaacttcgaggaatgtttaaatgggtgagaagaacattaattgccctcgttcaggtcacttttggaagaaccatcaacaaacaaatccgggacacagtcagctggattttcagtgagcaaatgttggtttactacatcaatattttccgggatgctttttggccaaatgggaagttggcaccaccgaccacaatcagaagcaaagagcaaagtcaggaaacaaaacagagagcacagcaaaagctgcttgaaaacattccagatatgcttcagagccttgttggacagcaaaatgcccgccacggtataataaaaatattcaatgcactgcaagaaacaagagccaacaagcatctgttatatgcgctgatggaactgctgctaattgaactgtgtcctgagctgagagttcatttagatcaacttaaagctggccaagtttgagactacacaaataaaccaccagaaaaatgtctgtgtaataatagacatgaaacattttcctcttttccacagagggcttaactgagaaccgtattgatttttattttagttacctccctctagttttatgtgaaatta

SEQ ID NO: 40310 - DNA, 891 bp, Homo Sapiens
gaaaccagtcctgataaggaggaagccagcatccccaagaagctgcagaccgccaggccttcagacagccagagcaagcgattgcattcggtcagaaccagcagcagtggcaccgcccagaggtcccttttatctccactgcatcgaagtgggagcgtggaggacaattaccacaccagcttccttttcggcctttccaccagccagcagcacctcacgaagtctgctggcctgggccttaagggctggcactcggatatcttggccccccagacctctaccccttccctgaccagcagctggtattttgccacagagtcctcacacttctactctgcctcagccatctacggaggcagtgccagttactctgcctacagctgcagccagctgcccacttgcggagaccaagtctattctgtgcgcaggcggcagaagccaagtgacagagctgactcgcggcggagctggcatgaagagagcccctttgaaaagcagtttaaacgcagaagctgccaaatggaatttggagagagcatcatgtcagagaacaggtcacgggaagagctggggaaagtgggcagtcagtctagcttttcgggcagcatggaaatcattgaggtctcctgagaagaaagacacttgtgacttctatagaccatttttttttcttggtcacaaaaaaattccctgtaaatctgaaatatatatatgtacatacatatatatttttcggaaaatggagctatgggggtaaaagcaacaggtgggatcaacgccagttgttacctctcttaacattctggcattggagaaaatcagctaaatactttctctccaaaaaaaatgggaagggccagatgcttaaactccccccctaagacggaggga

SEQ ID NO: 40311 - DNA, 581 bp, Homo Sapiens
caagaaggaatagttatattaaaaaagaagtggattttgagcaccagaaccactacggtattagagcaaaagttaaaaaccatcatgttcctgagcagctcatgaagtaccacactgaggcttccaccactttcattaagatccaggtggaagatgttgatgagcctcctcttttcctccttccatattatgtatttgaagtttttgaagaaaccccacagggatcatttgtaggcgtggtgtctgccacagacccagacaataggaaatctcctatcaggtattctattactaggagcaaagtgttcaatatcaatgataatggtacaatcactacaagtaactcactggatcgtgaaatcagtgcttggtacaacctaagtattacagccacagaaaaatacaatatagaacagatctcttcgatcccactgtatgtgcaagttcttaacatcaatgatcatgctcctgagttctctcaatactatgagacttatgtttgtgaaaatgcaggctctggtcaggtaattcagactatcagtgcagtggatagagatgaatccatagaagagcaccatttt

SEQ ID NO: 40312 - DNA, 812 bp, Homo Sapiens
  misc_feature (7)..(8): n is a, c, g, or t
  misc_feature (11)..(11): n is a, c, g, or t
  misc_feature (16)..(17): n is a, c, g, or t
  misc_feature (20)..(20): n is a, c, g, or t
  misc_feature (28)..(29): n is a, c, g, or t
  misc_feature (35)..(35): n is a, c, g, or t
  misc_feature (40)..(40): n is a, c, g, or t
  misc_feature (769)..(769): n is a, c, g, or t
  misc_feature (792)..(792): n is a, c, g, or t
ctggaannccnttggnnaanactagaanncccttnggatngggacgcgcgccattgtgttggtacccgggaattcggccattatggccgggtacaagaagccaaattaaaagcatagggattgaatccggatggaactccagccctttcaaccctgggtggattttctccagcctccaagccatcatcaccaagagaagtaaaagctgaagagaaatcaccaatctccattaatgtgaagacagtcaaaaaagaacctgaggatagacaacaggcttccaaaagcccttacaatggtgtaagaaaagacagcaagagaagtagaaatagcagaagtgcaagtcgatcgaggtcaagaacacgatcacgttctagatcacatactccaagaagacactataataataggcggagtcgatctggaacatacagctcgagatcaagaagcaggtcccgcagtcacagtgaaagccctcgaagacatcataatcatggttctcctcaccttaaggccaagcataccagagatgatttaaaaagttcaaacagacatggtcataaaaggaaaaaatctcgttctcgatctcagagcaagtctcgggatcactcagatgcagccaagaaacacaggcatgaaaggggacatcatagggacaggcgtgaacgatctcgcttctttgagaggtcccatagcaagcaccatggtggcagtcgctcaggacatggcaggcacaggcgctgactttctcttcctttgaagctgcattagntcttgggtttgcctatctacagngtgatgtatggactctcact

SEQ ID NO: 40313 - DNA, 764 bp, Homo Sapiens
ccacatacacactgtcatgcactcaactatatttaaaatatatacgtctattctttatgccttgccctagccagatggaagaagatgaagaaggaaaccaggtgaactcagcaaggcagactggctgcttacttcagcactattggaattatttcccgctgttgccaatggaaatcaaagaaaatggatgtgacgtctgtgcaggtggacggcagtccgaggggcttatttcacttgcttctcagtgcaacttgataggagaatccagcatcttaaagttgcatatgtgtagcactaatgtttctttttaaatagttgggggaaaatgacctagaaaaccaaattgcagtttggtagccaaaattaactcttggtttatttgtcctttgtgtgtgaaaagtcctactattccgtgcgtcagacttcctcacagaactgttgactggttttggttcttagtactattgagatctttcgcgtcgatcccaacggccttagcggcggcagactggaataacaccttacacctttctggcctgcatttctgtagacttcactctcaagggaggagttttcttttcttacgttttgacttttgcacaccatatgcactagggattctggaaacttctagcatgactgcaaagtggccaagagaataaagtccttgatgataaatcacagtatatcccttgagcctcaccttattgccagtgctagattttttctttttaatctctccgtttttgctaacgaaaacttga

SEQ ID NO: 40314 - DNA, 882 bp, Homo Sapiens
attgaacagcagatgctagaagacaagaaacgggccacagactgggaggccacaaatgaagccatcgaggagcaggtggctcgggaatcctacctgcagtggttgcgggatcaggagaaacaggctcgccaggtccgaggccccagccagccccggaaagccagcgccacatgcagttcggccacagcagcagcctccagtggcctggaggagtggactagccggtccccgcggcagcggagttcagcctcgtcacctgagcaccctgagctgcatgctgaattgggcatgaagcccccttccccaggcactgttttagctcttgccaaacctccttcgccctgtgcgccaggtacaagcagtcagttctcggcaggggccgaccgggcaacttccccccttgtgtccctctaccctgctttggagtgccgggccctcattcagcagatgtccccctctgcctttggtctgaatgactgggatgatgatgagatcctagcttcggtgctggcagtgtcccaacaggaatacctagacagtatgaagaaaaacaaagtgcacagagacccgcccccagacaagagttgatggagacccagggattggacaccatctcccaaccccagtactcctgctctccggtgccacctcaccttctttggcttcttccctcttgcctccttctgttctttctgctctcccctcttttccctcctcctcacttccctctggctagcccacccctgcactctctctcattgccgctgccactatcacctgtctctctgccagctgatgtgccctggttgcccccccaccccatcccgcacagaaacaatccctgcaattccacagggggactccgggcaaaggtggccaaac

SEQ ID NO: 40315 - DNA, 665 bp, Homo Sapiens
ttttttttttcacagagaagatcttgaagattcttcttaagcagaaaaatgagcatcatcatggacacagccattatgcctctgagtcgcttccctccaagaaggaccaggaggagggggtgatggagaagctgcagaacggggacctggaccacatgattcctcagcactgcagcagtgagctggacggcaaggcgcccatggtggacgagaaggtcattgtgggctcgctctctgtgcaggacctgcaggcttcccagagtgcttgctactggctgaaaggtgtccgctactctgatatcggcactctggcctggatgatcactctgagcgacggcctccataatttcatcgatggcctggccatcggtgcttccttcactgtgtcagttttccaaggcatcagcacctcggtggccatcctctgtgaggagttcccacatgagctaggagactttgtcatcctgctcaacgctgggatgagcatccaacaagctctcttcttcaacttcctttctgcctgctgctgctacctgggtctggcctttggcatcctggccggcagccacttctctgccaactggatttttgcgctagctggaggaatgttcttgtatatttctctggctgatatgttccctgagatgaatgaggtctgtcaagag

SEQ ID NO: 40316 - DNA, 583 bp, Homo Sapiens
aggctgtttcttcattaaactctagtcattccaggtctcatgggaatgatcaccatagcaaggaacatcaacgctccaaatcacctcgggaccctgatgcaaactgggattctccttcccgtgtacctttttcaagtgggcagcactcaactcaatctttcccaccctcattgatgtcaaagtccaattcaatgttacagaaacccactgcctatgtgcggcccatggacggacaggagtccatggaaccaaagctgtcctctgagcactacagcagccaatcccatggcaacagcatgactgagctgaagcccagcagcaaagcacatctcaccaagctgaaaataccttcccaaccactggatgcatcagcttctggtgatgtgagctgtgtggatgaaatcctaaaagagatgacgcattcatggcctccccctctaacggctattcatacaccatgcaaaacagaaccttccaaatttccttttccactaaggagtctcagcagtccaattttggcactggagaacaaaaaagatataatccttctaaaacttcaaatgggcaccagtctaaatctatg

SEQ ID NO: 40317 - DNA, 637 bp, Homo Sapiens
tgggtgttcatctttcttttgcacttttaaataatatcttaagctcctttacaattaaagaattagcacagtgaaaccatacacagagagaaacattggttattgtcctcagtgtttttcgctgatacttattttgatgaaagtgataccacgttatatagctgtttctctgtcgctcctttttgttactcacagcccatcctgggcatctctccaggttagcaggtggggtttggagttgtttttgttacaattggtattcctggcttgattccattacctggtgttggacattgggttcttttatgcttcttgccaccacaagcagtgctgtagtgggcatctctgccaggtgttctttttgagaacccttgtcaccatgtgtgaaggaaggagtaattttgaggagccctggtgtcagcaggagaacctggagggagatgaagtgtggggacggtcagttctagctgtgagcactgtcctcactctggaactcatcagtggcgccgatggatactggctcatagtgcttctgaagatcaggtctggatatctcactctcctgagatgccagtatagacacagaaccaaagcaaagtgtttactaagtaaaaaaaaaaaaaaaaaaacgcgggcg

SEQ ID NO: 40318 - DNA, 493 bp, Homo Sapiens
  misc_feature (391)..(391): n is a, c, g, or t
  misc_feature (431)..(431): n is a, c, g, or t
ttaaaagaagccagtgaagtgttcaaaaacttgattgatcgaaatgcagaaaactggtgttattatgaaggcttggaaaaagctctacaaattagcactttagaagagaggcttcaaatttatgaagaaattagtaagcagcaccccaaagcaattacacccagaagattacctttgactcttgtcccaggtttctataatccaggaacttgttactaattatgaagcctctcttaaaacgtgtgacttttttagcccatatgagaatggggagaaggaacccccgacaacactactctgggttcagtatttcctggcacagcactttgataaacttggacagtattctttggctttggattatattaatgctgcaattgctagtactccnactctaatagaattattctatatgaaagcaaaaatttacnaggtaaaatctgaatcctgttttttgagtagttgaagaattcagctactttaagaatccttg

SEQ ID NO: 40319 - DNA, 864 bp, Homo Sapiens
tcagcagcctgcagtcttggaagaagaagaggtcatgatagctcatgctcatccacaggaagtctacaatgaatatgtacccagagggtgcaagaataaatgccattcacatttccacgatacactcggccagtcagacgatctcattcaccaccatcatgactaccatcatattctccatcatcaccaccaccaaaaccaccatcctcacagtcacagccagcgctactctcgggaggagctgaaagatgccggcgtcgccactctggcctggatggtgataatgggtgatggcctgcacaatttcagcgatggcctagcaattggtgctgcttttactgaaggcttatcaagtggtttaagtacttctgttgctgtgttctgtcatgagttgcctcatgaattaggtgactttgctgttctactaaaggctggcatgaccgttaagcaggctgtcctttataatgcattgtcagccatgctggcgtatcttggaatggcaacaggaattttcattggtcattatgctgaaaatgtttctatgtggatatttgcacttactgctggcttattcatgtatgttgctctggttgatatggtacctgaaatgctgcacaatgatgctagtgaccatggatgtagccgctgggggtatttctttttacagaatgctgggatgcttttgggttttgggaattatgttacttatttccatatttgaacataaaatcgtggtttcgtataaatttcaagttaaaggtttaaatggtaagaagtagcttaaaaagttgtcataaggtttcaggaagggcataggggaagatgagtttggtatggctggtactatggcagccgttttaaaat

SEQ ID NO: 40320 - DNA, 757 bp, Homo Sapiens
cagcagtcccctcagcgtgctcactagttagcagggtcctcacctagctctagcagcagtaattctgtcaaccccatagcctcacttggagccctgcagacattagctggagcaacggctggcctcaatgttggctctttggcaggaatggctgctttaaatggtggcctgggcagcagtggcctttccaatggcaccgggagcaccatggaggccctcactcaggcctactcgggtatccagcaatatgctgctgctgcgctccccactctgtacaaccagaatcttctgacacagcagagtattggtgctgctggaagccagaaggaaggtccagagggagccaacctgttcatctaccacctgccccaggagtttggtgatcaggacctgctgcagatgtttatgccctttgggaatgtcgtgtctgccaaggttttcatagacaagcagacaaacctgagcaagtgttttggttttgtaagttacgacaatcctgtttcggcccaagctgccatccagtccatgaacggctttcagattggcatgaagcggcttaaagtgcagctcaaacgttcgaagaatgacagcaagccctactgagcgtgctcccctctgagactggagtgagagggtcttctggtaagtggggggaggagcacccttaatgattcgaagccctgaggctgtgtgttgacagccctggaccctgatccctgccactctcgcaggcacagcttgccctgaagactcggct

SEQ ID NO: 40321 - DNA, 756 bp, Homo Sapiens
  misc_feature (15)..(15): n is a, c, g, or t
  misc_feature (22)..(22): n is a, c, g, or t
tcattgtaccccagnacttatnacctttaataacaagcaattgcacatcaaaatcagttcccgtgaggagacgttcatttgaatttttagatttattgttgcaagagtggcagactcattcattggaaagacatgcagccgtcttggttgaaactattaaaaagggaattcatgatgctgacgctgaggccagagtggaggcaagaaagacatacatgggtcttagaaaccactttcctggtgaagctgaaacattatataattcccttgagccatcttatcagaagagtcttcaaacttacttaaagagttctggcagtgtagcatctcttccacaatcagacaggtcctcatccagctcacaggaaagtctcaatcgccctttttcttccaaatggtctacagcaaatccatcaactgtggctggaagagtatcagcaggcagcagcaaagccagttcccttccaggaagcctgcagcgttcacgaagtgacattgatgtgaatgctgctgcaggtgccaaggcacatcatgctgctggacaagtctgtgcgaagcgggcgcttaggtgcaggtgccctgaatgcaggttcctatgcgtcactagaatgtgaagccttttggagatctgggagaactgcaaagctctactctgtctaaccaaaccctaaacatatattccaaaactctattcagtttggatttctttatgttttttatggctatcaaattaaaaagttgacgttggttttgcgt

SEQ ID NO: 40322 - DNA, 635 bp, Homo Sapiens
  misc_feature (635)..(635): n is a, c, g, or t
ggagagtcaacgggaccctggccgtctccagagccatcggggatgtcttccagaagccctacgtgtctggggaggccgatgcagcttcccgggcgctgacgggctccgaggactacctgctgcttgcctgtgatggcttctttgacgtcgtaccccaccaggaagttgttggcctggtccagagccacctgaccaggcagcagggcagcgggctccgtgtcgccgaggagctggtggctgcggcccgggagcggggctcccacgacaacatcacggtcatggtggtcttcctcagggacccccaagagctgctggagggcgggaaccagggagaaggggacccccaggcagaagggaggaggcaggacttgccctccagccttccagaacctgagacccaggctccaccaagaagctagggtgggttccaggcccctgccctccccttcctcccatccttgtccttctctccctcagaagcctcaggacccaacaggtggcaggcagtggacagggtgcccgcccacagtgctttcccagcaccccaaagccaggcggacaaccccccggagcccgtctgggggctggggaactgcattgggttgcggacagaagttgaagggaagctagaaacn

SEQ ID NO: 40323 - DNA, 583 bp, Homo Sapiens
  misc_feature (393)..(393): n is a, c, g, or t
cacgaggtgacttttttttttttttaatgtagacatggggtctcactctgttgcccaggttggtctcaaactcctgggctcaagcgatcatcccaccttgcgcttcccaaagtgctgggattacactatgcctggccccttcaacagatttgaccgagtgtgtaccttgtgccatgcactgttctgggcacttggggtatagcagtgaacaaaacaagatcccagctctcaagggcttacattctagcagggagaaacaggcaagcaatgaacacaagtgaaattatctaacaggttaaaagattatttgggccaggcgcagtggctcatgcctgtaatccaagcactttgggaggccgaggtgggtggatcacctgaggtcaggagttcagnaccagcctgaccaatatagcgaaaccccgtctctactaaaaatataaaaattagccgggcgtgttggcgggcgccagtggtcccagctactcgggaggccgtgacaggagaattgcttgaacctggggagtggaggttgcagtgaactgagatcgtgccattgcactccagcctgggtgacagattaagg

SEQ ID NO: 40324 - DNA, 797 bp, Homo Sapiens
aattcccgggagccacagaccgtgttcccccgagagctggctgtggaggccatgaagaggcagtaccatgcccagtgcttcacgtgccgcacctgccgccgccagctggctgggcagagcttctaccagaaggatgggcgacccctctgcgaaccctgctaccaggacacactggagaggtgcggcaagtgtggcgaggtggtccgggaccacatcatcagggccctgggccaggccttccacccctcctgcttcacgtgtgtgacctgcgcccggtgcattggggatgagagctttgccctgggcagccagaacgaggtgtactgcctggacgacttctacaggaaattcgcccccgtctgcagcatctgtgaaaatcccatcatccctcgggatgggaaagatgccttcaaaatcgaatgcatgggaagaaacttccatgaaaattgctacaggtgtgaggactgcaggatcctcctgtctgtcgagcccacggaccaaggctgctaccccctgaacaaccatctcttctgcaagccatgccatgtgaagcggagtgctgcggggtgctgctgagagtgcccgctgggcagtgaacagaccactagccccggctggggcccttccctgacttggtttcccttcctaacctgctcttgcacactttccttctgagcctccatggagaccagcctgcaagccggcccagcctgtccaggatacagtggggctgagcacccccaggccttccactcctctaccctctgggcaccagaaggctcctggaccatgagctt

SEQ ID NO: 40325 - DNA, 694 bp, Homo Sapiens
gtgcttcacgtgccgcacctgccgccgccagctggctgggcagagcttctaccagaaggatgggcgacccctctgcgaaccctgctaccaggacacactggagaggtgcggcaagtgtggcgaggtggtccgggaccacatcatcagggccctgggccaggccttccacccctcctgcttcacgtgtgtgacctgcgcccggtgcattggggatgagagctttgccctgggcagccagaacgaggtgtactgcctggacgacttctacaggtacgagaagggtttgtgcactgggtggggtgcagggacagggcgagacccaagcagggtgaaggagctgagcttgagtcctgggtgctgggccagagtttcctgtctactggtttattataaagaatattacagggctgggctgggcgcggtggctcacgcctgtaatcccagcactttgggaggccgaggcgggtggatcacgaggtcaggagatcgagatcatcctggctaacatggtgaaaccccgtctctactaaaaatacaaaaaaaattagccaggcatggtggcgggcgcctgtagtcccagctactcgggaggctgaggcaggagaatggcgtgaacctgggaggcagagcttgcagtgagccgagatcacgccactgcactccagcctgggcaacagagtgtgagactccgtct

SEQ ID NO: 40326 - DNA, 963 bp, Homo Sapiens
  misc_feature (41)..(41): n is a, c, g, or t
tcccaatgacatatccaatgctcctggggtatctggagcangaggttgtcaggacaacacatataaccaccaaggatgtgttggcctttggagttcccctttaggttcctagtgatgtggaggtttatgggtgaaaaattagtggagagggaactcctctcccccattttgtgtagagtgaaaatagcctgaagcccctactcagcagggctctgggaatgtgccttccttattttagtttcagaattgctgggaaagttaccccactggtgggtgaggatctatcctcaacctacatccagatcctatgtgctgcttgcacagaggcctttggcttttgacccaggagggccgcgaggctggagctgccctgtctttcattgagccttagcatttccctctcaggcttcctctcaagctcaaggaactcacccccagataagaagctggtgcctcttgtctctctcatttcagaaacggactttctcatcatgctttcctatggtgggtatgaggggccagctgataccaaccaactggcctggatctatctatctggatttgacttgaattttgacaatgggtatcgggttaaaaaacaaaatggggttgcaaattttggcccataaggagtctttccactggttcattttttcaggggggggtggggtctttcacacctagaaaagacccatgcgggagcttcttggggaaaaggaagactgggaaaggggggcccacggataaagaagaccccctggggggggcaggggcttggtttagggccccggaaacctcccacaacccggcttggaactttgaaaccccacaagggggcttgggggtaaaatttccgaacaattccatggggttcctagggaaaaacctgcatttgcggttggcggaacaccacccctgccctcctaagggcgcaggatcccccccggacatcatgggaaaatg

SEQ ID NO: 40327 - DNA, 849 bp, Homo Sapiens
ggatttcggacgccgactgcagagggatttgaagagagtggtggatgctaggctgaggctcagcgaggagctcagcggcgggaggatcaagccgaagcctgtggaggtccaggtggtcacgcatcacatgcagcgctacgccgtgtggttcggaggctccatgctggcctcgactcccgagttctttcaggtctgccacaccaagaaggactatgaagagtacgggcccagcatctgccgccacaaccccgtctttggagtcatgtcctagtgtctgcctgaacgcgtcgttcgatggtgtcacgttggggaacaagtgtccttcagaacccagagaaggccgccgttctgtaaatagcgacgtcggtgttgctgcccagcagcgtgcttgcattgccggtgcatgaggcgcggcgcgggcccttcagtaaaagccatttatccgtgtgccgaccgctgtctgccagcctcctccttctcccgccctcctcaccctcgctctccctcctcctcctcctccgagctgctagctgacaaatacaattctgaaggaatccaaatgtgactttgaaaattgttagagaaaacaacattagaaaatggcgcaaaatcgttaggtcccaggagagaatgtgggggcgcaaacccttttcctcccagcctatttttgtaaataaaatgtttaaacctgaaatacaaatcggagtttatatttcctatcattttggattttatgggatttgggaacaactggctgatcctaagcacgaatgatatttgatggttatggatggctggaatcccaaggtttttaattggtgaaggcatgttcttgatatgtttaaaaaa

SEQ ID NO: 40328 - DNA, 721 bp, Homo Sapiens
gcgtccgcccacactcactcctgctcagctgccgactgctacaaccggcgagagccccacgtgcctgggacatcctgtgctcaccccaagagccggaagcagaaccacctgcccaaagtgctccaccccagcaaccctcacattagcagtggctccactgtggccacctgcttgagccagggtggcctcctggaagacctggacaacctcatcctggaggacctgaaggaggaggaggaggaagaggaggaggtggaggacgaggagggcgggcccagggagtgacccctgccaggtgcagatacaaaccagacacggtctgtggctactttgtgttattataagatatgagctcaaaccgagatatgaatgaccttggggagccatctgaggccaagatattgacgggggggattcctgggtcccattttcagcgcccagggtcacagatccacagtgggaagttctgtgggacacattggcactgagccacaaagaaggtgtggccagaacaacttgggctcctgctgaccaatgtcctctagggcctaggggacagaggaacacagagtcacagcttcaggggccgaatgagcatggcggccttcctgagagaatatgccccaccacgaaactcagcccagtagacaccatcctggtagcggcttcggtagtggccgccgtggtgccacacaccgttgaggttgggagtgggcacagg

SEQ ID NO: 40329 - DNA, 797 bp, Homo Sapiens
  misc_feature (557)..(557): n is a, c, g, or t
  misc_feature (593)..(593): n is a, c, g, or t
  misc_feature (598)..(598): n is a, c, g, or t
gggggttcaagagattaattgctctccgacaagaaagactaatgggcagtcctgtggcctaagtaatatacatatagttggattggattgtcagcagtaacattggaaatttaggtttttaaatcccaatattaactttttactcttaaaaagaattttgctgattatatataaaggtagtctcatttcatttgtctctcatgtaggcttgaatatttgttaatttgaattaaatcaaacattgtaaaaattaaaacaaaatttaagattgcatgaaaatgttatactgttaataaagctaaacataaataagtctgttaaaatgaatggtagacactagtgtttcttagtgcaattcaaaaaatgtcaagatgtcatttaaagacacaattttgattaattatgcatacatgagaattgaattacatgctataaatatgagatttcatcttccgtatggtattcaaccatttttaaatattttatttcaccatattgcaaatttttaggcacaataaaaagcaccctaaacaatgtaagcagaatgtgcatgttanagaacatatttatggaaaaaaaatttttgaaacttnaatanattggtgattttgcttagagatcagcttctactagatgctcctttacaacatgttagcagatctcagctcattgttttagaaatcacatggtcatgctagaccctaacagttggccaaatacctatgatggagaaatcatttctgagaaaactgaataagagctctcactttcgtcttacttaccccaactgctattcc

SEQ ID NO: 40330 - DNA, 889 bp, Homo Sapiens
ggctggaccggtccggattctcgggattgatatccagggattttttgtccggtggtaggagagattatacagtccaagttcagttgagactttgcctggcagagacaagttgccctcaagaagataactatccaaatagtctatgtataaaagtaaatgggaagctatttcctttgcctggctatgcaccaccgcctaaaaatgggattgaacagaagcgccctggacgccccttgaatattacatctttagttaggttatcttcagctgtgccaaaccaaatttccatttcttgggcatcagaaattgggaagaattactctatgtctgtatatcttgtacggcagcttacatcagccatgttattacagagattaaaaatgaaaggtattagaaaccctgatcattccagagcactaattaaagaaaaacttactgcagatcctgatagtgaaattgctacaactagccttcgggtatccttgatgtgccctttaggaaaaatgaggctgacaatcccatgccgtgcagtgacttgtacacatctgcagtgttttgatgctgccctctatctacaaatgaatgagaaaaaagcccacctggatttgtccctgtgtgtgacaaaaaagctgcctatgaaagttctaatattagatgggctttttatggaaatttctcaaatgactgttctgatgtagatgagatcaaattcccagaagatgtttcttggtgtccaatgagaccgaagaaagaagctttggaaagtatccagccaaccgggttacaaaaaatagaaaggttcaagccgtcctccattaagcccttggtttagtgaaccgtagcccaggtgaaggccaagccagaaaaaaagttagatgtttaatggatc

SEQ ID NO: 40331 - DNA, 700 bp, Homo Sapiens
gtccgctagataaatgggtatgagtattatagaacaattagaccctgtatcttttagcaattacttgaagaaataccataatactatatgtggaagacatcccattggggtgttattaaatgctatcacagagctccagaagaatggaatgaatatgagtttttcgtttttgaattatgcccagtcgagccagtgtagaaactggcaagacagttcagtgagttatgcagctggagcactcacggtccactgaagctctgaatcctcagggatgccacctgcacattctcatactctgtccggggtcccagcctagcctttaccacgatactggtcctggtttggggggattctgaaacctcaaactaatagaactttcttctctttttttctagtaggtgtagtccttccttaatttcaactcattaaaaaatgctttatagtttagggcagtggaaggaaggctggcatcaaaatattttgatcaaaaaagatgacaatgtaaaggctcagttgtggcagacagttttttgaaagtaacttgtaaagcatttaccatatcctaaatttgcactctttgcagacttgtgcacatatattccgctttcagaatagttttgcaaattgtacacaaacaaacaaaaaggtggaagctttttaataaagaaattgcatttataaatgatctgtattagaatat

SEQ ID NO: 40332 - DNA, 1027 bp, Homo Sapiens
  misc_feature (794)..(794): n is a, c, g, or t
  misc_feature (824)..(824): n is a, c, g, or t
  misc_feature (916)..(917): n is a, c, g, or t
  misc_feature (939)..(939): n is a, c, g, or t
  misc_feature (993)..(993): n is a, c, g, or t
gtgatgccgatttccattataggggccaaatgggccccactgagcaaggcccttatgccaaaacgtatgagggtagaagagagattttgagagagagagatgttgacttgagatttcagactggcaacaagagccctgaagtgctccgggcatttgatgtaccagacgcagaggcacgagagcatcccacggtggtacccagtcataaatcacctgttttggatacaaagcccaaggagacaggtggaatcctgggggaaggcacaccgaaagaaagcagtactgaaagcagccagtcggccaagcctgtctctggccaagacacatcagggaatacagaaggttcacccgcagcggaaaaggcccagctcaagtctgaagccgcaggcagcccagaccaaggcagcacatacagccccgcaagaggtgtggctggaccacgtggacaggatccggtcagcagcccctgtggctagaggaacaccagcacaaacgacagcctcaagtctccttcgagctttatatccatttggggatgaagtctactttgacagctagcaaggcgacatgcaactgttgttgaatgatgacagcaattcaggaaagacttaaatatgaaagcaaattgaacacatcgggtgtttgttatcagaaaagagatgagatgagataagacttgtttattgactagccaatatgtcattaaaattaaggtttatattgtgaagcttttttgaattttacttttttttgagagttttgctctgtcacccaggctggagtgaggtggtacnatctcggctcactgcaacctccacctcccnaggttcagagattctccctgctcagtctcccgagtagctgggattgcagatgtgcatcaccatggctgggctaatttttggatttttttagnnagagatgggggttcgccatgtntggtcaggctggtctcgaactccctgaactcaagtggacccgcccctggtcggncctccaaaagttgctgggggattacggggcatga

SEQ ID NO: 40333 - DNA, 630 bp, Homo Sapiens
gaaagtttagtgtttccttgaagcatggaaatacagattcagagggaatagttgaagtaaaacttgtggaccaagataagacaatgttcatatgcaaaagcagctggagcatgagggaagccaacgtggcctgccttgaccttgggtttcaacaaggtgctgatactcaaagaaggtttaagttgtctgatctctctataaattccactgaatgtctacatgtgcattgccgaggattagagaccagtttggctgaatgtacttttactaagagaagaactatgggttaccaggatttcgctgatgtggtttgttatacacagaaagcagattctccaatggatgacttctttcagtgtgtgaatgggaaatacatttctcagatgaaagcctgtgatggtatcaatgattgtggagaccaaagtgatgaactgtgttgtaaagcatgccaaggcaaaggcttccattgcaaatcgggtgtttgcattccaagccagtatcaatgcaatggtgaggtggactgcattacaggggaagatgaagttggctgtgcaggctttgcatctgtggctcaagaagaaacagaaattttgactgctgacatggatgcagaaagaagacggataaaat

SEQ ID NO: 40334 - DNA, 500 bp, Homo Sapiens
gaaaaaaaaatctttccactctttagtttttgattctgatgactcgtttttcttttactctgtggccccaatttttataaagtgtttttgagtgtcctatgggccggggcagggtccaagatcttttcccttccccaggcccctcggctccctcccagatcccacccccagccccactggttgccaaacactaaatctgccgacacccatctgccccacctcctgccatggccatgaaccgcgacccccactaaatttctagattggggatagggagaaagggaggcccaggaaggtctcccctgattttttttcatagtaatttttttccccagagtttgaattttttggtcttctcctggttttttggcaaattaggggggcccggggctcaagtgcgggaagggggctggcccgaggatcccatggctctcacaccatgtttttgtacagaactgatggttgaatctttgttctcttgaaataaacagaagaaaatg

SEQ ID NO: 40335 - DNA, 523 bp, Homo Sapiens
acacagccacagttgccaaatcccgtactccttgccaccggcttcctagagcagcgtagacagctggtaaactgaagagcacaactatattcttatgaaggaatttgtacctttggggtattattttgtggcccgtgaccctcgttattgttacagctgagtgtatgtttttgttctgtggagaatgctatctggcattatggtaatatattattttaggtaatatttgtactttaacatgttgcataatatatgcttatgtagctttccaggactaacagataaatgtgtaatgaacaaagatatgttgtatgagtcgtcgtttctgtcagatttgtattgtttccaagggaaaagcttgggggaggactcagttcacaaaatgcaaaactcaacgatcagattcacggacccagagcttttccatgtgtttatattgtaaatatttttgatttcatcaaattatttattcattaaaagaaatttttgtgaagcacaaaaaaaaaaaaaaaaaaaaaaaaag

SEQ ID NO: 40336 - DNA, 614 bp, Homo Sapiens
  misc_feature (490)..(490): n is a, c, g, or t
ctgtcattggcgttatgttggcaccatttacagcagggctgagcctgagcattactgcagctggggtagggctgggaatagcatctgccacggctgggatcgcctccagcatcgtggagaacacatacacaaggtcagcagaactcacagccagcaggctgactgcaaccagcactgaccaattggaggcattaagggacattctgcatgacatcacacccaatgtgctttcctttgcacttgattttgacgaagccacaaaaatgattgcgaatgatgtccatacactcaggagatctaaagccactgttggacgccctttgattgcttggcgatatgtacctataaatgttgttgagacactgagaacacgtggggcccccacccggatagtgagagtagcccggaacctgggcaaggccacttcaggtgtcctcgttgtgctggatgtagtcaaccttgtgcaagactcactggacttgcacaaggnggatccgagtctgctgagttgctgaggcagtgggctcaggagctggaggagaatctcaatgagctcacccatatccatcagagtctctggctgaagccatggcagaagaccgtgatgtggattc

SEQ ID NO: 40337 - DNA, 1135 bp, Homo Sapiens
ttcggctgcggagggggctcggcggcggccggcggagaaagttgctccgagaagaggctgggtcgagctgggccgagccgggcgcgcagggcgggcgtcgcgggcgtcccgggcggacgcggcgcggagactgccggcgcgtcccgggggttccgatttgaagaccttgcttctcatcacccactggattatgccccaggctttcctacccaatgatcctcttgcaacacgccgtgcttcctccacctaagcagccctcaccctcgcctcctatgtcagtggccaccaggtctacaggaaccttgcagcttccaccacagaagccttttgggcaggaggcttccttgcctcttgcaggggaagaagagttatcgaagggaggggagcaagactgtgccctggaggagctatgtaagcccctgtactgcaaactctgcaatgtcaccttgaactctgcacagcaagcccaggctcattatcagggtaaaaatcatggtaagaaactccgaaattactatgcagcaaatagctgtcctcctcctgctagaatgagcaatgtggtcgagcctgcagctactccagttgttccagtccctccgcagatgggctcctttaagccaggaggccgagtgatcctggccacggagaatgattactgtaagctctgtgatgcctccttcagttccccagctgtggctcaggctcactatcaagggaagaatcatgccaagaggctgcggctggcggaagctcagagtaactcattctcggaatcctcagagctgggtcaacggcgggccaggaaagaagggaatgagtttaagatgatgcctaacaggagaaatatgtatacagtacagaataattcagcaggtccttacttcaatccccgctctcggcagagaattccacgtgatctggccatgtgtgtbactccaagtggccagttttactgctcaatgtgtaatgttggagctgcgaragatggaatycsggcagcatttagagagcaagcamataagagcaaggkkytgacagcggtmaaggawtarrtggagawytgggattttttaktgwtwtcwtwtaarwwrasmgctttcctsctgttgttgcttttkyaactgcctgcttgtgg

SEQ ID NO: 40338 - DNA, 609 bp, Homo Sapiens
acgtcctgctggttaaccggcactacgccaagatcagcgactttggcctctccaaagcactgggtgccgacgacagctactacactgcccgctcagcagggaagtggccgctcaagtggtacgcacccgaatgcatcaacttccgcaagttctccagccgcagcgatgtctggagctatggggtcaccatgtgggaggccttgtcctacggccagaagccctacaagaagatgaaagggccggaggtcatggccttcatcgagcagggcaagcggatggaatgcccaccagagtgtccacccgaactgtacgcactcatgagtgactgctggatctacaagtgggaggatcgccccgacttcctgaccgtggagcagcgcatgcgagcctgttactacagcctggccagcaaggtggaagggcccccaggcagcacacagaatgctgaggctggctgtgcctgagctcccgctggccaagggagccctccacaccgggttttccccaccttagagcccaccccaggtcctgcattctggctgagccctgcttgggttgttccacacacagttggcctgtggtaggggggtcttaggccaaaccggcttt

SEQ ID NO: 40339 - DNA, 853 bp, Homo Sapiens
gttgaccagatctgtcacaaaaatagcatcaagttctttacaggagatgtttttggctaccatggatacacatttgccaatctaggagagcatgagtttgtagaggagaaaactaaagttgccaaagttagccaaggagtagaagatgggcccgacaccaagagagcaaaacttgattcttctgagacaacgatggtcaaaaagaaggtggtcttctgccctgttaaagaagccctggaggtggactggagcagtgagaaagcaaaggctgctctgaagcgcacgacctccgactactttctccttcaagtgctcttaaagttccgtacagataaaggaagagatcccagttctgatacatatgaggaagattctgagttgttgctccagatacgaaatgatgtgcttgactcactgggtattagtcctgacctgcttcctgaggactttgtcaggtactgcttctccgagatggccccagtgtgtgcggtggttggagggattttggcacaggaaattgtgaaggccctgtctcagcgggaccctcctcacaacaacttcttcttcttcgatggcatgaaggggaatgggattgtggagtgccttggccccaagtgaactcaagatttggcagccccagagatgccaactgcagcatgcccacctgtattccctgtccccttccttcatgaaggcatctccaggcaaggaaaactgaagtcattggcccgatacaaaacatttcctgcaacgaaaggaggtggttgccgacgtgctgctttccattcaccagcagctgctcgacaagggggcgcagggtgggctggtctttgtttccagcactgtttcaagg

SEQ ID NO: 40340 - DNA, 567 bp, Homo Sapiens
gggctagaagattttagatataaaagagagtcacctcattgaattaaatattgaaaacccagatgacagaagaaggttactatcagctgctgaaaacttccttgaagaagaaattattcaagagcaagaaaatgaacctgagcccctatccttgagctcagacatctccttaaataagtcacagttagatgactgcccaagggactctggttgctatatctcatcaggaaattcagataatggcaaagaggatctggagtctgaaaatctgtctgacatggcacataagattattatcacagagccaagtgactgaacacgcattcccaactatatatctacagatgcattccattttaactcttcttgagctaaaacgtcaaataggagaggaagataagataaatatttgtaaataaaacctaaagtttaaatgttttaatctgaataattgtacataaaattgtgtatctctaacattccaaactactgtcaataaaatatatatttattattttaaatgctatgtgttaatatttcactcgcttgtattagaaaggcaaaatg

SEQ ID NO: 40341 - DNA, 580 bp, Homo Sapiens
cttcctctctttcttcttcccactcatcctaaccctactcctaatcacataacctattcccccgagcaatctcaattacaatatatacaccaacaaacaatgttcaaccagtaactactactaatcaacgcccataatcatacaaagcccccgcaccaataggatcctcccgaatcaaccctgacccctctccttcataaattattcagcttcctacactattaaagtttaccacaaccaccaccccatcatactctttcacccacagcaccaatcctacctccatcgctaaccccactaaaacactcaccaagacctcaacccctgacccccatgcctcaggatactcctcaatagccatcgctgtagtatatccaaagacaaccatcattccccctaaataaattaaaaaaactattaaacccatataacctcccccaaaattcagaataataacacacccgaccacaccgctaacaatcaatactaaacccccataaataggagaaggcttagaagaaaaccccacaaaccccattactaaacccacactcaacagaaacaaggccacatgtgctcg

SEQ ID NO: 40342 - DNA, 627 bp, Homo Sapiens
atgcctgcttgggtgatagataaatatgggaagaatgaagtgcttcgattcactcagaacatgatgatgcctatcatacactatccaaatgaagtcattgtcaaagttcacgctgccagtgtaaatcctatagacgttaatatgagaagtggttatggagctacagctttaaatatgaagcgtgatcctttacacgtgaaaatcaaaggagaagaatttcctctgactctgggtcgggatgtctctggcgtggtgatggaatgtgggcttgatgtgaaatacttcaagcctggagatgaggtctgggctgcagttcctccttggaaacaaggcactctttcagagtttgttgtagtcagtgggaatgaggtctctcacaaacccaaatcactcactcatactcaagctgcctctttgccatatgtggctctcacagcctggtctgctataaacaaagttggtggcctgaatgacaagaattgcacaggaaaacgtgttctaatcttaggcgcttcaggcggagttggtacttttgctatacaggtaatgaaagcatgggatgctcatgtgacagcagtttgctcccaagatgccagtgaacttgtaaggaagcttggtgcagacgat

SEQ ID NO: 40343 - DNA, 965 bp, Homo Sapiens
gctcaaacaaggggactctgcagatgagaccacagcccacaagacagaagaagagaattccgactcggactctgactgaaggcctggcgggtgccttggcaacctgagccacacaggcctccacccctgtgcctcacaggggtcgctggcgttggagcggaggcctggacttctgagttgcagagggggctgcggacacagcaggccccctacagcctcaggttctgcctgagcccagcctaccaggcttgcccctcagctcagcactgttgaccacgctgcgtatgagggcatcttgggtatcccactccttctccccatttctgtcccacaggccttcagccctttaacgtctctgccaaaaaccagcacaaggagacaaagcagagccttgtctgtatctgggcagcaggtgttccatgctgctaggtggcgggggtcgggggtcttctgtttcactaacaggaacaaagacagaaaccatgacagggctgccccgccaggccccggtgggtttgtctgcacttggtgctcctgcccacaccagccactttggtgacaatgacccttccaagaatcttggttcaaggagcaccagttccctcttcattcttgaagcagggagaaattgacctttgccttgtcgcccaggaagtggggctcggcaccataactaacactcccacccttggaaaccatgtcttctgggggtgagatgaccattctgggtctaagactgtttcaaagaagagctcatagactgactggtccagaagacagaggtacaacagtggcatcacagtgacagtgtcatgggggagctgggcgggccaggcaaaacctccttcttcttaaagccaagcaggaggaggagttcctggaccttcaggacaggaaacttcagacttagggcaggctatgggcactgcgagatgagaccgctttgtgtcacctacgatatacga

SEQ ID NO: 40344 - DNA, 769 bp, Homo Sapiens
tccttctccccatttctgtcccacaggccttcagccctttaacgtctctgccaaaaaccagcacaaggagacaaagcagagccttgtctgtatctgggcagcaggtgttccatgctgctaggtggcgggggtcgggggtcttctgtttcactaacaggaacaaagacagaaaccatgacagggctgccccgccaggccccggtgggtttgtctgcacttggtgctcctgcccacaccagccactttggtgacaatgacccttccaagaatctttggttcaaggagcaccagttccctcttcattcttgaagcagggagaaattgacctttgccttgtcgcccaggaagtggggctcggcacccataactaacacctcccacccttggaaaccatgtcttctgggggtgagatgaccattctgggtctaagactgtttcaaagaagagctcatagactgactggtccagaagacagagggtacaacagtggcatcacagtgacagtgtcatggggagctgggcgggcccagccaaaccctccttcttcctagagcccagccagcaggcaggagttcctggaccctcaggacagtgaacttccagacctcagggcaggtctatgggccactgcaggagatgagaccagccttctgtgttcacctaacgatttatactgtgtatctgtctttgatggaatttgtactttttatattttttatgcaaagcagcttctaacagatgcatttctgtgactctaggctcacaaaga

SEQ ID NO: 40345 - DNA, 703 bp, Homo Sapiens
gaggccaagaattcggcacgagggacattgcaggcctgaagaaagcaccttttctgctgccatgacaaccatgcaaggaatggaacaggccatgccaggggctggccctggtgtgccccagctgggaaacatggctgtcatacattcacatctgtggaaaggattgcaagagaagttcttgaagggagaacccaaagtccttggggttgtgcagattctgactgccctgatgagccttagcatgggaataacaatgatgtgtatggcatctaatacttatggaagtaaccctatttccgtgtatatcgggtacacaatttgggggtcagtaatgtttattatttcaggatccttgtcaattgcagcaggaattagaactacaaaaggcctgggtctggatggcatggtgctcctcttaagtgtgctggaattctgcattgctgtgtccctctctgcctttggatgtaaagtgctctgttgtacccctggtggggttgtgttaattctgccatcacattctcacatggcagaaacagcatctcccacaccacttaatgaggtttgaggccaccaaaagatcaacagacaaatgctccagaaatctatgctgactgtgacacaagagcctcacatgagaaattaccagtatccaacttcgatactgatagacttgttgatattattattatatgtaatccaatta

SEQ ID NO: 40346 - DNA, 646 bp, Homo Sapiens
atgatacatttcatattgctcttcagtcgacaagggaaattacggctacagaaatggtacatcactctccctgataaagagaggaagaagatcacccgggaaattgttcagattattctctcccgtggtcacaggacaagcagttttgttgactggaaggagctaaaacttgtttataaaaggtatgctagtttatatttttgctgtgcaatagaaaatcaggacaatgagctcttgacgctagagattgtgcatcgttacgtggagctgctggacaaatattttggaaatgtctgtgagctggatattatctttaattttgaaaaggcttatttcatcctggacgagtttataataggtggggaaattcaggaaacatccaagaaaattgctgtcaaagccattgaagactctgatatgttacaggagaatcgtttgagccccagaggcagagattgcagtgagccgagatcatgccattgcactctagcctacccaactttcttgtacaaagttggcattataagaaagcattgcttatcaatttgttgcaacgaacaggtcactatcagtcaaaataaaatcattatttgccatccagctgatatcccctatagtgagtcgtattacatggtcatagctgttt

SEQ ID NO: 40347 - DNA, 587 bp, Homo Sapiens
aagtttgttccccgagttcggagcctaggagccccccgcggctgcggcgcaggtgccctcggcctgagtcgggatggagctgcctgctgtgaacctgaaggtgattctcctaggtcactggctgctgacaacctggggctgcattgtattctcaggctcctatgcctgggccaacttcaccatcctggccttgggcgtgtgggctgtggctcagcgggactccatcgacgccataagcatgtttctgggtggcttgctggccaccatcttcctggacatcgtgcacatcagcatcttctacccgcgggtcagcctcacggacacgggccgctttggcgtgggcatggccatcctcagcttgctgctcaagccgctctcctgctgcttcgtctaccacatgtaccgggagcgcgggggtgagctcctggtccacactggtttccttgggtcttctcaggaccgtagtgcctaccagacgattgactcagcagaggcgcccgcagatccctttgcagtcccagagggcaggagtcaagatgcccgagggtactgaagccagccacgctgcgcccggccctgccccgggc

SEQ ID NO: 40348 - DNA, 582 bp, Homo Sapiens
atttcctgctcttgaattctggttgaactacttaagcttaatttgttaaactccggggctctcaagaacaatggaatatcatcctgatttagaaaatttggatgaagatggatatactcaattacacttcgactctcaaagcaataccaggatagctgttgttcagagaaaggatcgtgtgctgcatctcctccttggcgcctcattgctgtaattttgggaatcctatgcttggtaatactggtgatagctgtggtcctgggtaccatggctatttggagatccaattcaggaagcaacacattggagaatggctactttctatcaagaaataaagagaaccacagtcaacccacacaatcatctttagaagacagtgtgactcctaccaaagctgtcaaaacccacaggggttctttccagcccttgtcctcctaattggattatatatgagaagagctgttatctattcagcatgtcactaaattcctgggatggaagtaaaagacaatgctggcaactgggctctaatctcctaaagatagacagctcaaatgaattgggatttatagtaaaacaagt

SEQ ID NO: 40349 - DNA, 564 bp, Homo Sapiens
accggtgagtcgccggcgctgcacagggaggcggcactggtctcgacgtggggcggccagcgatgaagccgcccagttcaatacaaacaagtgagtttgactcatcagatgaagagcctattgaagatgaacagactccaattcatatatcatggctatctttgtcacgagtgaattgttctcagtttctcggtttatgtgctcttccaggttgtaaatttaaagatgttagaagaaatgtccaaaaagatacagaagaactaaagagctgtggtatacaagacatatttgttttctgcaccagaggggaactgtcaaaatatagagtcccaaaccttctggatctctaccagcaatgtggaattatcacccatcatcatccaatcgcagatggagggactcctgacatagccagctgctgtgaaataatggaagagcttacaacctgccttaaaaattaccgaaaaaccttaatacactgctatggaggacttgggagatcttgtcttgtagctgcttgtctcctactatacctgtctgacacaatatcaccagagcaagcca

SEQ ID NO: 40350 - DNA, 605 bp, Homo Sapiens
  misc_feature (497)..(497): n is a, c, g, or t
  misc_feature (526)..(526): n is a, c, g, or t
  misc_feature (553)..(553): n is a, c, g, or t
  misc_feature (558)..(558): n is a, c, g, or t
tcctgcagaggatcaagacagcacgtggacctcgcacagcctctcccacaggtaccatgaaggtctccgcggcagccctcgctgtcatcctcattgctactgccctctgcgctcctgcatctgcctccccatattcctcggacaccacaccctgctgctttgcctacattgcccgcccactgccccgtgcccacatcaaggagtatttctacaccagtggcaagtgctccaacccagcagtcgtctttgtcacccgaaagaaccgccaagtgtgtgccaacccagagaagaaatgggttcgggagtacatcaactctttggagatgagctaggatggagagtccttgaacctgaacttacacaaatttgcctgtttctgcttgctcttgtcctagcttgggaggcttcccctcactatcctaccccacccgctccttgaagggcccagattctaccacacagcagcagttacaaaaaccttccccaggctggacgtngtggctcacgcctgtaatcccagcacttntggagcccaagtgggtgatcacctgangtcangagttcgagaccagccctgccaacatgatgaaaccccatctctacta

SEQ ID NO: 40351 - DNA, 1100 bp, Homo Sapiens
cgcrctgcagacgaagcccgcgcgtgatcccgctccgggtgacctcaaagcagaagctctgaattcacctctcatctgacgactgacagctgctgccaccgccagcctctgtcccttagcccaggcctgtcacacggctgcctctcagcaggggcagtagaatgaaagagggcatgtctaataacagcaccactagcatctcccaagccaggaaagctgtggagcagctaaagatggaagcctgtatggacagggtcaaggtctcccaggcagccgcggacctcctggcctactgtgaagctcacgtgcgggaagatcctctcatcattccagtgcctgcatcagaaaacccctttcgcgagaagaagttcttttgtaccattctctaactccgtgtgtgatgaaaacgcctccttttctgaccttcaaagtcccctgtagagaccatgcatgctctaagccttagggagtgagaccaacacccatccctgcccagccaacagtggccggggcttgtcttatgtttccatctgttttcttcgtggcattcaatttcatttttttccttttcattttcatgttattttcattattggcaaagaaaatcaaaatgtttatagccaaataacaaatgtgccatgtaaaagtaagtctggacttaagagtttaaaatttttaaacatcagtttccaagtttatatcatattaatacatttcagtggataatttatttaaaaaaaaaactatgcctaaatatcccttatttgtaatattcagtatcaaattagagcattttgaccaactgaaacatataacgttttcatctcctttcctggagaaagcagctgcagaggttctgtatttcctgcatttccatcatcctagtaaaagacaacacccmcaggrttggaatggtttcttttgtttttttgttgttgttgttgttttgagawggrgyccgctccgkcmccaggctggggggaatggcgggacccagcccctgcggcctccccycctgggtcarsgrtyycygcccmrccccygggtgstgggryatrggcgsgcmccccccastawtttttktttttagaaaagggggt

SEQ ID NO: 40352 - DNA, 762 bp, Homo Sapiens
tgctctgagccacagtgggatgaaccagccggggccttatcgggctccagccatctcatgaggggagaggagacggaggggagtagagaagttacacagaaatgctgctggccaaatagcaaagacaacctgggaaggaaaggtctttgtgggataatccatatgtttaatttattcaacttcatcaatcactttattttatttttttttctaactcctggagacttattttactgcttcattaggttgaaatactgccattctaggtagggttttattatcccagggactacctcggcttttaatttaaaaaaaaaaaagaagtgggtaagaaaatgcaaacctgttataagttatcggacagaaagctaggtgctctgtcacccccaggaggcgctgtggtactggggctgctgctatttaagccaagaactgaggtcctggtgagagcgttggacccaggcttggctgcctgacataagctaaatctcccagacccaccactggctaccgatatctatttggtgggaggtgtggccctgttcttcctcaccccagttccatgacattggctggtataggagccacagtcaggaaagcacttgaggcagcatctgttgggccacccccggctcagtgctggaatgttgcagtgtaggtttcccagggaaggggggtgggggtaggtgggctccacaggatgggggaagagcatgccactgagtatcttccttatgttgctgagatattgaagcttttatt

SEQ ID NO: 40353 - DNA, 779 bp, Homo Sapiens
ggcacacaaggaagcaaatctttctgaaagaagtaaatgatacacttctggtgaatgaattgaaatcaaaagaatctgacatcatgacaacaaatggtgtaattcatgttgtagataaactcctctatccagcagacacacctgttggaaatgatcaactgctggaaatacttaataaattaatcaaatacatccaaattaagtttgttcgtggtagcaccttcaaagaaatccccgtgactgtctatagacccacactaacaaaagtcaaaattgaaggtgaacctgaattcagactgattaaagaaggtgaaacaataactgaagtgatccatggagagccaattattaaaaaatacaccaaaatcattgatggagtgcctgtggaaataactgaaaaagagacacgagaagaacgaatcattacaggtcctgaaataaaatacactaggatttctactggaggtggagaaacagaagaaactctgaagaaattgttacaagaagacacacccgtgaggaagttgcaagccaacaaaaaaagttcaaggatctagaagacgattaagggaaggtcgttctcagtgaaaatccaaaaaccagaaaaaaatgtttatacaaccctaagtcaataacctgaccttagaaaattgtgagagccaagttgacttcaggaactgaaacatcagcacaaagaagcaatcatcaaataattctgaacacaaatttaatatttttttttctgaatgagaaacatgagggaaattgtggagttagcc

SEQ ID NO: 40354 - DNA, 1056 bp, Homo Sapiens
ggagaagatgcctgggcggtccaggagtcctccaagctctgcctgccaccatcttcctcctcttcctgctgtctgctgtctacctgggccctgggtgccaggccctgtggatgcacaaggtcccagcatcattgatggtgagcctgggggaagacgcccacttccaatgcccgcacaatagcagcaacaacgccaacgtcacctggtggcgcgtcctccatggcaactacacgtggccccctgagttcttgggcccgggcgaggaccccaatggtacgctgatcatccagaatgtgaacaagagccatgggggcatatacgtgtgccgggtccaggagggcaacgagtcataccagcagtcctgcggcacctacctccgcgtgcgccagccgccccccaggcccttcctggacatgggggagggcaccaagaaccgaatcatcacagccgaggggatcatcctcctgttctgcgcggtggtgcctgggacgctgctgctgttcaggaaacgatggcagaacgagaagctcgggttggatgccggggatgaatatgaagatgaaaacctttatgaaggcctgaacctggacgactgctccatgtatgaggacatctcccggggcctccagggcacctaccaggatgtgggcagcctcaacataggagatgtccagctggagaagccgtgacacccctactcctgccaggctgcccccgcctgctgtgcacccagctccagtgtctcagctcacttccctgggacattctcctttcagcccttctgggggcttccttagtcatattcccccaagtggggggtgggaagggtaactcactcttctccaggccacggctccttggactccctgggggtgtccactcttcttcctctaaactgcccacctcctaacctaatcccccgcccgctgcctttccaggctccctcacccagcgtgtaatgagcctttawygctgctytaggggagtgagtktasagcvtgttagtktacccctctcctkatytttaggcacttaktatataattyttccactgca

SEQ ID NO: 40355 - DNA, 714 bp, Homo Sapiens
tgagctgggcctgggcctgggccagctggcctgctgctgcctgcaccgccgggccaaaaggaggcctcctatgacccaggagaactcctacgtgtccagcactggcagagcccacagtggggctgctccatggcagcccctggcagcgccatcaggagccagtgcccaggcagcagagcagctgcagagaggccccaaccagcccgtggagagtgacgagagcctaggcggcctctctgctgccctgcgctcctggcacttgactccaagctgccctctggacccagcacccctcagggaggccggctgtcctcagggggacacggcaggagaatcgagctgggggagtggcccaggatcccggcccacagccgtggaaggactggcccttggcagctctgcatcatcgtcgtcagagccaccgcagattatcatcaaccctgcccgacagaagatggtccagaagctggccctgtacgaggatggggccctggacagcctgcagctgctgtcgtccagctccctcccaggcttgggcctggaacaggacaggcaggggcccgaagaaagtgatgaatttcagagctgatgtgttcacctgggcagatcccccaaatccggaagtcaaagttctcatggtcagaagttctcatggtgcacgagtcctcagcactctgccggcagtgggggtggggggcccatgcccgcggggga

SEQ ID NO: 40356 - DNA, 840 bp, Homo Sapiens
  misc_feature (42)..(42): n is a, c, g, or t
  misc_feature (58)..(58): n is a, c, g, or t
  misc_feature (819)..(819): n is a, c, g, or t
tttcgagttctaaacaagggttgcaaacaaaagaaactttgnaaaataagaagcccanagttctcaagccactccagttcagactagccagccagattcttccaacattgtcaaagtaagtccacgggagagctcatcagcttctttgaagtcctctccgattgctcaacctgcatcttcttttcaagttgaaactgcctctcaaggccatagtatatctcaccataagtcaacaccaatctcttcttcaagaagaaaatcaagaaaactggctgttaattttggtgtttctaaaccttctgagtaaatttggctcttagaattaagttaatttcttctctttccatctacctttttataaatacatatctatgtctcataaaaattacaatgtactattttaaaataatatgtgtaaattgaaatttttcatttttaagttatcaggcacttttcatgctgtttaaaagactgtgtatcaaattgtgcactttaagtatgtgcagtttgttgtatgtcaattatacctcaataaatctgtaataaaaaactaaattaaaccttgcattaaaataatatcacagtatcagtggactaaacattaaaatgtaccactctaatcattggcctcatgattgaagcatcctgaactattaattagacatcagttagcaataataagcattttttacactatcattaaggaataattacatggagcatggaatttgggcctcccgtataacttactgaatggggattttatttctccttttaatgatgcaagaaaattggcaggagaatggctcttaattaggngtgctttacctcatgctttga

SEQ ID NO: 40357 - DNA, 855 bp, Homo Sapiens
gacacacaagctctcttgccttctgccatgtaagatatgactgtgctcctccttcaccttctgccatgattgtgaggcctccacagccatgtggaactggaagctgtttttccctctttggggtctcagagagattggtggcaaggactcctgggaagagaaaagctgaaggacactctggcaagaggaaaccccgagccaaacgtatggccacctctgaccactcgaccagcccagcatggtgtacatttctgggtagcttatcacgccttccaagcattgcctttatcttccttctccccatcaagcctgtattgttttccttttgaatcataaggcactttttgttaagatacctcaaatctttcgaggaacagcaaggagcaagaataaaacttaacttctctgagatccgtaatgaaaaaactaaggcaagattacttgaccagaaaacaccgttgggggcgggcgcgtgggccctctcagagaagggtttttccaatcaccccctcggtggggggcgcggcgggcccccagtaggcaattggacacgtggcggcaccgggggtcccaacgaagactctcgcgcctgactgcagggctgggtgtccctacccagactatgaaagcgcgggggggcacctgagacggtttgtagacaacccccagtgagtcgtcggggggcccccagggctccaccaacggggatccagagaagcaatatcatcgccgccggggggtggagaaccccctccgataccttaattatcaacggacattatcacccatacaatgcccacaccaagggaaaaatggcgttgtaagacccccaaaccacacagccagatcgacatc

SEQ ID NO: 40358 - DNA, 720 bp, Homo Sapiens
gccaccgtatccctgagcctgaggctgccgtgctcttccgccagatggccaccgccctggcgcactgtcaccagcacggtctggtcctgcgtgatctcaagctgtgtcgctttgtcttcgctgaccgtgagaggaagaagctggtgctggagaacctggaggactcctgcgtgctgactgggccagatgattccctgtgggacaagcacgcgtgcccagcctacgtgggacctgagatactcagctcacgggcctcatactcgggcaaggcagccgatgtctggagcctgggcgtggcgctcttcaccatgctggccggccactaccccttccaggactcggagcctgtcctgctcttcggcaagatccgccgcggggcctacgccttgcctgcaggcctctcggcccctgcccgctgtctggttcgctgcctccttcgtcgggagccagctgaacggctcacagccacaggcatcctcctgcacccctggctgcgacaggacccgatgcccttagccccaacccgatcccatctctgggaggctgcccaggtggtccctgatggactggggctggacgaagccagggaagaggagggagacagagaagtggttctgtatggctaggaccaccctactacacgctcagctgccaacagtggattgagtttgggggtagctccaagccttctcctgcctctgaactgagccaaaccttcag

SEQ ID NO: 40359 - DNA, 386 bp, Homo Sapiens
taagatatgatgattgattacttggaccagtgttagaccgacctgtgttagacgaacctgtgttgcctattatattggcagcaccttccattagcaatagctgaaaaattcagagaagaatttagaactttcactttatttttgccattcttcaagaagttgctgtatatttcagtctggttataccttcaattgatcaataacttcaattataggaaaggcatcttctataattttaaattactgtaaaaaaaagataccttttaaagccttggattatacttaaaaattgtaatggaagaaatgcatattaagttatatgcagatattaaacatatctgattctgaagataaaactgaagtatttttcagagcaaatggcatta

SEQ ID NO: 40360 - DNA, 497 bp, Homo Sapiens
cagaatcacactcaaacctgaatcttcagcatatttgttctaaaaactaatcctgttataagaatgagaaagacatttaccgtcatccctatcccatcactttgtgtcatactggacaagacgcttaactgctctgtgctataattttttaatttatgacatggtcatataagagtgcagcagtttgacacactttcaatcaagaggtggaatctacatccctctgttgtatacaggaatctacatccctctgtgactgcttcgcccagtagaatatggtagacgtactgctgtgctggtttcttgactcagactttactggtagggttacttcatctcatgaaatgacagaactgtcttgttacaaagtctgactactttgctgaagagaccacatgaagaggccctgaaactacgtagagagggagaggcacctgctgaaccctgtcttcttgacatccaccaagataccagacatttgagtgtgattctggccg

SEQ ID NO: 40361 - DNA, 529 bp, Homo Sapiens
attggtcagaaagaaaaagaaagaaaaccattctctatttttccatgggtatgatctggcttaaaacaatatggaatattttcctgacagacttgaaaactaggatcttcctcagatgtctgtaaataactctggtatccaactgggtgtattctagtgtggaacaaaaaacagtgaacacaagtgcttacttgtggatactatcttaccaacggatcacaaagttctctttttggtgtactgttgttgacagggattgtgtactgtttcgacccaagtactgctgtatcctgtgtagtactagatctgtatctcttgtctgaattaaacatttttagttgctgtgtaaatgttaggaagcaaagtagctttgaattttctctgtaagagaataaaagataaaataatgtattttctttatttcacattttatttggagatatttaaatgaaatagaaagccatataacatagctataattactacctgtttgctattttttttttttttttttgtagcttcctcactg

SEQ ID NO: 40362 - DNA, 617 bp, Homo Sapiens
cccaattccagagagaaacacatcactagattgacgagggcttttagagactgctcctataattgaggaatcagcagcataggctttatctccctacttcctcccccaccctaccgcgttcaatttgtgtatctcagatatttgatttcttgagcatgtattggtcagaaagaaaaagaaagaaaaccattctctatttttccatgggtatgatctggcttaaaacaatatggaatattttcctgacagacttgaaaactaggatcttcctcagatgtctgtaaataactctggtatccaactgggtgtattctagtgtggaacaaaaaacagtgaacacaagtgcttacttgtggatactatcttaccaacggatcacaaagttctctttttggtgtactgttgttgacagggattgtgtactgtttcgacccaagtactgctgtatcctgtgtagtactagatctgtatctcttgtctgaattaaacatttttagttgctgtgtaaatgttaggaagcaaagtagctttgaattttctctgtaagagaataaaagataaaataatgtattttctttatttcacattttatttggagatatttaaatgaaatagaa

SEQ ID NO: 40363 - DNA, 853 bp, Homo Sapiens
  misc_feature (717)..(717): n is a, c, g, or t
  misc_feature (798)..(798): n is a, c, g, or t
  misc_feature (816)..(816): n is a, c, g, or t
  misc_feature (837)..(837): n is a, c, g, or t
actgtattgctctctgtttatatagcaggtgtcacaactaacttgtctttagccttggtgctttgatccttctatattttgaccccacaggtgtggtccggtttacttaatcaggacatgggcctaagaacaaaccttttcccttcatgataacatccatagacaacttattagaagggactagagtttttgcaaatttccctgctggatggggcctatagctatacttagtatatgcctaaacatggtaattggatagtaaatggttttctagttccattgctgtatatttgcctaaatggacttgtgttcaaattatttcttcaattgtcatagataatcctgtaccaaatggggaagaattaggaaataatcatgttgtctaatggtactctggattcagggcagcaactgccatttaaatgttgtcttgttcatttctaaatctgttcatgaagtttaggttttccctgaaactaagttgaattatttccaaaatgaaacaggcttctcagggacatatccacttcttcccagtctgcctttggattaaagcaccaagcagagaccacattaattccctttgctatactgtgatccttagtatgttaattcttaagaaaccaacatatcactgaaagaaggctggcagaacgcaagtgcattttttcactgtgggaagaaagatcaagtgacgtattattttttcctgggtgncacttaatgggccgagtaaaaagcttggaaactcagactttcgggcttgggtctgccactcattgggtatgaagagcccanagcaggtaagtcaccttnctggcctactttcctgagggnatacggattcttacag

SEQ ID NO: 40364 - DNA, 825 bp, Homo Sapiens
  misc_feature (14)..(14): n is a, c, g, or t
  misc_feature (48)..(48): n is a, c, g, or t
agaggcaccccttnacagaaagggtggggggctgaataaataaatcanaatgactgaaaaagccccagagccacatgtggaggaggatgacgatgatgagctggacagcaagctcaattataagcctccaccacagaagtccctgaaagagctgcaggaaatggacaaagatgatgagaggcggggggagtacaagaaaacgctgctgggagatggtcctgtggtgacagatccgaaagcccccaatgtcgttgtcacccggctcaccctggtttgtgagagtgccccgggaccaatcaccatggaccttactggagatctggaagccctcaaaaaggaaaccattgtgttaaaggaaggttctgaatatagagtcaaaattcacttcaaagtgaacagggatattgtgtcaggcctgaaatacgttcagcacacctacaggactggggtgaaagtggataaagcaacatttatggttggcagctatggacctcggcctgaggagtatgagttcctcactccagttgagggggctcccaagggcatgctggcccgaggcacgtaccacaacaaggtcttcttcaccgacgatgacaagcaagaccacctcaggtgggaggtggacctgtcgattaagagggaggggacagaatgaatgcatcccaccctttcccacccttggcacctgggagaattctctaaggcgtgttcaacaccctggccctcctcctgtccacaggtgggtccctcttcaaactggcacattttcttaatgatgcctcttttcccaccctggaactcaacgggggcctcgggttccggcct

SEQ ID NO: 40365 - DNA, 658 bp, Homo Sapiens
acgtgaagcactgaataaatagatcagaatgactgaaaaagccccagagccacatgtggaggaggatgacgatgatgagctggacagcaagctcaattataagcctccaccacagaagtccctgaaagagctgcaggaaatggacaaagatgatgagagtctaattaagtacaagaaaacgctgctgggagatggtcctgtggtgacagatccgaaagcccccaatgtcgttgtcacccggctcaccctggtttgtgagagtgccccgggaccaatcaccatggaccttactggagatctggaagccctcaaaaaggaaaccattgtgttaaaggaaggttctgaatatagagtcaaaattcacttcaaagtgaacagggatattgtgtcaggcctgaaatacgttcagcacacctacaggactggggtgaaagtggataaagcaacatttatggttggcagctatggacctcggcctgaggagtatgagttcctcactccagttgaggaggctcccaagggcatgctggcgcgaggcacgtaccacaacaagtcccttcttcaccgacgatgacaagcaagaccacctcagctgggagtggaacctgtcgattaagaaggagtggacagaatgatggctccacccttttcccaacct

SEQ ID NO: 40366 - DNA, 824 bp, Homo Sapiens
cgttagtccacggtctggtcttcagctacccgccttcgtctccgagtttgcgactcgcggaccggcgtccccggcgcgaagaggctggactcggattcgttgcctgagcaatggctgccatccggaagaaactggtgattgttggtgatggagcctgtggaaagacatgcttgctcatagtcttcagcaaggaccagttcccagaggtgtatgtgcccacagtgtttgagaactatgtggcagatatcgaggtggatggaaagcaggtagagttggctttgtgggacacagctgggcaggaagattatgatcgcctgaggcccctctcctacccagataccgatgttatactgatgtgtttttccatcgacagccctgatagtttagaaaacatcccagaaaagtggaccccagaagtcaagcatttctgtcccaacgtgcccatcatcctggttgggaataagaaggatcttcggaatgatgagcacacaaggcgggagctagccaagatgaagcaggagccggtgaaacctgaagaaggcagagatatggcaaacaggattggcgcttttgggtacatggagtgttcagcaaagaccaaagatggagtgagagaggtttttgaaatggctacgagagctgctctgcaagctagacgtgggaagaaaaaatctgggtgccttgtcttgtgaaaccttgctgcaagcacagcccttatgcggttaattttgaagtgctgtttattaatcttagtgtatgattactggcctttttcatttatctataatttacctaagattacaaatcagaagtcatcttgctac

SEQ ID NO: 40367 - DNA, 510 bp, Homo Sapiens
  misc_feature (490)..(490): n is a, c, g, or t
gaaaagatcccgcccactaagacgcgacccctcagacaggggtccaagaagcccctgctggaggacgaccctcagggtgccaggaagatctcgtcggagcctgttcctggcgagatcattgctgtgcgtgtgaaggaagagcatctagacgtggcctcgcccgacaaggcttcaagtccagagctgcctgtctccgtcgagaacatcaagcaggaaacagacgactgagccttcctgcctccagcctggcttctagctggaagccagcccagcgtttctctaccaccaccaccatgcctccacctgactttggcttggagactgatcctctctgtgtaaattctgcccggtgctgtgaaggctggacggtggaggacctgctggggtctcctgggacccgcctgttgcttctgccctcccctgtggaaaggtctatatgacgggccgcctgaggccccagaactcgtctgtgaaccaccttttccagccngagttcccaaagctggaacg

SEQ ID NO: 40368 - DNA, 643 bp, Homo Sapiens
cagctctcaggagtaacacagacctgcaccaccaagtccctggcaatggacaaggtggctcacttctcctacccattcacgtttgaagccttcttcctccatgaggatgaatcttctgatgcactcccggagtggcctgtgctctactgtgaggtcctctcgctggacttctggcagaggtaccgtgtggaaggctatggggctgtggtgctgcctgccactccaggctcacacaccctgacagtctccacgtggagacctgtggagcttggcacggtggctgagctgaggaggtttttcattggcggttctctggaactggaggacctctcctatgtacggataccaggatccttcaagggggaacgcctgagccgctttggactccgcacagagaccacaggcactgtcaccttccgcttgcactgtctgcagcagtccagggccttcatggaatcgagctcccttcagaaaaggatgcggagtgtgttggaccgtctggaagggttcagccagcagagttccattcacaatgtgctagaggccttccgtcgagcccggcgccgcatgcaggaggcccgggaaagcctcccgcaggacctagtgagcccctctggaaccctggtctcctagctcacagcag

SEQ ID NO: 40369 - DNA, 675 bp, Homo Sapiens
gggggccatgccagccctctgtgcctcggttttcccactggttacacaggatggtcgcattttccctgcctacctcacagagctgttctgagggtgcatggaggagcactctgtcccaccaaggacaactagaaaccaaagccatctgacagccagtgcggtaagggcgggggatgtgtgtgtgaggtgtgcacaccccccgagaacctggccctggactggcctcacaggacaggaggcagccccttgtagagctagggctcagccccatcagtctcaaaggttaagccaccagtcaccaccgaggcacccctcaggcctggtggccactgtccactattacgtagacagaccccaccctcacccaggccagctgtgggccagtcccgccctgcaatctggtctgctgccttcctcttccatgttggtccccttggccactgtctctgggcatgcaagccagtgtcctggttcagtgcctcggccagagctggggcaggagaggggcctctgggtgagagctgggggtgtctctgcagggtactggcagccttgccacactgtcctcattcccagatggaaagacctgagtgcctctcgccttcctccgggaatgaattcctcatgaaaatgaccaggccacttcttccgagggccaggccgccccctccccga

SEQ ID NO: 40370 - DNA, 500 bp, Homo Sapiens
agtgcttgagggccatagtattgttcataatgtgaaaacttcttttttttttttaatttcagttagaaaatgtgtttcattaaccccttattaataaccaataatcaaattaaccagtcaatgaatcttctttagttaggcctgtaattagattgttagctcttcgtggctcttcaatgtcttttgaacatgtgggagatacttaataaaaagcatagctctaggacactataaaaattgctaattactccccttggaataaagacataagaacatttgcttaagatttaatatgttatatataggcttgggcatacagcagtgaggggtggggagattttgaaaagttctggtttgtcatttatgtagctggtagttttgttttgaacctgttatgagcaaccaccggaataatctgttccccatagaaactgaacctaaacttcaaatttttattatctaagctataataataggcggagtcgatctggaacatacag

SEQ ID NO: 40371 - DNA, 833 bp, Homo Sapiens
  misc_feature (767)..(767): n is a, c, g, or t
  misc_feature (770)..(770): n is a, c, g, or t
  misc_feature (798)..(798): n is a, c, g, or t
  misc_feature (807)..(807): n is a, c, g, or t
  misc_feature (833)..(833): n is a, c, g, or t
agaggtaatccccaaatcttccaaagcagagtcatcaaggagaacctcagtccaaagtggaatgaagtctatgaggctttagtgtatgaacatcctggacaagaattagagattgagctctttgatgaagacccagacaaggatgactttttaggaagtcttatgattgacctcattgaagttgaaaaggagcgccttttagatgaatggttcactctggacgaggttcccaaggggaagctacacttgagactggagtggctcacgttaatgccaaatgcgtcaaacctcgacaaggtgctaacagacatcaaagctgacaaagaccaagccaacgatggtctttcctctgcattgctgatcttgtacttggattcagcaaggaaccttccgagtaacccattagaatttaaccccgatgtcttgaagaagactgcagttcagagagctttaaagtcagggaagaaaataagcagcaacccaaatcctgttgtccagatgtcagttgggcacaaggcccaggagagcaagattcgatacaaaaccaatgaacctgtgtgggaggaaaacttcactttcttcattcacaatcccaagcgccaggaccttgaagttgaggtcagagacgagcagcaccagtgttccctggggaacctgaaggtccccctcagccagctgctcaccagtgaggacatgactgtgagccagcgcttccagctcagtaactcggggtccaacagcacccatcagatgaagatttgcctgcnggntgctcatctcgaaaagcgagaaaggccntcagacacnacactcagctcagtcaacgtcctctn

SEQ ID NO: 40372 - DNA, 680 bp, Homo Sapiens
gtctctgatttggtcctgtctgacatcactgctatatgctttgctcctctcaatttcctctgccctcatgccagcaggagtcatgccagagatcatatctgagaaagcaagacaattttgtgtgtgtgtctgtgcccatagaggagtgctggttgtgttgatatagttgtagattggttgtgtttacacagttgtatatattgacacccttgagtgttatgacttcttttgggggtggtcgccttttaaatcataacttttaatgggattccattttagtctttgtgaagacataaggttgttggcaggcatctgtccctgggagcatccaagcagaaaagactaagactcccttgtagacagatcactggccgccactgaagtgtgtctgcatggcaccacagggctggaagacccttgaaggcaggaattcaaggaaatgtatgatgaattttggcattgccatcaaaagcagaacaggcatggaaaacttgggtgagtgggcgagacaacctcctcaccacagcagagttccatccatgcctggataatgagggagggatttgtgtccactgcagtggggaaccatgaaggacacatcaagggtgtggttggcctgtggtgctctttggaggaatgaataaaaatgaatagaaatcctaaaaaaaaaaaaaaaaaaa

SEQ ID NO: 40373 - DNA, 605 bp, Homo Sapiens
tttttttttttttttagactttactggcagttgatatttgtttataggaaactgtgttggtctgattatccaggcagaattagtgtggcagaacagattggcattttcacaattttgatagcatgcttctgtgagattcctagttctaaataaggaaaagataatttgatttttctaaaaaccagtttaggttttagtgtggtaatttctctaagctattcatcttttggaaataataagactttgtacaagggattttaaacaatgagtttttgaaaaccttttagttgaggtgggtgaatataaattatgtctggcagaatgggtaaaataccaaagcctactaggagaaagaaccaccataagctgaggtagcagaatgtgtgttctcagctccactcatttattcattatctacagtaccagatctttgtctttttctggggtagagaagtggggtcacttcaatacaattctgctaattaccatttgttttttcttttcagatttctttggtgcgaatgccttacgcatgcaaactattgtttcaggaacttatgtctatgagtattgcaccgcgaatgatgagtgtttagctattttac

SEQ ID NO: 40374 - DNA, 571 bp, Homo Sapiens
tcagaattatagcactcatagtgataattttcagaatataatgtctcttaattagaattcatacaagaaccacgtgtgagtgttgttgttgttgtttttttttttaatcaaatgcaagtgtgactataaaggagtgtggctgatttttttttttttcttttttctttttaaacagacagcagaacttttctatccaaatgaatgccgtcccatggaaagtggctgtcctgggaggctacacgtttctccaatggtgatgctgttgctcagaacttgctagaggtctttagggaacctccgtgagagctgcagcacctttttaattttctcggtgtcatcctctgagtatggattttctgtttttaaacagcccaaagtttagaagggtattttctaatgtggctcataaaccaccttttaaggcctttcctcaaacaggagttctaaataagtctccaacaatagtagttttgttggagctaaggatgtaactactttgaggaagaaatgttcgtttagatttctacattctgttatgttggttttattaaaaaaaaaaaaaagacttgca

SEQ ID NO: 40375 - DNA, 482 bp, Homo Sapiens
gtccgccacttcttttgggtggcaatggtttggatatcgtttgtcctcactaaaattcatgttgagattcgagccccagtgtggcaggtgttgggatgtggggcctcataggagctgtgtggtcttggaggtggagtcctcatggatagattaatgcctgccttaaggggtgagtgagtgctcacccttgggaatttgggaatttggttttctctcccttgcttccttcagcaccatgtgatctctgtgcacacagctgcatccttctgccctcccccagaagcagcagcagcctcagggatgagggaggtcctcagtgagtgcacctgcccagtcttgaaccttccagccatcagaatctgagccaaatcaacctcttcctttataaagacccagcctcaggtcttctgtcagagcaacacaaaatggactcagcacggatcaaattgtgtctcccccacccccacaaaaaactttatatt

SEQ ID NO: 40376 - DNA, 851 bp, Homo Sapiens
gaacttgcccctgaggacccctccaccctacctgccctgggccctctcttaggcactgagttcccacctctggcattgtggccctaccacctttggtactcctggagtagagcctttgccctctagggctctgtccacggcgttgacacatatctggatgcttaacgggtgctcaaatgaataagtgaaacctgctggctttcatttggacagtacagacgtgtccattggattgcggatggctttgtaaccaggggcggtggcatatcaaaaatgaagactttgtaaaatgtatgggaactttctgcctataaagctggctttacactgtgccttcttttttgaacttcctgaagcgtaaaggcgtgcattgaatccgccaggaaggcttttcatggggcaggggcaggctctgttagcagaagaatggcagtgtggctgagggggccgtagtcattggttctcgccattgtattctgagccttttgtgctctaggcttcagggcctctcctttttgactctgtccaccaaaatctaacaaaatcgggcactgagtgtcgtctcttcttccctccctgtcctaggccacgtgctgtacgccgacatcaagatggagaatgggaagtccaaggggtgttgctgtggttaaagttcgaagtcgccagaggtggccgagagaagccttgccggaattgctgaatggcatgaagctgagtggccgagaagattgacggtcgaattcgcttagaaccgcttaacgcagttggccttttgtaaacatcgcttcgagacctctgcaattggcatttttccttgttaacacattttaatttgtcggctgctgctctcc

SEQ ID NO: 40377 - DNA, 690 bp, Homo Sapiens
gccccgccatgggcccggcccttggcgctggcattgagcgcatgggcctggccatgggtggcggtggcggtgccagctttgaccgtgccatcgagatggagcgtggcaacttcggaggaagcttcgcaggttcctttggtggagctggaggccatgctcctggggtggccaggaaggcctgccagatatttgtgagaaatctgccattcgatttcacatggaagatgctaaaggacaaattcaacgagtgcggccacgtgctgtacgccgacatcaagatggagaatgggaagtccaaggggtgtggtgtggttaagttcgagtcgccagaggtggccgagagagcctgccggatgatgaatggcatgaagctgagtggccgagagattgacgttcgaattgatagaaacgcttaagcagttgccttttttaaacatcgatacgagacctctgaatttgtattttttcttgttaaccattttaatttgttggctggatgtataaagatgtttaaaaaattcagttgctttttggggtaatttgaattacttttttaatgactggggttccatttgactgtttgcattgagattgcaatgtgcgcaattttttttgtagttgtggcatcttgttgacatcgaatatgactttgataataaataccggttcctgaaaacggcaaaaaaaaaa

SEQ ID NO: 40378 - DNA, 675 bp, Homo Sapiens
ataacatggcctcacttaatggggggccctgggaacctcagggtctctttacttctaccaaaccaattgaaaactccgcaacaagagactgctaccagaatgcacaagcccttgggttttggacatataaatacccaaagatggtggccaaaacaatccttttgatggcagctacaagcctgctattggactctatttaaacagaacacttgccccctgaagcactgtatgtgcctttaagacttaagctgcccatctcatgcaggtattattaacgaaaaataaaaatggaagccccagtttagaaataccctaaggctgactacccgcaaccgtgtaaccaaaactaatcattctgattttcctgaaatgctgtctctgatcataaatgaaatgcaaaatgtaagctttacatccttgccagcatgattcactgaaattaaaccaatcagctatagaccaacaagcttaaacagctcaacttgccctaaaaagaatgtataacagccaattataaaaaaggtcaaaatattccccccctttatgcattataaactgtgttgtaactgctgtaagattaatttcttaccacttgatttgagtcttctagattgtggtctgtacttcttgtttgaacaataaacttttaaatttttctttaaaaaaaaaaaaaaa

SEQ ID NO: 40379 - DNA, 619 bp, Homo Sapiens
  misc_feature (596)..(597): n is a, c, g, or t
ttgaatttaggtgacactatagaagagctatgacgtcgcatgcacgcgtacgtaagcttggatcctctagagcggccgcctactactactaaattcgcggccgcgtcgactggctcattgcaaccttgaattcctgggcacaagtgatcctcctgccttagcctccccagtagagctgggactacaggtatgcgccaccacacctggctaatttttttaattttaatttttgtagagatgggggggcaggtctcactatgttgcccaggctgttctcgaactcctggccacaagccatcctcccaccttagtctcccaatgcgccggaattacaggtggctcaggtgtgagccaccgtgcctggcttttctccactatcttgaaatcagatgggaggaggcttttttctgggtgggactgaggaggcacactgaagtcccccaggtcatcggggctgggccattgcctttttccccaccctgggtagtcgtggacagaagcttgggatgggatggagaggagagatcgtgctgtgtgtcatgtctgttgttcaagtaaataaaagttgccctgacttcaaacaaaaaaaaacaaannaaaagctacctccaaaggtcaa

SEQ ID NO: 40380 - DNA, 556 bp, Homo Sapiens
acacagtagccaaagcaatttttaaaaaaattattttaaaatgtgattctcttctttgtggctttccatcacagcctagaaaaaattgaaagatctgtaaggccctaatgacctgtccttcactacgtgtctgaccctatagcctactgttctccccttgtgcggtgtactgcagccacgttggccttcttggtattctttgaatacaagggagcttctacttcaaggcatttacattggctgttgccttagcttagaacgctctttctccagatagccgcagagcccgctctctcacctgactcatgtctctgctcaaatgttaatgatcaagaggcagtccccggcctccctcttaaaattacaacctgtcactctccaatcctttcctcacgattttctcaaaagcacttaccgctaaccaacattatatctaaatttttttttgtctctttttattggaatgtaagtttcatgtaagcaggaactgtatatcactgctataccctcagcatttaaaacaatggctgtacatcatacatactcaataaatatt

SEQ ID NO: 40381 - DNA, 397 bp, Homo Sapiens
ccttgacccagcccctctcagcagacgcttcatgataggaaggactgaaaagtcttgtggacacctggtctttccctgatgttctcgtggctgctgttgggggcagagattgacgcccccggtctttgcctctgagcgggagagtctgtgtgtatgtgtcttccccggaatccacaccaccccaccctcctcctgtcccgtggtttcatcatatctctttgcataccccatgtcttccccagttgtcccctggagtttggggggacatcccgcctcaggcatccttctcaaggggaagccaagagaggcatcaggatgggtgggtttctgattgtggcaacgtttgcaaccgttcacgattcaataaatattggatgaatttaaccgaaaaaaaaaa

SEQ ID NO: 40382 - DNA, 467 bp, Homo Sapiens
tcaggccagacacacgttcatcgagtacttctccgcacctgtttcattaaggactgttttacatgaagggtgcaaaagtaggataaaaatgagaaccctagggtgaaacacgtgacagaagaataaagactattgaatagtcctcttctctacccatggacttggcatttttatattcgattttaaggaaatataacttagtagtaaagagatgagcattcaagtcaggcagacctgaatttgggtcaaggctgcgccactcaaaagctatatgacctctatatgagcagcttattcaacctcttttaacctccatttggtcatctgtagaatgatgataaatgcctagctcagaaggattcctaatgaataaatgagtgacagtgcatgtaaacagactagcttaattaatattaatatgattaggatgggctgggcccggtggctcatgcctataatcctagcac

SEQ ID NO: 40383 - DNA, 785 bp, Homo Sapiens
  misc_feature (752)..(752): n is a, c, g, or t
  misc_feature (754)..(754): n is a, c, g, or t
  misc_feature (756)..(782): n is a, c, g, or t
ggtccggaattctcgggatgttctcttaacagtagtctagacatgacgtaatgagatttggcttaggagtgacaatggtaaggaagttaaaggattcaggaaccaaataccagttattgagaagaaagaatggcctcaaaacatcacttctcaaggaagccttgataccctcacccttactacactgtatcctccatttgaatgttgtcaagagctcttctcacaattgtaaataataattgtgtaattttgttttttttttcctactttaggttgctccttgagggcaggacagttcttatggctttatccgttgcgtaagcacagagaggtctgcgaggtcaaaactattgtcatgatagcaagatgcctgtctttttcatttattctcacggtgtgcagaggctacatgatgtgtgatgacatcctcattgatgttaatgaatggtgctatacttgaattttctaaggtgtcattaggtaggtttaggtatgcatacttgtttttagaaattatttttttcctttttcccatttttagaaatcaactcattttttaggttatgccttcagtaatctttgcaacctcaatattgtgtaatggttactttaaaatactgtagttttctttgtgcctaagtataaacataagtacattttgttgttttgtttgcaatagtggtttaaatattttcccaaaatatccaaatttaaaaattctacaactttagaatttaataaatttattctanantnnnnnnnnnnnnnnnnnnnnnnnnnnnaaa

SEQ ID NO: 40384 - DNA, 425 bp, Homo Sapiens
cagagggactccagctcgaacagcgctgggtaaactgaggctgaaccccgctggctgcatccccaggagtcgggcgtttacggtcacgggaacaggttaataaacttttacgcagcagacccggaacttaggtcccgatgtccgggtatcttaagaacaagaagcattcttagttgaagtttcgctttaaagataatgatacagatgcttgcggaggacaggcgttatgcaaagattggcaatcctttgacgagcccaggtagtacagcacgtctccccccgtgatgttttttggcttttatcttacatataaacaagcgtacccaggtggacgccttcctcctcgtgcttttgggaacaccctgctctatggagtagccattcttttattccttcactgccttaataaacttgctttcacttta

SEQ ID NO: 40385 - DNA, 569 bp, Homo Sapiens
ctggctggttcagcccctaccaccgccagcggaagctcatccacccggtcatggttcagcacatccagcccgcagcgctcagcctcctggcacagtggagcaccctcgtgcaggagctggaggctgccctgcagctggctttctacccggatgccgtggaggagtggctggaggaaaacgtgcaccccagcctgcagcggctgcaagctctgctgcaggacctcagcgaggtgtctgcccccccgctgccacccaccagccctggcagggacgttgctcaggacccctgaggggagagctcatgccagggggctcctgctggaggctgggggggctctgcactgccaaatggcctgggcaatacgggcccacgtgggcgtcgtgccctctggcccagcagtgtcttgcccacactcagttcctgagggccctgggcagcccctgggggagagactagaaaacacagaaggaagcagcacagggagacccgctttgtgatctgcatgtgtgacactgattctttggaaataaagagtggaagctgcaaaaaaaaaaaaaaaaaaaagaaa

SEQ ID NO: 40386 - DNA, 561 bp, Homo Sapiens
ccgggtcccagcggagcgcccggcacacgccgacacttcagcaccagtggcggtggccaccactgtgcgcggagatggctgcgacgcgtgcgcagatctcgatcccaaactccctcctgccagaatctggacccgaatccacccattgcccgttttccgctgccgctggagagaatctctgaggtccccaggagagcctgcctgcacggaagagacgcctcctcgggaaatttgtgcacagagataacacaggggatatgccatatgaagatgaaggcagaattctacaagcccagggatgccaaagattgccagcaaaccaccagaagctaggagagaagtgtggattagattcttcctcacagccctcagaaggaaccagccctgccaagaacttgatctcagacttctagtctccagaactgtgagacagtgcattttgttttgtaagtcagccacatggtttgtggcactttgttatggcagccctaggagatgaagacaatatgcaacatggtatgtccattataggacactgtgggccataaatgtgttctttgg

SEQ ID NO: 40387 - DNA, 607 bp, Homo Sapiens
ctgagactcagggccagcaacccgggtcccagcggagcgcccggcacacgccgacacttcagcaccagtggcggtggccaccactgtgcgcggagatggctgcgacgcgtgcgcagatctcgatcccaaactccctcctgccagaatctggacccgaatccacccattgcccgttttctgctgccgctggagagaatctctgaggtccccaggagagcctgcctgcacggaagagacgcctcctcgggaaatttgtgcacagagataacacaggggatatgccatatgaagatgaaggcagaattctacaagcccagggatgccaaagattgccagcaaaccaccagaagctaggagagaagtgtggattagattcttcctcacagccctcagaaggaaccagccctgccaagaacttgatctcagacttctagtctccagaactgtgagacagtgcattttgttttgtaagtcagccatatggtttgtggcactttgttatggcagccctaggagatgaagacaatatgcaacatggtatgtccattataggacactgtgggccataaatgtgttctttggcctgaagaaataaaacttggtggtc

SEQ ID NO: 40388 - DNA, 622 bp, Homo Sapiens
tagcttcctgcttgtgactgttacctaattgtgtcaatgtacatctgtagtatgtacatgtgaaagtgcctttctattttagaggagttttagccttgctcttgtaccgttgccccgctctgtgccccacccccacctcctcctcccaattcctgctgcccactcgagtgtttcgaagcttcctccctgtcccccaccttccccatccccgccttcctgtgcctcggtgctcagtaatgtcccatctcacctccctgtcggtcctcagactgtctcgttttccttgtagacgtgattgtgcctttctcacccctgtgtcctcccatcccaccgcatccgtcccccgctcatgtgctgctgacagcatcgcattcgcccgtgctctgtactgcctctcaccatttcattccctcctctctgaggtgaaaataaagggggatgcttttacagtctggaaagaaaaaaaatgttttgttaatctgttgtgacaatgcacttttatgtatagtactgtacatttttggcatgtaccattacaggcttcagtatacagtcaggtttgttcttcacggtgtatctttataataaataagatagttctggcaaaaaaaaaaaaaaaaaa

SEQ ID NO: 40389 - DNA, 670 bp, Homo Sapiens
  misc_feature (523)..(523): n is a, c, g, or t
  misc_feature (530)..(530): n is a, c, g, or t
  misc_feature (624)..(624): n is a, c, g, or t
  misc_feature (647)..(647): n is a, c, g, or t
gtgagctggagattggatcacaggtataattcaagcttttcatgtagtcatgtagatcactagactccttggtgtactgacgtagcaatttaaaagcagatcatgtgtagtacatctagaagtagatttacaaatattctgaagagttgtaaccttttaaaatactaacagtgacatggttttgtttttaaggtttagcaatatttagcccattatttttgttttattcttaacttgaatgtttgtaaattttatttcttgatgctttcattgtgttatgataacatcaaaataacttgatattctaggttactaataattgttgtgcatgagtgttactacttttggaattgaagactttaaagaattttaaaggcagttgttgactaaacttctttctcttgattcacagccgaaggagtaaaggtgctgcaatgatgttagctgtggccactgtggatttttcgcaggaacattaataaactaaaaacttcaaacaaaaaaaaaaaaaaagactcgaggnggggccnggtacccaattcgccctatagtgagtcgtattacaattcactgggccgtcgtttacaacgtcgtgactgggctggcgtatagcgagaagcccgnacgatcgcccttccaacagttgncagcctgaatggcgatggcaatt

SEQ ID NO: 40390 - DNA, 601 bp, Homo Sapiens
cgcgtccgacttaggccccagggtccacggatggccccaaaggctgagggccccaaagccacttgtctcctaggatccaggcctctgggcttctgccaagaactcagggtggccctatgacttggaggagcaagatcagaccgctcaaaggtccccgtgttcactgttacccagaggctcttgttactacccacttcattccccaccgctgccagtgccactgccaaccctgttcacaggcgcttccagcccactccagccaggggagcagggaagaagaaggggctccctcctcttcacattccccccgaccccaaagccagagaaagccagatggcaccagctgctccggatgtgcctgcccacattgggggacagggccgggcctgggctcggttcccaggtttgagctctgcagcctctctcctggagtgagggggctgaagtcagaccaaaggaagaactcagaaatgtcttgtttatttgtgtttgtgaccaagcagcctctcccttcacccaggtttatggcctcgttttcacttgtatatttttcacactgtaaatttcttgtacaaacccaaagaaaaaattaaaaaaaatt

SEQ ID NO: 40391 - DNA, 595 bp, Homo Sapiens
attgttgtcagctatgtcaggaaatatggctggacataattgtaaattagggctgcaattgtgatcaaattttcagtctagggtgtaatgtagccttagagttaatttaattactgttctattttgacttatttcagagcctcttgggggcaaaaacaactgctcaccaatcttacattgatgggagcagaacttttctaagatactgttggtctccctggaaggggacagccacagccctgtttgttgaccagagtcttgagcattaaccattgtggcttaagagaatgaaaatgtacaagggtatgatgggatctatcctcttcctctctccatgctcctgactcaagaaaaggaaaagacttgcatctctcaaaaatgtttggaagaaagttctacccatcttctcttacactcattcaatcttatgcttgggaggaggaataacttgatgagattgagaaaatggttataatggataggcagcttaggccactcttggatcttgagttcgttccacacagcaagatgtgggaaagactgcagtccttcactacatggctgggtaaacatctgctttctagacccaactatc

SEQ ID NO: 40392 - DNA, 1496 bp, Homo Sapiens
attgtgataatcttatgtcttcttgaccctttggactctttaatatgtatgacatgcaattgtggggttagattaattcaactcctgaggtcctgaaggaacttcacccagtcaagaggaagacagccaaggctgcagctgctgaaggaaccccatatctgggcagacatctttgtgagatctatatggctgaaatgagaaaaacgagaaattgggaaaggcagaattttggactttaattattttggactttgaattagaaatttaattttgggcagtcctttttcccttggagtttaatagttgatggggtgggggtgaggtcatatagttcaaactaaggcatttttattatgttgttgatattgtattatttggagtattttaatgctatctttgggagtcattgtataattgttgtcagctatgtcaggaaatatggctggacataattgtaaattagggctgcaattgtgatcaaattttcagtctagggtgtaatgtagccttagagttaatttaattactgttctattttgacttatttcagagcctcttgggggcaaaaacaactgctcaccaatcttacattgatgggagcagaacttttctaagatactgttggtctccctggaaggggacagccacagccctgtttgttgaccagagtcttgagcattaaccattgtggcttaagagaatgaaaatgtacaagggtatgatgggatctatcctcttcctctctccatgctcctgactcaagaaaaggaaaagacttgcatctctcaaaaatgtttggaagaaagttctacccatcttctcttacactcattcaatcttatgcttgggaggaggaataacttgatgagattgagaaaatggttataatggataggcagcttaggccactcttggatcttgagttcgttccacacagcaagatgtgggaaagactgcagtccttcactacatggctgggtaaacatctgctttctagacccaactatctctccttggggtggggaatcccaaagtcgttagacttatgatagaagttcatttcagcctcaggtccaagccatgttctccaatccagctctatcagctataaagctggtatctattttgattcttttttacagttttaatatataaattgttttttagaaaaataacacatgcctatggtaaaagtcaaacagtataaaagggtatactattaaaaagtaagtctctcttcctccttctcacccctggcctcagttccctggtcccattttcaaaaagtaacaactgttaccagttactgatgtatcattccagagatattccatgtatttacaagcatattgtgtgtgggtatgtgtgtatcaggtttttttttttttttacacaaatggtggcatactatacatgctgttctgaattttgcttttttcactgaacaatatattaaagctgatatcttaatccctaaaaaaaaaaaaaaaaaaaaa

SEQ ID NO: 40393 - DNA, 560 bp, Homo Sapiens
  misc_feature (1)..(1): n is a, c, g, or t
  misc_feature (13)..(13): n is a, c, g, or t
  misc_feature (25)..(25): n is a, c, g, or t
  misc_feature (32)..(32): n is a, c, g, or t
  misc_feature (375)..(375): n is a, c, g, or t
nttccgatcaaanaacttggcaaantacacgnactaattctattgctctccttgtacatcgtgggatagtaaatttaaatgagttgcaatcatttctgatggtcccactgaaaaacatgcaatttggaaataaaattgctatcctgagtggagactttcttctagcaaatgcctgcaatggactagctctgctacagaacaccaagtcattttcatttaatggacctattgctatatatcagatgggagactgtgagtcagcctggatcttgtctaaacacccaagagcattgtcatgatgtcactcctggaggttgttctattaagcattagtgatttatacttccggataaccagtggcacagatgtactctntacatagctgatgtatttccttatgttaactttgttttcctaaaggcgtaaatatgttgtttaaaatgaaagtatttgtttgtacaaatatgctcaatttatgcatataaatctccctttacaccatctatatagtttaataaagatgctattgtctatttgtgtttgtctcaaaaaaaaaaaaa

SEQ ID NO: 40394 - DNA, 582 bp, Homo Sapiens
tttagtagagacggggttttgccatgttggccaggctggtctcgaactcttgacttcagatgatccatctgccttggcctcccacagtgctgggattacaggcgtgagccaccatgcccggcctctttctcacctttacacctgtcttcttatcctcacatctgttttcacaccttcatccctgtcttcctcatgttcacacttgtcttccccatgttcatagctgcctttcttaccattttggtttgaagggcagtcttctctggcttgtttttttgtttttcccagaaaatcagtattattttttaaataagaaaaacattcctagaagatgataattgtgaaaacctcctttggcttatttgcttttccagattttagtctcctttctccccatccgggaaagatggtggaagacataggctaaatttctccagcctcacaatggtcttcacttggtctgacttgtaccaattctagcacccactgaaaaacaagttgagtagagagtgtagagtgcagaaatgtggcttttgccccactttgcatctccaaaattacaacggttggccgatcccattt

SEQ ID NO: 40395 - DNA, 681 bp, Homo Sapiens
gactctaacaccccacttgtcttttagagataaacgccttcctgttttcttgtaatcacacccagaatcaccactgccactttttggattagttttacaatttttttatccatcaaatccgaagtcatttaacaaaaaaaatctggaaatcggaatgttgctaactgtggacagaggtcccaatcacccagattcattattctttgttcattctaatgttgatactgtgtttctccctcaggaaggccctagctttcttcagcccttgggtcagggtataactgaagcatttgaacataatcaagcatatgtttgaccactttgctgactgtattgaaaaaaccctcaccttactctgaaagaagcatggcaacagtacaatattgccgatgctttggtagtgataaaagaggtgatgggtgatataaaatcagccactcttaagcttgctggaaactgtgggaggatgtgtgaatgatgcatatttccctagagctaatgaagaagttaaaaaaaatcttagtgtctgcaaaacaggtgggtttaagatttattgatattagggaaagtgaaattaatgagctactcaagtttctgtcttggtcatcactgagagtctatttcataggaagagtcttgcaggaaattgaatgtgtctgatgctacatcatatggatcttt

SEQ ID NO: 40396 - DNA, 518 bp, Homo Sapiens
ggcacgaggtgtggcacagcccccaccgactccgccgtccccctcccctgtgagccccgggggctgtacatactctactccatccccttgtccatccctgagaccacccccgccgcccttgcgtcgacttagcaaccacctcataggcccacccacctcgggatccgagccaaccatcccacatcacaaactttggtttgggggactttacgttcgtttaatttctcattttgtacggagaaatattcttttcaaaagcgtcttttgactgaagtaactttcctggtgctgttgttaactcgttcctttttttaatttattcccccaccccaggcagccctcctggttcctactcaccctccccccctcccccaccctccgtcccatctgaaccatttgtttcttttctttccgtcagattttggaaaaattctcctctcctccccgccccctccacaccatcctccccgatttaaatatagtcactgctccaagtaacagatgcactgtgaagattc

SEQ ID NO: 40397 - DNA, 663 bp, Homo Sapiens
ggggccagaccgcaggccctgactgcacactcccgttttggcaagaaactaaaattggggagggacccccaagtctcatatgcacacaccctgctgcccctcctttgtcccgttcttccttccatggcaggggctacgtgggcaccgggcgcttgtcctggaagaagcgcttgagcgtgcagacctgcagcacagccaccagcagcagcaccgccacgttgacagctgaccagaagttgacccgctccaagttgccctcttgcaggttgcggtcacgtgcctcgaaggcccgcagtagcgtgagcatctggatgctgcgctccagccgggtccgcatggtctcaatggactcctacagggcagcgggaggggaagggtcaggcctccctccacccatcagggagcagagaccaaaaaaaccgggggatacggagggaggctgtattaaccctgggaggtacagctgcaaacacagacttgttcaggctaagttcaaatcctcaccctgccactcactggctgtgaccatgagcaacttaattaacctatctgagcctgtttcctcttctataagcttccaaattgctgtgaacatttaatgcctaaataaatgtacaaggatgagcatggtggctcatgcctaaaaaaaaaaaaaaaaaaaaa

SEQ ID NO: 40398 - DNA, 631 bp, Homo Sapiens
ccacgcgtccgcaacatagtgagtcctcatctcctaaatttaaaaaacaaacaacaaaaacttctacgtgtggtaaagggttaactcagcaagcttgggttgcttaaaccttgcacattccaaagaaaggtctgaccccagtgctgacctttgactggctactgggaaatgagctctgagcccctggataggaatgtttctgtttgcctgaggcctttgaccatgccagatagtttatgctaacaatgtgatttatagtgaatacctgttttcctgtgtctaagaccctgggctgcactgtattaatttgaccttgggtatttggggagctgagactgagtagctgaagtgagtcacataagcactaaatgcttacctgactgacccccagtaaaactctggacatccagacttggatgagcttccttgggtggcaacacttttacgtattgtcacacaccattgctggggggattaagcactgtctgtaaaactccactgtgaaatgacaactggaaacttgcacgtggtctctcctgattctgctctattcaccttttccctttgctgattttaatctctattcttttgttgtaataaaccataatggtgaataaaaaaaaaaaaaaag

SEQ ID NO: 40399 - DNA, 703 bp, Homo Sapiens
gaaattcccaaattcactgaatggtaccatgccgatctctgagaagttatgttgcaccactgtgaaggtctagatgcaagcttggctccctcagaaaggcgcttcccttttgcatggctgaggatccttgaaggaacctggtcagtctccggttcagcttccgacaccagagtggaacccagtaagcaccatcaggaatgaatttcactacaagtgtggataactctgattttcaaaggagtagttacttgcaaattacatccttgctgaattcaggaggtatgaaaccctattttaccatgttagaaaacagcccaggattttctcattgctctgccatcatatatgtctatgacttgagcccttatttttccatctgcaaaacaataatgcctatgtgtctttgcatatagatttgaaatcttcattcaaggtttagtaggatcatattttctcaaaaataagagaaataaggttcataaggaaacttgctgggattgtggttgttttgttttctcagcagcacaaacaaaaccagaatttagcctttaggactgctgagtaagccaaatttaaatgactactgctttgttcatgggtaagccatgtgcttttcaaaataagtgccactaaaaaccacataatgctttggtttctatgtggataataatatttagtcctataaaaaaaaaaaaaaaatcgc

SEQ ID NO: 40400 - DNA, 725 bp, Homo Sapiens
gaactacagtgacagagtccctacagcataaaggcaatcaagaggaaaacaacgtagacctagaatcagccgttaaaccagaatctgaccaggttaaggacttgagttcggtgtcactatcctgggatccaagtcatggcagagtagctggcttcgaagtacagtctttgcaggatgcaggaaatcagcttggtatggaggatacatctctgagctctggaatgctcacccagaacacaaatgtaccaattctagaaggtgttgatgtggccatctctcagggaatcaccctaccttccttggagtcttttcacccccttaatatacacattggtaaaggaaaactccacgctactggctcaaagagagggaaaaaaatgacactcaggcctgggccagttacccaagaagacagatgtgatcatcttaccctaaaggagcctttttcaggagagcctagtgaagaagtcaaggaagaaggagggaaacctcaaatgaattctgaaggggagataccttccctgccatcaggcagccaatctgcaaaaccagtaagccagcccaggaaatcaacccagccagatgtttgtgcctctcctcaagaaaagccactcaggactctgtttcaccaacctgaggaagagatagaagatggtggactcttcattcccatggaagaacaagaccatgaagaaagtgagaaaaggagaaaaaaaaaaaaaaag

SEQ ID NO: 40401 - DNA, 621 bp, Homo Sapiens
ggaagccgatggctctgggttcaaatcctcaagtacaaatggtgtgataccaggcaaagcatgacacctccctgacgctgggcacagtgactcacacctgtaatcccaacacttctggaggccaaggcaagaggatcgagaccagcctgggcaaaatagaccccatctctggaaaaacaacaacaaaactttccgcgtggtggctcatgcctataatcaataggactttgggaggccgaggtgggaggattgcttgagtccagaagttcaagaccagcctgggcaacatggcaaaaccctatctttacttaaaaaacaaaataaaacacacacacacacacacacaaaaacctagctgggcagagcagcacatgcctgtagtgctcgggtggctgagatgggagaatcacctgagctcagaagatggcagctgcaataagctgagatcccgccactgtacgcaagcctaaacaacctgagtgagaccctgtctcaaaaaaacaaaacaaaacaaattcccttcctgagcttcagttcccctaatggtaaaatagagaaaattattccctaaaaaaaaaaaaaaaaaaaaaaaatgaccgcccgacagcttatttccttatt

SEQ ID NO: 40402 - DNA, 502 bp, Homo Sapiens
gcgaaactaagatatagcagtagaaattgtatcagtagttacctgggttgaggtgggatgggagttgactgcagagaaacacaagggaagtttctggagtgatgaaatgttctatgtcttgattgactatggttacattggtgtggacatttgtcaaaactctgaatttcatatttggaatttgtatattttgtatataaattatacctcaataaatatgtacatgtatatatatgtgtatatataatacattttgatatgtcatgatgtctatcacttcacagcatattatatttctatcataccatatttacataatggaaaaagatgaaaaggatgctgtattttggggaaatcacaagagattatcacctttatttattttttatacaaatacatataaatctttcacagtacaatacaaatgtcaaaatgtggtattttcattgctctataaattcttatatgttctatatatgtaataaatgttaaaaacagaaaa

SEQ ID NO: 40403 - DNA, 872 bp, Homo Sapiens
  misc_feature (842)..(848): n is a, c, g, or t
  misc_feature (851)..(852): n is a, c, g, or t
ggtccggaattcctgggatgtccgtggagtcccgtggccagcctgtcaagatctatgcctgcaaggcaggctgcctggacgagccagtggagctgacctcggcgcccacgggccacaccttctcggtcatggtgacacagcccatcacgccactgctctacatctccaccgacctcacacacctgcaggacctgcggcacacgctgcacctcaaggccatcctggcccatgatgagcacatggcccagcaggaccccgggctgcccttcctcttctggttcagcgtggcctccctaatcaccctcttccacctcttcctcttcaagctcatctacaacgagtactgtgggcctggagccaagcccctcttcaggagtaaggtaggaagccgccatctggtcgaaacccgaggccttggccttgctctcagccctgtgtctcggaaggggctagcctggcgagggggggtgaggcctgggcaggaatgggtgtcctgatgccctcagcccttgacaccagagagcgcgcgcaagtgttttgagaggagacgacgaggaagggaaagctggaaatccaggtgtgaattgatggtcttctggctttccagggcagccctcccctcctcccgcatcataaatctcagcatttaaaaataactgcaagctgggtgtggtggcttgtgcctgtagtcccagctacctgggaggctgagatgggagaatcccttgagcccaagagtttgaggctgcagtgaactatgattgtgtcattgcactctagctggggcaacagagcaagaccctgtctcaaaaagccaaaaacaaaaaagcaaataaaagttnnnnnnnaannaaaaaaaaaaaaaaagggcg

SEQ ID NO: 40404 - DNA, 547 bp, Homo Sapiens
  misc_feature (457)..(457): n is a, c, g, or t
  misc_feature (530)..(530): n is a, c, g, or t
  misc_feature (539)..(539): n is a, c, g, or t
  misc_feature (544)..(544): n is a, c, g, or t
acatgaaacagcttcactagactacctcaatatgaggaatgttttgatcctggacatatggtgtcttcctacctccatactttatagattcctaaacccatctatataatacaagcatgtgccatatgatcatttagtttcttattacctccctatgccaggaaagaaatagttgcaatttattgtagtcatcatgaaatcttcccttgcacataaatttaaaatgtacctgctgcacattttaatatgtcttaattgcttttaaacttggctgtattgtgtacaactattataccatcttttataaacacagttttttaagaaatttctttttgtaagttacaacattccactggatccttatattgcctgtagtggaagagggtcttgtgtgtctgccccttctagttttcactcatgcagaagcaacataaccttctgatttgcacaataaatnacatatatttagcaggatttttatttgccgtgatatataggataatttagtctttggcatgtggcattatatntattttggnttttnttt

SEQ ID NO: 40405 - DNA, 925 bp, Homo Sapiens
cggacgagggaggacagttacgagatcttcatctgtcacgccaacgtcatccgctacatcgtgtgcagagcactgcagtttcctcctgaaggctggctccggctctccctcaataatggcagcatcacccacctggtgatccgacccaacggccgagttgcgctcaggaccctcggggacacggggttcatgcctcccgacaagatcactcgatcctgagggctccggcctctccttccctctgtcctccctgcacaggccgcacacacttaacgttttgttcccaaggagaccggcggaaagtagaaacctgcaatgctgcatctgggaactgacttgtgaccaggctgagaaggggagagttgggatcagacagcctgacttctctgcagggttttatacctgaccatgaacccccaggatggcgtggggtttaaggtgaaagcgtctcacgcacaagtcaggcctgttgtggggacctgaaagaggcctgacccagaccaccatgttcgcacccacagctgacccgtgctgagggtccaggctccattggcaaagccggtcaggcacgagggcgactgaggcacgtggatgaggagggcacccaggttctgttcacaactcacttcacttcatacatccttttaatttcttaaaaccctcttgtcccttaaatatttgtcaattaaagattttctggctgggcacagtgggtcacacctgtattcccagcttacttaggagggccgggggcggcctaccccccctccacaatgggacgccaccccctagctcactgcaccggacgagttacaccggccaaccccgtcgtgacagtcggctgcccaccccgccttggaacttccgtagacacccgccacgctactcccacacacgcttcacccgcacgcacctcatccccccc

SEQ ID NO: 40406 - DNA, 789 bp, Homo Sapiens
gcgtccgggcttatttttaaatctgttcagaggagtggggaagacccattcagaagagttatttcacaaacacgtggcaattatcagtgcagatttcttgttaaggttccctagcaatgactgtatttccccagtagaaatggggtgtgtgtgctgctgcacaccacaggcagatgtgggagaccctgtttgttttgtggcagtgggaacagtcgcaattttagagaggacttattgaggggcatttgttactttaaacaatttagtgccatacaaaggattagacagagctcctgaagggggaatctccctcattttcagggtgttaactacagaggagttgagggaaggggccatggagggaactgactgagacaggtagagcatctaccgcccaaaagtcaaagcaaagacagggttagaaggacccagctgggcattttctgctcttgaatctgcagagagtgtcattaggccaaaattggcatcctctctcttctgtttatcagaaaccaccttctcatttgttgtccttcattttaaacagggcagacctccttatgctgcttcagcagaagaagtggccaaagaacttaagtcaaaatctggggaatcgaagtcctctgctatgtcttcagacgggtccctggctgaaaacggagtgatggccgaggagaagccggctccccagatgaacggggagcacgggtgacgccaggggcccccagccactctgaaagtgccttgaataatgactctaaacgtgcaatacaaatcctcatttaaatg

SEQ ID NO: 40407 - DNA, 619 bp, Homo Sapiens
ggccaaagaacttaagtcaaaatctggggaatcgaagtcctctgctatgtcttcagacgggtccctggctgaaaacggagtgatggccgaggagaagccggctccccagatgaacgggagcacgggtgacgccagggcccccagccactctgaaagtgccttgaataatgactctaaaacgtgcaatacaaatcctcatttaaatgcactaagtacagacagcgcttgccgcagagaagctgctctggaggcagctgtcttaaataaagaagagtaaacttattttttatagagggtgaaggatgctggaagggtaaggatttaggaatatctggagagaaagagagcctgcagttatgtacattttgtcctttccgtaagagaaaaatgaggactttggaaattcagatccctctttgatatcagagatttaaacaacacatttttagttttaaccagttgtagtcaaaatgctacaataaaacaaaaaagagaaagaaaatgaagagcatttgactcccgcacttaaaatgaagtacacataaagtttaaactggttatgacaaaagcctatagttgtgtttcttgaactataaagaaaacaaattttggcagtctt

SEQ ID NO: 40408 - DNA, 819 bp, Homo Sapiens
  misc_feature (734)..(734): n is a, c, g, or t
  misc_feature (753)..(753): n is a, c, g, or t
  misc_feature (782)..(782): n is a, c, g, or t
tattttttatagagggtgaaggatgctggaagggtaaggatttaggaatatctggagagaaagagagcctgcagttatgtacattttgtcctttccgtaagagaaaaatgaggaccttggaaattcagatccctctttgatatcagagatttaaacaacacatttttagttttaaccagttgtagtcaaaatgctacaataaaacaaaaaagagaaagaaaatgaagagcatttgactcccgcacttaaaatgaagtacacataaagtttaaactggttatgacaaaagcctatagttgtgtttcttgaactataaagaaaacaaattttggcagtctttaagtatatatagcttaaaatataatttttagcatttggcaccatatgtatgccattatatttgattttgcattactgtttcacaatgaagctttctttaaggctttggtttttatgattatgaaagaaataaggcacaaccacagtttttctttcttaaatttcatcactgttgatgtggttcttttgtgttaaaaaaaaaaagtgcaactatcaaaactaaaaaattatagagtaatattgccgttctgctgattttaaatatacaatacatcatacatactttacaagcaagttaaatggagataaagttgaaatcatagaagatgcaaatgacctttcaaaatcaacacaatgtgttctgaaactttccgtgacctaataccatgcatccngtggatcaaatgaactaangtgggttttgaatcgggatgttagaccanttagtacctactaacttgagcctaaaccttccgccat

SEQ ID NO: 40409 - DNA, 805 bp, Homo Sapiens
tgaaggatgctggaagggtaaggatttaggaatatctggagagaaagagagcctgcagttatgtacattttgtcctttccgtaagagaaaaatgaggactttggaaattcagatccctctttgatatcagagatttaaacaacacatttttagttttaaccagttgtagtcaaaatgctacaataaaacaaaaaagagaaagaaaatgaagagcatttgactcccgcacttaaaatgaagtacacataaagtttaaactggttatgacaaaagcctatagttgtgtttcttgaactataaagaaaacaaattttggcagtctttaagtatatatagcttaaaatataatttttagcatttggcaccatatgtatgccattatatttgattttgcattactgtttcacaatgaagctttctttaaggctttgatttttatgattatgaaagaaataaggcacaaccacagtttttctttcttaaatttcatcactgttgatgtggttcttttgtgttaaaaaaaaaaagtgcaactatcaaaactaaaaaattatagagtaatattgccgttctgctgattttaaatatacaatacatcatacatactttacaagcaagttaaatggagataaagttgaaatcatagaagatgcaaatgacctttcaaaatcaacacaatgtgttctgaaactttcgtgactaataccatgcatctgtgatcaatgaactatgtggttttgaatcggatgtagaccattagtactactacttgagctaaacttctgcatggttcataatttttaaa

SEQ ID NO: 40410 - DNA, 653 bp, Homo Sapiens
gggtgtggtggcatgtgcttgtagtcccagctccttgggtgggtgaggcaggaggatcgcttcaacctgggaggtcgaggctgcggtgagctgagatcgtgccactgcactccagtctgagtgacagagcaagaccccatctcttaaaaaaaaaagtttaattgaacagcagattttatttctaatttgtttcttgaaattagtaatgataaatacctaatcttaatgagtctccagttgtagattatgctctgttgggattaagagtttccaaatatttgctcaaagggttgtgtttcaatgagagttttaagatttgatatttcagcttgacagtttgttatttaatggcaagaagtaataaattgcctgtgcctaagaaactttttttccttttccagcttcttggacacttaatgattgttggcaagaaatgtgctgctgatctgggcctgaataagggttatcgaatggtggtgaatgaaggttcagatggtggacagtctgtctatcacgttcatctccatgttcttggaggtcggcaaatgcattggcctcctggttaagcacgttttggggataaatttctcttctttaggcaatgattaagtaggcaatttcagtatgtaagtaacacactttattttgctgtg

SEQ ID NO: 40411 - DNA, 612 bp, Homo Sapiens
agcctctcctctggccgccgcgcgggagagaggccgagatggcagatgagattgccaaggctcaggtcgctcggcctggtggcgacacgatctttgggaagatcatccgcaaggaaataccagccaaaatcatttttgaggatgaccggtgccttgctttccatgacatttcccctcaagcaccaacacattttctggtgatacccaagaaacatatatcccagatttctgtggcagaagatgatgatgaaagtcttcttggacacttaatgattgttggcaagaaatgtgctgctgatctgggcctgaataagggttatcgaatggtggtgaatgaaggttcagatggtggacagtctgtctatcacgttcatctccatgttcttggaggtcggcaaatgcattggcctcctggttaagcacgttttggggataattttctcttctttaggcaatgattaagttaggcaatttccagtatgttaagtaacacacttatttttgcctgtgtatggagagattcaagaaataattttaaaaccgcatacataataaaagacattgttgcatggcttatagtctcaaaaaaaaaaaaaaaaaaaaaaaaaaggg

SEQ ID NO: 40412 - DNA, 746 bp, Homo Sapiens
gttggcccctgggctatgttctagtgggtgagattaggtcggccgtacagaggccggtgggctccctgacatcccttccaggcaacctgaaagcactgaaatagcttatggccctgtgccagggaccttggcccaagctgctgacctccagggtggggagggagctacccccaggagaagagtcactcagacagcagtatgagcaagccagccagcagctccgtgcctgcacccagctcaggggaatcccagggggttcagatgcccaggaaggaaaaggggacagcgctactgctatggaatgagaccaccacttctcctgttgtccttcccagcttctccccaacctccccttttccctagtttataagacaggagaaaagggagaaagcaaaaagctggaaagaaacagaagtaagataaatagctagacgaccttggcgccaccacctggccctggtggttaaaatgataataatattaacccctgaccaaaacgactggtgttatctgtaaatcccagacattgtgtgagaaagcaccgtgaaactttttgtcctattagctgatgtgtgtagcccccagtcacgttcctcacgcttacttgatctattatgaccctttcacgtggacccccttagagttgtaagctcttacaagggctaggaatttctttttcggtgagcttcggttttagacgcgagtctgccgacgctctcggccgaataaaacctctttctttttaa

SEQ ID NO: 40413 - DNA, 838 bp, Homo Sapiens
  misc_feature (700)..(700): n is a, c, g, or t
agaggtaatcccaccctcaggtagggcccagtgtctgttgtttatgagttctcatcattttgctcccacttaaaagaacatacagtatttggttttctgttcctgtcttagtttgctgaggataatggcctctagctccatctgtgttcctgcaaaagacatgatctcgctgttttttatggttgcacatcttttgttctaacatttggtccttaaacctggttcctgacacagagctcctaaatcccttggaattttctgggtgatagaagcgtcctttgttctcatgaggtgactcttggtgggctccttatttggggactggtcaccaaaaagacctatggttggaagcgttgtgctgtcagccccattccccatcctctggcgtggggagtagagctggagctcaatcatgcctatgtgataaagcctccagaaaactccttaaaagacaggacttggagagcttccgggttggcgaacacatccatgttccaggagagtggtgcaccccaactccacaaggacccttccaagcctcaccctgtgtatctcttcaactggcttcatcatttgtgtcctttaaaatatcctttgtaataaatcagcactagtaagaaaactgttttcctgggttccatgagctgttctagcaaatgttcaaacctgaggagggagttgtggggacctccatttacangcagtggtcagatgcatagtgatgctggccttgcactgggtctgactgggaggtctgtgtgacgacccttactgtgagctgtgccatcgctaggctctctgcttaggtctcagcgctttctcctgcatcgaacttctc

SEQ ID NO: 40414 - DNA, 351 bp, Homo Sapiens
ttctgactgagactgttcctaaaaagatctttccttgtatactctaactccctgctttctgggcgcttggcttctcaattaaaggctaatttaccagcttctcttgcatctgggtttgtccaaagtttggggccaatgagatgtgaacggaagttgcatgtattatttctagtttgtgccctaaaaagaatatgtatgtgttacccttgccctcttaccctctccactggctggggtgcagatgtgatggcaggaattggggcaactactttggacccagaggcagaagccctgtgatgaggatggcagaactgctctattagccctggactgttacatgaaagataaata

SEQ ID NO: 40415 - DNA, 327 bp, Homo Sapiens
  misc_feature (321)..(321): n is a, c, g, or t
tcttaatttttctccatataccatctgaatactaatgtatttatttatttgtttatttctgaatgagactgatatccataaaaatgatctttccttgtatactctaactccctgctttctgggcgcttggcttctcaattaaaggctaatttaccagcttctcttgcatctgggtttgtccaaagtttggggccaatgagatgtgaacggaagttgcatgtattatttctagtttgtgccctaaaaaagaatatgtatgtgttacccttgccctcttaccctctccactggctgggggtgcagatgtgatggcaggaattngggcaa

SEQ ID NO: 40416 - DNA, 643 bp, Homo Sapiens
  misc_feature (244)..(245): n is a, c, g, or t
aattgagttcaagctttcctacccaaaactttaacaaaggcttaatttggttggcccccaatttgagcttgaactgaaaaggcatccctgcatggtcaacttcttgatggccgctttaccacctccaaattgtgccagtgggtattttcccagttttatagtttgagacatcaaattacactgtcttagtggtatttaattacttaaattatgtagctattggcttgttagttcttttaaacannctgtttcttgggcttcagttatttaaagtaaatttaggtgtaatatagaaaactgtccctttccaggtgggagcttaacacctgtataaaacctaaggttttggtaagtaccttagttgaataaaagcacaaggttatcaccttttttatccgtccaccgtgacatggttatgcatcctttagattaacctcaccaaatgaagctttttctatccatttttaatattgtccttacataatattgtccttagattttgatcaattctatgtctgacttagaaattccatctacaatgtagtatgttttcaatgaaaaaccataaagtaacatccaagtgtttcatggtttgttgggaaggtaattttaaaataaaacaatttccaaaaaaaaaaaaaaa

SEQ ID NO: 40417 - DNA, 392 bp, Homo Sapiens
gtttccttgggcttcagttatttaaagtaaatttaggtgtaatatagaaaactgtccctttccaggtgggagcttaacacctgtataaaacctaaggttttggtaagtaccttagttgaataaaagcacaaggttatcaccttttttatccgtccaccgtgacatggttatgcatcctttagattaacctcaccaaatgaagctttttctatccatttttaatattgtccttacataatattgtccttagattttgatcaattctatgtctgactttgaaattccatttacaatgtagtatgttttcaatgaaaaaccataaagtaacatccaagtgtttcatggtttgttgggaaggtaattttaaaataaaacaatttccaaaaaacaaa

SEQ ID NO: 40418 - DNA, 594 bp, Homo Sapiens
tttgtaaataacaaacaccactttgttatgaagaccttacaaacctcttcttaagacattcttactctgatccaggcaaaaacacttcaaggtttgtaaatgactctttcctgacataaatccttttttattaaaatgcaaaatgttcttcagaataaaactgtgtaataatttttatacttgggagtgctccttgcacagagctgtcatttgccagtgagagcctccgacggggcaggtactgtgccagggcagctctgaaattatggatattcttatcctcctggttccttcggtgccaatggtaacctaataccagccgcagggagcgccatttctcctaaagggctacaccactgtcaacattatcctggactctgtgtctctctctgttgggtcttgtggcatcacatcaggccaaaattgccagaccaggaccctaagtgtctgatagaggcgatgatcttttccaaagtcagtacttacaaactggcattcttacaggctgcaccatttcctagtatgtctgctttaagcctggttcaacctctcatcgaatattaaatttttctttgtaagaaaaaaaaaaaaaaa

SEQ ID NO: 40419 - DNA, 588 bp, Homo Sapiens
acggatactcaacaaagctgttagaacaaggagttggaattagaaaaattacccaagtagtattcaaatacctaattatttgcttgaaagcactgaaggccaactatggaactcagtggctccaccagagagaagtctggctaggtgctcaggtggcgtgtcctgaccattcagtggctgagccctgtgaaaacaggcattctgtaggtcttcggatgaggaacttgcagaagcagccgggtgctgccatcctaagctggttttccatatgggcttctctgtgagtgttaagaaaagctgtggtttgcctgtcagagtgagcgcccccactcagggtaaccacagtttctccatagagcaataggacagcaggagtgggctgggacgactcctaccttagcagctgctggggtagaatgcagcctggtttcagaactgaatttctctttcttcttaaaggtgaaatcttgtgctgagtgggtgtctctctcaaaggccaggattgtagaatatgagaaagagatggagaagatgaagaacttaattccatttgatcagatgaccattgaggtaatccgtgaggggggg

SEQ ID NO: 40420 - DNA, 635 bp, Homo Sapiens
gattttatatcagtatgttaaactttattgccacatttaaaggactgtattttcatacttttttgcattttacctttcatctaccaatccatgtgcatggattgcacactaagatgtattttcttacgaaatagttctgtgtttattttttaattatagaaattccaaagaacagcacatcagaatgctcctctcttttcagtaattgttttagttcagagatcttcccgctcagcctccataaatctaatgtcattttttttttaataagtcctaggagctgggcttcattcctccagcgggagtccagtcagggtcctgaagtttgctggttcaggaaagaacaggaaagagaaaagccttctgtgcccaggctaaaactgttacatttccacagtgtggatgcagtcagaatccctgcacattctggtcataaggattagagtcaccagatgaggctctaaacagatcgcatcccttggaattagaaagcagtggagaccgggcgcagtgactcacacctgtgatcggcacttcggaaggccgaggcgggcagatcactgaagctcaggagttcaagaccagcctgggcaacatggcgaaactccatttctataaaaatacaaaaaaaaaaa

SEQ ID NO: 40421 - DNA, 634 bp, Homo Sapiens
agtgaagatgggttcttgaactcttggaagcctggatgagccacctaatctgcaagataaaaaccaaagaccaatgcgtattggggaaaagaatgcttagtactgcaagactgttgaatacctgttgaatattcctattgaggttttttcctaaacatacttcagtaacatcttaggacaattcactggagaaatgttgatccctggctggaatgtcataccattgacccatttgaagagttaaagctggatttgactgctctattctaccaggaatattgttagggtagccttttaccagtttctaaacaattgtaatcatttattgactcagcaattcctcagataacaggtcaaaagatgtacagatacattctgaagttttcttgctattaaaggcacaagagtttccttgtattttgactgacaatgtagcatgtttccattttagtttgttagtgatggtggttttttccctttgaaagccatttggtatattcaccataacaattagtttaatatgattacataagaaaactatgataaaacccagcaattttagtagttgtgaaaatacgttttttaaatcatgtttaagaagaattgcaagacttgaaaccaaatcctgatgggg

SEQ ID NO: 40422 - DNA, 396 bp, Homo Sapiens
  misc_feature (324)..(324): n is a, c, g, or t
  misc_feature (337)..(337): n is a, c, g, or t
  misc_feature (371)..(371): n is a, c, g, or t
tcttttttaaactcccaaacaagaagcttgaaacttttcctgtattttaaaattgaaatttggtcacagggtatagtcagatttttattaaggtttggtttgacaacctttaaaagaaaggtttacctcgctaatacttcttaataacatgcatcaaatggtattccctatggtgaagtatattctcaaagttatgttatctttcatttttggcatttggtgcttatggacttagtacccaggcaacaaagatctattatgcacctactctcttgtatgttcgctattatttcccaaacaaaaaaaggggcatatatgcataanaaataaatattanaattattttgtttctcccacaaagcccatggganatggcccaacaaatgtttaaaaagt

SEQ ID NO: 40423 - DNA, 682 bp, Homo Sapiens
  misc_feature (615)..(615): n is a, c, g, or t
aaagaaagaactgtttttattttttgtctacctttattgtaaggagagagtgaggataccatgccacacatgcagggtcctgagcagagggctgcaccctgcttagttctaaagacacctagactttatcctgaaagccactgagaggcccatattttgaaacactcagcctctcagaagaggatagaatgggttgccagtgtaatagggagagaaatcgaacatagctgactccatgttgcttctgactcctcaagctaactgcttttaggcacttctgcacacgggccaagttaatcatggaaagaacttagattacagtttaactggaaagcaaggatgataagcgttcctttccaaaactaacctctgaggagataagaagggcatgcacacaagtaacaatgttatattgaagacttgtaggagcgctgtgacctgagcaaggacaaagttttgcaatctccttgggcccctgctgatgcccaagtgtctgtggtcaccagccacccccctcacctcagtctcctccttgttccccttcagtgtaccccttcaatgtacaaagaagcttgagattcatgcctttaaagatggttcgttaggacatgggtncagtatcttcctgacttgctggctctccaaataaagatgcttttcttgctctaaaaaaaaaaaaaaa

SEQ ID NO: 40424 - DNA, 636 bp, Homo Sapiens
  misc_feature (490)..(490): n is a, c, g, or t
gcacgagggcagctagcagacaatcatcggtggaccacagggccactagagtgagacctatccatagataaagattggccagtgatgaagcccatctgggtgcaaaggccgagctgagaggcttctaccaactggagtgtgccagtgagggtgagcagaaggtggtctccagggagaacatgggcagggtttggagccagcacctccccagggttggaggaagcagacccaggacctgcctgactgggatggggctctcttctgccatctccgcctccacctgcctagctctgctcccccgccccgagagatgcctccaggcttgggtagatgaagccaggggcttcctgccttcctggaaggcttttccctgtctggagtttatgaaagaccagcaggcaatgcggcaataaaaaagaccttggggtagaggggcgccacgagaggcgggtctggcgctgacatccaaccccgtgccccctccctgcangatgctggtggactgtgtgcccctggtggaggtggacgacatgatgatcatgggcaagaagctgaccccaagtgtgtcttcacctatgtgcagtcgctctacaaccacctgcgacgccacgaactgcgcctgcgcggcaagaatgt

SEQ ID NO: 40425 - DNA, 591 bp, Homo Sapiens
aggtatccagggattttacctctccagtgctaggcagggtctatgcccataacatcagcaggaagcagttacagaagatgaacctccgcccttctgcaagccccttaagattaaggaggagtatataatctctgatggggaaatgaggtaggagaccagaaggacttattttccattcccaaccccattgaacagagcaggatctggtcaaaacagggtgcagtggagaagcctgctgaaaccagcagatgatgatgaaagtgacctctagttgccctcactgcttatgagcataaagacactaccactgggaccatggccagtttacaaatgtcatggcaacacaccttggcaatggcctggaagttactttatatggttctggaaactccctgcccctttcccagaaagttctgaataacctacctcttaattggcatgcaattaaaagtggctctaaatacaactagctagtagcccacaggcaccaactctgggcacactgcctataggttagccctgctctgcaagaagtagcaccagttcaataaaagttgctttctctcaaaaaaaaaaaaaaaaaaaaaggac

SEQ ID NO: 40426 - DNA, 595 bp, Homo Sapiens
cctgcatgaaaaattggagttagaaatactgatttctgagaccacgtataccagtgaaaattagcttctgagtaaatttctaatttatgccctgctttatttagcctcgctatatgtaacacatggattattttttccctctagtttttaactatatcctagattaaaaccagcatatgctaagaatgtttttacattctgtttcctcctgtgatctttctgaaccaataataaacagtcaactgtgatgctttttagtatgaacaatgatagttttctaaaatctgaaaatcaatacctgagtatgtgatgtggcaatgcattcttctagataagcactaaacaaagtatggaccctcaatttatgtctttaagatttaaagtgaagtaaatttctaaggaactgtgtcctttcctagcaggaataaacagtgaaaatttggtaagtatttaacttgaagtgcatgtaatagtgatgagagtaagtagccaaatttccgtaatataaggtaatgtttaaaagtgagcaataattattgcatctcttttgcgacttcatgtagatgtgattaacattttttacaaatttgcctgc

SEQ ID NO: 40427 - DNA, 1000 bp, Homo Sapiens
cagaagagcggggtcggggccggctgaccaggaacctgggcgagcagcggcgggggcccgaggggttctgggccggagaaggggcgacgttcgggcaccccccgaatggacaatctttccttctgtcaacggcagggtgcaggcctagtttgactctgacagtcctcccactaaggaattcctggtgactggaagggggagtgactcaggccctcaacctctagcagagtgccttggctccctcctgtcgtcctggggaacctcggccccagccctgcctccccagccagtcacagctcctccctggtcaccctgagggagctcagggcccggctggtagctgggttgctctgcttctgtccccgactcctgtggagcctggcaggcaactccatgatctgaccccggttaccttgacagccctgcctggcctcccctctcatggcccagccaccccagaacctgaagaggttttctagctgccatgcatttgccaggctgggttacccagcctactttccctgcctgccctccagtgctgccaggcctagtgtgccagccagcgctcagccttcagtaaagggttcccctgcttccaacctccattgcactgcttcccctaagactgtgacctcctggaaggctggagcacaactgcctctcaatagacgtgttgcaaaacaggaaaaaaaaaaagggaacacagccagcaacccacacccacaggacaaagcaaacgagcaaaaccacacacccagcagagaaaggagaagagcaacgaacgcagaccagcggagacagcagacgccacgaggggtagagaagataataaaacatgtacagcagcgaggcggaaatccaggaagaaggacagcatataaagtaagaagggaatgagatgcagtaaataagatacatatctaacgagggctgcggcggagcggggtgtcgtgaacgttgtaggagcggaacatagaaggaaaagatgtataggtgcacc

SEQ ID NO: 40428 - DNA, 647 bp, Homo Sapiens
aatctgaaatctaaactctgtgatattggaaggatattttaaaataaagggactgacctgccagttcaagcttagctctggcttctttgtctttggcaataaatctgtattcaccctggtcacggggcttaatatcacaaatctgtagtcgatgtatctttccttcactcatcatctggtgtttatcaccctggacaacaaccatgttatttcttagccattggacttccaccttatctttattgagttctgctaaaaagacaacatcagcaccaggggcttcaagaatatcttgtggaggcctgatgatctcaacaggaatttctggaaagaaaatgtgaaataaatacaaatatgtttacattttgattaacaattttaaaaaattggtaacattagaattgttttttcacttaatatgtaccttccacaaaaagtctagcacgagacttcctgtcttctaccccgcaagcatattcacactcatcatccagcctgcaatcttttataatgagtctgtgtatacttccatctttttcaaatttgtatctaaaggagacattggattatcagttagcttgcaatgatggccactaaattgtcaaaagtgtatatatagctacagaaatagagaataaaaagatctt

SEQ ID NO: 40429 - DNA, 1014 bp, Homo Sapiens
tttaaatccatttcctttggagattttattttgtgttgtacacttatgctctaccctggcacagtgcttgacacataggtgctcactgaataaatgttttgttgaatgaatgtatggtgcttggaagagaaaacaactcttggagacagttgagagttgtacttcatcctgtttgttctgggcgagggaagacaatcttagagttggaagagatgtaatccggctcagcctcccaggataaaggaacttccttttgaaacaccctggatggctactctctgcttgagtgttttgagtggagggcactctgtgtctgacagggtgattatgagccaggatgtgcctacctctaatgctcacatttgccccagagtcagggtgctccctggcatggttgctcctcttactcttagacccaccagctggttttctccagataggaacagggctaggagaaatctttctcagaaatccatctcttctgatttcagattattctctaggcggagaaaaacttcccgtctttaaagttcttagagaagatgtatttattgtatactaatcctccagcacctgctccactccttattataaaatgtcatatccaaagaacagatgctgtcactgatgcctgatgagccagtagtttaagcttccttgtctcatcagtggtacagaatatctcatggactacctcccacttagttttctcaaaattatctcacttaaaataggaaaactgctgctgtgtgtgatgctttttttaaaagtgaatttctaagttgatgactaagtctgtccaacagaaacatacagggaattataacttctgtgagactgactgtcagtcattccatctttgcaaaccactggcacacagaagcagaagctttggaagacaaaaaaagcacccttttgattcagccaaagactgactttaacagacgcaaaatgctatatacatgaaggtgtttgctgcaattttatctataatagcaaaaaaaaaaaaaaaaa

SEQ ID NO: 40430 - DNA, 673 bp, Homo Sapiens
  misc_feature (552)..(552): n is a, c, g, or t
atgattgtcattgcctccgtgtgagccactgagtggttatcacctcagtgaatcttcccagggctctgcagtaaaaacaaaggacaacccagccaagcagaggaagaagctgccgaaggggacagactccactgccagacggccagccgtttgctgtcctgccgcccggctcagtcggccagacttcctctaggagtggtgctgctaccttgtatgtttacataatgctttagcccaaggacacatcaccaacccatggactcgcagacaccggggctgggtttctctttcctctttttggagaaaaggaacagggcagtggaatgaaaattttttgtttgtttgtttttaagaaacaagaaaacagaactgcctttgcactaaattagtgacttggacttttgcccagtgaagacaggctgtgacactctggatgtcttggtgtgtgtagacacacattgcagactcttaacgcaggaaggacttcaaacttctgctgagaccttggggtcaaggaacatttcattggttttttttgtccacccccatctnccttgctcatttggatgcgtcaccttaattctcctgctgccaccgtctttgattcaccgggatgtacagtttacagttgaagagcaaacagaaaggttttctcttggtgggatatgcagaa

SEQ ID NO: 40431 - DNA, 484 bp, Homo Sapiens
ccgatcttatttttctgtattttactcaaaattttatttccacttctgtagaaataggtccatgccagtgttctctacaaagtgtctttcaaactaaactctagaagaatatcgattacctgaacagaaacaaaggcctaagaaatcatacatttttgtagcttatgtgtattgcaccaatcaagcaatcccatgtgctcttgatattggcactgtagttttatcttagaggacttgccactggagaactcagtggtgagagaccttggaaatgttttatgtggctgcacataagtgtttctgactagctaaggctacttcagacttttcactttccatttgtccccttttccttccctgaattagatgctatgtcataaacttggtggtttttgaaatactcttatttcaaaccttaaactaaaccgaaataagttatgcctgagaatgcgtttgtctgaaacgattttggcacttcccttta

SEQ ID NO: 40432 - DNA, 731 bp, Homo Sapiens
tgacaagtgagaatggcagccgcaacacgtacctggtacactgcgagggctgtgcccggcgccgcagcgcaggcctgcagggcgtggtggtgctggagcagtaccgcactgaggagctggctcaggcctacgacgccttcacgctggccccagccagcacgtcgcgatgaggccggacgccccgcccgcctgcctgcccgcgcaaggcgccgcggggccaccagcacatgcctgggctggacctaggtcccgcctgtggccgagaagggggtcgggcccagcccttccaccccattggcagctcccctcacttaagtttcattacgaagaaacttttatgagacgatttgtacgccaaactatgagggaaaacagggaacaaaattgggaaccgggggagggggctggcagccccctcgcccataaggagcctcccgctcaccgacttgggccttttaagcaacagacacaaggaccaggctccggaggacggaagggggtcacatacgggttcccatcagccgtgccagaccgaccgaccgcccgggcagcagaatgccgcgcgagaacgaggtatgcaccataagacctaacgggagacggaggtcataaaagtggagaatcgtaactaatgggctttaagacccgtcaccgcggaaacctcatgtgaaaataccaagggctagcgtgtaacccgtgtcagtgacatttaagaacactggggaatcgat

SEQ ID NO: 40433 - DNA, 912 bp, Homo Sapiens
  misc_feature (49)..(49): n is a, c, g, or t
  misc_feature (51)..(51): n is a, c, g, or t
  misc_feature (719)..(719): n is a, c, g, or t
  misc_feature (741)..(741): n is a, c, g, or t
  misc_feature (745)..(745): n is a, c, g, or t
  misc_feature (749)..(749): n is a, c, g, or t
  misc_feature (806)..(806): n is a, c, g, or t
  misc_feature (816)..(816): n is a, c, g, or t
  misc_feature (865)..(865): n is a, c, g, or t
atggtcccagacgactgcgatggttcgcggtgcacgagcactactgggngnaccatcagcgctttctgtgatcggcacggcgtggactacttgacgggttcctggtggccaatcctggatgatctctatgcatccaatattcctgtgtaccgcttcgtgcagcgacccggagacctcgtgtggattaatgcggggactgtgcactgggtgcaggccaccggctggtgcaacaacattgcctggaacgtggggcccctcaccgcctatcagtaccagctggccctggaacgatacgagtggaatgaggtgaagaacgtcaaatccatcgtgcccatgattcacgtgtcatggaacgtggctcgcacggtcaaaatcagcgaccccgacttgttcaagatgatcaagttctgcctgctgcagtccatgaagcactgccaggtgcaacgcgagagcctggtgcgggcagggaagaaaatcgcttaccagggccgtgtcaaggacgagccagcctactactgcaacgagtgcgatgtggaggtgtttaacatcctgttcgtgacaagtgagaatggcagccgcaacacgtacctggtacactgcgagggctgtgcccggcgccgcagcgcaagcctgcagggcgtggtggtgctggagcagtaccgcactgaggagctggctcaagcctacgacgccttcacgctggccccagccagcacgtngcgatgaggccggacgccccgnccgnctgnctgcccgcgcaaggggcgcggggccccagcacatgcctgggctggaccttagtccgnctgtgcccanaagggggtcgggcccagcccttcacccattggagttcccttactttatnattaggaaaactttttttttttttttgcaatttggggaaaaggaaaa

SEQ ID NO: 40434 - DNA, 309 bp, Homo Sapiens
tgagaaggtatttgtggcccgtacgctggttcattgatgagacttctttgcacaggagarccgctaaaaattactgtggtgaacagacggaggcccattgaggcttctctgtcctccacgggggaccagcattgggctaaacctgcwgacaccattgcmaagggaattcakgcawacccggtggtgaagaatgattccascgcgaggacakaagctgacmtttcttgcctgggtgatttaatgttgcgcatcaatttttcactccccccgyywagaktatgamwtatccmcmacctttgccayggcccc

SEQ ID NO: 40435 - DNA, 416 bp, Homo Sapiens
cgtgcctgaacccctctcacagtctggcgggcgcagagtctgtgagcggccaggaggccacctgctcgactggcccgtcctctccatgtgccagatgcagcccagcatgacactgccctcagctcaaaaacagcacagctactctgtgtgcaggaaaaaactgccagtgacttcaccaggatttgagaacggtccgtacgttcacactaagctgagacagcgcaggttagaagatagcgcggggaagtattcacacttcagatacgaccatcacggccacatggctaaggcccacaccctcccggggtgaaataactacagcagaagaatggggcgctaaccacctccacgggcattttaaataaaacccaaagttgttttgtttttttaaaaaaaaaaaaaaaaaaaaaaaggac

SEQ ID NO: 40436 - DNA, 528 bp, Homo Sapiens
cggtgccccaccggccgcacctttgaataggtagtcgtactcgtcgtcccgggtccccattgtcctggcgcttccggcgggatcggcgactccgcagccccaccacaaacacccgacgggggcggagccggcgccgcgcagagcggcggttgaatggcctatcagcggcgagtggagtagcgacgggcacccagcgaagccaatcagagatggaagtagtgctctgagggtgggcgccgcttggtaccaccctcctcgccctcggtgtcctggagaaaggcggaaggaatgcggacctttttgaagtgacggacgcgccagcctatcaggggcgagctcaagagggcggggcggaagactgcaggaatgaaatggattgacagaccaaataactaatgagaggcttgattgagaacctacccgactatcagaggacctgtccgggaagagaaatggggctacgtccagacagaatctcgctctgttgcctgggctggagtgcagtggcactgtatccggaattggggg

SEQ ID NO: 40437 - DNA, 804 bp, Homo Sapiens
cgcagccccaccacaaacacccgacgggggcggagccggcgccgcgcagagcggcggttgaatggcctatcagcggcgagtggagtagcgacgggcacccagcgaagccaatcagagatggaagtagtgctctgagggtgggcgccgcttggtaccaccctcctcgccctcggtgtcctggagaaaggcggaaggaatgcggacctttttgaagtgacggacgcgccagcctatcaggggcgagctcaagagggcggggcggaagactgcaggaatgaaatggattgacagaccaaataactaataagaggcttgattgagaacctacccgactatcagaggacctgtccgggaagagaaatggggctacgtccagacagaatctcgctctgttgcctgggctggagtgcagtggcactgtatccggaattggggggttcttggtctcactgacttcaagaatgaagccacggacccttgcgagatgggggttccaccatgttggcccggctggtctcgaactgctgacctcaagtgacctgcctgtcttcacctcacaaatggctgggattacaggcacgagacaccgtgcctggccctgggaacatgtttacatggactttgttcactttttaaaacaaactgagggtaacttactagatctgtgaacctaaacgaaagagcaaccaaaacgaacggaaaaccaaccaaggaacaaacgaaacacaacaaacaacaaaaataaaataaaaacacaaaacaaaaacacgaaacaaaaacaaaagaggggggcgctaaaaaccc

SEQ ID NO: 40438 - DNA, 558 bp, Homo Sapiens
tttttttttttttttccaattagttagggtaaagcaagtgtaaagggaagtggatggtaaggcattttgaggaggcaatcaaatatgtttttttctaattatatatttccaagccaataatttctttgaagaagaatgttttaagcgtgtttctttaccatgttaggccagtaggtacagagaaaataatattagctctttatgtcagcataggtaacaaagccttaaaaaattcacagctgaatgcaacagtgaaggccgttgacaagagaggttgcattacttcaaccagggctactgcagtgaaccaaaaaaagaactgagttctaggcttccatctccaggctacatcttaactgactaagagggcagtttagctgtccaggaagaactcgattgctaactctcactgataattttgcaacagtgacaataaagaatgaattttaaaaagaaaaacttgtctccctgaactattgaactccagaaaaagtagtacttacagtctttgctttaagagaaaccagttaaaaaaaaaaaaaaaaaagccctcgtgcc

SEQ ID NO: 40439 - DNA, 935 bp, Homo Sapiens
  misc_feature (648)..(648): n is a, c, g, or t
  misc_feature (698)..(698): n is a, c, g, or t
  misc_feature (935)..(935): n is a, c, g, or t
attcattggacccccaacatttcaaagtgattttcttgagtaataccatatgctgtgatgtggatgtgattggtttgccctcatcaagtctcatgttgagctttgaccctcagtgtggcagtgctgggagggggcctggtgggggtttgggtcatgggggcaccctcctgaatagttggataccattcattcttgctgtgtcaagcctggattggtttgtaggggaatgcactagttactgggagcatggttgtgataaagccaagccgtccctcgggtttggctcactgcccttgaccttctctgccctgtttgacacagcaaatagtcctcaccagaagcaggtcagatgccagtgctatgcttgcacagcctgctgaaccatgagccaaataagcctctttctaagttacccacagcctcagatatgtagcaacacagacagactaagacaccaagcatgatggaaaactgggttatgggcaggactgcaagtactggttaggcagatacctgtatttctcttcctaactctcagaacgtgttctgtgtcacttagggcaacttatgccctcctgtgtgaaaatctccactcccaatggtctgagggttcctcagagtaagataaaatattaaaggaccaattgnattaattatggttttatttttttttttgttagggtacttttccatcctgnggtcttggctgtggggggctagaccgtccctctcaggctagatcattccctaaagatggtaaacaactttgctggaaacatgcactgcatatacaaatcaactcactgcatatgcaaatcaactcactgcatatgcaactccattcacaccgtatatgcaactcaacttcacaccgtgtatgcaaatcaactcgcacagcgtatgcaactcacttcgcactgcgtatgcaactcaan

SEQ ID NO: 40440 - DNA, 775 bp, Homo Sapiens
  misc_feature (701)..(701): n is a, c, g, or t
cctaatatggcttctgtccacatctaacctcaaatcttaccttctgcccttgctgtgctcaagcctttctggcctttcatttccttaaacacaccaagcctttccagcatcagagactttacaattcttcctggaatgctcttccactaatttctttaggtcatagtttgtggtcatttgaaaacatgtccacaaattcttttctatcctaaaaaaagggggaatccaattcccctcctcttgaacatggactagcctcagtggcttgctactaatgaattaaatggtatagaagtgactgtaacttcttagactaggtgaccaaagatggcacagcctccacctggttctctgtcttgtgaggctcacccttggaacccagccatcatgctgtgacaaagccatgtaccacatgcaggtgtttcggggaacagacctgtcagaggtccttgccaacagccaacatcagtcagcatcaaccactagacatgtaagtgaggaagcctccagatgattccagttcccaccttcagctgatgttaggtggagcagagacatgctgtccccacctgcctaaactgcagattcatgagtaatgtaatttctgtcattgttttaagccattaagttttggggcagtttgtcacacagcaatagacaactggaacacagctcatatgccccttctcagaactgccctncctgatcatcctaagtgcccattggcattatccataacctgaaaattattatgattgatcctaaagtccagcct

SEQ ID NO: 40441 - DNA, 893 bp, Homo Sapiens
ccagaagcaggtgggctttcctcagacaccagatctgcctgcaccttgatcttggacttgccagccttcagaactctaagaaagaaatggtagcatggctggtctaagtggaaggcctgagaaacaagcacatggtggaactgagttcaaggataaagacttgagaatacctgctcagtggactgagtagggaagatcaaccctcaatgtaggcaggcactatccaatcacctgagggcccagatggaacaaaaaggtggaagaagggtgaattctctcttccagagctgtgacacccttctcatgcccttgtaccacacaactctaggtcctttggcctttgactctgacacttgcaccagtggccctctggggctctcaagcctttagccttgaacttagttacaccatgtgcctccttgtttctcaggccttccaacttggatcaggccatgccaccggtttctctgattctccagcttgcagatggtatattgtgaccctggcatttaataactatgactttggtcttaagcaattttcttcctctgtggatgatatttacatatccaatgtggattataatttcttaccacggtaaatgttgtgaggtcacacactgagttacataagtaaaacgaggacatgaaaacatccgaatgtatactactattgtctgacgactaactggttctgcactaaaaaacaaaaacaaaacacagcaccgaacagcaaagcaacaccaacacacagaagaaacacacaaaaggggcgccccccaaaatacaacgggcgccgcacacacaaccctcaacacgatagggcccaccaagcgggggcacacagggtggtccaaccaacacggaaccacaccaaccaacaccaagacatca

SEQ ID NO: 40442 - DNA, 411 bp, Homo Sapiens
caggctctctggctgaggctgcctgcctggaggggacatcagggaagaggcttccggagaggcggatgggagaaagtaggggatgtggcttgagctgcagtcacaggccttggctggaccagggatggcccccagctcccaggagggcccactgaccctgcagctccagccttctccatacttcaacaaagaatgagttgtggcaatgagggaagagagaccctctcatagtgttttatactcagtacctgttttaagaaaaaacaacaaggaagtaaaaccaaagacaggcaggcagcctggcgctaggcccgaaaccaggcctgcgcctgcctggcctaaacccagtagttgaaaatcaattcataacttagaaaccgatgttattcatagattccagacattgtatag

SEQ ID NO: 40443 - DNA, 716 bp, Homo Sapiens
aagcctgcacactgaaactgttctcagaaaacaaaggcatcatcaacttctcaaggttaaggtagtgatttgaggctaacagaccccacactcatgtgataataattagttaagcaattacaggtcacaagcagtcacttgtccagtgacattttaaatctctagtcatgactttgtcattggtttacttttgcccctgggaaaagttgaaaattccttagcatggaatcaaaactctcacatcagtgtggttcttgtcaggttattcagccttctctttcgccacttaccatactctgcacctttgttctatcatccagccaaactagactacatggagctccacagtgatcgtcttcacctccagctctttgcatttacttcttccctctatcctacatgtgttttccttccctttcagatatcaacctatgaattgcctctaccaaaaagcctacaatattgacacaaacctgggctagtatcccttctatgtcttctaataagtgctgtcttatgcctgtcactgtatgtatgactctgtatgggaattgcctgtttgttttttcagattatagcaaacagttgttgaggggtggaccatatcatctttatcttgtaattccagagcttgtcctatttacttaacacatggttgccgaatacatgaattaagagtgagaaacagaagtctgatatttaatgcgcgataagaa

SEQ ID NO: 40444 - DNA, 728 bp, Homo Sapiens
  misc_feature (44)..(45): n is a, c, g, or t
  misc_feature (130)..(130): n is a, c, g, or t
  misc_feature (181)..(181): n is a, c, g, or t
agataggcctgcaataagactgcaggcccaagatatttgtctcnngttccaccagtaacttggggcaacttggtgtacaacaaggcacagagaatgcactcgtagaggccgtccagtttctcacgctctnctatggactgcagatactgctgcttgccttcctgagattcatccttctaanaaggtccaaaataccatatatagtatgattccttttgcatatgtgtatttgcttttaattgcctaaagaaactctcagaaggattcaaaagatccataccaaacaagatgggagaacagaggagtagtgacaggagtagaagcactgtagaccttttcatatcattttggtttttaaattacatgagtaggttacctaattattaaaataaatttaatttaaaaggtaatgggggataggaagaaatttgttaaaagatacaaaattacagctagataggaagattaagttgtagtgttctatagctctgtaggatgactacagttaacaataatatatattctaaatagctagaaggaggatattgaatgttctcaacagaaagaaatgataaatgcttaagatgatggatatactaattaccctaatctgatcactgtatattttgtgtattgcaatgtcactatgtaccccataaatatgtataattatcgtgtgtcaattaaaaatttttaattaaaaaattataaacaaaaaaaaaaaaaaa

SEQ ID NO: 40445 - DNA, 442 bp, Homo Sapiens
ggaacaaagtctgatagaaaaaatactcaattcctaatttaagtgttagagactttaatgtaagctatctaatctgaactagtttcattatttgtgtgtgggtacatgttatgtgctccgtaagcatctttcaatttgaaaatttcataattgtaatttcactgcctttataaattgctttttttttggaggcagggtctctgtcacccaggctggagagcagtggcacagtcatagctcactgcagcctcgaacacctgggctgaagtgatcctccctccttagcctcccaaagtgccgggattacaggcatgagctactgcacctggcccataaattgtcatacttttaaagagcctattacacaaagtatcatcagaatcatcccaagactcatttcctgattcctaattatttaaaattttgcttttaggcgaggcat

SEQ ID NO: 40446 - DNA, 660 bp, Homo Sapiens
acgcgtccggtgacgtgcacctgtaatcccagctactcgggaggctgaggtgggagaatagcttgaacctgggaggcagaggttgtggtgagccaagatcacgccactgcactccagcctgggtgacagagcaagactccatctcaagaaaaaaataaataaataataatttgtgtatgtgatgactgactctagtcattatggaaaataacttttggcagtttagttcctacttgttaacaattcctctttttaagagaggtactacatttgatttctcaatttctcagtttgttttcaatacaaacagcaaccactgaaatgcagaaaatggtaatcaagtgtgatgtttctataaaaataattgagattcacatgtaatagaccctttagctttaatgagcagacatgagaatggtttatgatcttaagttggtaacataggaatatgtatttgtcaattttagttcacaaacatatccataagaatgtttacacatggcagtatcaaagcatataaaatattttctatgtaagtaaattgcatctttatgctagtgaacaaagtagcaataaatgttcatttttggatggcagtacacattgttaacaatcgtgtaattataataaatatgtctacctactccttgaaaaaaaaaa

SEQ ID NO: 40447 - DNA, 773 bp, Homo Sapiens
  misc_feature (707)..(707): n is a, c, g, or t
ctgcccacctcacaacatcatatgggatttgggtccgagtcttgctgttatatcaccacctgggtcatctaggcttgtcactgaattgttctgaaacccagctttgtttctcacccactcccaagctcctctagctaactgaagaactggactaattccctggtattaaaatctggcctcacgtaagagttgcttggggaacttctctaaaatacagattcctgtctccctttagccgaggatttttgattcagtagatttcagccacttaatgccctaggtgtcattgtctcactgggttagtagagccttgctccctgttctggtacctctttgttctctctgcttattgatgacaatctgaacactgtccttcaatggaggtcaaagccctaaacaagatcctttctcctcctcaggggaagagctcctcattgttgggagagaggcctgttctcagcataaggaagagaatccattctttcttatgcacaatttctgctatttatctcgcatttggtaaaaattcagactgtgctgtctgccacaccactgctattggttagccctcttctctttttttgtactcaaggcaacttccctacctttttcaccgaaatactgatctcaggggaagggaggggttactgctgtatcagccacaacctttgcaatccatagattctccatcaggtattaccaagtgntttaaaatcagtccaagaagtgaggtattttgtaccttattttcatcatttaaaaaaaaaaaaaaa

SEQ ID NO: 40448 - DNA, 450 bp, Homo Sapiens
agggccctaccctcagaaagcttgcaatttatgaaagaatactaacaaaacctgcaaagtggtattttaagttattttgtttcatttttgctattgaaacaaagaaactgagaatttggtatgattcaaaaaatgtttaggtacaagaaaaagaaaaaagcaagaagcacttgccagatttaactataattcctaaaaatgatgaacattttcatcttcaggaacatgaaacatcatcgactattctctacagacaacaggcaaaggttcttactggtccagtacatacaagtccttcaggaagaaaaacatgattctaccaggattgggttgaatagagagagaattgcagtttaagattcatgagtatggaaataaacagctcttatggctaataaactctctatgaactttaaaaagaaaacaagaaaaaaaaaaaaaaaaaaggac

SEQ ID NO: 40449 - DNA, 647 bp, Homo Sapiens
ttagcagtcaacacgtttacttccaagttttattgtatatgcttaatatacattttattagatcatttaactcaataatttagagtatagccttagacaccagactgcctaggtctgactcctggtacgctgctttctgtgacctctctgtgcattcctctctgcgaggatgatgatcacatctgctcccagggtggctgtcttaaatgagttaacacgtatctgatgattagaagagtgcctgacacatagtaaacactcaaatatttgctatgttatatgttaatgtaatgtggtagagttcagttgccattaagtgggataaatcctcacagggcacacattatttaaataatttgttacattaaaacttattttacttgtacataattgactaaaaaatggggggttgtacattcaaacatttatgaccatgtgcaacactgagaatctcaaaccgacagtgtgctctgtgacccaaggcaagtcttggagcctttcaaggcctcaatttcttctgtaaccttgtggtttcacaattgtcaaccttttgttctgccgaccattgtcgtcatagtcttacttgcagagggcatagtgctgatgggacaagtgacatgggtatgagcccccatgtaactaaaaca

SEQ ID NO: 40450 - DNA, 467 bp, Homo Sapiens
tctcaaaccgacagtgtgctctgtgacccaaggcaagtcttggagcctttcaaggcctcaatttcttctgtaaccttgtggtttcacaattgtcaaccttttgttctgccgaccattgtcgtcatagtcttacttgcagagggcatagtgctgatgggacaagtgacatgggtatgagccccatgtaaactaaaacataattacctttcctttaggtgttggctacagttatcccaaacttggacttgaggtcttgtatatgcatgccattggtcacataccatcagaatagaattctcaaaaactctttagtaaataagataaacatcctacttataacagctcattatggattttatttttattgtctggctctttcagaccccagcaactgcaattctgacttaataatcaattgtttctaatcattaaaaatgtatatagaaaaactgaaaaaaaaaaaaaaa

SEQ ID NO: 40451 - DNA, 898 bp, Homo Sapiens
  misc_feature (729)..(729): n is a, c, g, or t
gcacactgacaaagatggtcgtattactaaaggtgaataaccagcgcggggggcacgtggagtcactggaacatttgtgcaatgctggtgggaatgtcaacccgtgcggccctctggaataagcctggcagctcctccaagagttaccgtgtgacccagcaattccactcctagctccacccacaggaattgaaagcaaagacgcaaacagatgcctgtgcaccaaagttcacggcagcatccttcgccatagtggcagcatccgtcgtcacagcggcatcatccttcatcatagcggcagcatccgtcgtcacagcggcagcatccttcgccacagcggcagcatctgtcgtcacagcggcagcatctgtcgtcacagcggcatcatccttcgccatagcggcagcatccttcgccaaagcggcagcatccttcgtcatagcggcagcatcctttgccatagcggcaaggtggaaaccctgtccatccactgaggcgtgcatagactaaacatggccagtccaggcactggaatccaggccgtagaacggcgcccacggtcaaaaggaatgagaccctgatgcactgggcgacacagacgggcgacacagacttggagacatcatgctaagtgaaaagccaggcacacggagcggacggcgtgatcctgctcacgtgatgtgtcccgaatgggcacgtccagagggaagaagggagatggcgctgccngtgcccgggacgggggttgggagcgacggctgctggttttggggtttctttctgggggtggaggaaggtgttttgataattggcccgttggggatggtttgcctaacctctggaatattgctaagacccacagaatttgcacacctttaaattggatggaattggatgc

SEQ ID NO: 40452 - DNA, 618 bp, Homo Sapiens
  misc_feature (147)..(147): n is a, c, g, or t
ggctagatcaaggtgttggcagggttggtttcttctgaggcttcttttcttgccttgtagatggctgctttgtcactgtgtcttaatatggccgttgccctgtgttttctgtgtcctcatctcttcttctaaggacaccagtcatantggattaacgttcatcttaaagaccccactttaacttaggtaacttttcagaggtcctatctccaaatacagtcacattctgagctactggggcttaggacttcaacatctgaatttctagggggacacaattatagcattttctttctagtaaactttatgtttttctttcgatttatctacatctcacacaggtaaggttccatgataacaaatatggtagtgaaaatttctgtgtgacataaaacttcctatagtcaagtcaggagtcaattaattttaatctttgattaaaagaaattcatttatttaaaaacagaacttgagaggtagttatggaaataacattcggcaatattggaaagataccactattacttaaaaagctatataaacattctataagctttatgtcctattaaaaaaaacagtatcagtgaacaaggtgctgtaaaaaaaaggattaacagt

SEQ ID NO: 40453 - DNA, 533 bp, Homo Sapiens
agagaaacttgtataataaaagcacaaaaagtatggtattgtagggtgtgtttaggtactagtgctctgatatgcctaaacacaaaagtaattttacaacacatttagagctaagaaacagagttacacataacagcattttggattggagtaagagatccttttgagactgttataatacagaactttgcccttaactagaagtttttgagcacatacttaaaaaatcagtagaaagtttgagagctcatttttacccaaatactaattttcatgttatttttgaacagatgcctttttggaaatcttaaaaaagcaaacatttcaaacagttggctaacacgcatgaactaacactcattcagtttttaaattacggatgatatccgtattaacattataatgactctatactacagattgacatggtacatcgtaacaagtccgaaggattcttccttgatgcatctcgacacatccttgaagcacctcaacatgggactggagagaaggcacttggaagcaaatcagaa

SEQ ID NO: 40454 - DNA, 583 bp, Homo Sapiens
  misc_feature (490)..(490): n is a, c, g, or t
  misc_feature (514)..(514): n is a, c, g, or t
  misc_feature (547)..(547): n is a, c, g, or t
attcaagaacttaatgaagtcgcgagacatcggccacggtccacgttagttatggggatccagcaagaaaacagacaaatcagagagttgcaacaagaaaacaaagaattacgtacatctctggaagaacatcagtcggccttggaacttataatgagcaagtaccgaggacaaatgtttagattgctaatggctagcaaaaaagatgatccgggtataataatgaagttaaaagagcagcactccaagattgacatggtacatcgtaacaagtccgaaggattcttccttgatgcatctcgacacatccttgaagcacctcaacatggactggagagaaggcacttggaagcaaatcagaatgtacactaaataaacagtcaacttttggggtgtggatggaagggggggtccattttaaaagtgcttttacattgaatttccctcccagattagatcagcaaataaatgaaatttattaaaagaatgnttgtgtctttaatagccatgctgntcagtgtagaaactttaaatctctcattaattntctgtgtattgtatcatgtacagcctgttagatatt

SEQ ID NO: 40455 - DNA, 625 bp, Homo Sapiens
atgtaactggtcactacatttccccctttcatgatattcctctgaaggtgaactctaaagaggaaaatggcattcctatgaagaaagcacgaaatgatgaatatgagaatctgtttaatatgattgtagaaatacctcggtggacaaatgctaaaatggagattgccaccaaggagccaatgaatcccattaaacaatatgtaaaggatggaaagctacgctatgtggcgaatatcttcccttacaagggttatatatggaattatggtaccctccctcagacttgggaagatccccatgaaaaagataagagcacgaactgctttggagataatgatcctattgatgtttgcgaaataggctcaaagattctttcttgtggagaagttattcatgtgaagatccttggaattttggctcttattgatgaaggtgaaacagattggaaattaattgctatcaatgcgaatgatcctgaagcctcaaagtttcatgatattgatgatgttaagaagttcaaaccgggttacctggaagctactcttaattggtttagattatataaggtaccagatggaaaaccagaaaaccagtttgcttttaatggagaattcaaaaacaaggc

SEQ ID NO: 40456 - DNA, 590 bp, Homo Sapiens
caaagttgccaactggactctgttataaaaattaaaagcacacatcacgaaaattcttggacttgcaaagcaataagcctactaacaaaataagtgctatagtttcttttgaaataaggcattctaattatctcagtatgtctgccaaccaaataatgggaaatcagggaactaacttaatatttaatacattaactattagtaaaataaaaacactcttacatccatggcctaaatactatagacattatagatgaggaaagaggcatttcctctatacaagggtgcttgctcaatgtacaataaaggtaataacacaaatattattcaagtctgtgtttttggttggggagttcctagttttaaaaaatactcatttggtgaaataaatcatcttgagatttttctgaaaccatgctgcttacaaggatttcccatattactagaatttttttacttttctgtaaacattttctaattaagccagcatttacaaaaggtttaaaaatattaaaaatgtaactttaataactaaattaagaatgccttacataatacatctaacaattcccctcagtagtattatgaaa

SEQ ID NO: 40457 - DNA, 489 bp, Homo Sapiens
ccgcctatgtaaaatgtaacaccattcagacatagctgtggaatccttcagtttactagtagctttaattaaagctgagccttttacagctacttggtaattaaacaaatttaaaactatgattaatgtatttgttaactaattagcttttggcctttgatagaaatgtgtaggtaatataaattttagaattggtcttgactactaaactattgctaaaattattaggctaaaagtttttgtctcatctgcaaaaggtgagattatcacctatttcatgggaagatttagattggtaataatgtagtctgggggccgggcgaggtggctcacgcctataatcccagcactttgggaggccaaggcaggtggatcacctgaggtcgggagttcaagaccagcctgaccaacatggagaaaccccatctctactaaaaatacaaaattagccgggcgtggtggtgcatgcctgtaatcccagctacttgg

SEQ ID NO: 40458 - DNA, 449 bp, Homo Sapiens
  misc_feature (174)..(174): n is a, c, g, or t
  misc_feature (296)..(296): n is a, c, g, or t
  misc_feature (299)..(299): n is a, c, g, or t
  misc_feature (333)..(333): n is a, c, g, or t
tgtgtgctagctgcatgtacttgctgttgtactgtgtttaaatgattctctaacttcctttggaaagcactaatgaataagtgctgtttctcttctctattgttgggttttttgtaaagttgctcaaatgctctcaggtatggcggctctgaatggaggacttggcgccacagnttgacgaatggcacggctggcaccatggacgccctcacccaggcctactcaggaattcaacagtacgcagccgccgcgctgcccactctgtacagccagagcctgctgcagcagcagatgcnctnaggcagccagaaggaaggtaggtgccgcccttgncccaggcagggcccagcccaacaggcagcactggcctctagagcacggttagaaggtatcaaattgaactgaacccatgtcataacagaaagcagttgttttgttaattcatgttt

SEQ ID NO: 40459 - DNA, 563 bp, Homo Sapiens
tgactgaaaaggagaagcgaggaaagccagtttaaccatcatgcagtttatctctttttaaatttcctcttctccaaaactatagagaatcatatggtcacagtcaactttttaaaaaagctttccagccttcgtaactgtctttctttcatgtcttcttagctacttgctgtttttccttaagtttttgaaacctgactattcttggagtcttgggaacacatcttacagtgtttcctcacactgtgagataaaatggctactttttcttgaagtttttgtcttctaaaatgaacaattcaaatatagttataaaatggagtatttattttgtacttttaaaaaatggtttaaggtgaggctttgtttattcctaatatgtgaataatactgatgtgaaaaatgtgagtcccagcactttgggaggccagggcgggcggatcacgaggtcaggagatcgagaccatcctggctaacacggtgaaaccccatctctactaaaaatacaaaaaattagccaggcgtggtggcgggcccctgtagtcccagctacttgggaggct

SEQ ID NO: 40460 - DNA, 488 bp, Homo Sapiens
ctttacacattgttgatagaaatgtgaattgatagactctttatgtaggtcattttatcagcctttactaaatgttaagccattctacttctaggaatctgccctacgaaaatgtttgtagaaatgtacaaaaatctcttacatgggtattcatttgtagtgtataaagtagttaaaaaaattacaaataacccaaatgattatcaatagaagattggttaaatcacaatatattagaggattctggggagatggcagagtaggcagcaccaggaatctatctccctacctcaacaacaattgcattggcagaatctatctgatgtaactattttggaactctggagtctattcaactcttgcagcttctacagtaggggtgtccagtgttttggcttccctgagtcacattggaagaagaactgtcttgggccacacataaaatacactaacactatgatagctgatgagctaaaaaaaaaaaaaaa

SEQ ID NO: 40461 - DNA, 254 bp, Homo Sapiens
gacaaagcccagcgtggtccggcgagccttgcagaaagcacatgtgccccagccctgggcctgtgactatcagctcttcaagtccttcctggggaccggggctgggaagagatgctgatttctgcgataaaatcagtaggtacattttttggaatgttcgctatgtgccaggctagattttactgatgggagaagactgcgcctcttcatgtataaaatccctgttctttctctgccaccctggcgtagattat

SEQ ID NO: 40462 - DNA, 473 bp, Homo Sapiens
ccggaatttagagtagacaggatggaagggacctggtgatattgtggagcaatgaacgaatgctgtcgactgcctagttaacctattacttgtttaaatctctgataggctatatttttaaaattttgcaaccagggttattcttagtctaagcatacaactttgaaaaatgtgatccctttgacaagataacaagccttccattacctgctgcaggtgacccagtttgctggctgttgtgggtagctcagaacaggaccctaaggcaccttggccctccctctgctttaaaactcaacaccaaactgtattcattcttgtggtactgcctgtgtcttaacatgcatcccaacatctggcacagagcctggcactggcaacctcttaggaaatttgttaaatgaactgatagtgtagcattctgtcactttcctcagcgataaaattctcattcttcaaaaaattttcctttt

SEQ ID NO: 40463 - DNA, 698 bp, Homo Sapiens
  misc_feature (3)..(3): n is a, c, g, or t
  misc_feature (609)..(609): n is a, c, g, or t
  misc_feature (621)..(621): n is a, c, g, or t
agnaggacacattacagatgacgttcagggactggggaagaagggaaaaaagcaagaaatgttgagttcaagatgtctgtgaagatccaaatggctatgtctacctgccagatgggatgtataaattagtcagggctagagacatagatttgaataatcagatttgaaacacccttgtaagggtagttcagactcaaaagtatataagatgccctaggaaaatatgtagagaaagaacaataggacaaggatgaaatcctggagaataccaattatcacagaggtggaaagagaaggaatatagagacatttgtgaaagagcaattataaatatatgatagagactgccagtgtccattaatattggtgtgcctctcttcttccataaaagtactgctaaactacatatctcagcctttgcagttaggtaaagccatttgaaaatattttgtccaaagatctatgggcagaagtaatatatgcacttctaggcctggtttctgaaacttcttccatgatcctctgtgctgtctcatttttcatggaagacttggaagccacaaactgaggaagccaagtctctgaatgtctctaaggagctgcacttangacagacactgnagtaaatatcaatattttgtgtcagaggtctaaaccctgaaaaacctacatggtttgcccacaaaaaaaaaaaaaaa

SEQ ID NO: 40464 - DNA, 612 bp, Homo Sapiens
ggaacgagacttctgcagaggtggctgacctcaagaagcagtgtgatgtgctggtggaagagtttgaggaggtgatcgaggactggtacaggaaccaccaggaggaagacctgactgaattcctctgcgccaaccacgtgctgaagggaaaagacaccagttgcctggcagagcagtggtccggcaagaagggagacacagctgccctgggagggaagaagtccaagaagaagagcagcagggccaaggcagcaggcggcaggagtagcagcagcaaacaaaggaaggagctgggtggcttgagggagaccccagccccgaggaggatgagggcatccagaaggcatcccctctcacacacagcccccctgatgagctctgagcccacccagcatcctgtcctgagaccctcatctctaaaaagcgaataaaaacagaaaaaacaccaaaacaaccaggatgtctcccatttgcactccacttaagtgtggagacttaggctgatcacatcactgcactccagcctgagtaacagactgagaccctgtctcaaaaaaacaaaatgagacaaaaaacctgctcgtaataaagtgtgaaattgcaaaaaaaaaa

SEQ ID NO: 40465 - DNA, 484 bp, Homo Sapiens
aagagaacagaccaaattacagcagcttttgaacttgagaaatctgggcctactaaaagctacagtcaccctttcctaaccttaccaatcctccttgcatcctcagaaataattgctaggagttctcttttaacttagctcatcccttagataccttacattttaagtcatctttttgtgtgtagcaaacccctcatttcttgtttctgaatgtgtgatctttgctctaattatgttgagagtgcctgttatttcacctgactctggttgtttgtgagctgctaagtagccatgaggttaaaacagactaggatcagagagcatctcagcctctcaggaccttagtttcctcctttaaaaaggaaggagattggactaaggtcatttggtcatgcaacaagagtatgtgatagataaagtaatgaacttctgttcggtgaaagcaatgaatagggctctccaaggtccctttcagctttctggt

SEQ ID NO: 40466 - DNA, 481 bp, Homo Sapiens
  misc_feature (364)..(364): n is a, c, g, or t
  misc_feature (473)..(473): n is a, c, g, or t
cctaaccaatatctgccccttggatcttgttctcttcccaaagaactatctatgtgtcaacaagtcatttaaaagacaccaggacacagttaattcagttgcttcctccagtcttactttctctgcctgtctggcccttcttctgtaagctcattgtgaaaggagcatctttacaggccagcatgtcaggtagactatcctgaaaattttataacattttcgggaagcagcttatgtaattaatttacttgtgggtggatattaatgccaactccagaactaagatttgcatacgtgtctgagcctgtatccagagaaatgtatctcagcagcagggataaaggtcattttaaccattatcaanttagatgctcatcctccaatttagcattgctctatcgggagggttgggacagcacacagtcactctcaatatggcattattcaagtcctttgtggctttttcttggtcncctccttt

SEQ ID NO: 40467 - DNA, 477 bp, Homo Sapiens
ggattgggtaaggatgctgtgcaactccacccatgcatgtgagaccagcagttccctcttccttcccccagtgattctctggaagataaatctctacgctaaggtggataggactccatagtattcagtgacgtgctatatttattttttaaatgaatgtttcttggggcgggcacagcagagtgcatgagccctggagttcgagaccagcctaggcaacatggcaagagcccatgtctataaaaaatacaaaaaattagccaggtgtggaagcacatgcctgtattcccagctacttgggaggctgagatgggagaattgcttgaacccgggagacagaggttgtgagctgtgatcgcacctaggcggcagtgagaccctgtctcaaaacaacaaaaaaaacttccttgctttttattaatttttcactgtaggaagtttttaaaagactcaaagtcatataaaaaaaaaaaaaaa

SEQ ID NO: 40468 - DNA, 655 bp, Homo Sapiens
agcaatttggactccctttgtctcttattgtcctgtgacagttaccatgagtgcattctcccatttttgtttaccagatctgccccaggaactttttaaaagattgatttctttcttttgaaaataaaacaaatatgtgaaacatactgaaaatgctaaaacctacatgagagtattagaaagtaaagaatgtaattctataatcagctacatatggataggcagagagaggggtctgcttcttgtccagctgtagctctgtgctagtggaagcatgtcctggagttcacgatgtggccaagagaacagatgtagttaggcaatggaggtgggacagagagctgcaaagtgctgcacttgcccctcttactggacccaaaaggctctcaagtgtaacacctttctgtagtgctgtagatcattaatctgggtgtgtgatgaccatctgatctagcacatccagtggcattgtgcatattgggataggaatttgattttgtgaactcaagctattcagcagggcccatgaaaaatcaccagaagggtaggtgggtctttgccactgtctgatgtttcaaagatttcttgtattaaatgctgtgtccaaaattatagaatactctccagtttgtatttatgtaaaaaaaaaaaaaaa

SEQ ID NO: 40469 - DNA, 698 bp, Homo Sapiens
  misc_feature (678)..(678): n is a, c, g, or t
tctatccgaggcagtataaacatctttccattcaagtttaccgcatgtgtttcactatcgagagtcggactgcttttggatttacgtggctttgtgggatgcggtatgaagatcgttgcattcaagtttaccgcctctacttcactgcagaatctgactgccgtcagatctgtatgacagattgttgcattcgttttctgcgggtacgtcactatccagtctactttttccattgacgtggctgagtcatatgtagtatgactgtcagagacgttggaacctgaagcgaccccattttgagtgagggctagaaaaatgaggccgggacttacgggcctgcattctcataaggatattcctagctttcagatacttacggttaagggaacaaattaatgtttactgaagagacccgagtgtccagatagctggatatctggagaacaaaggcgttcctaattttgctttaaaggtagtaatagggattcttgcaaaatgtaataattaaagtgaattatcacaaacccttgtaacagaacacctctccccatgtgtacaagcattgtacctagggtggatacgttccttctcttagtttcaggaacgcccttctctgtctgtggagtagctgttctttcaccactttactttcttaatacacttgcttttattttgcanaaaaaaaaaaaaaaaaggac

SEQ ID NO: 40470 - DNA, 603 bp, Homo Sapiens
ccactccacccagtgtcacatcaaagagccgggtgagccggctggctggtaggaaaacaaatgaatctgtgagtgagccccgaaaaggctttatgtattccagaaacacaaatgaaaatcctcaggagtgtttcaatgcatcaaagctactgacatctcatggcatgggcatccaggttccgctgaatgcaacagagttcaactatctctgtccagccatcatcaaccaaattgatgctagatcttgtctgattcatacaagtgaaaagaaggctgaaatccctccaaagacctattcattacaaatagcctgggttggtggttttatagccatttccatcatcagtttcctgtctctgctgggggttatcttagtgcctctcatgaatcgggtgtttttcaaatttctcctgagtttccttgtggcactggccgttgggactttgagtggtgatgcttttttacaccttcttccacattctcatgcaagtcaccaccatagtcatagccatgaagaaccagcaatggaaatgaaaagaggaccacttttcagtcatctgtcttctcaaaacatagaagaaagtgcctattttgattccacgt

SEQ ID NO: 40471 - DNA, 690 bp, Homo Sapiens
ctgggactgtgcatgaaaaaaattgagacataagttaacctccctgacattcctgggcaaagtgtcaccagtttccattccacatttaacttggtaaagctttaaataaaagacaggaaatcctaagtcattgattttggtaagctcatgatagtgcagtttattcaaactctaggcttttttattaatactttaggcctatgactcagaatggaaaccaatgtaatagtgagatactttttctgattcaccagtgaggtaatgaaaatctcattcttacacagggggttggtaattccatatgagattgttatctttgataacttcctagaaaataggaacaattaagagcttcccaagagaactaagctgggtaaggatttgggaaaccttatatggtaatagaattgccactgatcaacactgctgggctgttttgatcttttaaaccaaaagctcttgaatgctagtcagccctccatagatgtgaaactgcatccatggatgaaaaatatttgaaaaaaaaataaaaataaaaaaataaaaagtatagtgggcacagtggctcacacctgtaatcccagcactttgggaggctcaggcagggtgggcagatcacttgagcccaggagttgaagcccagcctgggcaacatagcaaggcctcgtctctaccaaaaaaaaaaaaaaa

SEQ ID NO: 40472 - DNA, 497 bp, Homo Sapiens
  misc_feature (418)..(418): n is a, c, g, or t
atttatttatttattttagaaataagagcctgggtgacaagagtgagactctgtctccaaaaaaaaaaaaaaaaaaaaaaaaaaactggattgcctggctctactccgggcacagcatgcaggcccagttctgctgctctgctgtttgttctgctttcctccacatattggcatcaccctctggtgccaagatggctgctgcattccaggcatcacatccagactcagacccagagaagctgcccatccctacctgggtgagcctttgtaggaacgagaaaccgcatccagcagcagaaacctcacccagcagcgtcttttccggtctcattcaccagcgccgcccaccgctcaaccaatccctggccaaaagaatgggaccgcctggaaggctggaccaaacaggacctgccctctngggctggggagaggcccagatgaaggctgcaggacaggatggactcctagacctctgttaccagcagtgactacctctg

SEQ ID NO: 40473 - DNA, 654 bp, Homo Sapiens
gtccgattttaatgggagattgtttccgctggcgggagcctcagagaccgcctgtgtcctttaagaaacccgaatttcagacagttaagagaggtctaaggtcaaaataataatcataatttcttcttactggccagatactatgctaagccctttttaattttattattattatattttgtcaccgaggctggagtgcaatggcccgatcttggctctgcaacctccgcctcccggtttaaagcgattctcctgcctcagcctcccgagtaactgggattacaggcgggcgccaccacgcctcgctgatttttgtattttagtagagacggggtttcgccattttggccaggctggtctcgaccctgacctcagggtgatccgctcacctcagccactcaaaagtgctgggattactggcgtcagccaccgcgcgcccggtcgtgctaatcactttgaaaggcattatctcatcggttaaaacatagttttccggacttaaaagtttacagcacactggcgcagaagatggaaaaccgctgcttgcctttctccgtttattgactcgcattctgctctttggatcattttcttcggaaaaagttttccaaagtgtgtccttgtgtattaaaagttgtgtattaaaagtatttg

SEQ ID NO: 40474 - DNA, 393 bp, Homo Sapiens
ctattgattcatttaattctcatagcaaccccataggtactgtaattcccgttttagggattggggaaccaaggcgtagagaaatcatatcatttccccagtaatcccagctgataaatggcacagaagaatttgggccaaggcagcatgagctccagacttccatttagagcattttattgctactcaccttgactgtcagtctggctcagattctgccacttcccgctgcacgtcctggcattcagtttctttccctgtcaagttgttgtcataataccctccttggaggctttttgggagagttcagtgagagagactgtgtcacgctccacacggagtatctgaacataacaagtgtagctactggaccttctttttggttaacgtgaa

SEQ ID NO: 40475 - DNA, 825 bp, Homo Sapiens
gtccttgtcagcttgtcctctagtcttcagacttgtgaataaatcaggtggagtaagtaatttacatgttgtgtctcatttactttttgcaacaaacaaccgccctttactgataatggagattaaggctaaggggaactaaaagaatgttgtctacaatcacacagcaagtgatggaactgaaattcctgttggggtctttctggtttaaagtttattttaaagatcatttctactatatcccaattttaaaatatgcattagaaagaaaacagcaaaaacttcttttttctatttaaaaacaagcaaaaagaaggacataaaagttgcctatattcctgccatctagagagacttaattctgtcaagactgtaggacacattgaccatctttatttgttcctctgccccaaaagaaacaaaacttaaagtcagagaagcttaatgaaacagtaggataaaggctccctatcttgtgtctggaagtaagaattgacagtgattccgttttcaaagcatttattgaatagtatcttccaaacagtatgctggcttttagacaggttatacaggtgaatgtaggggtctatccttaaaaagcctataaggcagttgttctcaactctggctcatttaaaactctattgggaagtttttaggaaaatatctgtggctgggcattttttttttttaaagagacagagtcttgctctgtcatacagactggagtgtatggtgtgactcataagtcactgcagccccaaactcctgggctcaagcaattctcccactcagcctcctgagtacagccataggcaatgtgcc

SEQ ID NO: 40476 - DNA, 581 bp, Homo Sapiens
gccaaaaaggcaaagatttataagcgttaactgagggagttaacaaaaaatgttggtgttctcaaaatccaatatgagtttctttgtactgaagcccccttcgggattcacacactcttagcaccttctggaaatgttgctcctgacagcggaggttttgtttgaattattctctgtgtggttgtctggctcttgtgtttatggatcaaaaacatattctactgcactctttggccctatctgtgagaatgtcccagccatttaaaatggcctgttgagtgtaggtcatttgctgtcattggtctgaaagctgcagtcacccaggacctgtgtctaccagttaaagttcaacttgtctttaaaaggcagacgcgttgtggagtagcatagggtggttggttgtctaggaagaaagttgaagctacatcttctcactcttggggcatagctaagaacggggcgtggcaagggttaaataaatctctagcagagtccaaatttttgttgaactgaaaataatttctgacatttcctttgaaatgttgtggatggtaaaaaaaaaaaaaaaaaaaataggtgcg

SEQ ID NO: 40477 - DNA, 614 bp, Homo Sapiens
cagcatgcaacttggcagctggtctcccttacagtgaatgatccaagagagtatgagagagtgtgccacaatggaagccaggtatctgttataacctcatcttagaaatgatataacatcactctgccatattttgtcagttgcacagacccctggtacagtgtgggaggtgacaacacaggatattaataccaggaggcaggaatcattgggaccgtcttggaggctggctaccacattcaattaactttgctattaatttcatgtaatccctatatctgtcttcatatttgaagaggaaaagatactttctcatgtaaacataatggttttaaagaataagactctcttatgctacttaaacaaaagaataagactctctttagagatcttagtgagaattgtaagaaataaaataaacagaagtctgactgccttatttgatgtcactgatgtatgttgtattgctggagtagaagttaaatagaaaaattgacctggtatattctactcaaatgtatcttttgacaattgaaatgttcttaatagctaagttttaaaaaatgcgtttgtttgctttttgtttatattttattggtatgtatcttgtactg

SEQ ID NO: 40478 - DNA, 529 bp, Homo Sapiens
ggagaaataattaaagcctggcacctggggaggcttgatccctggaagcctcctcttgctgaaggaaaattcccagtgctgcctttccatgtgctgtgagtgctttgagttcagactgacaacagagtgggtctagcttctatgctttccatgaagatctcccacaaatgtcatccatgctcatgagatggatcaacttgtatcctgaacaagcaaaactgtttgggactcactgccttcaggcagtcccttggaagccaaggactctgggaacttttcagatgggactggaaacacttgggcaggagttcccctggtaggaggtctgttcacctgtacagcctaatggatgtcctgcttgaggtgccctaatattgcaaattctttgtttacaggggtaccacctgtgcccctgggactgtgcttctgtacatgaccacaactctcatgatgtcccctcagccctggaaagcatttgggttagcttccgcttactggtcagagttatactgtgcctgaattgatgcct

SEQ ID NO: 40479 - DNA, 595 bp, Homo Sapiens
ctggagaattattaaagtcctgtcagagtttatactgaacctctgacttgattttatccagctcatcaaagcaaaattgtcttagtagcactcttttgtagctgtttaatatttaatattcagtgggctccttaaggtgagttcttgaaggcttgtgagtagttgaagagctgtgaatggtggttaacaagctattatcatctccttgaaaagcataacatgaagcagagattcaggaaaatcttagacagtgattagtctatctgacagtgcatcaaaactaaattagttggccaagcacggtggctcacgcctgtaatgccagtactttgagaggccaaggcaggtgggtcatttgaggtcaggagttcgagaacagcctggccagcatggtgaaggcctgtctactaaaaatacaaaaattagctgggtgtgggttgtgcacgcctgtagtcccagctacttgggaggctgagccaggataattgctcaaacccgggaggtggaggttgcagtgagccaagattgcgccactacaatccagccttccagcctgggcaacagagtgagattccatctcaaaaaaaaaaaaaaa

SEQ ID NO: 40480 - DNA, 646 bp, Homo Sapiens
ggttcgagagctcggccggggcagcgcagccgccggctgcccctcgctcccaggcgccacaaccccgcgccctcgccgctgctgcgtcccgcgagacctgtggggaggccgggagtcacttcgggttccctttcagcccacgtggtcctgggacactccacccaggaacctagtcggcaccgcgcagggaatcccagcagcggggttctggccccagcacgcgttgcggcagcctggcgagcgtccttgcggcctccaagtgccggtggggtgcgtgcgcagggggcagaaaaatcatgtcttcttccagagtggggctccgtttggctgcctgtttactaaacgtttcagaagccggaagaaaatacattgttgagaacatagcaaaagcagctcttcttgacaaaaatggaaagaaacatcctcaagtttcagtgctcaatatattttccgatcaagactacaagagatcagtcattacaatagcaacttctgttgataagttggtggacaagcgcaaccaagcctaaaggcaagtgctgttgcgaggtcgacatccaggaaccagaggagggcagagcaatccacagaatggatctggggtgactcatggaggaaaaccaacacacagtaccatttaattctt

SEQ ID NO: 40481 - DNA, 1101 bp, Homo Sapiens
cgacttcccagtctcgtgagtcatacaactctcaggcctgtgctgcaaatgacacttgcttaggagtaaggtgaagggtattttatagctctaatggtttgtacagttcttaaacatgtattgattgctaacaactgctgtctttctcccagcttgccccaccaccagtctttgtgcataagcacaattttggacatagttatttgtacttatttatgcttttacaccttcttccttttataaagattttagctggtttatgacttgagttgaaacaaggaaaaaaagaggagacctgaaatggtctgtcccctgccaaccagaagcctcctgtggtatccaaacagaatagttgcctcagtctgtcagcacttctgtctttgaaggtggtttctgcttgaaaagtggtgactattagcatagcctggggataattgcctttttttcttctctcgggataccttttttttttttttttccagatactttcttgctcttgtcgactttgtttttccagaagatttagcctgtggttaaaatgtttcgggtccccacgtgaactctctgtgggattacccaattctggggtaccttcaccagatcaccagtgctaaagagggcaaaggatcttcttggttaatagaaaaggctgttttggaatgaatctcaaagtccagaaacatcgagacttttcttcaatacttttttctatttggggtagcaactttacctagtgtaggggagggaggggttagttgggagggcttgtgtttaaggggttcagaaacaggggatttaagtgtgtcttttgtgtttgcaaggcactaacaccactcccgtctgtatttaaatgctgtccccaggttacgactatggctatgtctgcgtggagttttcactcttggaagatgccatcggatgcatggaggccaaccaggttgctttatacttcggtcaaatgatgctggaaggatatatttttttatatatggggagggagggtttcaaatgattttactttggaaaggtacaagaagtctatctgtggagcatactgtattccaaccatcggttgtgaggaaaatctttaaaaaggctgga

SEQ ID NO: 40482 - DNA, 427 bp, Homo Sapiens
  misc_feature (22)..(22): n is a, c, g, or t
  misc_feature (260)..(260): n is a, c, g, or t
  misc_feature (291)..(291): n is a, c, g, or t
  misc_feature (307)..(307): n is a, c, g, or t
  misc_feature (317)..(317): n is a, c, g, or t
  misc_feature (344)..(344): n is a, c, g, or t
  misc_feature (361)..(361): n is a, c, g, or t
  misc_feature (417)..(417): n is a, c, g, or t
gggaactactgtcatctggtgnggagagaccggcaatgctgttgatcttactataatgcacaggccacccccaacaacaaacaaattacatagccccaaatatcaataatgccaaggtccaaataacctaaccttccattactgaaaatagaagttcaagaagatagtttataatttaaaaatttttaggtcttaataagttgtcatactttcacaggttttatttcatactaagtaatttatttcaaatttgtacattnccaattacagaaaatttttctaaagccagtntttggttccttcatgnagtacttacntatcaagggtcacattgttgcatctangtgatggtttttacccntgggtacttggttgggccaggggttcagggacttaagggtgaggatgcgccaaggnattttggcct

SEQ ID NO: 40483 - DNA, 442 bp, Homo Sapiens
cacgagggtgatacctcccctaagttactctcacaataaaaccttatttgagaattttccttcacttcaatctgtgacatagcattaggcatttagtataccttatttgtgaaacctaaggttcattcaacagatgaagctgcaaaacagttttcttggtagactcttggaacttgctcagttttttccttactttacctgcatgacacacattgggttgaaagttgtttggttttacccttcatttctcttagatatgatttggttctttttcatgcattatatttttgaaatatatggaggaaatattttattgaatcaagaaatagaaaatattccttaaaccagtagtaaaaaggtgagttagaactccatgtctggaagacaattcaacatttaaaatattaagatgctataccacttaacaagtgaatactaaaat

SEQ ID NO: 40484 - DNA, 857 bp, Homo Sapiens
aagcactggtatcaacgcagagtgcccattacggccgggcagtaagaagataaagtatgtaatcttagactaaaaagacatagacccatgttacttggaacatattttaacatattaatgaactgaaagaagaaaaaaaatttttttttaaatttgtttctgttatttactttttagactaagaaatcaacaaatatttcttgagcacgtttggtgtcactcttattttcctttttccaaccatataactgaatattttcacaaataaactcctactaaggaaaatgctatttaagtagttaaatctaattagaaaccatattttagtggtaaagtttcaaagaacaaagttgagagaatcttttcttgagagtaatagagtctgttttctttttaatatagtgaacaaatatttaagttctgaaaatccactgttctttgaactacgtgccagatacctaattgcttgtgaacgcatacccgaagcaatggctcttattaaatcttgtataaatcacccagaaatcagtaaagacttatacttccatcaagcactcttcacatgtctgtttatgtcacctgtagaagatcagctatccgggaggtatgttgagactattttgcctattacattttaccctacaaaaaaaacaaaaaaaagtagccagttggtgttaatcctttaaggagcaagattaggttcatttcgggggggttcttgggccatattaggtgggatttgccaatggtttacaatggaagcaattccttaagttcactggtggggggaaaggaaaacaccggggaaaaaaaaaggcgggaaaaaggggggggaaaagaggtaaccaaggagagta

SEQ ID NO: 40485 - DNA, 344 bp, Homo Sapiens
gaatctgactcactgaagactgtcaactgaatgaaggcttaaatttcatggtcttgggtgggagaactttttcatattctttccccatatggaataacaatctgccctgaaaacagggagtattttggcatgatctctttttgcttatttgccttccattttccataaagcaacttttgccaagcaccatacttaagactcaacttttttgcaaaaatatcagacaaagcactgtctttaagaacacagagagcacactagatcccttcttctgaaaatcactgttctatgttgtttgtggatatttttttagcattcactgcatgcctggaatgaataggctg

SEQ ID NO: 40486 - DNA, 702 bp, Homo Sapiens
gcactatgcctcatagtggtgggtcacactgcccaggaggaacccgcaatgagaccggcaaatgccttaaccatctcattgtctcatcaggaagaagcttaaatgactcttcttgctcacatacttcctgggcaaacatgtctgctctgttgggataaaggacgctctagaccaggctctgctgaaagatccagggcaaaggttcctgacaagactatgtccagcctcaaataaggccacagaagagcccaggctcgctgacgagcaccggctccgaggcagtcacatcaggagacagaaacagacatgttggtgctgccctctcaggtcagtgcaaatgccacttgaggagggctgagagctttgcagcataaaatgaccagaacaaggagaaacacagatgcaatggcaatagctggcaattcgcacatggcgtcaaacaccactgccacagaagctttttagctacaagccacgctatgcaacctttaagcaaaacattattgatttcgtggttgtaaaaacataccttcaactgcagaactcagttttatgacaccttgaataaaaacaaaaagtggcagttatatcatggacccaaatcgccttttccaggcttctcataaacacacgcatgcttcagatttggcatttttctttttctgctggcattgcaagaacgtaactaaacaaatatcaagt

SEQ ID NO: 40487 - DNA, 707 bp, Homo Sapiens
  misc_feature (640)..(640): n is a, c, g, or t
tttatttacccctgaggagggaagaggcagcttatttgtgctagtgtagcagtgagcttgggttctaagtttgaagacatcacttcacgcttcactggggctcagtttttctcctttatgaaattcgaggtttgggcctcggggcaagtcacagggtggggctgtgtttgctgcagtgagtctcacgtcccgcttcagcatcagggtaccagcactgttcatcccccaggtaaactcctctagtaacttcagggcaacccctttagacttacggggtgagctcttgcgggtggctgtcaccatctgtcatctgtctccaagaccatagttagaggaggggcccaatagcagcactcctcaaatgccagcagcatccctcaaatgccaacagcacccctcaaatgccaacagcacccctcagatgccaacagcacccctcaaatgcgctttcctagatgttacagaggaccatgtgtgaaccttttctggcaggaagctctggtgttcttgtttagtctcgcattgccagagagtaggcagctctgaagggtagatagtttttaaaaaaaaaaaaaaaaggcggcccactacactaaaggataatcatcaaggatagccaagagcacagttcataaatcanaatcactgccttaaaaatgttgagaatgctttcattaagtgcttaaattggataacagacttgtgcc

SEQ ID NO: 40488 - DNA, 577 bp, Homo Sapiens
  misc_feature (572)..(572): n is a, c, g, or t
  misc_feature (576)..(576): n is a, c, g, or t
attttttttggtggcatattcttcaagtaaattcttaactgtctttgctaaatgcaaagctacatggggttagattatataaatatgacaaatagaacatttcttagtatattcgccatggagtaacctcttaaaaaatctgataaacaattttggcatttattcacctttctcccaagtggaattacaaacatttgaacttgatggactttcataattatctgatactagccatataaccttgaagaagcttctaagcctctctgtgcctcagtttctgcatctgtaaagatgataaccccacctcataggggaaatgcaaagattaaatgtgtcactgcacgtgagacaggtacatgcggagcactcagtgcttgttgattcttacgatgttacgttcaccattatggatattattcaaactgagactgtctgtgacaattactgttcagagttgtacagttgatttaggcagcaagtcttctggttcttaatccagtggtgtttttgtgcaattcagaagacatgtatgttgttcccagtaatgacttggtgtgtttgctgaggtaccncggna

SEQ ID NO: 40489 - DNA, 418 bp, Homo Sapiens
tttggcctgtctagtataataaatatgtttttgtcagaatttgacccatttatgatgtaagcaaaaatgatatgtcttaatccatttgtctcacacactaattttataatttaaaagagcaatagtagtttcattcagaaagacaggtttaaggccaggtgcagtggctcacacccataatcccagcattttggatcacctgaggtcaggagttcaagaccagcctggccaaggtggtgaaaccccgtctctactaaaaatacaaacgtggcaggcgcgtgtaatcccatctacttgggaggctgagacaggagaatcgcttgaacccggggggcggaggttgcagtgaatcgagatcccaccactgcactccagcctgcgcgacagagtgagactccgtttcaaaaaaaaaaaaaaa

SEQ ID NO: 40490 - DNA, 311 bp, Homo Sapiens
gaagctactgccagaggagtaggtattctctgaattaaccatagatttgctcacagagctgaatgtgaagctgtgttcatacttgtttctgtggcaggtttttgtctctgctcaatttccttatttatatctattttttgacccaggcaaacttcagctagtgtcttgaatttaagtcccaaatcatctaagaagcggtcatctagctctccttcaataaaactgcaacaaccaatagaagcattcagcgattcagtttcttcctgagaataaaccagaaggcaatctttggctgtgtgattttcatcttc

SEQ ID NO: 40491 - DNA, 573 bp, Homo Sapiens
gcacgaggtttctggaatgcagtagataggtgtcaggtatgttactatttctataatgtacaagacagttccacacaatgaagagttgtcccttgtcacatacagcttttgaatgtccctgtagatattaatgttgatgaaaaacctgttataaattacttcagtgtttgtcatgttttaaatgattttttttttagtatagggtgtttcttctgttttttctttctttcatgactgacatttttgaagagtacaacctagttactttgcagatttccctcaaattgaatttatctggtgttttatcatgatttgattcagatttgatttttatgtaggaaagccacagaagtgatgtgcttttcatgcttgtcaggaggcacattatgttgatttgtctcaatacttgtaatgttaactcataccacttagttaaggtggtatctgctggtttgtgtgttttacatattaattaataagttaataaatattagggagagattctttgagactgtaaatatctctagtttaggatctagtgtttatacttgcctgaataatttatttaataaa

SEQ ID NO: 40492 - DNA, 502 bp, Homo Sapiens
aaatggaggtgctggcagttggagatcaggctgtccatagcacactgatgtggcacaggcaaggaatatggctgaggcaccaatttgctgctactgctgtctaacaggcattggaagtcttatgtgttcaaaaataaacttctgatttctactcccaaacctgctcttcccacatcttccccgtctcagtaggtggcagctctatttgtccggttactgagaccaaatattagagtcctccttaatttcctctctctcatgcttcacattcagtttattaataaatcctgttgacagcctgggcaatatggcaagaatccatctcacaaaataaataaataagccaggtgtggtggtacgtgcctgtggtccccggttactcgagaagctgaggctgaggatcagttgagcccaggagttgaggctacagatagctatgatcacaccactgcactccagcctgggcatcagtgagagcacatttcttaaaaaaaaaaaaaaa

SEQ ID NO: 40493 - DNA, 500 bp, Homo Sapiens
tggcagccctagaagagggcctgaagaagatatttttagcagcaaaaaagaagaaagcaagtgttcatcttccacgtattggacatgccacgaaaggttttaactggtatggtactgagcgacttattcggaaacatctggctgcaagaggcatcccaacttacatatattattttcctagaagcaagtctgctgtccttcattcacagtcttcatcttcctcctcaagacagctggtgccttaagaattggcccagcctcagatcctgtctttagcaaccagctaatatttacccagaggtactgcaatagagtatttcaaaatggaatcaggatctggtgggcctcagaaattgtctcttttctgagtttcagtttggttctcctggatgttttgctctgttttggtacctgtaatatagggaaacacaactttttttgggaaagccctttgaccccagcttgctagttgcataataataaattttctgttcctaatg

SEQ ID NO: 40494 - DNA, 294 bp, Homo Sapiens
gccaaatcctatcaaagggtattggctgcctgtagtgctttagggcagattatgaggcctacttgaggctctgagaaaatagaggagttctgagattgactactaatgtctgccatggaagtgagaggagcagttatggtacgagtgtcatatttttgccagttctgactgaaggctctgacttcaaagcccaggatctttctagcctctacccagtgtcactgactttctagctcattgccctagtgaaattggcttgccaaaatatattgacaaaagtcattgtaaaaaaaa

SEQ ID NO: 40495 - DNA, 600 bp, Homo Sapiens
  misc_feature (536)..(536): n is a, c, g, or t
  misc_feature (562)..(562): n is a, c, g, or t
gccatctctgatgggagcctctttagatctttcgtccatttactaattgggttgttcgatttcttattgttgagttgtaagtggtttttaatggtctggatgccagacaggtgttttgcaaatattttctccgtctgtggcttgtttctccattctcttatttcctttcccagagcaaaagtttttaattgtaacgacttcataccaatatcttctttcatggtagaaatttgtcttttatgtactttactgttgtatctacaaagtaattgccaaacccaaagttacctaaatatcccttttgttattttacagaagttttacagcttttggatttaaatttaggtctaaaaattgaattcataaaagtagagagtataatgatgcttaccagaggctgtgttgctggggagaaaaatgggaagttgttcacagatgcaaagattcagttaaaccggagaaatgcgttttgaaatctattgcacagcaggatgactatagtcaataataatgtactgtatatttaaataacaaanagtaaatttcaaatatctaaccacanaaaatatttttttgagacagagtctcgctctttcgccc

SEQ ID NO: 40496 - DNA, 562 bp, Homo Sapiens
ccttgccttatcgctcttcacacctgccttaggtctctttttaccttgtaagagaccttaagagacctttccagttggttcagttctctcagccccaggttcaacctgtcctgtctgacacgtctcacagccttcctgccttcactccagcgccccctcaatccatttcccacagtgcagccagacctgtttttgattgtcagtcctatggggcttaagtcctggaacatcccattgacctccaggacaaaattcaatctatttcactttcagggcactcaaaactactagtgagtggttcctcacctcttctctcaaatacaatctttgtataaattcatttatcctggaggtattagtcctctagctccataccttactcagttactgcagacccctctgctacctccttcattcactatacatcttgttttcccgaggatgtgaatctccctcaagaaagatccctggggcctggagtggtgtcttactcgtttctgcttcctcagtctctgtcagataatcagtgctatgtaaatgttaagtaaatgactttatttat

SEQ ID NO: 40497 - DNA, 621 bp, Homo Sapiens
aaatgatcgcctacaagcggttctcttggctcaaaacgcctctttcagggctcttatgctagaaaggaaaggaataaggaggagataaaatgacgccgaggccctgaactgttcatggcatccgcggctcagccaagctgttgttttaaaagagcaataaaaatgaattatgactaaacgccttctaacttaatgctttcggacggggatccccggcaaataacgtaagaggatttttatttgtgcatgtgttcctgcaattgatctctttgatgacattctcattcatagaaagcgtttgatttatgagcgtaggacgaatcgcatccaggagctgcgcagccctggccgcggccgggacgccctgctccgcgctgagcttggggccagaaaccagccatagtccccacactccgccgccgcagctaagatttagcggaggaaggggcgagggaaggtagggagcaaacctatgaagaaacatcgcgttgtcattggaacttccaagcctttgctgttaagagccaggttcttaaatcaacccgccccacacacatgttgcttacatgctgcgttttctcacggtaagtaaagtaggcatcagaagagagctcagaaagg

SEQ ID NO: 40498 - DNA, 700 bp, Homo Sapiens
  misc_feature (536)..(536): n is a, c, g, or t
  misc_feature (691)..(693): n is a, c, g, or t
  misc_feature (695)..(697): n is a, c, g, or t
ccacgcgtccgcccacgcgtccgggcgagagaaagcgtttgatttatgagcgtaggacgaatcgcatccaggagctgcgcagccctggccgctgccgggacgccctgctccgcgctgagcttggggccagaaaccagccatagtccccacactccgccgccgcagctgagatttagcggaggaaggggcgagggaaggtagggagcaaacctatgaagaaacatcgcgttgtcattggaacttccaagcctttgctgttaagagccaggttcttaaatcaacccgccccacacacatgttgcttacatgctgcgttttctcacggtctgttttgcctgaacccatcaacagctgggagattaatcaaccacactgaaaatgtggagggatttatgggggagggggttgaatgtgggtgtttgaaacaaaagtgtataaacaaatgaattgttgataacttagttattgacctggagactggtagcttattaaagaaactccgtgttactcattcctggagttgggggtttctgtangcactttatttctccactttcaagagcttgggcttggcccaaatcttagactgtccaattctgcctctattaccaatttaaatctatggcttgaacctgtgcactgaaaatcaaatccttttaaaagaaagaggggaagaaagagcccaaaaaannnannnagg

SEQ ID NO: 40499 - DNA, 486 bp, Homo Sapiens
  misc_feature (486)..(486): n is a, c, g, or t
gggagactctgtctcaaaaaaaaaaaaaaaaaaaaaaaaatggaacgcagggcaagaactcgtatttggaaggagatgggggaaaggagcggtattatacctaagttgtatttgcaggcaaatgagatggagccctctctgtaaagaagagtcatttgtgcaagtagacggggtctgtgggtgcaggccctggaggggcacacaattgcctggaggcttctgtgagatcgggagagggaggagaggcagtctcttgacaaaataaagtatttttattcatttgtatttattaaatgaaaaaacaatcccatggtgtccctgttgtgtggtggaacctaatgactgttgaaataaagttctgtgttttccctgaaaaaaaaaaaaaaaaaaaaaaaaaaaaaaaaaaaaaaaaaaaaaaaaaaaaaaaaaaaaaaaaaaaaaaaaaaaaaaaaaaaaaaaaaaaaaaaaaaaaaaaaaaaaaaaaan

SEQ ID NO: 40500 - DNA, 632 bp, Homo Sapiens
atgaaccccgaccctgatgaacatgagatgaccgccgtgtggtaaactgatgaaccccgaccctgatcaacatgagatgaccgccgtgtggtaaactgatgaaccccgaccctgatcaacatgagatgaccgccgtgtggtaaactgatgaaccctgacccattaggctttggctacagaatgtggaaataagttgtgttactacatgtgtgtaatcctagggtgcaggacaccggccgggaggttccatagagtgatgggttctgcaggtaactcatcctctagtcctctgtaagctcctagaaggaagaaattatgtcctttagactaataaaattcctccaaaccaaatacagcacctactgtgaagacacaaagatacttttagatagtaaaaactttatccattgagaaattccttaatgaaacagtatccaagaagtcatttgccagcagatttcttagaggtgcgataaagaagaggacattgccagtcgtcacagcagctgcaatagctcctctctattgttaaacagtgggatatcttgtgcaggttttcagttgacaatcaattttaaagattagtttcggtccccatcaatcaattatttattaacccatcaataaaaatt

SEQ ID NO: 40501 - DNA, 770 bp, Homo Sapiens
  misc_feature (424)..(424): n is a, c, g, or t
  misc_feature (533)..(533): n is a, c, g, or t
ctagggtatgcggctgtttgaaaactatttcatcatctttatcatcatcattcagttcagccacttgagattttcgcctctccaaaaatgttggtgtacaaactggtgtggggccctggattcaacaagtaaagattataatacataaatgtaaaacatgattatgactttacccaaaaatatcatctctcctctatttttacaagttgtgccccattattttagctctgttaccatcttttggtgatactattgcaaagaataaagaacttagatgcttatcaaacttggtacagaaattcacaattaacaaatatagcatgttccattataaggttttaggcagaaaattgctaaatcaacaataaagatctaccaaatgtcacaatatttaatttgaaatcttaaaatgagagtagcaganactgcttctcctccttcaaattatttctataatatctggtgtctggagtattgaaaaccattttacctggctatccacagtcttctcaggagtgtcaagagtacctganacttttttcttcttcttacgtaaaaccttaaaataaattttaaaacacatcaatttgaatattgatcagctacagtagtcttgaatatgttttcctacttatccttctttaatatcttgcatgtaaaatgataaaaaaattttacctggcctttgtagacgtctgacgattagttttgaaatactttccgtttctggaaaacttttataaagaagttagaactgaaaaaaaaaaaaa

SEQ ID NO: 40502 - DNA, 536 bp, Homo Sapiens
gtagcgaagttatactcatggtctttgtcaattatggaggaggaaaatattggtacttcaaacatgcaagttggaatgggctgacagtggctgacctcgtgttcccgtggtgagttgccggtctgccctcttctcttccacgggttgactccaatctcctgtttttcagatgatgctggagcctctcttctgagacgggcatgtgttatgtggttaggaagtccttccaaaagtcctgttactggatagttctcatacttgacccagtgcctacacgtgtgtataaaagagtgatttggggccgggcgcggtggctcacgcctgtaatcctagcactttgggaggctgaggcaggcgaattacctgaggtcaggagttcaagaccagcctggccaacatggtgaaactctgtctctactaaaaatacaaaaaattagctgggtgcagtggcacgtgcctgtaatcccagctactcgggaggctgaggaaggagaatcacttgaacccaggaggcgggggttgcggtgagcagagat

SEQ ID NO: 40503 - DNA, 924 bp, Homo Sapiens
  misc_feature (860)..(861): n is a, c, g, or t
tccggaattctcgggatcaggtgaattgttatactagttactttttggtggttaatgtgataatattgtcttatttaaaaccacaaatgaatttcaggagacgaaaccagacagagggtcaagtttacagatgaccgtgtctgcaagagtcaccttctggactgctgcccccatgacatcctggctgggacgcgcatggatttaggagaatgtaccaaaatccacgacttggccctccgagcagattatgagattgcaagtaaagaaagagacctgttttttgaattagatgtgaaaggggggaccctaccctcagaacatgagggaataatatttacgtggctcacaaagaccagcaatggatcacttggagtcctttattgctgaatgtgatcggagaactgagctcgccaagaagcggctggcagaaacacaggaggaaatcagtgcggaagtttctgcaaaggcagaaaaagtacatgagttaaatgaagaaataggaaaactccttgctaaagccgaacagctaggggctgaaggtaatgtggatgaatcccggaagattctaatggaaatggaaaaagttcggtgcgaaacaaagagaaaccttaggaaaaatacaaagatggcatgccagggtccggatttaatcaagtaaaaggtaactgtatagcaacaacctgtttcgcccgaccttagactcccaataaaaaataacatgcctcccggtcaaaaagaatttaatattaaagatgaaatatatggggaaatcggtgcttcacaaacgggggaacatgacgtgttgccagaaacagacaagagcatcagggtgaggagggggaaagatgagcacgataaanntaaacaaaagttgggagtggagctgtttgatgtgtattctctgtatataaactcacaaacgac

SEQ ID NO: 40504 - DNA, 537 bp, Homo Sapiens
gagcaagctgccagagagagggtgtcagagagcttcagaggagcccttttgagtcttctgctcagtaatgatcagcacatgtgtgtgaggaaaccgcccagggctgggcaaggtaccacatgaaagaagcagggaataatcctctgagttcatagaaggccaggaatagtttatgttcccaccagccagagtggaggatttggtagtcacagggcgtcaaatagagtcttcagaagggtgttgcctcagcactagggcataatttggtttcacttaacaaagcttaaaagctactcctgaacagtacccttaacttaccgttttcaaataagtgcatccctaacaaaactcaataatttagcaattcaaaaatatccagcatccactgaaaaattagcaggcatgcaaagaaacaagcaaatgtaacctataacaagcaaaaaaatcagtcagtagcaacagatccagaagtgacacagaagatagaattagtagacaaggacattaaaacagtgactgtaatccatctgctgaaga

SEQ ID NO: 40505 - DNA, 711 bp, Homo Sapiens
cgggattaatgcatgaaaaccctcagagggtgttgggacatcctacttccctgtcctcacccagtggaactctggtgtgtgccttgaggataaggaagtagagtggaaactcatcctatcattgagtattctcaatattttggccttccctctggaattatgagaaatttaacaaagtctcaggaacctttaaatccattgtccaacactgctagaaaaactgtaggaggtacatggagaattcctatagttcttaggtaagtgcaagacatggcacagggatccctatccacataaaggggaatctggatgctgcacacctcaattctgagaaatccctgactgaacttggaattatgacagtaaagttttcgtcctttagttttctagagcagctcacagaaattttaaaaagtaaaacaaggccaggcgcagtggctcatgcctgtaatcccagctctttgggaggctgaggcgggcagatcacgaggtgaggagatcgagaccatcctggctaacagggtgaaaccccgtctctactgaaaatacaaaaaattagctgggcatggtggcgggcgcctgtagtcccagatgctcaggaggctgaggcaggagaatcgcttgacctgggaggcagaagattacagtaaggcaagatcgcgccatgcactccaagcctgggcgacagagtgagattccggtctcaagaga

SEQ ID NO: 40506 - DNA, 1075 bp, Homo Sapiens
  misc_feature (720)..(720): n is a, c, g, or t
  misc_feature (834)..(834): n is a, c, g, or t
  misc_feature (1008)..(1008): n is a, c, g, or t
cccacgcgtccgcaaatccttcttaagtgaagagctgggctctgaggttttgaacctactgacaaataaacagtatgagttgctttcaaagaaccttcgcaagaccagagagttgtttgttcatggcttacctggatcagggaagactatcttggctcttaggatcatggagaagatcaggaatgtgtttcactgtgaaccggctaacattctctacatctgtgaaaaccagcccctgaagaagttggtgagtttcagcaagaaaaacatctgccagccagtgacccggaaaaccttcatgaaaaacaactttgaacacatccagcacattatcattgatgacgctcagaatttccgtactgaagatggggactggtatgggaaagcaaagttcatcactcagacagcaagggatggcccaggagttctctggatctttctggactactttcagacctatcacttgagttgcagtggcctcccccctccctcagaccagtatccaagagaagagatcaacagagtggtccgcaatgcaggtccaatagctaattacctacaacaagtaatgcaggaagcccgacaaaatcctccacctaacctcccccctgggtccctggtgatgctctatgaacctaaatgggctcaaggtgtcccaggcaacttagagattattgaagacttgaacttggaggagatactgatctatgtagcgaatanatgccgttttctcttgcggaatggttattctccgaaggatattgctgtgcttttcccaaagtaagtgaagtggaaaaatataaagacaggcttctaacagcatggagaagaganactgtctcagctccatgaggaatctgatctggtactacagatcggggatgcgtcggatggtctaaccgatcacattgtggtgggacaggtctgtcgattttcaggctggaaagaaatatcgggtttggaatcaatccaggatagcccccccggtctggggctacaaacctctgntctggttgggctccaaggcaaaagaatccggtttttttgaaggcttccgggggccggaaacccgccc

SEQ ID NO: 40507 - DNA, 565 bp, Homo Sapiens
ctcatttgtacagggaatggaatatgtagctgtggaaactgtgaatgctgggatggatggaatggaaatgcatgtgaaatctggcttggctcagaatatccttaacaattacatgagagagcaattttgatgacgtattcgctgatgcacagacattggaattcattacattatctagccatcgtaatacaaatgacctttggatttctctatcacggcgcttatcctcctattaaggatcagaaagttaaactttacggaccacgtacgtccctgtctcatattcttctttgttggtttctgtttaatactttaaagctgtaaaaaaaatttaaaaaattccttctgagctcccaggccatacaaaagcaacttaagggtggatttggctggcagctgggcagtactttgtcagcctcagctccactggaactgcccttgattctctatagctcatcacaaaacctcaggtatgtcttatttttcttataatcctctgtatgttattatcctttttattaacaacaacaactacaacaaaagtgctgctctttttcatagtctc

SEQ ID NO: 40508 - DNA, 595 bp, Homo Sapiens
cagttcttggctgaattcagcttgtgtttcttttggagggtgggcaaatcatacggcagagattatttagttgcattataggtattcttctataccacttgccctttgaaaccctcaacttgatgtaatgtgcagtctggggttttaattagtattaataatcttgtggatttacagaaatctataatgcacagagttgagttttaaccaatgatcgtattcatagaaaatatttcgaaccaccacattcttcatggtcattttagttagtacataatcattgagtggccagccacacctgacacaatctcccagcatccaagattggagattcctggtctgtgtagagtatatggttttgcacgaaatctttctagtcttgtgattgcttcagtttaatttgtcacataaaaccacaagtatttaatattaatgtatcagtggtttggtgtttttgttcccagtactgggctttgcgccgggaaaaatctgaatactggagctacagagttaactctaaaagtgcttttattggtttctacaaactggaagaagagaaaggcaaaaaggaaaaagaaagacaggaaattgagaa

SEQ ID NO: 40509 - DNA, 889 bp, Homo Sapiens
gatgtccctgcccctccgttccctccagagtctcagctctgaacatcttcccgcacctctgaggagccaggcctggaaaccctctaaaatagatttttctgcctcaagacagaagatgggcgttccaggcagagaagagctgcccagtcacgtgctctgctccacctggtcagagacccttgacctttagaagactggacctgagggcgtggctggtggacctgagggcgtggatggtggacctggccacccagctgtagctttttgggttcctgtggtcccatttcttgggtcaatctcacacctggcagctcccaggaagacacccccaggcccctcacactcctgggggcagctggaattggcttcagtggcgggaccaggggccccatgggtgtttggaatccctgatctgggtcaggcactggcagcaggattccagcctggcctggactctggtgtgtcccgtttgaagaaaccccgccctgtgaaagttcaagtttagcatccaatgacccatttaagaggtttgctgagccacgtcacaggagggtctgggtgcaaacggaggtggcaacacacagagcgagccttgagcacccaggttacccccaggacctccagtctggctggggggctcctgctgtcctgtggagcagcccctgggatcagggacggggctgagctggagagtgtgcaggattgattaatgatgtctgccacggtcaggccaactgctgctgtaactggggcccactaatctaaatatggttggaccaaattcaaaggttactatacgtgacatatgagaatgctatgaaaagtcacctttgctatccattaactaagtttaattgacgctagccatggcttcactcttaaacaaaaa

SEQ ID NO: 40510 - DNA, 776 bp, Homo Sapiens
  misc_feature (629)..(629): n is a, c, g, or t
  misc_feature (637)..(637): n is a, c, g, or t
  misc_feature (757)..(757): n is a, c, g, or t
  misc_feature (770)..(770): n is a, c, g, or t
  misc_feature (776)..(776): n is a, c, g, or t
agaggtaatccgttagttcagtatctgaattaactaataaagaagcagcttcacaacgacctcttagctcttcagcaagtaacagactgtcagtgagttctttgttggctgctggggcccctatgagctctagtgcaagtgtacctaacctgtcctcaagagaaacatctagcttggagagttttgtaaggagagtggcaaacatagcacggactaatgccacgaacaacatgaatctaagccgaagcagcagtgataacaacactaatactttggggaggaatgtgatgagcacagcaacttctcctcttatgggtgctcagagtttccctaatttgaccacacctggtactacatcaacagtgactatgtcaacatccagtgttactagcagcagcaatgtagctacagcaacaacagttttatcagttggtcaatctttaagtaacactttaaccaccagcctcacatcaacttccagtgagagtgacacaggtcaggaagcagaatattccttatatgatttccttgatagctgccgtgccagtactctattggctgagctcgatgatgatgaggacttacctgagccagatgaagaagatgatgagaatgaagatgacaatcangaggaccnagaatacgaggaggttatgattctgagacgcccatcccctgcacgtcgagctggctcccgctctgatgtaacgcatcatgctgttacctcgcagctacacaggtacctgctggagcaggnacccgactattgnggagcn

SEQ ID NO: 40511 - DNA, 648 bp, Homo Sapiens
  misc_feature (579)..(579): n is a, c, g, or t
cacgaggagcatcccagtgatgtgttcctgtgttatgagaaggagtctggggttctggatgcctcaggaacagaatatggaccttaaagaccaggctgagagcctggcctggcacgcagcctgcccgccccccccgcccttcctgtccaccgcgggctctctgcagcagggcttgccgaagagactgctcccgacctctcatgtcatcctgcatccagagaacggcagcatatcaagccgttaaccctgattcactcggttcccttgaaaccaggcctcagttaaccatgaccacagctacaggcaaaccgctgctgttgctgcctgcttttgctgaagaatgatatcttgccaggcacggcggctcatgcctgtagtcgcaacactttgggagaccaaggcaggaggatcacttgagtccaggagtttgagaccagcctgggcaacatacagatgtctacaaaaataaaaatttgcaaggtgtggtggcatgcacctgtagtcccaactgctagggaggctgaggtgggcagattgcttgagctcaggagtttgagaccagtctgggcaacctggcanaacaaaaatacaaaaaattggctgggtgtggtggctcatgcctgtaatcacagcactttgggaggctga

SEQ ID NO: 40512 - DNA, 542 bp, Homo Sapiens
ttttttttacaggaactcttgcaagaagaaaggactatgagttcaactttagagggagccatggggactaaacaaaattctgaggccccctcaaccatctaaatggacttccttctgggccaggacactcgaaaattaaacctgaaagactggttcaggccatgatgggaagtgggagtcgaacatgcctcatcataccctccagcattaacatcaacacagaccttaaggctgataagaagcatttacaatctattctctctgaagtcttctacctggaggcttcatctgcatgataaaactttggtctccacaacctcttacaacccaggcattcctttctatcgataattactctttcaaccaattgccaatcagaaaattgttatatctacctataatctagaagcccccacatcaagttgttttgcctttctggacaggaccaatgtatatcttaaatgtatttgattgatctctcatgtctccctaaaatgtataaaaccacgctgttccccgaccacctggagcacatgttctca

SEQ ID NO: 40513 - DNA, 502 bp, Homo Sapiens
atgctccagctgcggccaggcctttggccagagacgcttactgctccttcatcaacgcagccaccaccaggtggagcacaagggggagagagactgagccctcccttggctcactgtccccttctgccgccagccctagccagtaagaggtgggatttctaagaccgactgtatgagctcgcctcttccagatagctggcagagggcagggcaagggattggccatttatactgggctcgagctcagaagcccgaggaactctttgctcccctgctttggggagatctcaaaccatggacgtggagctgtggtttgacagcgctggctctgcttctccccacacacttacatggcaaaggtaaaaagtctgctactatcgtgggttgatgaggattgtgggcaaacaggctctcttgttaaaagtttaaactggtgtctccactttggccatatgacggtatctaagaaattgaaaatacatacatgcttgtctcaactctt

SEQ ID NO: 40514 - DNA, 429 bp, Homo Sapiens
aattaagaagttacaaaaaatgggtgttggtgatattttatcatggttatttagcttaaaatacacgtgtaaaggcaggtgtcttccatttttctcctttgccttttagctgctgttttcctgcctctgacatgttggctgctcagaaactgctctctgggcagtgattggggaacagggtattcaagttcactaaaggctcaattttccattgatagaatatcagtgtccacagaattaagactgcaagcacagcaaagacacccatattgaatgttcccttaaattgcttttatttggagacaattctgaacatgaagtgttatagagggcccaggaaactaagttgagcccacctgaccctgtgatgaatcttggaacttccgtctcttgaatacattcttagtagtagcttcttggcattttcaa

SEQ ID NO: 40515 - DNA, 945 bp, Homo Sapiens
gtcatgtatagaagagatctgatccagtgttgttgagtgaaaatctgacagatcattctagagactgtaagagttaggaaaatatcagagctctgagaaaagggacaaagcaagtgttttgaattgtatatgctctcactctgaaattccaaggttgggggcaatgatgaaactttgtacagtatatgaaacagtatattaaccctaaaacctagatgttgtccacctgatgccaaatttcttaattttttttgatgttgttgtctttttcaggagtgtagaaatctatgtattggtggttgtcatttgccagctctctcgtagcatttctggttagaatctttaactagagatgtatacatttctttaaaacttgttggttatccatgtcttgtctgtacatatgaccatgtttcttgacatggaaataccagtcagtgttcctatgtattcgtctatattgtaaaccaagagaccggctgggtgtggtggctcacgcctgtaatccagcacttcgggaggccgatgtgggccgatcatgaggtcagaagatcgagaccatcctggtaacacggtgaaccagctctactaaaaatccaaataaaaaatactcgccccggccatcatcaaagccacatctctccccacgcagcgacagaccgacagaagacacgcgcgagccagcctcggtcacccgatcatgccgagagctccacagcaacacgactcgaccacggaacccagcgcggcaaacgcgcgtcacccccgcatccagccgaaagtcccgccacaccagccggccgcagcccctgccccgatcccgcgctcgccccgccctctcaggcgccgcgcgcacccacccaccaagcccgcccaccaactaagacagcacgacccacagctcgtaaacacacatcccacagaccaaaagtcccaagacccatc

SEQ ID NO: 40516 - DNA, 916 bp, Homo Sapiens
ggtttcttgtgagctgtggctggaggcctccttgcttccttgacacatggacctcttcatggggcatctcacacaaggtagctgcttcataaaaggagagcaagtaggagggcaagagacagcactagtaaaacagaagtcatagtcttggtgatgtaataacacaagagacatcccttcactttgtcacattcttctcattagaagcaagttgctaagtccagccagaactcaagggaaggagattaaacaggactgggaatatgaagaggtgggtattatgggagtcctgtcagaagctgcctgctacagggtctttagctttccttagattttcaaagaggttgtgatccaagaagaatagagtttgaatctagattttatactaaacgatcactttagattttcaggagtgtgtgcctagtttgtgattaagttattctgcttcctttcttataattgagtgtaacttattttcttcttcatattacctccattagttattggaactcaaaggtttaagtggaaaactaaatttaacatttataaatagccaaatttcagacaccaatgatggactaaggaccaccccacacactacgcacagagcaacctgtcgagaggatccactcatgtcccggagagggcaagcaaacaatacacagggggacaccgacaccgccccggccattggacacgcctcacgaacagcacagcaaaacggcaaaaggcccgtgcgggggcaaaacagcgagcgcaagagcacacgaaaaaaagaggcccaaacccgtgcggcacgaacgctggtgccatgcaacagcgcacccccagttcagacgggaaagggaccaacggagggagactacaaacggtcaatacgtaaccggctgggcgtccgcaaccccgaggtaaagcc

SEQ ID NO: 40517 - DNA, 563 bp, Homo Sapiens
gcacgagcattgttctatgtatgcattttattgtgttaatattgtgtattaaaggataaacaagtcttaatgctcaaagtatgttaaaaatagatgtagtgaatcagtccctttgtgaatgtcctattgttagtttttaggaaggcctgtcttctgggagtgacctttattagtccacttcttggagctagacgtcctatacttagtcactggggatggtgaaagagggagaagaggaagggcgaagggaagggctctttgctagtatctccatttctagaagatggttttagatgataaccacaggtctatatgagcatttttagtaaagtgcctgtgtttattgtggacagagtttattattttgcaacatctaacctttatgaatatctgaggtgacaatgtgtgataaaaactagagctagtgggccaggcgcggtggctcatgcctgtaatcccaacattttgggaggctgaggcaggcagatcacatggtcaagagatcgagaccatcctggtcaacatggtgaaaccccatctatactattctttgctgggcgtgg

SEQ ID NO: 40518 - DNA, 597 bp, Homo Sapiens
  misc_feature (379)..(379): n is a, c, g, or t
gagcttcacactactaggctctgcacccctggaccaggagcctctgctgagtatagacctgggcactgctcactcagctgctgtgactgcctcgggtgattgctacacttttggcagcaatcagcacggacagttgggcaccaatactcgccgaggcagtcgggcaccctgtaaggtccaaggccttgagggcatcaagatggcaatggtagcctgtggggatgccttcactgtagctccacacagaccctaccctttcccctagcccagttagaaaataagtctgggccggcggcggtggctcacacctgcataggcagtgctttggccaggaggatcccttgatcccttgtggccaggagttgggagaccagcctgnggaccatagcgagaccgctgtctccaccaaaaaaaaaaaaaaaaaaaaaaactcgagggggggcccggtacccaattcgccctatagtgagtcgtattacaattcactgcccgccgttttacaacgtcgtgactgggaaaaccctggcgttacccaacttaatcgcctttgcaaacatccccctttcccagttggcgtaataccaaaaaggccgcacc

SEQ ID NO: 40519 - DNA, 930 bp, Homo Sapiens
  misc_feature (659)..(660): n is a, c, g, or t
  misc_feature (682)..(682): n is a, c, g, or t
  misc_feature (775)..(775): n is a, c, g, or t
ccacgcgtccggtgaccatggtggtgatgacgatcattgtcgcctttatcctcgaggccttcgtcttccgaatgaactacagccgcaagaaccaggactcggaagttgatggtggcatcacccttgagaaggaaatctccaaagaagagctggttgccgtcctggagctctaccgggaggcacggggggcctcctcggatgtcaccaggctgctggagaccctctcccagatggagagataccagcaacattccatggtgtttctgggacggcgatcaaggaccaagagcgacctgagcctgaagatgtaccaggaggagatccaggagtggtatgaggagcatgccagggagcaagagcagcagcgacaactcagcagcagtgcagcccccgccgcccagcagcccccaggcagccgccagcgctcccagaccgttacctagcccagcgcccgaaagccgtctcttctatgcaataacacaatagtattactctactgcgatgtacggaactgcggtgtgtgtacacatactcacgtatatgcacatatttatatacaggaagaaaaaagacagacaagatggggcttggtttataaccaccttgccctgtcttccttaactccagaagccagttggaaggggggggggggggtgccnnccaccaaggtctgagctcttcntactgtggaaggctccagaaggcccttcacaaggagacccctcacctggatccagtcgaactgcggggcttgccccctccagttgggctgggnctccatcggccaccgtccaaagctgtcactggctactggcttcaggctcacatcccccccaaacctgaatggggtggcccggcccccctctcccctgggggccatggcaaccaggggttcccgggggggtttgggctttaaggggacagaaaccc

SEQ ID NO: 40520 - DNA, 698 bp, Homo Sapiens
ccttaagagcatagtcatcgtgcacaaatagatgtgtaatgtagaagagtgatggaaactctaggaaacaatcaagaggaaatgctagaaataataaaaatcactgacataaataaagagtgtcttcaataggttcatcaacagaacaagtttgaggaaagaatgagtaagcttgaagataagtcaacagaaataatttcgaaagtataatatacatctatttggaataacagaaggagaagaacaagaacaagaaactaaagaaatatttgaagtaacactgtcagaggattttcccaaattaaccacagcaaatcacaagtcaagaagtagagaacagtaaacaggagaaataccaaaacaattatacacaaacttcagaaaaccaaagacaaaaagaaaatcttcaaaggagtcagagaaaaagtaacctgacttacagcaaaacaggacaagaattaaattagacttcccatcagaaacacagaagcaagaagactggagtgaagtatttaaatgctaaaataaagaaaaaaaatacaaacttgagaaataaagacttcctcagacaaatgctgagggaaataatcaccatcagaccttccctgtaagaaaatattaaagaagtcctcacggaaaaggaggtgatcagtcagaaatcaatctggtacaaggagagtgcaagaagataatacgta

SEQ ID NO: 40521 - DNA, 830 bp, Homo Sapiens
  misc_feature (641)..(641): n is a, c, g, or t
  misc_feature (680)..(680): n is a, c, g, or t
gtttatccacctggctcccagctagctagagggcatcaccagagtgtatacgtgtgtgccttgtgtggaagggctgcagaggaaggtgtgtgctaggagaaggggatatgtgcgtctgtgcgtgtttctgtgtgttgagagttttccactctcgtgtacggtgagaagaatctctgaccaaagggaaagcttccaggggggaaggctgtactttcttaaatatgttacaggaaagattaagggttccttctctccattttcaggaaaccctgtagaaaaggagatacaagatagtgtctaagatggaattacaggtcaaggtagagatctctattctgaccagctttctttcttagttaaaaatagcctgatttttataaacaaacttcctgtttctccgcaaagattactgtctacatactaacacttcctctccccttggagaaaatatttctcttagcttcgcttttagtgcaagtggtagtaatcagtgtaaagattcacctctggagatcaccactcattctttggcctgcaaagattgatgaccagtaacaaatagaaagtacgtacgtaggtttcatttgtctttctgcatgtgtaattcagcctttaaattttaaatttttaaaaattattangctggacaggcagagttttcgtttgcctgttttgctcantgtttgtttacaaggctgggtgaaataaacagctttccagaaaacctccttctgacttaaaactcttttaggttggacagaaattcctgtccttgataaagaaccacctagaagcagcccccagcgaggggttcttgaaaagtcatgggg

SEQ ID NO: 40522 - DNA, 582 bp, Homo Sapiens
acttcggtcgcgggcggtgaggtgctgttgctgaaacgctgccgctgagggtggactcgatttcccagggtcccgccgcgggagtctccggcgggcgggcgcgcgcgagccaccgagcgaggtgatagaggcggcggcccaggcgtctgggtcctgctggtcttcgcctttcttctccgcttctaccccgtcggccgctgccactggggtccctggccccaccgacatggcggcggtgttgcagcaagtcctggagcgcacggagctgaacaagctgcccaagtctgtccagaacaaacttgaaaagttccttgctgatcagcaatccgagatcgatggcctgaaggggcggcatgagaaatttaaggtggagagcgaacaacagtattttgaaatagaaaagaggttgtcccacagtcaggagagacttgtgaatgaaacccgagagtgtcaaagcttgcggcttgagctagagaaactcaacaatcaactgaaggcactaactgagaaaaacaaagaacttgaaattgctcaggatcgcaatattgccattcagagccaatttacaagaacaaaggaaga

SEQ ID NO: 40523 - DNA, 603 bp, Homo Sapiens
tcttgctttctttaggtaaagttttacagtaacctcctttgtagtcctttgaagatgaggatttgagaaatcccaactcctaaagtaggggagagacagcagcagaatatgacccacagccagacccaaaggggctagcccgacccctgtatatattgtacctctctctctgcccacctctcccccacttctccccactgccccattctctcttatcctgcctattcctctcccctatttctctgtctctctctctctcacatacacacacactcactcacaagcagtacagtcactaagttggctaggtaatatccaaagcattctgattgtcctactttttgtaaattgaacttatttaagatattttagaagagatgagtcacgtcttcctttgacccttcacccataacacacataccattctcacaggaggccacatggtgcagtagagtcagactttgattcaaagcccaactctgtcacgtgacagtaggcttgagtttcctcatctgtaaaaagggaagatttcctacttcataaagtggttggagaaattaaagaaatagtatatgaagccttgcacataaaaaaaaaaaaaaa

SEQ ID NO: 40524 - DNA, 522 bp, Homo Sapiens
tggggggcgatgctgaatcagatcctttgctggagctggcacacggaggaagtcctggagggagggtagacaccgtggaggtaagggcttgggacctgtgtcaggagagctaggtccatctccctcccagtctctcactaggcttatgatctttagcagtgaaaataatctctctaaggtggggaaaggaccccggtccctgctgtgctcaataaattatgaggatcaaaataaattatcagtgaatgtgaatgggaaaactaagaaattgttaaaattctcgaatacattacattttcatccacagaaaagtgtaggctagggatcatgggggaatagttagtaatgacagggatagttgaacttaaaaaaaaagtttgtgaggctgacaaagatgaaacggacacatttcctgatcttggagggttcatagggtagaagatggtagatgacagctgggtgtggtggcactcgcctgtagtcccagctactcaagaggctgtggtgggaggattgcttgag

SEQ ID NO: 40525 - DNA, 1102 bp, Homo Sapiens
  misc_feature (735)..(735): n is a, c, g, or t
  misc_feature (827)..(827): n is a, c, g, or t
  misc_feature (837)..(837): n is a, c, g, or t
  misc_feature (844)..(844): n is a, c, g, or t
cttaaaaccacgtggttcgatggctgccgcggctacgctgaggctctccgctcagcagctgcttcttggcacaatcctgaactgggcagaacgtccttcccaaactcgcggaagacaaatgactcctgtgacaccctgagcttacgtttctttacaaacgatgcttctctgacactctttctgtagaatttctctccaatatgctgcttctggtgctgatgaaggtatgcagtgtcatccaagttttttccacatgctccactcctgttcagcttctgcttgtgatgagtttcctggtggtcagcaaagtgaaaaacatcctccaagatgaggccacacatttcacaggggtgagccttcttaggagaaacacctgccctaggagtcctgctctgagactctctttgtacagaaattctctgcttacaaggtgcctcctcatcttttgatccacaccaacaacctgaaagcaagaaaatgctggtcaagtgcaaagtacctccggcgggaaggcacagcccacccacaagtacgtctcacaaattgaggaattaatctatagaaatatttgcaggaacacaatgttggcttcaagttgaagatggggctgctggctgggcatggtggctcacacctgtaatcccagcactttgggaggctgaggcgggtggatcacctgaggtcagaagttcaagaccagcatgaacaacatgggtgaaaccccatctctactanaaatacaaaattagcctggatgtgggtgtggacacctgtatcccagctactccggaagctaaagcaggaagatcatttgaccccaaaagcanaggtttgtantgagcantgattaccccactgcaccccagcctggaacacagagtggagactcatcccccaaaaaaaaaaaaagggcggccggctctaaattatccctccagggggcccaaagctaacccgaaacccaccttttcttgggacaaagggggcccccctaaaaggggggccggtatataaaacttagggccctgggccggcgcctttttacaaacccccccggactggggaaaaaactcgctttcttcttgggggaaactttttggga

SEQ ID NO: 40526 - DNA, 709 bp, Homo Sapiens
  misc_feature (507)..(507): n is a, c, g, or t
  misc_feature (667)..(667): n is a, c, g, or t
aatatagtattttttagaaatttaaataccagtgtaaaaaaatcctttaatattcctagtctggagaaaacttcttcagattgattttactgtatgactggcattaactgctcataaccaagctaacttccagtaggaatattgtcagctttgctttactgatagctgagactctagtcctgtagaagcagtactcatacagtagacaggttcccctgatcttgcacatccaatcttataattttgccgtggaacaggaagctactgcttatctgtgtgttccaatgcctatcactgtctgtcatgtgtaaggaggcgatgatctccttacagataacgtgaaaacaaaagccacattgggctagacaacaacattcacacattctgaattagagcaggctgatttaataaaatgttactgtaatggtgacattttaatttacagagcccttttcaagtattcttgaattatttccataacaaccctatgaggcaggttagggttgnttttgttatttccatgtaatataccaagaccagatggagatgcagtgactggtataagggttacacagatagtaagtagcagaagaaattgaatctaggttttctgactctaggctccatgttctttctaatttactgccaaagctgctaaataagggcngattttaaggccatttggaatacttgcacatgagcttacaag

SEQ ID NO: 40527 - DNA, 663 bp, Homo Sapiens
caactttttaaatgttcatccacttcaaatcccttcctcttccctgtaaggtttattacactgtactcacaattggtgtgactcaccagcagaaggaaactggatatgactgggagtgtgcttagtttcctcattcaacagagatttatggagcacttgctatatggaaagcactggccttgggtctggaaggatacaaaaaaatgaagatcagtttcctgctttacattctagttgagataagaatggaacataaataactactgtagaataaatgtgtcttattcatggtgagtgccagtaaaaccttgaacttccaagagctaggcctcctatgttccagatgctgtgtcacacagtttacaatgttcccacttaaccttcgcaacaacctctaaagaagataattgccattcccattttacagctaataaaacaggaactgagaaattacaagtggaaggaaataagatctgtatacaagtacagatgtgaagagtggcttccaggtcttgttcttctctgtcaattcattgatgttatctgtcttcaggatttcattttacgcctatatcagaaataaataaccttgaggaaaccatggatgggtttcaaaaggtctatgaaagaaaaaaaaaaaaggggggggggctttatttaatg

SEQ ID NO: 40528 - DNA, 1000 bp, Homo Sapiens
  misc_feature (666)..(666): n is a, c, g, or t
gtggatttagagcaagcaggcactagttctgtgaagtcgcactgtgattaagaggtggtctgtaccatccatgtggggtgtaagggtcagtggtacaagtcaaattggttatatctagctgtcccacagggaggtggtcaccagaatgcagttgtgtaataaatatatgtgagttgaccacatggaggaactgggagaaagtggagaactagaaactctgttgagtttgaataaagttttcttccgttatgagaaagttaaatccttaaagaaaatgcatgctaaggtaacatataattataagaactcagtataagaggcaactctagaattaattaaattattgtatatggagatgacaggtagtggattgattattctcctgtagataaccatttgtccctgctttttctgttaagtgttcaccacttgtatcattggctggcaatacctggtttgtcatagtttcacattaccttaaacagatgcccagactgggcacagtggctcatgcctttgatcctagcactttgggaggctgaggcgggtggaacacctgagatcaggagtcgggatcagcctgaccggtatggggaaaccctgtttctactaaaaatacaaaattagcaggcgtggtggtacatggctgtaatcccagctaatcangaagctgaaacaggagaatcacgaagaaacctgggggggttggaaggttgtattgaaggcaaagaatcaaaccattggtctcaaggctggtgacaggaatggttccctggtttcaaacagcacgtacggagatattatataatacataatcgtaatataagagtcataaaacacacaaaggagggcggtaataaacacgcgggaccactgccacttcaagagccaatgaaatataaaagcggggcaccgtgtgaacatcgtcgttgagactcttgtgagccacccaacacgtatattattcgctcgttaatcaataacagctgcaccaggagcc

SEQ ID NO: 40529 - DNA, 365 bp, Homo Sapiens
  misc_feature (238)..(238): n is a, c, g, or t
  misc_feature (274)..(274): n is a, c, g, or t
aacgggtgatgcggttggtataaggtaaaaaggcgtgaagaggaatatttcgttgataatgaaagtgagcagctagggaagaaaactcccagaggaagagggaggcaaggaaatcaagaacacacttaaagtttgtcagaagaaggaactttatttccttaaacattcaagaaagatgatgtcatttcagttattgattgtctaacttcagtaggtttaagagttacttgagggctgngcacagtggctcaggcctgtaatcccagcactttgngaggctgaggtgggcggatcacctgaggtcaggagtgcaagaccagcctggccaacatggtgaaaccttttctaaatatacaaaattttct

SEQ ID NO: 40530 - DNA, 379 bp, Homo Sapiens
ggtcgaccacgagcatcactagacacatgagtagcattgcactcggcaacaggaattttttcaggcccattattataatcttatgggaccgcatcctatatgcagtttgtcattgaccaaaatgtccttatgcgatgcatgactatatttgcaaaggactagtatctagaatacatttaaaagtcttaaaatagtaacaaaacaaagaatgcaattagaacatgagcaaaagatacaaagcaacatttcactggagaagatatacagattgcaaataagcacatgaaaagatgtttgataccattagggaaacgcttctttaaaccaggagatatcaccacgtgttagaatcaacaaaataaggccaggcatggtggct

SEQ ID NO: 40531 - DNA, 409 bp, Homo Sapiens
cttctaattacagtgtaagccgcatcccacaagttttgatagtcacagaactgtatcgtcacactattttttaatttcagtaagttcttcactgatccctgtgtaatttagaaatgtttcataatttccctacattggaggggaagatagttttgtttttattattaatttctagctgtattgagctcttgtcagagaatatggtttattttagtcgtttgaaatttaagatctgcttaatggcaaaatgtatggtcagtttttgtaaatgttgccagtaagcttgcgaatcatatgtactctagttttgaaatccattgctcagtggatgttcattaggccaatttgtataatcatgttgtacaaatctattctgttcttaactgttttttgttttaaaggtgtgggg

SEQ ID NO: 40532 - DNA, 729 bp, Homo Sapiens
ctcgcagctccggcccggcggccgatggcgcggagcgtgcgcgtgctggtggacatggacggcgtctggccgacttcgaggccggcctcctgcggggcttccgccgccgcttccctgaggagccgcacgtgccgctggagcaacgccgcggcttcctggcccgcgagcagtaccgcgccctgcggcccgacctggcggataaagtggccagtgtgtacgaagccccgggctttttcctggacctggagcccatcccgggagccttggacgctgtgcgggagatgaacgacctaccggagtaaggagagaggggggcgggcggagtcctgggcgggctcctggctcccggcggtaacggcgtccttctccgcagcacgcaggtcttcatctgcaccagccccctgctgaagtaccaccactgtgtgggtgagaaggtgtggctgccccgcccctactccgcacgtggagctgcctaaatcctgattttaaaaagaaaccaccagaaacccagaagtaccgctgggtggagcagcacctggggccccagttcgtacgaacgaattatcctgacaagggacaagacggtggtcttgggggacctgctcattgatgacaaggacacagttcgaggccaggaggagaccccaagctgggagcaccatcttgttcacctgctgccacaaatcggcacctggtcctgcccccgacaaggagacggctgctctcctg

SEQ ID NO: 40533 - DNA, 717 bp, Homo Sapiens
ggcactgttgtgatttctcttgggagtagaggtgccaggaaggacactggagattcccagaatttaaggctgccacttatttacatgaaatcaagtattttgactctactctggatcacaaaggcagtttgctggagtttaagaaccaacccattaacattaggaagtaagcagtgttgagatcagaataacttaggataggctttgaaattgcttttctggtacaaggttatggttgaaataggaaaacagcacagagaggacagtccatcacggtgagacttgggaaaggcacacagagagctagtcgtctctgttctggcctcgaacagtaatgattatggtctgatgattgccctgtgtatacataactgctctcagagcatttgaatcacctttcttcaaaaggaacccgggccgggcacagtggctcacgcctgtaatcccaacactttgagaggccgaggcgggcggatcacttgaggtcaggagttcaagaccagcctggccaacatggtgaaatcctgtctctattaaaaatacaaaaactagctgggcattggaggcaggggcctgtaatcccagctactcgggaggctgaggcaggagaaatcgctggaacccaggaggcggaggttggcagtgagctgagatcacgccactgtactccaagcctgagcaacaaagccagattcgtctcacaaaaaaaaaaacaaa

SEQ ID NO: 40534 - DNA, 510 bp, Homo Sapiens
cgaagtataacctttgagaatggccttttcactccattcccttgagatacatccaggtagttgcatgtatcaatagttaattcctttttattgctacacagtactccatagtatgaatatactatgtacatagcatatatatttatagtttaaccattcaccttgaacattttggttgtttccagtttgggggcattaacaataaagctgatctgaacaatcaggtataatagtccccctttatctttgaagattatatcccaagactcccagtgagtgtctgaaaccatggatagtatatacactatccatatgtgctatatgtactatatgtcctctatatattttttctatacatacatacctttgatgtttaattaagcactgcaagaaactgacagcaataaatagaacaattatactgtaattaaatgaatgtggcctcaaaatgtactgttctcacatattttcagactgtgggtaactgaaactgcataaagcaaacctggg

SEQ ID NO: 40535 - DNA, 440 bp, Homo Sapiens
tctacagcataatgtataagaatttcgttgggtcattaataaataatgcaattattttatcacattttcaatatcctgaagggcattagggttcaaaccgagccaatcctgactctgattatactatctgccaaaacctttgttcctttcacagctaagggtttttataaaaatggattcagggtttgctgaaataaattttttttaaaaatttcagtccataaaccaaacaaaaatatctgtcctggaatgtgatcaggaacaaaccagaaaactgtgaacatctgatcttgatactggcttatgttgtctcttgttaagcttttgcttctttgcattattcatgaccattcaattaatttttgtatagccatacaggtaggattattaccaagtgcctaccgtgtaccaggaatagttctaagccttgagaatacagc

SEQ ID NO: 40536 - DNA, 400 bp, Homo Sapiens
ggttctcggttgtcatctcctaagccaaagactctcccagccaataggtctagcccatcgggtgctagttctccacgctcctcctcaccacatgataaaaatctacctcaaaaaagtactgctcctgttaagacaaagcttgatcctcctcgggaacgttctaaatcagactcttacacacttgatccagataccctccgcaagaagaaaatgcccctcacagaacctttgagaggacggtcaacgtcaccaaaaccaaaatcagtaccaaaggattctacagattcccctggatctgaaaatagagctccctctccccatgtggtacaggraaacctccacagtgaggtggtcgaagtctgcacctcaagtactttaaaaacaaatagtctaacagaca

SEQ ID NO: 40537 - DNA, 325 bp, Homo Sapiens
taatttttgtatttttagtagagatggggttttgccatgttagccaggctggtcttgaactcctgacctcagatgatccggcttcctccgccttctcaaagtgctgggattacaggcatgagccatcgcacccagcctatggtacacctttactgaggaaacaattcaggaacatcactcttagtaaggcaattgttgattataagtcaaaaaaacaccatcatgtacaaattcaggggattttgtataccttgtttttttggttacaaatatgcaaaattaaagatgtttgctaatacttgtttccaatttttaaacttttcaa

SEQ ID NO: 40538 - DNA, 856 bp, Homo Sapiens
  misc_feature (752)..(752): n is a, c, g, or t
catgatttagtcaagcaaaaagaagaacggagaaggtctctgaaggagaaaagcaaagaagctcttttggcctcacaaaagccatttaaatttatagcaagggaggaacagaagcgagcagcccgggaaaagcagctgagagactttcttaagtataaaaagaaaacaaatcgatttaaagccagacccattcctcgatctacttatggttcaactaccaatgacaagttaaaagaagaagagctctatcgaaaccttaggacacagctgagagcccaggagcatttacagaactcatctcctctgccttgtaggtcagcttgcggatgcaggaaccccaggtgtcctgaacaggctgtaaagttgaagtgtaaacacaaggttaggtgcccaactcctgattttgaggaccttcctgagagataccagaaacacctctcagaacacaagtctccaaaactcttaacagtgtgtaaaccatttgatcttcatgcatctccacatgcatctattaaaagagaaaaaattttggcagacatcgaagcagatgaagaaaatttaaaagaaacacgttggccttatttgtctccaaggcgtaagtcaccagtaagatgtgcaggtgtaaaccctgtgccttgtaactgcaaccctcccgtgcccacggtatcttccagaggacgagaacaagccgtaaggagatcacttgaggaaaagaaaatgttggaagaagagagaaatcggatcctaactanacagaagcaaagaatgagagaattgcagaaactccctgacacccgggctaaggcttatgactcacatcaaagtttagctcaaatatctaaatccagagtaaaat

SEQ ID NO: 40539 - DNA, 756 bp, Homo Sapiens
cacctgcgtgtgctcacagagcatatggatttttccctgcggtgccttcacttgtggctggaagagccttctctgtgatcctgtgtcctgggtgctctgttggcctccttcttgccaccgaggaagacacggaggctagagagggctcactgaacagtgaaatgattggaacctaaggagcttcagcagaaggtgtcatgatggggctaggctctcccgagggctgtgtggcctcagcgtcttgttgggcagatcctgctccctgacacagcggggctaagagccagcctgtgtcacacacctgtgaattaacatgcctggctgaccctcactggagaagggctacacgtttgtgacgaaagcagaagaggtgtttattgtagaccaaatccaagctgtcattttacttttattagaaattatttgggatttggctcatgcctataatcccagcacttgggaggctgaggtgggagaatcacctgagctcagtcgtttgagactgcctggcacatggtgagacctcatcttctactcaaatttaaaaaattggccgggcgcagtggcgtgcgcctgtactcccagctactcaggaggctcagttgggaggatcgcttgagcccaggaggtggaggctgcagtgagcccagatatgctcatgaagcactgtgggtttctcctgcagtgcaccaccgactccagcctgggtgaccggagagagaccccatctcaacaaaaataaaaaaaaacaaaggg

SEQ ID NO: 40540 - DNA, 849 bp, Homo Sapiens
  misc_feature (580)..(580): n is a, c, g, or t
tttactctttttgctcacgaagcgcgccattgtgttggtacccgggaattcggccattatggccgggaatgacaagagatagaacagagacattttctacctcaacattgggaggcagaaaattcacctttttatccaagaataccaaaccagaagctgaaatatctggatctgatagagaggatagtctattcccccttggactttggactggatgcaataatggtatgagaccctggggtaggaatgagtgtcttctatgtgtgggaaagagaggaaagcagatatttggcgacctaaaaagaaggccatggcagaacctcattagttgttcaacaatcctattttccttttctcctggacacacagctatgcattttccagccatccttgtggttagatgcccagtgacagttctgagaatggaatatggacagatgtgataggcacttctgggcctgggccacaaaaaccttccacatgatgtccagtgcctcttttaccccactgacagttttttattgtcatccagagagaccttggatggtttagaagccatgtgtagaagatggcaaccttnccttagcatggatccttgaatgactgtggagtgcaatgccttctaccaattacacctactggggtttgagaatcaaaattcattttgattaagctactgatttgggggggttatcttcttaagcacccacattataccactcatgcagatgggagagttaatgggacacatatggacagactggtgaaaccaggactttaggtgatagaggaattctgatataatttccttttccgcaaaaggtttttcaatggtggatattagatctt

SEQ ID NO: 40541 - DNA, 689 bp, Homo Sapiens
gtgtgagccgctgcaccctgccccagtacaatcttttttgaactcaaatttttgctgacatctgagtgcacacaccacagtgtaaattatgccttatcagaatctaaatgaaaatagcgaacatttaaaagctatcaccattgtagtagaatcatccttcttttttgaaatttgaagcatcccaggcttaaaatcttgtgtttcagaaagacagtttataccatgactgcttaattatccccccaaagaccttctgattgaagtcatgtacagttcagtggcctaaattctctgcctttttaacttgctttgcaagcctactctgaaaataagttatttagtcaagttattctcaaagatgtcccagttgcctagaaaggatcaaatggaacatttgacacacatactcaaaaaaatgtaactgactataaacactttaacctaatcatctgtatcaaactttctaaaaatcaaatctcaggattgttccactttagagattctatgtaaagtttatataactatacttgtcaaatagcacctatctatgcatttaaaaatgcattaatatctaacataaaattgttaatttatacacacacatacacttatacatagagagagattttcggtatgttgcaagtattttttccgattaaatttattttccaaagaaaaaaaaaaaaaaa

SEQ ID NO: 40542 - DNA, 606 bp, Homo Sapiens
aaacccttgacatgacataccttatcttgaagaaatgaatgaccagacttgtcccgagagactaagaaggtactttccaagtagggtaagtcatagaatttaaagctggaaaggccctaagaatcacctaggctagacatttttagttcagggttgttgccctttgaagttcatggatggatttcaaggaacttgtgaatcacttgacattgtgtgtatcatttagcatgtctttctgaggggaattgggttcctcgttctcattctcaaaaaggcccatcatctctaagaggttaaggcctgctgatctagtgtggtcccagactgaggtagatggtttgctcaaggttacacagccagttaggggcagagatgaggattgacacccagtgacttccagtttctttctcatttcactgtactcaactaaattacatgaacaaaggcacaggcaggattaagctaccattttatattagatggtataaaaacaatcaactagcctggggtcaattgaattaagtctgtcagtctgtttctacaaaagttgcagaaggatgggcttcagtttgtctcttcaaagtgaactaatattttgatttttct

SEQ ID NO: 40543 - DNA, 563 bp, Homo Sapiens
  misc_feature (492)..(492): n is a, c, g, or t
  misc_feature (548)..(548): n is a, c, g, or t
  misc_feature (563)..(563): n is a, c, g, or t
tcactgtactcaactaaattacatgaacaaaggcacaggcaggattaagctaccattttatattagatggtataaaaacaatcaactagcctggggtcaattgaattaagtctgtcagtctgtttctacaaaagttgcagaaggatgggcttcagtttgtctcttcaaagtgaactaatattttgatttttctggttgaaatatgctacaactcaccgaagtagctttctcagttgaaggtaagctccttaaaaaatgttcctattcttgggccgggtgtggtggcccccgcctgtaatcccagcactttggggaggccattggagggcagatagcttggagtccaggattttggagaacagcctgagcaacaatggcaaaaccccgtctctacaaaaaatgggaaaaaaactagccaggcatggtgatgcacatctgtgttcccagctactcgggaggctgaaggtgggaagatctttttgagtccgggangcagaaggttgcagttgagctgagatcatgccactgcacttctggcccgtggtganaaagtgagaccttan

SEQ ID NO: 40544 - DNA, 389 bp, Homo Sapiens
ttagtgaagtagagatagtgaaagcctgccatactcctcaccaatcgtagtcatgtcatcattaattatatgcctcagtgaaaggattgagaaaaagagaacaaaagagcatcagataactaagaagaatccccaaccctgtacctcattggttgggtaacacaaatgccagtggaacctggacagtaatgatgatgtgactgttccacgtggctcagcttggccaatttcctcagctcctggtgttctgtggtcatgtccaagggactaaagcagcagtaaagctccatagtcagatgtctttgatttacccatttttaggtaagcaagtatcttcagctctggcctcattctatttacttataaaacaaaatacagtaaggaagcaa

SEQ ID NO: 40545 - DNA, 692 bp, Homo Sapiens
tcattcattacaataaaacttatggccggacacggtggttcacgcctgtaatcccagcacttgggagtctgaggcaggtggatcacctgaggtcgtgggttcgagaccagcctaaccaacgtggagaagccccgcctctgctggaaatgcaagattagacgggcatggtggcacgtgcctgtaatcccagctacttgggaggctggggcaggagaactgcttgaacccgggaagcagaggttgcactccagcctgggcaacaagagcgagactccgtctcaaaaaaatacaaaacttactgagagcttaccatgtatcaggcactgtgattgatgctaccatacaacatagtgcttataattaacaatactgtaatatatacttaaaatatatttttattaataataaatacaacagtgcttttaattaacaatactgtaatatatacttaaaatatatttttattaatacttaatgaaaatattttttaagtatatgttacagataaatcttacatgtaagtttttaaatcacaaaacaatagaggctgagaggaaattttgggcatgatatgtttatggcattgtgatgggttcatgggtggatacttatctccaaactcctcaagttgtatactttagatatgtacagcttttttgtatgtcaatcatacctcaataaagtgcttttta

SEQ ID NO: 40546 - DNA, 656 bp, Homo Sapiens
tgagaaccgtctctataaaaaaaaaaaaaattgataaaaatagctgggattacagacgtgcaccaccatgcccggctaattctgtatttttagtagagacggggtttctctatgtggtcaggctggtcttgaactcctgacctcaggcgatccgcccgcttcggcctcccaaagtgctgggattataggtgtgaaccactgcacctggccaggacctatttttattgtagactttactgaatatacataattctgagtgcagatatgaaagctagtactattcctgcaaaaaatgccaaagccaagatgcgatgagtgaaatttcactacagatttgttgatggaagggcctaagtttttcctcgttcactatcatgttttgcctagtgatggtcctgcttttgtatggcaaagtcacatatagcaagtattcttttctacactgttcgttgtgtaaggaattccctttgcaaagaccatgtatcccaattcttgcctagattatgagcaattttgaattagtgaaagttttattttcaaatagtaaatatagccagttgccctgcctcaccttattgctgatcatgcaaattatggtgaaaatcttagagcttaaaaaatatatatgggctcagttgtagaaaaaaaaaaaaaaa

SEQ ID NO: 40547 - DNA, 544 bp, Homo Sapiens
ttccatttgttattcttgttttgcattatgttacttttgagttgagatcattcatcttccaaattgctgatttaattaaattgcttgatgtccccagttgagtatagtgtagtatgttctgagtatctcaagtatggtttcatctgaggagattagagaaaataatggctcaaccatgtgaatttattttggttgcctgttatctgggtacctgatctatttatctctgggctatgctgtgacttctaatttaagcttagctccagtctataatctgtttaaaataaagaatgccctaacactatggtgttaagatgaatgaatgaacagaaactcaaaagatcggccaggcgcagtggctcacgcctgtaatcccagcactttgggaggctgaggcaggtgatcacctgaggtcaggagttcgagatcagcctggccaacatagtgaaaccccatctctactaaaaatacaaaattagcctggcatggtggcggacacctgtaatcccagctacccaggaggctgaggcaggagaatcacttg

SEQ ID NO: 40548 - DNA, 1134 bp, Homo Sapiens
  misc_feature (8)..(8): n is a, c, g, or t
  misc_feature (18)..(18): n is a, c, g, or t
  misc_feature (44)..(44): n is a, c, g, or t
  misc_feature (345)..(345): n is a, c, g, or t
cccgcccncccacccccncagccccatacacttattagtagaanaaagatggtaccggtccgggattctccggatccttagggtcatttttagggtttacaactttctcaatagggtttcaagattttgaaaagtgtcttccaattctgatctccgtagatcctgttatgggaattaacctttatggaaggggattcttgttcttaaagatgaaattccctactttctttcctggagggaatcagtaggggcagagggaagaggagatggcgattctgacctgtgtgtctcaagtcacctaacacctatggggtggcatgaaacttgagctttaaaacacaccangggccaggcacagtggctcatgctggtaatcccagcactttgggagaccgaggtgggtggatcacctgaagtccagagttccaagacaggcctgcccaactgggcaaaaaccccgtcctcctaccaaaaaatacaaaatatcatctggggggtgagtgcccggtcatcctggttttaccctatccaccttgaaaacggcccaaggccaaaaataatctcccttacataccctcggaacagacaaaaatctcctctcatttctcactacaatacacggctcatttatattaatatccctaagaatgtaacgatagttgctttactatttcctcgtattaagatttcaactttgtaaaaactcctcatcagaatgacaaatgggatgtctagattttccatattatacaatataaaacagaatacacaaaacacatctaaaatatagcgcagcaagagaacagaatacacgcaacacgcactcatgcgtgtgatcaatcgcgcttgtatatcatatgaacatttgtacactacaacccgaaactgttattttccgtgtttgtacgtgacgattatctctttacgagatcactttattcttatagatttagaccctctctgctccaacatagacaagggtcgctcgccactcgcagttgtcacgacacgagcaaaccacaagttacattttgttgctctacatggtatcttgatactcaattcttaatcgcgtataattatgatatatttactcgttatcagtatctctcaccgcactttgcacatgcgccg

SEQ ID NO: 40549 - DNA, 692 bp, Homo Sapiens
agcgggctcacacaaggatcagggcgaggaccaggtagctgccggtggtcccttggccatttggggctgagggagaggtggcctggtagcctctcaggcccagctgcacctgctgcctgaacacgtgcctctcagctgcccaggaagggggcagggctccccagcagctgcagctccaccacgcagccgccctgggcaaagcatcaagtctagctcctcccagcagtctcaccccagcccacgccatgggcgactatgcatcctggtggtgtctgcttcccaccctcagttccgtagtgctgaggggcccgcgttctctgtgcacagtcctgggaggcccatggcttctgcccggcaagtcggtcagatgctggtttgattactatgtctaagggcacgggtgagcattcagggtgctttggtggcttcacccacttagcaccttgttaagacacgggagccccttatggacactgttgagcgtagaggattcctgtcttggggataagccctttgtttcatcaaaatctactccctgggtctgacttagttctgggggcatttaatgcttcggtaaagttaactatcctcttactccctggcaaaactgttcattactcttacctcaaatgtacactttgatttgctgaggctttttaaaaacaggccgggcacggtggcttacgcctgta

SEQ ID NO: 40550 - DNA, 649 bp, Homo Sapiens
  misc_feature (575)..(575): n is a, c, g, or t
  misc_feature (645)..(645): n is a, c, g, or t
cagagtatctgagctatgtttgttaagtctgggtggggaagaagtggggatgtttatttacttagtgttttgaatctgttaactcatttcttaaacctttacatcactttatcccacaaattgtcattataccatcaacttctccctccacaagtcactggactatttgagaatatccctcaagtcttcatgcgtgcatgcctcagccccaagattagagacagctattccactaaggctgtgttttcagactcttttaacagtatctcttagtaagaaatccattttcttatgtgtgcatgtatgcatatagatccatgaagcaggcgtttcacagtacaatccttttggtttgatgcatgttgatacttgcctctctattctattttattgccaatggtgactaaattgattttacaactcactaacagatcttgacctacagtttgaaaaacagagtactgaagagtcttgtttcctttatttagaacagtgcaaggatgagtatctgggtagagttgtgcgttgtacataacctttgatagtcatatagttgaaccaaaaacaatttctgnagtgacattgaaaaacattttgacttgatttatcctgacagcatacataatttttggctggctaatacantatc

SEQ ID NO: 40551 - DNA, 733 bp, Homo Sapiens
caaggtggctggccggcaggccaatggcggccaacgccacttccggccgccctccgagcatcgctcttcggcaacccgaagccacaggatggaggagggggatcccagcaaagatcccagtttctgacctgcagcatagtccctctctctgaagaacttcctgtaatattttttgctaggaagagtttgaagtttgaaatcccagaatgaggaaattcatccagcttggagacttccaatcccttcattgtgcagaaggttgctaatgctctcaggagaagcccttcaccaagagaatacttccacatagagtcctctccattgagactaaggaaacatgctatgtcatgtagccacagcagcctttgcagctgttgaaggcagcaagacttgcatggcaatcagaagacacagaaccaagactcatatccagttataagatggcagatgggacacacactcatcaggcttagtgagcagccaatccagagggaaccatactcagccctaggggctgggcgcggtggctctcgcctgtaatcccagcactttgggaggccaaggcggatggatcacctgaggtcacgagttcaagaccagcctgaccaacatggagaaatcccatctctactaaaaatacaaaattagctgggcatggtggtgcatgcctgtagtcccagttgctcgggaggctgaggcaggagaatcactcgagcccgagaggcggaggttg

SEQ ID NO: 40552 - DNA, 601 bp, Homo Sapiens
  misc_feature (188)..(188): n is a, c, g, or t
atgtaaaataataagttagattaatttggacttatgtagatagacttccaaaacattgtctagtaagagaagaaagccaaagtatgccatgtatctggaaaccctagtacataaagtaatactatatatttttgtgggtacatatttatgaatataaagtatagtatgaatataaagtatagtaaaanttctgaaagaacttacatgccagactagttgttttgggagtggggacattaaagggttcaaagggattttatccttagtcacagaattcttttaaacaaggaatacatatattatttgtacagttatttaaaaacaaaactaaagaagagaaaatatattctcgtaaattatctgaacttaaaagatggaagcctggagatagatttgtgataagccattgctgagtacatcctagagttcttgataatttcagttggttaaattacaatagtttgctatttcctccctcacattttacgttctacagtatctagctgcttgggttttcctgtataccatggggcttctgtcatctgggctttactcagtggcatattccctctacctaaaactctcctcccctctccacctt

SEQ ID NO: 40553 - DNA, 338 bp, Homo Sapiens
ggagagaagctaacggtgctcatcgtgtggcacgcaggtgcgttgttttctctccactaaggctgctgggtggggccaaaatagtccaggcagccaagtgcagaggcgttgggggcggcaaagatgcaaaggatccccactgtggctgcaccccgaggaggagtccgtggcaggaggcccacacccaggacccggcgccaacagtgaggagacgaacctggaagacatcccgctgtccagacaccgcgagggaggcgagtggtgctcgcagcctgggacttaggaacacagggaaacagcttccacatgtccatttgctgaataaatatttcttgcag

SEQ ID NO: 40554 - DNA, 369 bp, Homo Sapiens
  misc_feature (183)..(183): n is a, c, g, or t
ccatagcctcattgggctcccagacgtgctggaaaggttgagcccagagtggccgaggctggaccctgtggcaccaagtggggtcggctgaccgtgtggcagggatcgttgcactggactcttggcgtgtgggaagggatgctttctctttgtcgcccactcttcattcctgtttctcctcangttcccctgtgcagatgggctgtgaaattaaattggagtcttgataagaacattttaatttgacttaatattttaaagattgaatccagatcacttgttgctgtcttaatggaatggttttctacaggagctgtaacatacttaaaaatatgaatgtattatgtaaatatggcttctttacataaa

SEQ ID NO: 40555 - DNA, 504 bp, Homo Sapiens
  misc_feature (489)..(489): n is a, c, g, or t
ccgcctactactactactactgtgcggctgcgagaagacgacagaagggttgactggggctgaaggatctgcttccaagttcactgtgagctttttccttcctctttcatcagcaagctgttttgtactttccattgataaaatgcattcgcattatacccattatatataatatatgtgttcctattcgtaaaccgtgatacagttttttgtaaacagtaaattttgcttgttgaggtcgctttaaatttggatcatcatgtaaatacttcaagtaatcttttgatttttcactttgctcacgacactttattagcaaactaatccttttaaaatctgaactcatcatgtaaaatgtagagttagtaggttcggtgtggtagtttctgcctgtagtcccagcactttgggaggccaaagtggaaggatcacttgaggccaggagctgaagaccagcccgggcaacacaatgagaccccatctctacanaacactttaaaaaca

SEQ ID NO: 40556 - DNA, 636 bp, Homo Sapiens
atggacaagttttggtggcacgcagcctggggactctgcctcgtgccgctgagcctggcgcagatcgatttgaatataacctgccgctttgcaggtgtattccacgtggagaaaaatggtcgctacagcatctctcggacggaggccgctgacctctgcaaggctttcaatagcaccttgcccacaatggcccagatggagaaagctctgagcatcggatttgagacctgcaggtatgggttcatagaagggcatgtggtgattccccggatccaccccaactccatctgtgcagcaaacaacacaggggtgtacatcctcacatccaacacctcccagtatgacacatattgcttcaatgcttcagctccacctgaagaagattgtacatcagtcacagacctgcccaatgcctttgatggaccaattaccataactattgttaaccgtgatggcacccgctatgtccagaaaggagaatacagaacgaatcctgaagacatctaccccagcaaccctactgatgatgacgtgagcagcggctcctccagtgaaaggagcagcacttcaggaggttacatcttttacaccttttctactgtacaccccatcccagacgatgacagtccctggatc

SEQ ID NO: 40557 - DNA, 787 bp, Homo Sapiens
gttgggactgtctgggtatcggaaagcaagcctacgttgctcactattacgtataatccttttcttttcaagatgcctgaggaagtgcaccatggagaggaggaggtggagacttttgcctttcaggcagaaattgcccaactcatgtccctcatcatcaataccttctattccaacaaggagattttccttcgggagttgatctctaatgcttctgatgccttggacaagattcgctatgagagcctgacagacccttcgaagttggacagtggtaaagagctgaaaattgacatcatccccaaccctcaggaacgtaccctgactttggtagacacaggcattggcatgaccaaagctgatctcataaataatttgggaaccattgccaagtctggtactaaagcattcatggaggctcttcaggctggtgcagacatctccatgattgggcagtttggtgttggcttttattctgcctacttggtggcagagaaagtggttgtgatcacaaagcacaacgatgatgaacagtatgcttgggagtcttctgctggaggttccttcactgtgcgtgctgaccatggtgagcccattggcaggggtaccaaagtgatcctccatcttaaagaagatcagacagagtacctagaagagaggcgggtcaaagaagtagtgaagaagcattctcagttcataggctatcccatcaccctttatttggagaaggaacgagagaaggaaattagtgatgatgaggcagaggaagagaaaggtgagaaagaag

SEQ ID NO: 40558 - DNA, 1139 bp, Homo Sapiens
ggatcgtgaaagcagcttttgggggaaactgaggcagtggggaagacagagcagaatgagccctcaccctggctgggggtccagcacaggctgtatctgcagagggtcccagaggaacgctggagccaagagaagccctgggaaggaggggtggggaacgacatgcatgtgagggatggcacactgatgtgtttatgcacctgtacacaggagcgcatggccatggctttggaaaggagaatggaaaaatagaagaaggtcggccgggcttggtggcttatgcctgtaaccccagcactttgggaggccgaggtgggcggatcacctgaggtcaggagttcgggaccagcctggcaaacaccccatctctactaagcgaaaacccatctctactaaaattacaaaaattagctgggcatgattgcgcatgcctgtaatcccagctactttggaggctgaggtggggagaattgcttgaacctgggaggtggaggttgcagtgagccaaggtcgcgacactgcactccagcctgggtgacagartgagactccatctcaacagaaggaaaaaaaaggaaaataggagaaggtggaaatgggtgaagagagaagtcccctcactagctgcatgagaaatctatcttactgtggttctccatgggcagcaggaccatttttcagaatcaagagggaggacagtgtgagaaggcgatgatccaaagaagacagagaggtcagccccacccgatccctcaaatggggctcttgggaggcacccccaggggcagcccatttctcaaagtccagaaaattagggtcccagaagggggcagcagcaggctgggagttaggagggagagcagggtgccggccctgccaccaagttgagagctggaggggaggtggggagagaacatcacagagcagccagccctggttcactcctggsagtttcttctcaagctccttccctaggagcatgggtggcacgtgcctgttggtctcagctacttggggragctkatgcgggaggatcscmaaacccaggagtttkaggstgsagtkaashatgagggkgcyytktgcycmwycctaaggaamaraadtraaagctgtttaaaaaaraaaaatmctttcct

SEQ ID NO: 40559 - DNA, 567 bp, Homo Sapiens
ctgctttgaccgccaagcccgccgcttggcctactatgcggacaaggaagagaccaagctcaaaggtgtcatctacttccaggccattgaggaagtctattatgaccacttacgctgtgccttcaagagccccaacccccgcctgaccttctgcgtcaaaacctacgaacgccttttctacatggtggctccgagccccgaagccatgcgcatttggatggacgtcatcgtgaccgccgctgacgaaaaccacgccccctgagtggccccgccctcttggggggaagtcccttcgaggctccgccggcgcggggcgcgggggcgttcctaggccccgcccactgccggaaaacttggacgcaccgctttggaactctcccgggaattccgcaggcgcggcagttcagctggcctgagctgctgcgttctgggttgcaggtgccttgcccccgacgggatcgccggcccctaaggccctgcccggggcaggaggaagattgcaggggcgggaagaaactatttattggtgctcctgtgataccgaattaaatacggaggaaaaaaaaa

SEQ ID NO: 40560 - DNA, 1100 bp, Homo Sapiens
tagtgcaatcaaagaattaaaactacaaacaaaccatgttacaatgctgctaagaaatccatacttgttatcagaggaggaagatgatgatgttgatggtgacgtcaatgttgagaaaaatgaaactgaaccaccaaaaggaaaaaagaaaaaacaaaagaataaacagctgcagaagcctcagaaaaataagcccttacttgtagatgttgatctcagcttgtcagcatatgccaatgccaaaaagtattatgatcacaagagatatgctgctaagaaaacacaaaagactgttgaagctgctgagaaggcattcaagtcagcagaaaagaaaacaaagcaaacattaaaagaagttcagactgttacctctattcaaaaagcaagaaaagtatattggtttgagaaatttctgtggttcattagctcagagaactatctaattataggtggacgagatcagcaacagaatgaaataattgtgaaaagatacttgacaccaggagacatttatgtacatgctgatcttcatggagctactagctgtgtaattaagaatccaacaggagaacccatccccccacggaccttgactgaagctggcacaatggcactttgctacagtgctgcttgggatgcacgagttatcactagtgcttggtgggtgtaccatcatcaggtatctaaaacagcaccaactggagaatatttgacaacaggaagcttcatgataagaggaaaaaagaattttcttcctccctcatatctaatgatggggtttagcttcctttttaaggtagatgagtcttgtgtttggagacatcaggttgaacgaaaagtcagagtacaggatgaagacctggagacactggcaagttgtacaagtgaacctcttatcagaagaaatggaacaattttaatggaggtgacccgagcagggatgaggataaagagaacatgaaaatcctgtggaagtagactcctgactccggttgaccaagaggatatccctcttcaacaatggcaaaaatgaacttaatgagggggtccttccgggagaaaactcttgagcacaaggggaaatttgagagggttaaaaa

SEQ ID NO: 40561 - DNA, 750 bp, Homo Sapiens
tgctttaaaaaaatagcaaaatgtgcaacttcttacaaaaattgttaacgttaggtacttctatatattttatatgaccataatgtccgtgtgtgttttgtaccttcagtcccttgttattgttccgtatattacctgtaagcagatactgtattttattttagcctatttgacagaacacatcactcagaaaaagtgaagtttcagagcaaacagtgaagaaatcagtgtgattgtagacaaaaagtcggttcacagaacggagcagcggggagaggaagggaaaagcttcatagtttggtgcttatcacatcaagagattggtaaatttctgaggaaagacaggctaatggggcactgaaatggaacaactcctttaaacgtgcagccttttgaatttttcctcaaaaccaagaagttgacctctgagctgtcaggtgaccactgtgtgcaaaggggatggattctcttgtcagtagacggtcttctccatgaagcgagagtaggaagtgtactggaatggccaagtgggactgcttcagctgaccaggttcttttaaaccgtagtcatgctttcccactaactcttaaatccttatgcttagaaaattgaggataaggctgggcacagtggctcaggcctgtaatcccagcactttgggagaccaaggcgggtggatcacaaggtcaggagatcgagaccatcctggctaacatgggcgaaaccccgtctctactacaaaaaaaaaa

SEQ ID NO: 40562 - DNA, 906 bp, Homo Sapiens
ttcgagaggacctgggtcaactggaatacaagtttcagtatgcatacttcaggatgggaattaagcatccagacattgtaaagagtgagtgcttgcagtattcactaaccaagattaagcagagacacatttacctggagcgcctgggacggtaccaaacccctgataagaaggggcagacacagatccctaacccattgctcaaggacattctcagagtttcagaagctgagtttttggccaggacagcctgtacttctgttgaggagtttcaagtttttaagaagctcctggctcgggaggaggaggagtctgagagcagcacatctgatgacaaaagggcaagtctggatgaggatgaggatgacgatgatgaggaggacaatgatgaggatgacaatgatgaggatgacgatgatgaggacgacgacgaggcggaggacaatgatgaggatgaggacgacgacgaggaggaatagctgtgatggaaggactagagcgaaagggcccagagatatcaaggaagcttttcattctcttaaagcttttgggtcctttacttgaatcttctcaagttattttttattctaaaactggtctcttgatgaaaaaaattataagtyacctgagaggcagayagatcaaaccaaacaggaaacaggaaatgcatgtttgatctgttgtcacgtgtctttggggagggccctgtcccatcctgaataagawacttatgttgagctattcaaatcaaggggactcaatatatcaacaattggttttatttttttctcttttgaatatgttggtgataattccgtgacagttggaagatggggttcattcttccggttcaggaatcactatgtatttccttcttgtgataaaaataaaattacgagaaggcaa

SEQ ID NO: 40563 - DNA, 611 bp, Homo Sapiens
gaagtttcatgctttcttggatctccttaaagatgctgggcttgggcagcttgccacaatggctgggatagatcagtcagattttcaattactaggtcatccccagatgacttctactgttagtaatccacctaaagaagaaaagaaggcgcttgaagatgaaaaaccagaaccgaagcagaatgccctagggcaaatgcaaaatatccagtttcagaaaattacaggtgatgctagaattcctttgcctctcgactcctttcctgtcccagtttctactccagagggcttaggaacttccagcaacaacctaggagtcccagctactgagcagcggcaggagtcttttgaaggattcattgctagaatgtgttctccttcaccagatgcgacttctggaactggaagtcaaagaaaagaagaggagttgtccagaaatagcagatcttcttcagagaaaaagaccaaaacagaatcccattgaaatgactggagaaatattaaaataaaaataatagcagagttggaaaaccagaaatttgaaccgggaaatttctgtaggattagaggcagatgatttaagtaccagttaatttaaggatggaaccact

SEQ ID NO: 40564 - DNA, 811 bp, Homo Sapiens
  misc_feature (754)..(762): n is a, c, g, or t
  misc_feature (764)..(765): n is a, c, g, or t
  misc_feature (769)..(771): n is a, c, g, or t
  misc_feature (773)..(773): n is a, c, g, or t
  misc_feature (775)..(780): n is a, c, g, or t
gactgtggcccagagctcagatcccaaaggacccataggagaggcaggggccactcattcactctgcaagagaccagcagaatcctgagggagatgctgacaaatcataaaaagaccaagaatagccgggagtggcggctcaagcctgtgatcccagtactttttgagaggtggagacaggaggatcatgtgagcccaacagttcgagaacaacctgggcaacatagtgagaccctgtttctacaaacatttcaaaaattagttgagcatggtggcatgtgcctagtcccagctcctcaggaggctgaggaaagaagattgcttgagcccaggaattagaggctgcaatgagctatgatcatgccactgcactccatcctggggagcagagctagactctgtctcacaaaaaaaaaatttgtgggtgccaagactcaagaccatgggagctggtcgggcacagtggctgacgtctgtagtctcagcactttgggaggccgaggcgggtggatcgcctgaggtcaggtgttcgggaccaacctggccaacatggcagaaccccgtttctgctgaaggcgcaaaaattggccaggcgtggtggttcatgtctgtggtcccagctgcttggaggctggggcgggagaatcgcttgaacccaggaggcatcggctgcagtgagtcaagatcgagacactgccctccagcctgggcaacagagcaagactctgtctcacacacacacacacacacaccnnnnnnnnnanncacnnnanannnnnncctccaaggcatctatggtcggggtggcgga

SEQ ID NO: 40565 - DNA, 964 bp, Homo Sapiens
cacatactaattttgaccttgaaagatgaattccttcaagaaaaataaaataatgcttaagataatgtgtacgaaattaaataaaggactttatttacatactacataaggtagcaaactgttgaatgagtttgaaggtatcacttattttttatgcatgtggttttagctttagaaagaaatgcgttatagaaacaagtaatagcaagaaaattgatgtatattttaatgatacattaaaattcccttttaatcataatagttaactctacttactgttttaacatacatttgatttaacaaattgttcagcataacacttctaattaagtttatcaagttgtactgtattagataatcagcagtgtatctggagtatgtttaaagagaacagttcgcaatacaaaaagttacatggagctttacatcttaactttctttgtcaatttaaatgcaatgtataaaaagtttattttgctattgtgaaaaactaaatgtaaggaaatcacctactttcatgcaggtgtataatcttgaaaaggaaaaatgcttccatgttgaaagccagattttctgtagtaaacttttaaatatcatttaccgaaatatgttctcaatatctctatattcttggaatgatactaagtcctcggtctagaccctaccttatattaacgctctcagagaccctgcaatgtccgcactggactagatactgcggcacctcattcacgggcccccatacaattcactgagttcccccccccaaggtttcatacatgggtgccacccgccctccccgcggacctacacgcccgacaacccaacacacacgtcgcggctcgccagccgcaccggctacccaagacacacgagccccagacgcgcgctcccccacacacccccggcccccccaccgtccgccgcccccaacacccgcccacccacaaccacaccgtacacg

SEQ ID NO: 40566 - DNA, 792 bp, Homo Sapiens
ttgtgcggctgcagcggctcttccctgggcggacgatggacagccagggcaggaaggtggtggtgtgcgacaacggcaccgggtttgtgaagtgtggatatgcaggctctaactttccagaacacatcttcccagctttggttggaagacctattatcagatcaaccaccaaagtgggaaacattgaaatcaaggatcttatggttggtgatgaggcaagtgaattacgatcaatgttagaagttaactaccctatggaaaatggcatagtacgaaattgggatgacatgaaacacctgtgggactacacatttggaccagagaaacttaatatagataccagaaattgtaaaatcttactcacagaacctcctatgaacccaaccaaaaacagagagaagattgtagaggtaatgtttgaaacttaccagttttccggtgtatatgtagccatccaggcagttctgactttgtacgctcaaggtttattgactggtgtagtggtagactctggagatggtgtgactcacatttgcccagtatatgaaggcttttctctccctcatcttaccaggagactggatattgctgggagggatataactagatatcttatcaagctacttctgttgcgaggatacgccttcaaccactctgctgattttgaaacggttcgcatgattaaagaaaaactgtgttacgtgggatataatattgagcaagagcagaaactggccttagaaaccacagtattagttgaatcttatacactcccagatggacgtatcatca

SEQ ID NO: 40567 - DNA, 449 bp, Homo Sapiens
gcacgaggattattttatattgtcatattgtaaatcctataaaaatggtagataagtaaacatagataccaacatgggtatgtaattatgaataatatttggagatctttagtttaaattcttccataaaatagctttcagggccaggcgtggtggctcaaacttctactccaagcactttgggtggctgacgcaggaagatcgcttgaggccaggacttcaggaccggcctgggcaacatagcaagacctaacttctaaaaaattaagataaattagcgggcatggtcgcacatgtacctactccagaggctgaggggaggattgcttgggcccaggaatttgaatttacagtgagctatgattgtccactgcactccagcctgggccacagagtgagaacctgtctcttaaaaaaaaaaaaaaaaaaaaaactcgagggggggcccg

SEQ ID NO: 40568 - DNA, 293 bp, Homo Sapiens
gggagagacatgtttttaccatcgaggccaggctggactcaaactcttgacctcaggtgatccacccgccttggcctcccaaagtgttgggattacaggcatgggccaccacgcccagcaggggatctgcttttaaagggctcactcatagggctgttggcaggatgcctcagtgcctcaccacatgggcctctcagtagggttgcttgtgtgtccttgtatcacggcaactggctttccccacttggattcttgcagtgagctgggagaacatagtagaaaccataaccttt

SEQ ID NO: 40569 - DNA, 1108 bp, Homo Sapiens
atcagacaccacatggtggtgtccttggatctcactgtgcagaattagcagtgtataaccatcttctcttttcatcttgttccaattctctcctctttcctttccattctgctttaagctcatgtgtcaggcagactttaccagagtgtcagacattacctaaaacacatacgttagccatgctgctggtatggagaaattccacaccatgattattagcctcctttaagctgaatgggatttaaccattctaggcaacacccctgaagggcatacctaacctcaatagtgttggcttttaaaacgtatgtttgtatggtagagaaactttgtaaaagaagaatccaagagaagtttgtgaggatcctacaaacccaggcccactcactttgctctaattctttctagtatcttgtagatctaatgggtctgggataaaaactttgaaaagtgtcaatattccatgtatgctgctgaaatgaagttaagtttggaaagaagtgatacctctagactgggtttatattaatctgggatataaatgaagaagacatactaatagaactccttgcttttaattggggaaatagggctttaataattttgacctcaactaaaaatgatatgcaatagtctctgtgtgtgtttgaaatacattgtgttctcagagatttctacattctcacgttctagtgatttggggcatgggcttaatagcagatgtacagtgtattcctgcattattgtgattccccttaaagcccagttcttgctgtcttctaccaggggctgctgactccagttacccatggaatgcaggacctgggaggggtagccattagggtctttcaaaactctttggatctaagcatttgtctctccttaagtgccaatcacaattggatatggaaggactgtgatttctgcaatgaaccaaacttttagagtaaaarccaaatttaaattataagaaagaagggaaaaagagaaaactcaagtytatwmttgtagagtcyattcttagcatggaaccccyaggwtctagttkggsttgtctggattgcyttcccataggcttgarkgaaaagcttgtamaattatttttata

SEQ ID NO: 40570 - DNA, 933 bp, Homo Sapiens
gttaaaccccccctaagcattacagatggcttatagctgtccacggggttggtagaggtgggaaagggaagggttctaggccagaatgttcctatttagaagacactcaaattacagtctgtgttatgtatgtataccatttattcaatgctactgtgtatataatggaaaacttaagtccagtttgaaacatctagtctttctaggtgtttaaaagtgtacaacggcctgtcgcagtggcgcatgcctgtaatcccagcactttgggaggccgaggcaggcggatcacgaggtcaagagatcaggaccatcttggccaacatggtgaaaccccatctttactaaaaatacaaaaattagctggtcgtggtggtgcccacctgtagccccagttactcgagaggctgaggcaggagaatcgcttgaacttgggaggcggaagttgcagtgagccaagatcgcaccactgcactccagcctggcgacagagcgaggctccgtttcaaaaaaaaaagtgcacaatgtaggttaacagtagagggcttaagtaacacccctctaagcattgtgttttcagtacttcctaggagtggttgcattggggaatggaatggttaaaacttgatgcttaggagcgaatgcagactattcatcgggtgtaaggggtgggggaagggggggtgggccagaggaggtatgcagggagaggggttctgggctcctggagattaagtcagaatgggtcctaagccatggttctatatgttgcatcttagtaaactatggggggtattcaaaggataagcgcatcaatggctcaaaggtatgttcacaaatcagaatgtagctaactcagaccctttggggaaatgtccctttgggaagagttttaaggaaaggccgtgactctggggagagaccttcataagccac

SEQ ID NO: 40571 - DNA, 703 bp, Homo Sapiens
  misc_feature (474)..(474): n is a, c, g, or t
  misc_feature (514)..(514): n is a, c, g, or t
  misc_feature (616)..(616): n is a, c, g, or t
  misc_feature (655)..(655): n is a, c, g, or t
cctgagcctggggtcctggtagtagagacccagctggcctggggtctgctttccgacattttgcctctctcactggtcatgtatttattccatatttatatggtctacttcctgtggctgggagcagcagctcctgaaggttccgtgggggtgcggggggttggacaggacactccttcttggaaggcaccaattttcccagccccactcccattacacacacacacacacacacacacacacacacacacacacacacacacacacacacactgattcaggccttgagagtcaagcccaagagctcccttggccctgttccccactccctccactggcctctgctgttcctgtctttgctcacaccctcacagctgctctctggcagaggttggcatagcctaggagcagctgcaattgcacctgagggacaggccctagagtttggtggcccaagtcctgaacccctcttanaccaggtgaggtgcagaggtggttgctgcttccagtttcncttcagacttagctgtgtgaaccccactcctatcctttggccttagttttcccatctgtaaaactcagaaacgcagttggaaagtccttattcatttagtangcgaatatattataatatgtatagagcgcttttgtgtantcactggtcagatcctcactgagctcccagtccagagagaagcagaca

SEQ ID NO: 40572 - DNA, 873 bp, Homo Sapiens
gtgctctgctaatttttatatttttagtagagacggagtttcatcgagctggccagactggtcttgaactcctgacctcaagtgatccacctgcctcgtcctcccaaagtgctggggttacaggtgtgagccatgcacccagcctaaaatgatggttttctgattctagcatttcttttataagattgctatgtaaagcacagcttttctttttttagggaaaaatgtcttttaacagctgcaaaataaatattctttcaatggaatgacaattattattttgtgccatatatttattttaaaaatttatgtataatggtaacctgagcctgcatgttattcactgtgtggtgcatactgatctttaattttaatgtgaagcaagtactaatatagtaaagcataaattatataaaattgtgtttatatttggatgcaaattaattgtgtactttatagaacagtttcccaaatccgttttactttttgtatttgaaatttaatcacaggtggaatcttaaagagagcatttagggatatgtaaaccagatgttattaggactaatgttaacaaacattgagaagagaaaacagtattgttttagttaacatcttagtggagtgaatatttcagatatcattataattataattattttttggaaggagttggtggttgccaggtgggggaggggggattagtaatgaacttggtctgggtgcaagggatttggtgttccccgagttggggttacgccattttttacaacacacaactttttggccaaacggttgcgcccaaaacaggggtccccaaagaacgcccacagggagggggggggaaacacccttttatgggttttatagaccacg

SEQ ID NO: 40573 - DNA, 837 bp, Homo Sapiens
tgcatttgaaagctgaaggaattactttagatagataggaattgctacctttattctggaaaggtttagtttctgcctcaaagcattttgaagtgttttaaccattaaagggtctaatttttttttcttaatgaaatcaagcattttaatttactgtgggaggcatcctgaccacggacatccataacagcaaagcacaaatcgttttcgtctgtagtcatatcctgaaacataggtggacaaatttttaactgagagacaaaaatcacatagttgaattgagcagaacacttaagtgctttctgcatctatttaggagtctatttcttaccaataaacttgacaacgcatttggaaaactagtgaacaccttacagctttcattctgctttaatgtttcaattcaagccggtgtaaaaataatttccaaggcatttctgtttattctttagtaatctcactactggctatgtcagcaatatctttttcaatctggttccttttgtatatgatgtcactgtgacctctttgaaatatagtgatggcttttacctactttgaaaagaattttcacatagagtcagaaaaaaaaggaactatcaaatcacttgcctttccacttggagagcacgacagttgccaacaacaaggggtcaagggacgcacaggagatgtgtgggggcctggacactcccaactggtgaccagaggcttgttcgcatttacatttgtctccacttgtaaaaaacatagttcaggtcctaaattcttatcactggatttacttagcaatcttcaatgacctgcagtcattgcctgtataagtgaacacgaaaa

SEQ ID NO: 40574 - DNA, 506 bp, Homo Sapiens
atcctttcctggattcgtgtcagaaaagggctccttgccacaactgaacttactgtataaaaacctggctagggagatttaattttactaaaattacagtttaatgttaccgtctagccacaaatcaagcagcaaaagctattttgatgatgaaagggggtccccggttgagctggccatctagtgcagtgtgctctcagattccatgtttgttgattgtgtgtcttcacaagcccctctctggtgctgaattggatttgaattcttggtgagaggcctcagcatctccttgggctggtctgggccagtaaaaatagctgcctgacatgtttatatattatcatggtcagtagttcaatgaaatttgtacatttttggtaacattggtatacatgatgcccctgcagttccttttctgtttggtagtttgtgactctaagatttccactgttatgtgtgttaatttatgaaaataaatttttttgaaaacctttcaaaaaaaaaaa

SEQ ID NO: 40575 - DNA, 389 bp, Homo Sapiens
cgcagtggctcacgcctgtaatcccagtactttgggaggccaaggcgggtggatcacctgaggtcaggagttcaagacgagcctggccaacatagtgaaaccccatctctactaaaaaatacaaaaaattagccgggcgtggtggcagacgcctgtaatctcagctgctcgggaggctgaggcaggagaattgcttgaacccggggagtggaggttgcagtgagccaagattgtgccactgcactccagcctgggtgacagagtgagactctgtctttaaaaaaaaaaaaaagattcatgtccttagattagattgtaagcccactgggcaggtactgtgtctaatgttttgtgtggcacctgtcacattgttagagctcaataaacgt

SEQ ID NO: 40576 - DNA, 465 bp, Homo Sapiens
caggagcatggctcccatactgtttttccttagggcctgttttgaataatagtgtttttctgaatatataaccaagcattttctctggactggaagccacatttgatccctggttctcagaaatctgggtttggtggttctgtctttatagatacttgtacacatcacaaaatcaccaaatttggggaaatgccaaccatactttgagagaataaatatgagcagttgtgcctacttgcataggggagcctgtgtaaaaagtcagtgattccgtaggctcttttcctgcactaaccagtgcagttaatacctcactttcatgaacagcaaactcatggcaacattaagtgaatcatggccgggcgcagtggctcacgcctgtaatcccagtactttgggaggccaaggcgggtggatcacctgaggtcaggagttcaagacgagcctggccaacatagtgaaacc

SEQ ID NO: 40577 - DNA, 627 bp, Homo Sapiens
ccagactctaatacgactcactatagggaaagctggtacgcctgcaggtaccggtccggaattcccgggtcgacccacgcgtccgtttaactacctgtaaaatctaaacatggctgttagtgtcacaccaattcgggacacaaaatggctaacactggaagtatgtagagagttccagagggggacttgctcacggccagacacggaatgtaaatttgcacatccttcgaaaagctgccaagttgaaaatggacgagtaatcgcctgctttgattcattgaaaacagttgatggtgcactcgtagctgcaaaatgaaggacattaaatttggctgtgacattgagtggttacacagaagacctgcttctacaacatttggaaacattgtgaaacattactattcagttgctatttttccatctcaaaatatttttttttagttgctgctcacttatggccacagaacagtccctttttgagtaaagcagcaaggttgcttaatgacatgctatgtggttaacaagattcaactgccacatcaaggactttaaataatttcaagattttaaatgtatttatgaaatgaactcattacagcagctaatcaatgcaaactttgtcctttt

SEQ ID NO: 40578 - DNA, 719 bp, Homo Sapiens
  misc_feature (441)..(441): n is a, c, g, or t
agagatactgatatcaaactcccatttgaaatacaagggcccttctgattcaaggcccagttggggagcttggaccatgttgtgaatggcctagcactcgccagtctggtggagattggtggtcttagttgctggagcaggctgagtgtccccgcggggtttgcatctgtccccagaaccttttccccaggcccgtgggggaatagggaagtcactctgagctagaaattgtcgaagaagaaaagaaacaaccttcctagccttggaaagcctgtccctgcttttgatagaattattgcctttttgtaggaattacagtagcaaaccccaggctgccgctgaatttcctacttttgctcattctctaggatagttcttatccagaatgtggtttcaggaattcttttttttagtttgaaaatgaatgtgaaacattttctntggtgtctttttttaaaaaaaaaaaaacccttatggctatttttccgggtaggtcggtcgttttctgtttgttttaccattaagtaatacacttcccagaaattgggcactctggtgttaactgtggaggcaaataaaatttaacgtttcaatctgtggtgagctggatgcactacaacaccttcgaagtaatctgatggtttccattctgtcgagcctcatgctgcctacaaaaaaaccaccaatttacctggtgttttcaccatttaggattggag

SEQ ID NO: 40579 - DNA, 928 bp, Homo Sapiens
  misc_feature (702)..(702): n is a, c, g, or t
  misc_feature (716)..(716): n is a, c, g, or t
  misc_feature (727)..(727): n is a, c, g, or t
  misc_feature (758)..(758): n is a, c, g, or t
  misc_feature (776)..(776): n is a, c, g, or t
  misc_feature (791)..(791): n is a, c, g, or t
  misc_feature (800)..(800): n is a, c, g, or t
  misc_feature (813)..(815): n is a, c, g, or t
  misc_feature (840)..(840): n is a, c, g, or t
gagagatactgtatcttatccttgatggtacagtcagtgcctagaactgaaaaactactcaataaatggatttgttgttttgtgataaggatgatgtcttcttactttgcccaagcctggaaagtaggccaaatatataatagagtttctttcatcttcccagctcgagagtcaggatgtctcagatttaacaacagttgaaagggaagactcatcattacttaatcctgcagccaaaaaactgaaaatagataccaaagaaaagaaagagaaaaagcagaaagtagatgaagatgagattcagaagatgcaaatcctggtttcttctttttctgaggagcagctgaaccgttatgaaatgtatcgccgctcagctttccctaaggcagccatcaaaaggcactggatgtgtgtgagaagtggggagaaatgccaccactacaacccaaacatatgagggaagccgttagaaggttaaagtcaaaaggacagatccctaactcgaagcacaaaaaaatcatcttcttctagaccaaagtctagaaaggcctatgttactgacggaagaagtattggttccagacttcctataagactgtctgcattggtgctttagtatctcaggcctccaaggattccatgatgattttaatgtctttctcaaaactctgatatttgtcacaccctagaaagtatgtagcnctgattgatacttngccttgactanattttggggacctcttgggggcattttgaangtattttaactggtcttnggaccagttggaaangaagatacngtggggccataannngcatctttctgggacagggggaaanctgcttttcagaagaagaaaacccttttcccaagaagaaggttttgggttttgggtttttggggtttcgcctttttggtttgggagaa

SEQ ID NO: 40580 - DNA, 895 bp, Homo Sapiens
  misc_feature (740)..(740): n is a, c, g, or t
  misc_feature (761)..(761): n is a, c, g, or t
  misc_feature (806)..(806): n is a, c, g, or t
ggacgcgtgggccgagcttctgcctcaggcatctccgcgatctcctctcccctccaatcctatccgtgatggacgatgcccacgagtcgccctccgacaaaggtggagagacaggggagtcggatgagacggccgctgtgcccggggacccgggggctaccgacaccgatggaatcccagaggaaactgacggagacgcagatgtggacttgaaagaagctgcagcggaggaaggcgagctcgagagtcaggatgtctcagatttaacaacagttgaaagggaagactcatcattacttaatcctgcagccaaaaaactgaaaatagataccaaagaaaagaaagagaaaaagcagaaagtagatgaagatgagattcagaagatgcaaatcctggtttcttctttttctgaggagcagctgaaccgttatgaaatgtatcgccgctcagctttccctaaggcagccatcaaaaggcactggatgtgtgtgagaagtggggagaaatgccaccactacaacccaaacatatgagggaagccgttagaaggttaaagtcaaaaggacagatccctaactcgaagcacaaaaaaatcatcttcttctagaccaaagtctagaaaggcctatgttactgacggaagaagtattggttccagacttcctataagactgtctgcattggtgctttagtatctcaggcctccaaggattccatgatgattttaatgtctttctcanaactctgatatttgtcacacnctagaaagtatgtagcctgattgatacttgcccttgactaaattntgggacctcttggggcattttgaagtatttaactgtcttgaccagttgggaagaagatacgtggggccataagcatctttctggacagg

SEQ ID NO: 40581 - DNA, 708 bp, Homo Sapiens
gaattaagaataattaataggtccgggtgtggaggctcaagccttaatccccagcacctggcgaggccgaggagggaggatcccttgagcccagaggttcgagactagcctgggcaacacagtcagactccatccttccaaaacaaacaaacgaaaataaaacaaacagaaaacgaaattagccgggtgtggtggtgcgggcctgtggtcccagctcctcgggaggctgaggcaggaagatggcttgcgactgcaccactgcattccagccttcgcgacagagcaagaccctgtctcgaaaaatgtgtatgtctgggtaagtgtatagattttacaactattttgaaggcgacctttttaactttaaacagaccactctggaggagacgcctgacccagagcgctttacctaaagttcggtgcctaaagtgcacccttcctctggctggtgtctcccttctgccaagctatgcctcctgcagaggtaggctccgtggtgtctcccactccgccccaactggagaacggtgtaaagaactgtcagccgggtgcagtggctcacgcctgtaatctcagcactttgtgaggccgagaggggcggatcacttgaggtcagaagttcaaaaccagcctggccaacatggtgaaaccccgtctctgctacaaaaattagccaggcgtgatggtggatgcctgtaatcccagctc

SEQ ID NO: 40582 - DNA, 582 bp, Homo Sapiens
gcgtccggattctatgaattgtaggagtattaaagaccaggctgttggcaccagaacttaaagcgatgactggatgtctctgtactgtatgtatctggttatcaagatgcctctgtgcagaaagtatgcctcccgtgggtatacgtttttaccttttttaaaaaacatttttgtagaaaaaataattaaatcccctttttggaaacttactgcaggttttgtgccttgacaacctctccctatgtgaggtttgtaaaaagtgtcctgtgacttaacacagaaacgcaataaacacacacaaaatagtttcatgagtgattcttcagatgcccttcccaactggttagttgatcaagaattttgggggtgggggttgcggagaaatcaagtttaaaattccttctgattaaaaaaatatagtggaatacaattgtctgccgtttccccttcttaatgtatatattgtgagtatttattagattcgtaggtcatattacttatcaactgagccaaatgtctgtgtgcaattgtgtttcctttaccttgtaaaattttgtacagcataaataagtaaaaaaatca

SEQ ID NO: 40583 - DNA, 583 bp, Homo Sapiens
gaaaaaactggaggatggaagcctcagtaggccacagccagagatagagccagaagcagcagtgcaggaaatgaggcctcccacagatctcacacattttaaagaaacccaaacccatgaaaacacgtctcaacttagcgaggaagaacagaataaagattatcaagactgtagcaaaaccacttcattgtgcgcaggaccctcagcatcaaagaatgaatatgagaaaagcagaggtgaattgaagaaaaagaaaacacctggtccaggcaaacttccaccaacactttcttccaaatatcctgaagatgacccagactactgtgtgtgggtcccacctgaaggtcaaagtggagatggcagaacccatcttaatgacaagtatggctattgattgcttcagaatcccaaaagaaaaccttgtggaccatgtgacatggaatatttgggataatgtatcaaattgaatggccagagaagtttagatgattatttgtaagatctggtgactggcttttcgttctgtgttcttggcttcctaaatttatctgcccatatgattctcatgcatttgatatttatg

SEQ ID NO: 40584 - DNA, 789 bp, Homo Sapiens
  misc_feature (691)..(691): n is a, c, g, or t
  misc_feature (763)..(764): n is a, c, g, or t
aagccctaaaacctgaagtggataagctgaacattatggcagccaaaagacaacaggaattgaaagatgttggccatcgtgatcagatggctgcagctagaggaatcctgcagaagaacgttccgatcctctatactgcatcccaggcatgcctacagcaccctgatgtcgcagcctataaggccaacagggacctgatatacaagcagctgcagcaggcggtcacaggcatttccaatgcagcccaggccactgcctcagacgatgcctcacagcaccagggtggaggaggaggagaactggcatatgcactcaataactttgacaaacaaatcattgtggaccccttgagcttcagcgaggagcgctttaggccttccctggaggagcgtctggaaagcatcattagtggggctgccttgatggccgactcgtcctgcacgcgtgatgaccgtcgtgagcgaattgtggcagagtgtaatgctgtccgccaggccctgcaggacctgctttcggagtacatgggcaatgctggacgtaaagaaagaagtgatgcactcaattctgcaatagataaaatgaccaagaagaccagggacttgcgtagacagctccgcaaagctgtcatggaccacgtttcagattctttcctggaaccaatgttccacttttggtattgattgaagctgcnaagaatggaaatgagaaagaagttaagagtatgcccagtttccgtgacatgccacaagtgatgagttgccannctggctgtcatccaatatgagaagt

SEQ ID NO: 40585 - DNA, 583 bp, Homo Sapiens
gtaagagcatgaccaagctgcgaggcccaaaccccaaatccagccggactactctgcagtccaagtcggagtccgaggaggatgatgaagaggatgaggatgacgaggacgaggatgaagaagaggaagatgatgagaatggggactcctctgaagatggcggcgactcctctgagtccagcagcgaggacgagagcgaggatggggatgagaatgaagaggatgacgaggacgaagacgacgacgaggatgacgatgaggatgaagataatgagtccgagggcagcagctccagctcctcctcctcaggggactcctcagactctgactccaactgaggctcagccccaccccagggcagccagggagagcccaggagctcccctccccaactgaccacctttgtttctcccccatgttctgtcccttgcccccctggcctcccccactttctttctttctttaaaaaaaaaaaaaatacggtgggggtagggggctggaggagcccaggccaggactctgcagcctcaaagacatcagcccttgggggtcctcctccagggacagcaactatcagactaag

SEQ ID NO: 40586 - DNA, 551 bp, Homo Sapiens
ttttttttttttttttttgagactgtctcaaaaagaagaagaagaaaaaaaatgcagtgagtttatgttgttacattgtaacatctcagcgtagctgtatgcattactctatagcataactacttaagttttatgtcattcttgaactgtgatttttttttctatttgctttcatagtttggtgggccattgttatggactgaatgtttgtgtcccatcctcacccctaaattcccatgttgaagccccaaccttcactgtggagctggggctgctaaggaagtaattaaggttacacgaagtcacagtggagaatctgatctgctaagactggtgtccttatagggagagaccccagagagcttgttcccttcctccctgtgcacacaaacaagagggcatgggagcacacagagagatggcagccacctacaagccaagaggagaagcctcacaatgaacccccccccccaccctgctggcacctatgtcttcgacttccagcccccagactgtgagaaataaatttctgttggttcagccctcgtgcc

SEQ ID NO: 40587 - DNA, 307 bp, Homo Sapiens
  misc_feature (73)..(73): n is a, c, g, or t
  misc_feature (86)..(86): n is a, c, g, or t
  misc_feature (188)..(188): n is a, c, g, or t
  misc_feature (200)..(200): n is a, c, g, or t
  misc_feature (213)..(213): n is a, c, g, or t
  misc_feature (262)..(262): n is a, c, g, or t
taaaaccgtatactaaatttgaaatagaaatataagcgtgaactcatttgttgttcttttaccgtatacacantttctacctctgncccagtagcagtagacacatcaagcacctagaaagtggtctctaatacatgaaaaccatgaattcatagtgatggtttcaaagccaaaaccaaccaaccaancacatgtaattnggtcactcttggnggtacctagggcactaactcctaacactggggatgggcacttgaaggangatcagtgattatcctgtcttttctctacaaattgcaattcaggg

SEQ ID NO: 40588 - DNA, 746 bp, Homo Sapiens
gggcagtctaaattttctaaataaccaatagttgccaatctaaaatggcagagaagatgaaatttgataaactgaattttttttaaaaatccatttaccctacaggtttgcatttgtttgctgaaatttacctttttttagttatatatatgtgtgtgtgtgtgtgtaatttctgccaataaattctaaattacaaaggtaagagaaaacctagtacattactaaatatataaagtatatgttctgattatgtatacttgttctagtgtcaagtctttttaagtgggtttttaaaagtttgttattggacttgaatggatttttgagactaggttaattatttttgaggtcttatcctaaaaggcatctaaggtacatgaatggagtatggtgattttataacattttttatcagaatggaaaaagaactgtttaaaagtttgatacttttaaatagttggtttttttgcttactctggtaatgattttctacaaatacataataaattgtttttttgattctatattctgtatgcagttgaatatccattacttattctgctgtgctttaatagaatggaatgtttacaggcccttaaaatattatttttaaaaaaccttctgaagatacataccaaagttttttccaagaagattttataatcaaatttaataaatgtaaaggtttatcaagattcctataataggtataggtttattaaggggcaatttttaatgtttagaag

SEQ ID NO: 40589 - DNA, 227 bp, Homo Sapiens
tgcggtgagcctgtgatggtaccactgcattccagcctgggtgacagaatgagaccctgtctcaaaaaaaaaagtaaaaattatttacccaatatttggcgaatcagtgagtgacagcagttgtagtgctagtgggttaaatcaaggaataactgttgggaagtgaaaattttaagggagcacccggtctgaagcacccggtcgtgagaatcgggggtaccggagct

SEQ ID NO: 40590 - DNA, 697 bp, Homo Sapiens
  misc_feature (2)..(4): n is a, c, g, or t
  misc_feature (6)..(7): n is a, c, g, or t
  misc_feature (9)..(11): n is a, c, g, or t
  misc_feature (14)..(14): n is a, c, g, or t
  misc_feature (16)..(16): n is a, c, g, or t
  misc_feature (18)..(18): n is a, c, g, or t
  misc_feature (21)..(21): n is a, c, g, or t
  misc_feature (23)..(24): n is a, c, g, or t
gnnngnngnnngtngngnccntnnttgattcctgtgcctgttggcctactggatgttaacataatttttggaaaaattctctttaaaccatctggtttttaagaaatttggtaccaaaaattgatgagtagaggcaaaaatgccccttcatctttctctatatattttccagttgaaaacaaactaagaagtcctttaagaatttataatccgttccccattaacttaatttagcttttccatcactgttaatgatcagagtaacaaagtgtgaaaaataagaaaccatcattgatgttaattaacacatttagatgggccagttaaaacagcttcataagttttaaattaattgtaaatggaatattcctcatttaaaatttttgcactgcattttctactgtaaaccaaaagaggttactaagcaaaaccacctaaatttaagttggtgatttaaatgaatctcacattaaaagaaagcttgacagtgttatgaaagccaccagactcagccagtgtgtccccatgggtatccccagccatccttgctcaatccattacttatatactaactacataatgacctgttcaaaccagactctatttaatgaactgtgaatttacacagaggccattttaaatgggtcaccccatttaaggattagtggatctcaaattattaaccaaacatacttca

SEQ ID NO: 40591 - DNA, 584 bp, Homo Sapiens
ctttattttgctttgaggtactgttgtttgacattttgctttttgtgcactgtgatcctggggaagggtagtcttttgtcttcagctaagtagtttactgaccattttcttctggaaacaataacatgtctctaagcattgtttcttgtgttgtgtgacattcaaatgtcatttttttgaatgaaaaatactttcccctttgtgttttggcaggttttgtaactatttatgaagaaatattttagctgagtactatataatttacaatcttaagaaattatcaagttggaaccaagaaatagcaaggaaatgtacaattttatcttctggcaaagggacatcattcctgtattatagtgtatgtaaatgcaccctgtaaatgttactttccattaaatatgggagggggactcaaatttcagaaaagctaccaagtcttgagtgctttgtagcctatgttgcatgtagcggactttaactgctccaaggagttgtgcaaacttttcattccataacagtcttttcacattggattttaaacaaagtggctctgggttataagatgtcattctctatatggcact

SEQ ID NO: 40592 - DNA, 488 bp, Homo Sapiens
atggatttgattataggttttcccttagatgctgtggaggtgttttgtaatattcaaaatatgcccatattgcctttttaaaaccccaaagattatgaattctgaaacacatccagcccagcgggttttggataaggggttgtaggcatttaagcagcctcacataatgggctgacttcatccaaaacatgaaaatattacaaggcaaattctattttttatattttttggttcaatgcttgaacaacttgtttttctgctgggggaagaaaaaaagaaccaaccctgagtgtgattgttacggaaactaatgactttgtttttaaaggatcacattgattcaacaccttctattggacccagaagtgcgtaaatattacctatggtagtaaacgtttaattatcattcagtttaaatgttggccttctgtatgtagccaagaacagctcattttgtgaatttcagtttttaagtggctgctttttga

SEQ ID NO: 40593 - DNA, 537 bp, Homo Sapiens
cgccaagctctctagcctctcctggcctcagtatccttctctgggagatggtccagctgaaaatccccagcatccacaagaaagggtggaagccctgggggccctggcctggcccgggtgcaggctgcatggccgggcggggcggtgtctcctttcacagcttccccgtctgtccgcagcctccaggagccccacacagggctggggctctgtgcccccaactcacacccgtcggctcccccaggaggagcaggctgggcccagagccgcagggtgggctgcagggaggtctgacttagctggggaaagtgccatccctgccattgctagtgacaagctcgggctgctgtggccccagcacagattcaacactcactgcgctatgtgccagctgttgcacactcacctccacacccaactcacaggaagcaaggctgggaaggagggaactggccccaggccacacagatgctgcgagttgggattatgatcgggtgcagtggctcacacctgtaattccagcacttggggaggcca

SEQ ID NO: 40594 - DNA, 578 bp, Homo Sapiens
tatgtcttctggcttgtaccccacaacatcttatctaatggagccagtcttggtgctctgtgttcacctggttcatctgaggagctgcatctaccctgcccatgccatagatcctgccctgtttgcttctcctgttgctgctagtggacatgaggacagaataacgggctcccagattcacaagccccaccaagaggatcaccccaggaatgcttggaggctgaggagttcactgaggctactgcatcttgagactcaggatgaagacccagcttggggctgtcaaaggttttttgcatgtctgacacccatgactccacctggaccttatggctccacccagaagcaattcagcccaacaggaggacagcttcaacccattacgatttcatctctgccccaaccactcagcagcaagcacctgttacctgtccacccccaccccttcccccaaactgcctttgaaaaatccctaacctatgagctttgaataagatgagtacgaacttcatcgcccatgtggcgtggccggcctcgtgtctattaaattctttttctactacaaaaaaaaaaaaaaa

SEQ ID NO: 40595 - DNA, 780 bp, Homo Sapiens
  misc_feature (415)..(415): n is a, c, g, or t
acctccacctcccgggttcaagcaattctcctgcctcagcctcctgagtagctggcactgtaggcatgtaccaccatgcccagctaatttttatatttttagtagagatggggtttgccatatggccaggctggtctcaaactcctgaactcaagtgataacacccaccttggcctcccaaagtgctgggattacaggtgtgagccaccacactgggccaatgcttaatattttaatgtatctcaacaataaaaccaagaagaaacaaagccttttgacttgttagaatgtattaagtagtattttaaagaaactttatagttgtgacattgaaagactgttggggtggggggaggaaaatttttactttccatcttaatgtaaccttatgctattctgtatttttactgtatantgcttttacaataaatataaaatgaaatgtttatgttgaacaaaaaaaaaaaaaaaaaaaaaaaaaaaaaaaaaaaaaaaaaaaaaaaaaaaagggggggggggggcaaaaaatatctcccgagggggcccaaattgacgtcacacccttttttgtgcacaaaggggccccaaaagggaggccgataaaacgaaggacgggcggccggggacaaaagcgctgtcggcggaaaccgcgccctgggaactgggggagggacccacttggcgggccacccgggcacacccccaaaagatagagccgggcacaaacctcgcggtaggggtcacagcgcacgcgcgcgcaaatcgccgactataaaatca

SEQ ID NO: 40596 - DNA, 869 bp, Homo Sapiens
ttctcagtccctgtggaggctaacgcaaagctctgtagaacaagccttagagtgcatgctctatggtctaatgagaaacttgtgtttgtgcttgcacacgtttcaatgttccctacaggatattttacaaaggtatgaaaataatggccaaccagaagctagtatcagtttggggcctaaatgcagcaggtgttcctgataagcagataagcagagctcttcctgcagtagcccaggtctcaccaaatgacaaatggctaatcaagacactcctacaagcccttgatggtgagagctgcagagctgtttcttcagctgccatcaaggcaggacctcaggacctgactgtctacagtcagggaatagtgaacaatatgggatatgggtataggtaggtggtagacaaggatcgtgccccatggctgatgggccgggtgtctcaggcaggccccctgtgcacagaaagagcctaagtgcagagaagccaggcatctttcccctgtcatctgtggaaggggaatgtgatggccacagacaccctcatggcacagacatggccagcctctgacgttcctctgcatcagagtagttctgtcctcgaagccccagtcagcagagctggatgaccagatcgcaagaagcaaaccagaacagtgtgatgcgcagagatgtcagatcccgtttaaataaaacacttcagctaaaaaaataatcgatcgcaaaccaaaaagggggggcccgccaaaaaaattttcccctcgaaggggccacaaatctttaggcctttccccaagtttcgtggcacaaaggggggccctaaaggggagggcgtttaataacccaaggacacgggccgtctttttacaacc

SEQ ID NO: 40597 - DNA, 496 bp, Homo Sapiens
gtagcccaggtctcaccaaatgacaaatggctaatcaagacactcctgcaagcccttgatggtgagagctgcagagctgtttcttcagctgccatcaaggcaggacctcaggacctgactgtctacagtcagggaatagtgaacaatatgggatatgggtataggtaggtggtagacaaggatcgtgccccatggctgatgggccgggtgtctcaggcaggccccctgtgcacagaaagagcctaagtgcagagaagccaggcatctttcccctgtcatctgtggaaggggaatgtgatggccacagacaccctcatggcacagacatggccagcctctgacgttcctctgcatcagagtagttctgtcctcgaagccccagtcagcagagctggatgaccagatcgcaagaagcaaaccagaaagtgtgatggcagagatgtcagatcccgtttaataaacacttcagtaaaaaaaaaaaaaaaaaaaaataggt

SEQ ID NO: 40598 - DNA, 900 bp, Homo Sapiens
ggcttggaagagctcctgtccaccctccaaaagcggccccaaggccttagcttccttggcctgtcaggctgcgccgtccagggtcccctgggcctgggcctgtgggacaagatagccgcgcagctccgggaactgcagctgtgcagcagacgcctctgcgctgaggacagggacgccctgcgccagctgcagcccagtcggccgggccccggcgagtgcacgctggaccacggctccaagctcttctttcggcgcctctgaccctggcgctgcctttccccaccctcaccgaagcccctaataaatgaagctgctggccgggcgcggtggctcacgcctgtaatcccaacactttgggaggcccaggcgggcggatcacgaggtcaggagatcgagaccatcctggctaacatggtgaaaccccgtctctactaaaaataccaaaaattagccgggcgtggtggtggaagcctgtagtcccagctacttcggaggctgaggcaggagaatggcgtgaaccccgggaggcggaccttgcagtgagccgagatcgcgcccctgcactccagcctgggcgacagaccgagactccgtctcaaaaaaaaataaaaataaaatgcgtggtacaaaacacctaatacctaaggcagtccgaccggtcggccgccagctgcgcgccccccggggcgcggactgcgcgatgacacataacctgtgacgccgcggtgaggccgcggtggttaccccgcacttacatgcagacccgttagagaagatgcggacgcccgggcgcttgactatcgccgcgtcaccgcgcgcccaaagaagactatttatctcgcgcgtggtgggctccccccccccctcttgccttcgcccccaccagaaaagtagtttagt

SEQ ID NO: 40599 - DNA, 602 bp, Homo Sapiens
  misc_feature (504)..(504): n is a, c, g, or t
cacgaggtgtacggagtctcgctctgtcgcccaggctgaagtgtagagtgcagtggcatgatctcagctcattgcaacttccacctcctgggttgaagcaattcttctgcctcagcctccggagtagctgggaatacaggtgcaggctgccacgcccggctcatttttgtgttttagtagagatagggtttcaccatgttgcccaggctggtctcaactcctgagctcaggcaatcctcccgccttagcctcccaaagtggtaggattacaggcgtgagccactgcacctggccctcgactcacagattttcaaaatacttttgaacagtaagctgaggacagtgtttattatgactatactggtctcctttcactagctcacaaaatttaactacatcacttgtcagtctcctaaaaatgcagtgtatgtgctttgaaacttgtgaatgatctgctgatttgtgctattttatattcaatgttgttgaaagaatagtttttanaccaagtaatgcaaaaatttagtgtaacatgaatgcttgtgctgtaaaacatactggaaaatcaatagctctggaataaactttggatttttaattaa

SEQ ID NO: 40600 - DNA, 709 bp, Homo Sapiens
ggggtttgcaggtcttgtttcttgaatatctgtaaaaataactgctttagccttttttggaggatatttttgagaaatatgtatttctcaaacacacacatatgtattatatatatatacacgcagagagagtttttacttcaaaaacttttaaagagtaaataatatcatgaataatttcactaatgtttttagttaggcaaacctagaattttaaaatgttgattttgaattttatgactgatttggaataattctggcaattagttaattactcatctgaggcattcatttctagtggtcttaattccctgactccatagatctggcatgatgtttgaaatctgactttctaaaataaatatttttctgtaggtggtctgctgtgtgaataaataattcctgaagaatgaagaagattaatttgggagttctttgacgaactttgatatgtggaaacaagtatctataatttattgtaagaagaaagtaaacatattactagtggaagatcttcagttgtgttcctttttgtgttcctcatttgctcacgtggctttttcccccaaaggatatataacaacaaatcttgtaacataaggtcttatgttctattactatgtattctggggacctcgaatttttgttgtcgggagaaaggcagatactgactcaacatgaaatttcaaaattggtgctaaagtcaatc

SEQ ID NO: 40601 - DNA, 577 bp, Homo Sapiens
gcgtgatggtgggcgcctgtagtcccagctactcgggaggctgaggcaggagaatggcgtgaacctgggaagcggagctcgcagtgagccgagatcacgccactgcactccagcctgggcaacagtgagactctgcataaagagcatacccatgtgtgtacctatctatctatctatctatctatctatctatctatctatctgtatatagatatattaaaatgtaaatggtggcatacctgctgttctgtagttgattagtgttttctttcctgcctcttgaatattccctgtcaccttggatcccttagaacatagtgtgcatcacatcttccattctcaccccgccccatgctggctatattcctatattcgtactcagatcatagacacttgtttgctacccataaaaggaagaactggaggtaacagtgtcctcatcccatttaccatcagcacatattattttttaaaaattccacctagaagctgaaggacaacagatttaaacccatattcttctactcattttcaatttgcttcactatgatggtgtcacatgctgattccagataaa

SEQ ID NO: 40602 - DNA, 770 bp, Homo Sapiens
  misc_feature (676)..(676): n is a, c, g, or t
agcggtgttggccaggctggtctcaaactcctgaactcatgtgatccgcctgccttggccctcaaagtgctgggattacaggcatgagccaccacacccggcctattcttggtattctttattcttggttttctagcctttagaaaaaaaaaatctagtcttggtaaagaaaatgttcattttaatcaagctccagtacagcttgtgtcaagacctagtaagaccacctttaatgtgttcctggatatgacattaaaaactaacttgaaaattgttaggatatttccttgtccctacttttattgtaaaatctactacattcttaagaattaaaaaatgccatttcagaagagatgatagttttatcttgccaaggaattatcttcttagtagcctatattggcttattccaaaaaaggcgttaacctccatcaaaacatcttctgcgcctctctctcagcatatgctttgatatttgaagtgtgtaatagattggagctatcagtcacttatttctaaaaaatgtattcttttttcttcatagctgtgaagagggataccaaggaaagttctttctgctgtctttctcttcggtaatgcttatcttatgaacactcaactgaaaaaacactccacctaaaagcaggaaagatggcaattctaaatagcagctatnatccacgggtataaactattttgttgttggcttggggctttgctgcaggtattaatagttaaaggaacacaaaaaaaaaaaactctcaggggct

SEQ ID NO: 40603 - DNA, 780 bp, Homo Sapiens
gattattgaaagcacgatagcaagtttaagtggtgagaatgactctaagcctcttttgttgctgtgactgacagaactaaagggagtttgctctcacattcacaataccaactctgccatcttatggaaaatattggaagtacctagggcatttcattatatttcaaaggcacaggttgctggtaagagggacagaaagacaagaacatagtaccttctatttctactacatgtttttaatctttaacatttttaccagcagaaatcattttttttttaaatctctcaatcttcaaataattcttagattgcttgccagcaaagatgtctcttgatcttgacactggaattcaatgtaaaaatcttgaatgatatttgtactgatatgaatttctactgtcccataacactgtgtagtgacttcactgtatattaacttcttttctacagatgtttgacttatgagatgaattaattgaaaaagtcaaagcctatcaggagctatcttatatgatgttggtagcctgtgaaaaaataaatgtctttttcttatacaaatgataacaagattgtttcacaattactatttacattttgtgcatataatggctgtattattatactcatatttgaacagtgatcagacaaggtgttcattaaccagaaactacatacatttgtatgtctctctggacctttgatcctaagtaaattacagtaagttagccagtactagacaatccttcactatgaataacatgtccctgcaaacacacaaaa

SEQ ID NO: 40604 - DNA, 534 bp, Homo Sapiens
gtcaggctaccatcaggtgatggtcaggtggttgttaaactgtctctgtaaaataataattggttgcagccagctccaagcaaggacagtctctcaatagatacaaaacaccctgatctggtgatcagccgcttcccgataagatctcaggagctgggcaagcagcctggagcatgcgcaccaagaggcaaaatggcggaatttaaccagtatatgacctaccttcctctgggaacgcacgactggtaaggggaaaaatgcctcaagtgagcatgcgcgcaacttcagtaatcacactgtgcatgcgaccccttccaagtgctggcaggtcaccacatacgcggacagcctgctgcaagggaagaatcaggggagatgagacgtaaatcccagaactatgccaaatacataaaaccccaagttaagggtcaggcagggcacttagatctctcaagttgcctgcctgatccaagtgtagtgtacttccttttgttcctgctctaaaactttttaataaactctcactcctgccta

SEQ ID NO: 40605 - DNA, 602 bp, Homo Sapiens
aaagaaattagccaaagagtgagatgatctcatcacattattaaataagtgttgccttggttagaaggggagttgaaacaaggttcaggagacatggcagccctgtgttctgcctttctttcctctacagcctgagaccagggataatgatagaagctccctttagttgaagatttgagcattggagatttgtgcttcactctccaggtgaaagccaggggatggcaagcgttatctaaggcccctgtctgatgatagtgtgctggtggcagagttggaatggctgcacagcctgcttcttctggaattttgtgaagcaacaatgtcatgggtgtgtcccatattgaatgacatggtatcacttagatggagatggttaactatatgagagaagtctgtagataaagcaggtagaagatagttagcaggctcctatgggcccaggaaggcagttgagacttcatgcacttttgggcagaacaagggagctggatgcaagaccagtgctttaaaggacctcacagtaatgttgagaagaagccaggaatggtagtatggaatacatgattagagtctactaagactacagatagttcactgaa

SEQ ID NO: 40606 - DNA, 486 bp, Homo Sapiens
cacgcgtccggctggatgcaagaccagtgctttaaaggacctcacagtaatgttgagaagaagccaggaatggtagtatggaatacatgattagagtctactaagactacagatagttcactgaaaacccgatcacacaaatgctgtgactagagacttgacaggtgccaaatcagagtgctacaggtccaatgcctctcaccgataccatgcggctgctgtgtgaacttccctcaccacgtaaccctcaccttagggaagagaaggatgagaagtcatgaattcttaagatgagcatatgcagaaattactgaggaaaatcagaatgatgtaagcttatctagaaatgactagattatgttttctgatacttggtgctacagaagcatgagagagaggaggtaagttctattgcagaaaacagtatgaccaggcacagtggctcatgcctataatctcagtactttagaaggttgaggcacaatg

SEQ ID NO: 40607 - DNA, 683 bp, Homo Sapiens
gcgggggacggcgcgggcccgcagaggctgcagagcctgggggacggccgcgctcggccgtgcagggcgggtgccgggtgctgggcagcgccccgccgcctttcactccgtcactgctggagcaggaggtgcgcgccgtgcgcgagcgcgagcaggaactgcagcgccagcggcgcagcgtctatggcaccgcggagttcaaggagcctacgccgagcctcaccgcgagcaggggcgacggaaagttggcggtgatctggcccccccgcagaaaggtctcggagaacggcctggagcaggaggagcgcaaaccttgaggtttgaaaaggctgggacccccggccggaagtaacgtacgcgtcagaggaacagggcggggggcgtctagcattaggcctggagaagggtcggctctctgcattggggaagatgaaatcgacttgcctttgtgaaattgaccagacccctctataaaacttacagtcccccattgggaaactgaccaccagccacaactccgccagtgaaactgcccagcccttctctgcctaattgcaaactgaactaccctctcccttgactgttaagagggccggagttaccgcctcgattgccccagtccccccaagccccaataacgcctctatctttcagggaacaaagaaacaaaggacaaggcgcag

SEQ ID NO: 40608 - DNA, 469 bp, Homo Sapiens
aatatcaacatcggccaggcgaggtggggcacgcctgtcatcccagcactttgggagtgctgaggtgggaggatcacttgggcccaggggtgcaagaccagcctgggcaacatagcgagaccccatgtctaaaaaaattattttaaattagccaggccgggtgcaatggctcgcgcccgtaatcttagcactctgggaggccgaggcaggcagatcacttgagatcaggactttaagaccagcctcggcaacaacatggtgaaaccatctctagcaaaaatacaaaaaattagccgggtatggtggcgggtacctgtaatcccagctactcaggaggctgaggcaagagaatcgcttgaacgcaggaggcagaggttgcagtgagctgagatcgtgccactgcactccagcctggacaacagagcaaaactctgtctcaaaaaataataaataaaaataaattaaaaaa

SEQ ID NO: 40609 - DNA, 435 bp, Homo Sapiens
ttgctacccacttagtgtgggctagatgccatactagtcactaggcttgcattatccatgtgatcttccaacaactctgtgagctaagtattctaggtaacttcactcagagacctcggtttgtccaagggttcacagctcaggagtggcaaagccaggaaaagccagtggaaaacccagatgggtcacatcccagaacctaggagactccccacttcgaaggtagctctgagcatcctcaaacacctggccattattagctgagcaagacagcagtgttttagcagaaatcacttaaaccttattttgcacgctgacctatattatcaagaaccacattattattattattttttgtgacaggtttcgttttcattctgtcgcccaggctgcagtgcagtggtgtgatcgtggctcgctgcagccttgatctcc

SEQ ID NO: 40610 - DNA, 673 bp, Homo Sapiens
cacgcgtccgtgaatgtttgtccttcacataccattccagaacactgctgccgtggtctgaatgtgtgtccctcacataggattccagaacactgctactaggttctgaatgtttttcccacacctaggattccagaacacttctgctggtgtctgaatggttgtccctcacatatgattccaggacactgctatgagagtcttaatgtttgtccttcacatagaattccagaacactgctcccgtggtctgaatgtttgtccctcacatagcattccagaacactgctacaagggtttgaaagtttgtccctcacataggattccacaacactactgctggggtctgaatgtttggccctcacataggattctagaacactccagctggcttctgagtgtttgtccctcacataggattcctgaagactgctgctgtcgctatagtcgttgtgagtgtctgaatgtttgaccttcaacaaacaccaaatatcctggccctttagtcttggactttccagcctccagatctgtgagcaataatctctgttgtttatgaattactcagtctgaagtattttgttatagtagcctaaagagactaagagagcatcacctgccctgtcacctcatcaccgcattactgaagctatactaacagcagtcactttccg

SEQ ID NO: 40611 - DNA, 565 bp, Homo Sapiens
  misc_feature (9)..(9): n is a, c, g, or t
ctatttgtngaaaaaggtctctggctgcttttaaggtttacctttgtcttcggtattctagaatattccactataatgtgtctagatagggatttcctttatctttcttgttatatcctgtgtctgatggcttaatgttttttattattctggaaacttctctgccattttttcttcaaatagtctctctccacattctatctattatttccttttgtaatcttagtcagttttatgtaaggctttctcctcttgttctttgtatcttaactcatattatccagatagtttattctgaataattgtttcaggtctatattccaggtcacccactctttttcacataagcccagtctcttatttaacccatccactgaatttttaatttcagtaattttttgtttttggagttctgtttgattctttcttgaattttcctggttatttttgattttctgttgttctttgctcatttatttccactctgttttatttacataattatattgtttctgataattccagtatcttaatttcttaagaattaaaaaagttttcctgctga

SEQ ID NO: 40612 - DNA, 766 bp, Homo Sapiens
tgtatataaaagtagtctttctaactgtctgtatttctaagttaatatataagtttatctagataaaaaatacttaagaaacataaaccaaaatattttatgaaattgtttttatattagctaagtataaatttattgctgtataacaaattaccacttggtggtaaacagtgaacatttatcttaacagtttctgaggttcaagaatttaggagcaatttacctgagtgattctatcttagattctcttataaggctatatttaagattttggttatagttgcagtgatccgaaggcttcactggagcaggaggacaagcttctaagatgactcacttacatgccactgcaggagtcctcagtgtttcactggcttttagcagagtgcttcattccattgccacatagacctgtttttggtgttacttaagtgccctcacaacgtggcagcttcctttttccagaacaagggtaaagagataaagactgagccacaatgtcatttataatctagcctcaaaagttacacacagtgttttctgtttgttgagcaaataacttctattcagtatgaaaggtgctttacagggcatgaataccagagatggggatcgttggggccatcttggagactagctaccacgttaagaataaataatacttcttaaattaagcatttttatttcatattacaccatgtcagaatgcatttaggctttactcagtagccctgcagaccgggaaaatttcaaaaaaaaaaaaaaa

SEQ ID NO: 40613 - DNA, 883 bp, Homo Sapiens
  misc_feature (366)..(366): n is a, c, g, or t
aggcaatccactgccgcagcctcccaaagtgttgggattacaggcgtgagccactgcacccagcaaatctgtacttattataaacaataacttcccgtttccttttgtcctgacacccaccattctactttctgtctctatgatcctgactaccctatctcatataagtggaatcattcagtatttgtccttttgtgactggcttatttcactgagtataatgttctcacagttcatccatgttatagcatgtgtcagaatttcttaaggctaatattccattgtatgcatgtgccacatttcgctttcagtagtcatttttaagctctataaaataaaatgaagaaaggacagttcacaatctanaaaaaaaaaaaaaaaaaaaaaaaaaaaaaaaaaaaaaaaaaaaaaaaaaaaaaaaaaaaaaaaaaaaaaaaaaaaaaaaaaaaaaaaaaaaaaaaaaaaaaaaaaaaaaaaaaaaaaaagggggggggccccttaaaatttcccccgggggggcccaattttccccccccccctttttttttaaaaaagggccccctaagggggggtttttaaaaacgggggcgggggccgtttttttaaccccccgggggggaaaaaaccccccccggggattttttagaaaaaacccactttttggggggggcaaaatttggaacaacccccccccaaaattttaacccccagagaaaaaaaaaaattttttgggggaaaaaggggggaaaaaaacccccccaaatttcttctgctcctataaaaattttttttcctctccgcgggtttttttttttcaaaaaatttttttccccccggggggcgcgggggggctcccaaagaggtgggggggaaaattaataaa

SEQ ID NO: 40614 - DNA, 449 bp, Homo Sapiens
gctgcccaggcagggaaaccagcactatacagacctgaacaatgaagatggcacattttgttcagggaatggtgaattaagtgtggcagaaatgctttgtagagacagtaatttgcttgtatggaattttgcccaagagacctcattacagtttctaattttttgatgttatcatgcatcactgcccttgtcagatagtatcatgatcacaataacatcaagcataatatttcattgattctcacaaaaacaggtgggtgccacagttatccccattatatgcacaaaatgatgaagacttggggttaatgagcgatttgcccaagctcacctgaatattaagactgagtcaaatgttagtctggtctgacttcaatgcttgccttgttcatgagcaccatgcattgcctctcctatgcagttaagcagggtagacaggtgagagaagt

SEQ ID NO: 40615 - DNA, 488 bp, Homo Sapiens
  misc_feature (474)..(474): n is a, c, g, or t
cggacgggtgccgcgctctgcaggcaaccttccgccgccccgccgccagcacctctctgggtaagagctgggttccgacagcagctcagcttaaccctctgccctgctaacgagggaaactgcggcggctccgcgcccagcacgcccggtaggccggagagagcggcgaggccttcggtgagcgaagagttaaccgcggcggagcgacagatcgctgagctgcacgctgccgcctgcgcggctggccagctaaactatgtggatccagctactggctatgtggtgctcacacagattgcccacttgcaaagaggtgaatgttgtggctctgcgtgcagacattgtccatatggtcaagtcaatgttaaagatccatctaaaaagaagcaattcaattcatatttttatgtttgacaagaatttcatctctgttccctaactgtgcttgtattttttaaaaaataaagcccccanttcagaattgcctg

SEQ ID NO: 40616 - DNA, 597 bp, Homo Sapiens
gcggccaggcagatctgggcacggacgggtgccgcgctctgcaggcaaccttccgccgccccgccgccagcacctctctgggtaagagctgggttccgacagcagctcagcttaaccctctgccctgctaacgagggaaactgcggcggctccgcgcccagcacgcccggtaggccggagagagcggcgaggccttcggtgagcgaagagttaaccgcggcggagcgacagatcgcggagctgcacgctgccgcctgcgcggctggccagctaaactatgtggatccagctactggctatgtggtgctcacacagattgcccacttgcaaagaggtgaatgttgtggctctgcgtgcagacattgtccatatggtcaagtcaatgttaaagatccatctaaaaagaagcaattcaattcatatttttatgtttgacaagaatttcatctctgttccctaactgtgcttgtattttttaaaaaataaagccccaattcagaattgctggattattagtacttgaacactagtttaatcctaaatacatatattaaaagaacatcaataaacatgaaaaagctaaaaaaaaaaaaaaag

SEQ ID NO: 40617 - DNA, 845 bp, Homo Sapiens
  misc_feature (730)..(730): n is a, c, g, or t
gctcgagcgattcttccacctccgcctcccaaggtgttgggattataggcatgagccctcatgcctgccccttgcattttctatttaagtgatcttgaagtttttttttttcttttttaaatctcggaatttggcctttagtaagcatagaatagcaaagtgtaatacctgagctgggggaaaaagtccttgaattctttaggaaagacttaattggtgggtacaaagtgaaatgctcactggaatcaggaatcagaaaccagttctgatcacctatccctacatatccttcttcactctgccctggcatatcatggttgatgtacatagcaatgatcatcccttctgtaatcccacttgacagtttagaagtggattgataatactcttctggcttaaaacccttcttctctgggcaggtgtggtggctcctgcattgtcccggcaccttgggaggccgagatgggaggattgtgtgagcccaggagtttgagaccagcctgggtaacatggcaagaccctgtctccacaaaaaaataaaaaattaactgggcacggtggtgctcacgcctgtagtcccagcacttggggaggccgaggcgggtggatcacgaggtcaagagatcgagaccatcctggccaacatggtgaaaccccgtctgtactaaaaatacaaaaattagccaggcgtgatagcaggcgcctgtggttccggctatgggaggctgangcgggagaatcagatgagcctgggagacggaggttgcagtgggctgggatcgcgccactgcactccagccctggtgacggagtgacactcccgtctcaaaaaaaaaaaaaaaagg

SEQ ID NO: 40618 - DNA, 884 bp, Homo Sapiens
  misc_feature (798)..(798): n is a, c, g, or t
tggaggccaggctggggtggggtgtggcaggaggacaggaatgcagtggaaccagtgggtcaggctcctgagggccccaggctccagcctcagggctggcctgttccctcctaagctgccatcttcatatcttcaggacccacccctctactcctcaccctcagcacaacgatgtgatcgaaaggcaaatatttatttttcaggaagagaaacaggagacctcgaggcttctggacttaggaggtccgggcagctggtccatggttgtccaggtagtgccgcagggctgtgggataatccgttatgacgccagtggctcccacgctgaaggctgcttcaaaatccgactcttcattaaggcaccaaaagaccacctgagcagggagggagggggcctgtagattctgaacaattttacatctggagagtggggacccacctcctcctctatggagactccccagcagcagtaggctggagctgattgttaaattctcaggaattttgcaaagtggttattaaacccagccattattaaaaattaaatcatagcctgggtgcagtggctcacgcctgtaatatcaacactttgggacgccgaggcaggagttgaggccaggtgtttaagatcgagtgagacctcatctctacaaaaaactttgtaaaaattaattagcccggtgtggtggtatgcgcctgtgctcccagctacttggaagactgaggtgaaagaattgcttgagcccaggactctaaggctgcagtgagctatggttgcaccactgtactccagcctgngcgatacaacaagacctcgtctcaaaaaaaaaaaaaaattatatatactgacaattaaattatttatttatttatttatttatttt

SEQ ID NO: 40619 - DNA, 581 bp, Homo Sapiens
tatctgttaatgtagattttatttaaaaaactatatttgaacattggtctttcttggacgtgagctaattatatcaaataagtatcacaaatcttttacgcagaagaaataaaaactacgggtagaaaacataagaactatcataaaatttacttacaaggaggctgctcttgttaccacttttattatattacgtatcacttattcagctctgctgaaaatttccaatgactttgtttgtttgctctttttgttttttacctaaacaatacattttgattctcttgtgggttgataatgtctccccaaaatttacatgttgaagcacctcagaatgtgactgtatttggagacagggtctttaaagaggtaaaatatggtcattaggatagaccctaattcaatatgactgatgatcataaaagaagaggcgagtagggcacaacaggcacaaagggagaccataaggagacacagaggaaggacaactctttacaagctaagaagagagggcctcagaagaaaccaaccctgccaacaccttgatcttggacttccagcccccaaaactatgagaaata

SEQ ID NO: 40620 - DNA, 878 bp, Homo Sapiens
  misc_feature (631)..(631): n is a, c, g, or t
ggattcaaacccaggtgtggctccagagcccatcctcttcccactgctaccctaactcaaactgccacatgctcgtgtcctttcagtggggagagtggttcattagagggggttgctacttttattttggacaggccagttctccattctgcaggactatcccatgtattacaaacagttggcaaccttgccctgctcaccaaatgggagttgcataccagtattccccagcttgtgactacagagatgtcccagtatgtttctttctgccccgttgaagaggtgcagcctcaggctgagaaacactgatagaccaagaggtggccagggttcccagaaggaaggaactcaccttgaacttagctttctttgaagggtaggaaacctggaagacgtacaaaggagggagaggtcaggtgctagaaagtttgtgcacattgagggcatgggcagaatctgctcccaaaagcattgaaagccaatatgaggccaggtggtggctcatgcctgtaatcccagcactttgggaggccaaggcaggcggatcacaaggtcaggagcttgagaccatcctggccaacatggtgaaaccccgtctctactaaaataccaaaaaattaactgggcatgntggtgcatgcctgtagtcccaactacttcagaggctgaaggtagaaaatcatttgaacctggaaggcggagggtgcaatgagccgagaatgcccccctggattccagccttgccgacaaagggagactccctcctcaaaaaaaaaaaaaagcccgctatgaatgggggcgtttcattctttccaaaggaaaactgggcaagggacaggggggggctagttccccgaagcacccgggggtccaaagaa

SEQ ID NO: 40621 - DNA, 682 bp, Homo Sapiens
cagatgtgtaaaataagtaacttcctatctttgtctgtctagctcaagagttgactgtggacgaggaatgcctgtattgattcattaatgtaataactatttactgactgcctaccatgtacaaccagaaacacagttcctaacctcatgaacttaccatgtaacatgggaagacaagcactaagttcttatttgtttgtaattgtgataaggctcagagaacaaatacagattcctatgaacccatgtatagggggaaatatttaggttccatttaatactgacatggctaagtatctcagtatttaagctgagatctgaaggataattagaagattcctcaggcagagggaagagcaaaggctgtgtgtggggcaggaagaaatgtggtcgtttgaggaacttcgagatcagcgtggccactgatgtgctgcagtgtagcaaagagagcaaaagaaagagagaaacagggaggaatggaattcagctcacgggctctggaatcagagtttcaagttggaatcctgacttcctagctgtatcggttaagaatttttttttgtggcatccaaagaacagaaagcctaccttactgaggttcatatcaacacggggaaattggccaggtgcggtgggtcacacctgtaatccactactttgggaggccgaggcgggtggatcc

SEQ ID NO: 40622 - DNA, 1022 bp, Homo Sapiens
ggatggtctcgatctcctgacctcgtgatccacccgccttggcctcccaaagtgttgggattacaggcatgagccaccgtacctggcccaggttttcctttttttttatgtcttctgtacaatagagttggccctccatatccacaggttccacatccctgattcaatcaactcctgataaaaaatattggaaaaaatttttataacaataaaaaccaataatacaacaataattacaaataatacattgtaacaatgatttccatggcatttataatacattgtattaggtattataagtaaacgagatgatttgaagtatattggaggatgtgcataggttatactatgccgttttatataaaggacttaagcgtctgtggattttggtatctgcagaggtcctggaaccggtctcccttggatacggagggacaactgtagttctctgtctttgaaaacattaatcgatacaagtggccagtgaatgtatagtatgggagggagtaatccagtatgggggacaaggttgccatatatttgccaaaagtagttgaatcttctttctgtttttcccccctggtggaataagtttattgtttgctatgaggagccagaggctgtgtttgtttaaagcaatggtacccaatcttaagcatgtgtaaaggtctccctgggtctgtgaaccataccttgagaaataactagaaaagtaaaagaatggtgaaccactattaataatacttccattttgcatactaaatatgttgcgtgtacctgtgtgtgtgtgttgggaatagtaatatgaagtttgctcacaaaacactcccactgtgattcacattattttatagcacaaccaataatgattaaacataattatttccttttgactacttttcatttcagtggtaaacagctgatgaagttatttgggatggaagagtaatacagacwtcgcgatggrkcyctgtgcgaggtttagcmcmccatgttagctgtcmcatwagsctcttttgaag

SEQ ID NO: 40623 - DNA, 529 bp, Homo Sapiens
gtgattataagtgtgagccctgtgcctggcctgtaacctttgttttgacaaatggatagtattaaaggaaattttcttgatacgcagtttagtctgttcttggacaagcaatgcagtaggtttgactttgagtgctttattactaacactttctggccaggccacagttaaggtccggttggaaaacacttgttgaggtttgaattgtaacctttttactggatgatagggtattttttagcccatagataaacttgcttaaaaaaccaagaaagacactgaaatctcagtctatacatagtttcatcagtgtttattgggaactgtgttctggataaagcaatcgtatgtatacatttttattatgtaatgtataagtgatttgtaaattataaagatctcctacgatactgtggtgtcttctagatagaaaatatatctttctaaaatgtgtgcctaattctagtgtagtgtcaatttatagtacacaataaatatttaatgaataaacattaaaaaaaaaaaaaaa

SEQ ID NO: 40624 - DNA, 597 bp, Homo Sapiens
agtggaacctgcatatgtgactgaattgctgcaatctcatgataaaacgtgaacaaatgaggagttgcttctaatataagagccacaaaagtggtttcttgagatggaaactactcctggtgaagatcctgtgaccattgttgaaatgacaacaaaggacttagaatattacataaacttagttgataaaacagcagcagagtttgagaggattgacttcaattttgaagaatgttccactgtgggtaaaaggctatccaacagcaacacatgctacagataaatctttcggaaaggaagagtcagttgatgttgcagccttccttgttgtctcatttaaagaaatctctagagccacactaaccttcagcaaccaccacaccgatcattcagcagccatcaacagtgaggcaagactgtcttccagcaacaaagactcactgaagacttagattatcgttagcatcttttagcaataaaatatttttaaattaaagtatgtacattgtcagatataatgctattgcaaacttaatagactataatatagattaaacataacttttataggtactggaaaataaaaaaaaaaaaaaa

SEQ ID NO: 40625 - DNA, 871 bp, Homo Sapiens
gtaactaatatgtggaaaggcccatttccaggtttgcgtagaagagcccagaaaacagagtctcaagacccccgctctggactgtcataagctagcacccgtggtaagcgggacgagacaagctcccgaagcccgcagcttcctgctccactcagctccgtccagtcaacctgaacccacccagtccagctgtctgtgggaatggtggtgttcttagggacagactgacaccttacttgtcagtgttcctccgggccccatttggcagctcccgtatcttctgttatgctgcttttaaagatatgatgttttattgttttaactcttggtgacagtagatgctctctggagcgcagacgaggcacatgtgtcttcatagcctgggctgggtgggagccagtcaccctgcggatcgagagagggggtagagtcttcttcaaatggcagttttacttcaaatggcagatttcacaagagttggttattttttacaatggtttaggtcgttaagtctcctttgtatgtaaggtagttttttcaacatctaaaattttcgtctagccttcaaaaacaattaccaacctcagtccagcctggggaaggcagcgtcgattatggtagtctgtcaagaatatatggacctggaaacactttcctctctctgtcacctgggtagattaatgtcctgtgagaattccagatctggactggaacctgccggaccaccgctccagggaagtccgtgggcaccgaggtatcatcgatggttcttcccatcttagaccatttggtctttgaggtcactatattttcgaatgatacggatgacaaggtccatgacagctttgaattgcaagtggaggacaggctc

SEQ ID NO: 40626 - DNA, 782 bp, Homo Sapiens
gcttaggaggaacacgacaactacgcttactgcattattgggaaaaggccagaagaagaaaatgtctataataaactcaccattgtgcaccatccaggtggtaaggaaactgcccacaatgaaaataagttttataatgtacacttcagcaataagcttcctgctcgaccccaagttgaaaaggaatttggtttctgttgcaagaaagatcattaaagaaggttattataatgaaactcacgaatctacggacattttgctttcagggtgaagcaggcttgaatttggattgcctgctctctttaaagcgaattcatactatgacagcagaaacaaaactacagatttcagaatttgttattggcaaaatttattctcattatacctgcttcatatgggtatattactattaaaacagaataccatagagtaattgcattatttgaaaattctctcattttacaatgcacttcaccaatgaaacagctaatttccattttgaaaattaaaagaaaacagcacagagaagttaaatgcggtgtagcaaagttatggggtctgcttgagggcactaacctcaacagattattcctcctctccttagaataaccatgaaaatacaaatttacttagcacatttttgctttttagtagctggttcattttctgaatttctcacattcagagttccagtcattattgttacatcatgtttgcagaaaccttgtcttatttagtgtctatttgcatataaccctggaaacattattatttgaaaactt

SEQ ID NO: 40627 - DNA, 622 bp, Homo Sapiens
ataaagtgaaacttactcctggagtgcagaaaaagggaaaagctgcaaaaacagccttgaatagtttcatgcattccaaagaagcaacagcaagagaaaaagacttattccgcagcgtaaaggacacagatttatcaagaaacattcctggcaaagtgaaagtgtctgcacccaatcttctgaacgtaaaaaggaaatagctgaaatgaaattctaaaatatttgagaagagccaattttatagccttttggaagttcaaagatgaaagcaccatgtatcaggatttccgcattataaaaatgaactaaacattgccttgctatattcaccaaaaggacttacttcttgttttttcccagttttatatagaggaaacactgtctatgataggatttccaaaagtatttgtggacagttaaatgctaattaatatacatctgtagttattctacattttcttgaaatttgggaggttaataccaagtattcatttcatgatgtaaagaaactgaacagtgaagtggcttgattgcttaaactattgacttggtaagtctactgtatataacatctaatatatatattacaggccaaatgaactaaacattgccttgctatatt

SEQ ID NO: 40628 - DNA, 366 bp, Homo Sapiens
ttccttttttcagaaacatcttctgagtcataaccagcctggcagtatgatggcctagatgcagagaaaacagctccttggtgaattgataagtaaaggcagaaaagattatatgtcatacctccattggggaataagcataaccctgagattcttactactgatgagaacattatctgcatatgccaaaaaattttaagcaaatgaaagctaccaatttaaagttacggaatctaccattttaaagttaattgcttgtcaagctataaccacaaaaataatgaattgatgagaaatacaatgaagaggcaatgtccatctcaaaatactgcttttacaaaagcagaataaaagcgaaaaaaaaaa

SEQ ID NO: 40629 - DNA, 874 bp, Homo Sapiens
  misc_feature (719)..(719): n is a, c, g, or t
  misc_feature (841)..(841): n is a, c, g, or t
cagtttatatcgatgaaacaagaagacttctggatactgaagatgagctcagtgacattcagactgactcagtcccatctgaagtccgggactggttggcttctacctttacacggaaaatggggatgacaaaaaagaaacctgaggaaaaaccaaaatttcggagcattgtgcatgctgttcaagctggaatttttgtggaaagaatgtaccgaaaaacatatcatatggttggtttggcatatccagcagctgtcatcgtaacattaaaggatgttgataaatggtctttcgatgtatttgccctaaatgaagcaagtggagagcatagtctgaagtttatgatttatgaactgtttaccagatatgatcttatcaaccgtttcaagattcctgtttcttgcctaatcacctttgcagaagctttagaagttggttacagcaagtacaaaaatccatatcacaatttgattcatgcagctgatgtcactcaaactgtgcattacataatgcttcatacaggtatcatgcactggctcactgaactggaaattttagcaatggtctttgctgctgccattcatgattatgagcatacagggacaacaaacaactttcacattcagacaaggtcagatgttgccattttgtataatgatcgctctgtccttgagaatcaccacgtgagtgcagcttatcgacttatgcaagaagaaganatgaatatcttgataaatttatcccaagatgactggagggatcttcggaaactagtgattgaaatggttttatctacagacatgtcaggtcacttcccagcaattaaaaatattagaaacangtttgcagcagccctgaaggggattgacagagc

SEQ ID NO: 40630 - DNA, 608 bp, Homo Sapiens
  misc_feature (593)..(593): n is a, c, g, or t
ggatggggcccagctagaccgactaggacgagacaagagggacagggaggcttcgcggaaccctacgcccacccgacgcgttcgcccgtccgtttttatttttatttttattttggtttttttgttgttgttctcttcttttgtcttttttttttctttagagacggggtctagctatgttggccaggctggtctcgagtccccgggctcaagcgatcctcccgcctcagcctccggaaaagtgggactacaggcgcgcatcgccgcacccggccaatccctgttttaatccttttccttaaaattgcaaaagtggtgtctttttcctgcagatggaccctccctgatacaggaggagaaaaagagacagacacagggaggagagcactgcacgcagctgaaggcagagattggaatgacacctctgcaagccaaggaacacggagcattgctgggaaccaccggaagaagccagaagacaggcctggagctggctttccctcacagccccagaaggaacccaccctggtgccaccttgatttcggacttctggccttcagaactgggagagaataaatttctgttgctttanaaaaaaaaaaaaaag

SEQ ID NO: 40631 - DNA, 581 bp, Homo Sapiens
agcgggccgcccccgccccgcagggcccccaggccgggcgctgggggcgcacaggcatacagattctctctcctcaccacgcggctgctgctggaggatggaggaggggtggtgtcagcaattcaagactgtctttcctaccctcttcagtgcccttccttgataagctgtttaaaccagaaccgactgtttctggaaaaggtaaacatctattctccaaagggcagtgactttctacctgtgaaaataaaaagtaaacttcagaagaaaattctgaaagaggaatttagagatgttccaaataaaggcaatatagtttcactggaactgaaatgttgccttccaattctactacagaaggcagagtggcacatgtggcacctggtcaggatggactcactaaaggatttaacccagacttctgatcaacaaatattgctgctacattaactgattcgcaacaaagaacagaaaatatcatccagttgattttacttatttacatatgggctcaaatcttaaatctgacaaactaataaataaatatgtctgaaaacaaaaaaaaaaaactctccagcgct

SEQ ID NO: 40632 - DNA, 391 bp, Homo Sapiens
  misc_feature (20)..(20): n is a, c, g, or t
caaaaccgtatgtttctggnaaaggtaacatctattctccaaaggcagtgactttctacctgtgaaaataaaagtaaacttcagaagaaattctgaaagaggaatttagagatgttccaaataaaggcaatatagtttcactggaactgaaatgttgccttccaattctactacagaaggcagagtggcacatgtggcacctggtcaggatggactcactaaaggatttaacccagacttctgatcaacaaatattgctgctacattaactgattcgcaacaaagaaagaaaatatcatccagttgattttattatttaaatatgggctcaaatcttaaatctgacaaactaataaataaatatgtctgaaaagtaagaaaaaaaaaaaaa

SEQ ID NO: 40633 - DNA, 418 bp, Homo Sapiens
attactgaacctgtcttgctgtgcctcgaaactctggaggttggagcatcaagttccagccggccccttcactcccccatcttgcttttctgtggaacctcagaggccagcctcgacttcctggagacccccagaccagtgtgcttttcttggagaaagaagaaaagaagaaagaaggaagaagaagaagaaagaaaggaggaagaaggaagaagaagagccagtgtgataatacattgagtgattttttaaaaagtgcatatatgagcaaaaagttatttttcccttttctgaagtatggcagcatactatatagactgtctctgcatgtttatttttcccccatttaatatatcctggagatcattttatatcaatataaaaatggttttctcattcttttaaaaaaaaaaaaaaa

SEQ ID NO: 40634 - DNA, 378 bp, Homo Sapiens
cttggttctgctgctgcaccacatgaagtactcagagtaccagtccataaattaaggcccgctctctggagggaaggacattactgaacctgtcttgctgtgcctcgaaactctggaggttggagcatcaagttccagccggccccttcactcccccatcttgcttttctgtggaacctcagaggccagcctcgacttcctggagacccccagagacatggtcttgctatgttgccagtctgggctcaaacttctggccttgagtgattctctcacctcagactcctgagtagctgggattacagatgcgggccaccacacctggctgtacaaacttttgtttgagcttcaatgagtatagtcaggcatctatttggt

SEQ ID NO: 40635 - DNA, 315 bp, Homo Sapiens
attaatggtcttatggttgtatagaagaatgtccctctaattaggaagcacgtgctaaaatatttaggggtcaagtgtcttcatgtctgtgctttcaaatggttctagataaaatgaacatgtcagaatgctaataattgatgaatataattatggatgtcctggtgattattatacgttttttcaacgttactgtatgtttgaattttttaataataaatttggggtctgggcacagtggcggtaattccagcacttccggagaccaaggtgggaggatcacttgagtccaggagttgagcctggggaatatag

SEQ ID NO: 40636 - DNA, 683 bp, Homo Sapiens
cgcgtccggtaatgggagccatgctactggtttatttacaccaagctggatggtttccttttaggcaagaaggaggtcatcagcaggctcccaacaataatgccgaagttaacaatgatgggcaaaatgcaaacaacttggaacttgaagaaatggagcgtcttatggatgatgggcttgaagatgagagtggagaagatggaggtgaagatgccagtgcaattcaaaggcctggattaatggcttcagcttggtctttcatcaccaccttctttacttcactaataccagaggggcctccccaggttgccaattgacctgaaaaactgtgccagctacaaggagggtctgacttcaggaaagtggtttaaataacagtgcaatttcaaaaaaatttataactttcttttgatcatcatgtacagaggtgttttttttctttaggcttctcatgcatatgaatattttaagcacgaatggactactaaatatctgagttttttttttttttttttaaagatcctaacagaacatagcgtaacaatattgggtcttccaggggttactcatttcaattatgtgtagtataccaggacagacctattttcatgtcttatttctttaaagagctgcttcattggccgggcgccatggctcacgtctgtaatcccagcactttggga

SEQ ID NO: 40637 - DNA, 851 bp, Homo Sapiens
ccgggattgaaaaggagatcttccacctaaacagtgttctcttatttgaagcaaatctttttgagaatttgtttacttgatttctttccacaataaactgacagagaacgctactaatgattttttttttttttgagacggagttttgttcttgttgcccaggctgcagtgcaatggcacaatcttggctcactgcaacctctgcctcacaggttcaagtggttctcctgcctcagcctcttgagtagctgggattacaggcatgcgccaccatgcccggctaattttgtatttttagtagagacggagttgcaccatgttggccaggctggtcttgaattcctgacctcaggtgatccacctgcttcggcctcccaaagtgctaggattacaggtgtgagccaccacgcctggctaattttgtatttttagtagagatggggtttctccaaaggctggtcttgaactcccgacctcaggtgatccgcccaccttggcctcccgaagtgctgggattacaggcgtgagccaccgtgcccggcctgatgtttttgaatgattatgaaaatgggtatacagcattaaaaccttagactgattttaaatatattaatttcttttaaactcaatataatgttaatattactgtagcacttactagcatttctgaaggttggtcttgagataagattgaaaatgacagttgttgattttctgaggtaatatacccaaataaaatatatgtatgtgtacatgaatctaaactgtcttcttctgttcctcattttgctttacttaaataatctttcatattttttaagtgttttgcccatgtgcttgggtagccttga

SEQ ID NO: 40638 - DNA, 630 bp, Homo Sapiens
atcacttgagcccaggattttgagattaataatattatttattactattattcaagctttgttaaatcaaacctaaagctcttggaactttaagttattctgagccttgacaggaattggtctctgcagcctgagtcatggggcatgcagctgcaacttccacctatttttttttttttctgtaattacttaggaagaccaaatggcaccagagataagactcccttagatccccacttagatcaccaccctttctcagggggtaataaagtcatcttccttggaatgtagcaatctataaccaatcaaagcactgtaacatatgcactggtcttgtatggaaaatgttgtaatcctgctaaaattcctctctctttgcctgtggaagtgaaaccttaacttctccagtttggaatgctcaccccattcctttggagtcaatgcttactgggtggctattctcaaactttgcactcaaagaaactctatacttagtcttattttctgaatctcattatttaggttgacataataaacaactattagtaagtaaagtgaaaaaaaaaaaaaaaaaaacttgaggggggcccgtacccaattcgccctatagggagcggattacaatcacta

SEQ ID NO: 40639 - DNA, 386 bp, Homo Sapiens
ctatttttggcctctgtgctcatgccatcccttctgcctggaatgcccttctccactgtctgcctggctaactcctgctcattctggaaggctcagctcctcctgaaagccctccctgaccccaaccccagctccttcctcagggtgtcgtagcacagggatgcttttggtctaattcaggagagcatcatgtgatatgcttttaaagtaatgagttaaaatgttagacaatatgaaactctattatgtgatatattagatttcatgtcattacattgtattatattatatttttaggtggtatgctatgtgacataggatgcgatgtgatattacatcccatgacactatgttacacggtgttggattaaatgcctgtgtctctg

SEQ ID NO: 40640 - DNA, 541 bp, Homo Sapiens
ttttttttttttttttttgaggaagaatttgaggtgaaagatcatgttaattgtaacaattgccagtactttgtgttcactatgtgtctggcactgatttatgtttattaatttactacatcctcagaacaattcagtgaagtaggtattactaatattcttactttgagattatgaaaccggggctcaggtagtttaaataaatttgccatgtcacacgcagtggctcatgcctgttataaccaacactttgggatgctgaggcaggaggattgcttgaggccaggagttggagcccactctggggaaaacatgttgagatcttgcctctgcaaaaataaagtaaaataaaatttaaaaaaagtaaaaaaataaaatcagctgagcatggtgacatgcacctgtggtaccagctactttggaggctaagttgagaggcactgatgggaggatcatttgacggcccagaggttgaggctgcagtgagctgtgtttgtgtcattgcactccagcctgcgtaacagagtaaaaccttctgtca

SEQ ID NO: 40641 - DNA, 927 bp, Homo Sapiens
gggattggccagtctctccttgggctttcaccgtacctcatgccatgtcacctgtaamagtgttgtagttacctgcttatgtctttgtccttgagggcaaggcccatatttatttttatttccagtgcttggcatatattaataaagaggtgcttaagatgtttgtacaaatgagttaaggtggagggaggagagttgaggcacaggtcagctggctttggcttctgtcttcttagtaaggtgaacagtgagtcatccacacagattataatggtagcagagctggagtctacagctccttgagtatgaaagtccccttgagtgtgaaagamaaaatgctggtcgggggaagagaaggggaattaaaaggtaagtggaagatggcctaattgccaagtgtacagcttcagctcagcatataattgttatggaccccagttatccactcacctaaccgtcagtgccctgtggctcagagcagcagtgaagctaagtaggaggtgaggtttggaaggtgagtgctgtgcagcagtcttggagatcatagttgacagtgccggctctggggtgggcaggaagaccattgttgggtaagtgaggggaggtgggggtcacagcaaatatgagaaacacagccaggcactgtggttcacacctgtaaccccagcatttaggaaggctgaggtgggaggatcacttgaggccaggaattcaagamcagcctgggcaamatggtgaaaccctgtctctactaaaaatamagaaattagctgggtgtggkggctcacacctgtwctcccagctactcggraggctgaagtgggaggatkgctttagctcaggaggcagaggttgcagttagctkaraaggcgcaattcsctccargctgggkgacammaraatttkccttaaaaaaaaaaaaaaaa

SEQ ID NO: 40642 - DNA, 582 bp, Homo Sapiens
ttcttcctatgaaaatgccgagaaaacagtcaaatgaatgagtctgcacctggtacctatgttgttcagaatccacacagctctgaattaccaacgctgaatttccaagatactgtaaacaccctgaccaacagtccagccatcccattggaaacatctgcatgtcaggacatacccacttctgccaatgtacaaaatgcagagggtaccaaatggggagaggaggcattgaaaatggatcttgacaataacttttattcaactgaggtgtcagtttcttccactgaaaatgctgtcagttctgacctccgggcaggggatgtacctgttttatctttgagtaatagcagtgagaatgccgcctctgtgatcagctacagtggctctgcaccctcggtcattgtacacagcagccagttttcatcggtgatcatgcacagcaatgccattgctgccatgaccagcagcaaccacagagccttttcagacccagctgtcagtcagtccctgaaagatgacagtaagcccgagccagaataaagtgggtaggtttgcaagcagacccaaaagcattaaggagaa

SEQ ID NO: 40643 - DNA, 796 bp, Homo Sapiens
aaatggatttttctagctcctccaagttacagatagttccacgcacacacagaactcaccactctcaaatattttccccactagtatactattaaatttttcaaacatgcaaaagatgaaagaattgctcagtgaacaccatgtacccaccacctagattctacaattaacattttaccctactttctttatcacatatatgtacctatccatctatccattcttccatgaatccatcaattcatctaattttttatatatttcaagttaagttgcagatatgtagcttatgtttcaccttaaatgtttctgcctggctattattaactggagtgcaatatgtttttggttcttctttatggtaaaatctatgttcagtgaaatgcacaagacttaggtatgccattaataggttttgacgaatagacaaaccttgtgtctgaaactgtaataaaaaaatcaaacactaccttgctttcaaaaagtttcctcacttcttttcttggtcaaaaacccctccccgctcagccagccctcagcaaccatgttctcaattttatattttggcattccctagcattgcttttggcttgttccataacctcgtataacctgaacagtgtccacgtgttgccagggtccggtgtctcggcttttttccaccaaggcacctcttctctgacattcctcttctgtgcagttacttcgccggccatctctttcgcagcaccgacctgccgcgggctaggcactgttccattgcgtggctatcccccgcttcttgtcagacctcaca

SEQ ID NO: 40644 - DNA, 750 bp, Homo Sapiens
  misc_feature (660)..(661): n is a, c, g, or t
aagacatgagtgaactcacactgcagagaaaccctatgaatgcaagcaatgtggtgaagccttcagtagttccagctccttttggtaccatgaaaggactcacactggagagaaaccctatgagtgtaagcaatgtgggaaagccttcagatctgcctcaatccttcaaatgcatgctgggactcaccctgaagagaagccctacgagtgtaagcaatgtgggaaagccttcagatctgccccacaccttcgaatccatgggagaactcacactggagagataccctatgagtgtaaggaatgtgggaaagccttcagatctgccaagaaccttcgaattcatgagaggacacacacacacgtaagaatgcactctgtagaaagaccttatatatgtaagatatgtgggaaaggctcttattctgccaagtcatttcaaatacatgagaaatcttacactggagagaaaccctatgagtgtaagcaatgtgggaaagcctctatatctctcacttcttttcgataacatgaaaggactcacactggagagagaccctatgagtgtaagcaatgtggaccttcagatctacctcacaccttcgaaacatggtaggactcacactggatagaaaccacagcaggtgaatcacctgatgtcanngagtcaagactggcctgatcaatatgatgaaacacctgctctactctaccacgagatcccttgatcttgtgggcagagttgcattagcc

SEQ ID NO: 40645 - DNA, 677 bp, Homo Sapiens
aacgggataggctaggtcgaggctgggtgttgtgaaagtggagaacaggattaagactgggtgggaactaagaatgacaggtacttttaacaagtacagctgggatgctgttgatgacatgaatgaaccccactcttactgtagtcattgctcaagattcaaagtcatgaaaaagagtagaatggaccaaacttaggtactaagagtccccagcctggcagtgaaaacagtatagttcctttgactttaatatggggaaacaggttcctggatggacgatctcaccaaaactatacacaatttttttttattttttctcagacctttcagggatgaatatatacaatttctgagaaagaaacctgagtacctttaggaagggaaaaggaatgctgaatatccccaaataacatgtcttacatgtttggtaaggcttactgtaccctgtcctagaagatagaagatgccctgcccttagaagacaaagagactgtagagctatgccttctaaatcttaagccactcttcagataatggatcccttcatggtcagcccaaacatctcaagaacttttaatttgtaccgtgtgtctttttttccatttatttaataccacaaattccactttattattatgaagccaatatctacatcttctcacaaagattctcttaag

SEQ ID NO: 40646 - DNA, 712 bp, Homo Sapiens
ccccgcgtccgccctcctggcgtttatccggaagaagcagcaggagcagcagctgcagctctactccaaggagagattttccttgctgctgcttaacttggaggagtactactttgaacagcatagagccaatcacattttgcacaagggcagtcaccatgaaaggaaaatcagaggctccttaaaaatatgttcaaaatcggtgatttttgaaccagattcaatatcccagcccatcatcaagattcctttgagagactgtataaaaataggaaagcatggagaaaatggagccaatagacacttcacaaaggcaaaatctgggggtatttcactcattttcagtcaggtatatttcattaaagaacataatgttgttgcaccatataaaatagaaaggggcaaaatggaatatgtttttgaattggatgttcccgggaaagtggaagatgttgtggagacgttgcttcagcttcacagagcatcctgccttgacaaattgggtgaccaaaccgccatgataacagctattttgcagtctcgtttagctagaacatcatttgacaaaaacaggttccaaaacatttctgaaaagctgcacatggaatgcaaagcagaaatggtgacgcctctggtgactaatcctggacacgtgtgcatcacggacacaaacctgtattttcagcccctcaacggctacccgaacctgtgg

SEQ ID NO: 40647 - DNA, 977 bp, Homo Sapiens
aatgtgtcttgaatggaattacctacagtgagagttaggtgcattaggtaacaagcgcagagaggaatgactgcctctgctgatggtaaccttgaattttacaaatgacactggagcctttctgagactagtgttgcatgggtcctcaataagaatcacactgttgttactcacttcctttgggtttataaccctggtgataaagtaattgagaatagtggagtaaaccctcgacttgaattcaggaaaattgttttcaaatccagtttcaataagatctcacatcaggcactctatttgatgaatgaatgaacaaaacctaactataagacacttgacttcagggagtctcaattccttcatctgtaaaaagatctaattcctaactttggtaatgttggggagagtgaatgaaataatgtgagagtgcttcgtaaattgcaaaagtgttataaagaagttactggtaagagctacgagtgtctcgctgcactctagcatgggcgacagtgcgaggccctgtctcagaaaaaaaaaaagttacttataatgacattttcagacatgagaaatgggataaaattgaaaaaagattcagagaatagtatgtgagatgtgtagagacagatgtagctaatggaaaaaagctaaagtaagtctctctaaagatgtttattgaggtacttatgcatattatatggttgcaaaaatgtacagtgtcctttggtacatggacgcagcagtatattaggatatggttacttagttggtcacctgagggggagataattcttcagagacgggatggttgctcgaatataagttatacggaatgagagggtggagtttacaagtggggagtatgaagaataagggagcatcgaacacagaggaccacgtgttataaggcaacagagtaagggaatataaaataaggggaagtaaaaagtatacccggacgtatatggtaatctggt

SEQ ID NO: 40648 - DNA, 709 bp, Homo Sapiens
  misc_feature (651)..(651): n is a, c, g, or t
  misc_feature (659)..(659): n is a, c, g, or t
  misc_feature (709)..(709): n is a, c, g, or t
tctccatgtacataccctgttcctcatgagactcttccccattccccgaccaggttcagcaaatgttgctgattctggcctgattcaatctttatgatgactgccaagcgacgtttctgcagcccagcactccttcctcatttgccagtcatccctcccttctccttcatttattttcatatatccactatggattcccattttttcaaaagtcgacttcatcattgacctttggggatgggggaagagttcctcagatagttcccgacttggccagcgagagccccttcgagtgcctcctatatcccagcatttttggaagcactcccctaatttctgatctaacaagatgttccgggcccctgggcaccagccatggatcagtgtttgtcccaggagccctggtccctggcactaggtgtgcttattgcagctggggtgtctttgcttcttgtcctatagatgattgacagagcttgtcttactgccttttttaagtgtatttttttaaacaaaagtaattggtgctttaaaaaatgtgaacaatacagacatctgtaaagaagtacccacagggaagcaagttcagcagttcagcaatggcatgtgtctttgcagactacatacacagaaacagacttggtattgggntttttggntttttgctttttgctaataggaattttatcctacaagatcctctttctgn

SEQ ID NO: 40649 - DNA, 1064 bp, Homo Sapiens
actgaatctcccctctgtcaaagagtaaaatttttgctttttgaaatttttgaattatcagtttggctaaatgaataactattatcttacagtgacctgtaatcttattttgatcaagtgttttaaacctttgatatttgacaaactttccaaaatcaaatgtaaaattctaacttaaatgttttcgacctcaagctaacttttgggcattaaagcccttggaagtccaaatagggcccctggaagtccaaaagaaacatattaggctaatttggtatattaaaatcatacaggaagctgatcaaataaaaaatgttgtttaattttctttgagttgtatttgtataaatctgttattaatatgcatcccaaaattgtatcatattgctaaaatgttgatacatcttgttatatgttattggtaataattgttatcctgttaaattattgtataccacagaaataatgaaatttctttgtcaattgcatcagtaatcatggtctcttctaagccttttgtcattcacagatgattattgttttacttgggatttcttttcaaaaagtgggtttgtaatttggctacaggcctaaagatcctgccttgtccccggaacggacgctataaaaatcccctgggaaaaggggcgccctggaacaggcaccaccaccacctttaaaaacaacagggcattttcttgggaaaaaacccttttgggggaattttctctatatccgagttggggaacattagtcttaaaaagacgtttccccaacaaaaaaaatctctctttctaaaaaattccccacaataaaacacttaacttggaacgagaactttggccttaacttcctccaatgcttctcaacggtagcgaacctcaaaagagtcttacattttacgcctcgcgcgggcgttgcgcaaacctcgtaatcgacaaaagggggccccaaacaaataaaagcaaacgttgatttcacaacagacagcccttttatgtattttgtgaggacattcgggaacaaacccccttgggccccttaggaacacacgtctctctgca

SEQ ID NO: 40650 - DNA, 601 bp, Homo Sapiens
gggcaactctgagatgtcaggcaatggggaaaggagagctcaggtgggactaggaggggtaggaagcccgagggctgcagtcaccatcttcagaccactccagagcttcctggggagcaggaacagaggacaggccatgaagcccagaaaggcagatggcagcagaatactaggaagacacctccaatagtctgtccaaagagggtgaggggattaggaagtacagacatttcctgagttacaattttctattttaaaatgctatgaaagctatatgcatttggtaccctcctcaacttatgacgcagttgtgatggggttataaggttacttcggataaaccaactctatattgaaaatatcgcaagtcaaaaatacacgttcgggccaggcgcggtggctcacacctgtcatcccagcagtttgggaggccgaggcgagcagatcaggagttgaggagttcaggagttcaagaccagcctggccaacgtggcaaatacccatctgtactaaaaaaaaaaaattacaaaaattagccggggcgtactggcacacgcctgtgatcccagctactcgggaggctgagacatgaaaattgctt

SEQ ID NO: 40651 - DNA, 553 bp, Homo Sapiens
agtagggcgaggggcctggcagccggccggtccccaaacaggaaccccagccctgttcccgcgggccatcgacccctcttcgcccagcgctctctctgcgccctggctgggggtcttctcactctaaggtggtttttgggttttgtttaggagggtgggtggggaaggctgagcaaagggggagcagctacagacaggtgcaggtgttctcggagggggtgcgcggcctgggtcctcatctcctacctccggatccctcttccagcctcacccggccccctttccaaaaggctgggaattcatgagaattcagaggctgcgacagcagcgcaggctcctgcggctccttagctgtgctcatccggctctcagtggatggcaggataatccgagagtcttttctgtgtctccccagccctcacttttaaaaaatttaaatattcgctctaacaaatataaatttaggatgtataaatctcttggcactgagtctttgggacacacatatatatcgatacaattgtaaaaaaaaaaaaaaaaaaaatgcggcatt

SEQ ID NO: 40652 - DNA, 990 bp, Homo Sapiens
gtcttgatctcctgaccttgtgatccacccacctcagcctcccaaagtgctgggattacaggcatgaatgaccgcgcccagccgcaggcgcaacttttttgagttttcctggccaggcgcagtggctcaagcctgtaatcccagcatttgggaggccgaggtgggcggatcacttgaggtcaggagttagaaaccagcctggccaacgtggtgaaaccccgtctccagtaaacatacaaagccattacagggcatggtggggcacgcctgtattcccagctacttgggaggctgaggcaggagaactgcttgatccggggaggtggaagttgcagtgggccaagatcatgccactgcaccccagcctgggcaacagagcaagactccgtaccaaaaaaaaaaaaaaaaaaaaaaaacaggtctatattattccagtttcctaattatcaattttaaacacaagaaaatttggggccgggcaaagaggctcacacgtgtaattcccagcattttgggagacgccagggggggagcattcacgaggtcgggagatgggcagaccattccggggctaacagggttgagaccccggtctttacttaaaatctcccaaatttcgccggcatgggggggttgtgccgctggaagtcccaagtacctcagggaggcaagcgcaaagaatggcttgaaccccaggagggggcggatgtgttggtgtagcccaaggatcacaccagtggatctccacctggcgtgacaagcgcgagactgctccaacacaaaaacaacaacaggggggggcggcaaaatttcaccggggggccagagttacgctaccaggtttgtgcacgggcccatgcgggcggataacgaagaccgggcggttaaaacgtcgactgcacacacctgaagtggaagcactcttcgggtgacatggacacaccagagtagcaggaacaataggatgtaaccgcttcggaagcggtttaa

SEQ ID NO: 40653 - DNA, 853 bp, Homo Sapiens
aagaaaagttagaagtcacccgtactgaccaccagagagaaataacttctctgaaggagcatttggagcccgggaagaaactcatcagaaggagataaaggctctgtataccgccacggaaaagctttccaaagagaacgagtcattgaaaagcaagctggagcatgccaacaaagagaactcagatgtgatagctctatggaagtccaaactggagactgccatcgcatcccaccagcaggcgatggaagaactgaaggtatctttcagcaaagggcttggaacagagacggcagaatttgctgaactaaaaacacaaatagagaaaatgagactagattaccaacacgaaatagaaaatttgcagaatcaacaagactctgaacgggctgcccatgctaaagagatggaagccttgagggctaaactgatgaaagttattaaagaaaaggaaaacagtctggaagccatcaggtcgaaactggacaaagcagaagaccagcatctcgtagaaatggaagacacgttaaaacaaattacaggaagctgaaataaggtacggagctagaggtactgaagccaaatgcaatgaacaaaccaggttatgatatttacatcacaggtcaggtactgagaaagctcctggtctgatgccttcggaagcagtcgaggtatcggaatggagaacttgacagagtgggggtgagaacgatttactttgggtgaagagtggagtgcaggtgtggcttccgggggccggggaggaagttcactcggaatgggaggcggagagtggaaaccttggaattgggtagggcggaaagaagaacgagggggggggagcggtgaagga

SEQ ID NO: 40654 - DNA, 448 bp, Homo Sapiens
tcttggcttgctgcaagctccgcctcctgggttcacacaattctcctgcctcagcctccagagtagctgggattacaggcatgagccaccacgcccagctaattttgtatttttagtagagatggggtttctccatgttggttaggctggtcttgaactcccagccttggatgatccacccacctcggcctcccaaagtgctgggattacaggcgtgagccactgcgcccagccccagtgataaggatttttatgggtaccgtgttgaatctaaatcacattgggttatataatcatttaacaatattaatttttccccataagtatgggttgtagctctatgtttctaatcattttgatcaatgtttgtagatttcaaggtacctctgaccttttacgtttatttctaagtatttcttactttaagttctccagcctggggtgtttt

SEQ ID NO: 40655 - DNA, 492 bp, Homo Sapiens
atgtgccgggcggggctgctggagcctcccttgggggaggcagatctgagcaaggcttgagactgaagggctgggctagctgggggcagggaaccacaggagcagagatcctgaggctgagttatccgggtcgatgagaaggctggactggctgcagcttagtcaactgcagatgaggcaagagagcggccctgggaccagggaggaggcaggtcctgcggggcttgggaaggagttccgtgttggccctaaggaaaatgcgaagctttctgaggttagatgtggggatgtgatatggtcagattggctttaaaatgagctgtctgggccgagcgtggtggcccatgcctgtaatcccagcactttaggagaccgagttgggcagatcacctgaggtcaggagttccagaccagcctggccaacatggtgaaaccctgattctactgaaaatacaaaaattagctgggtgtggtggcgggcgcctgtaatcc

SEQ ID NO: 40656 - DNA, 614 bp, Homo Sapiens
  misc_feature (17)..(17): n is a, c, g, or t
taaaaaatatatctagnaatgggcaagaaggattctcctcattcctctcttgacttgagaatgatcagtcaataggccctgaagtctgaatttgtgaaaatttccttgggtgacaaacttgtttgattactctatttagtgtatcccaaagttattaccacataatcttttaaacaataaaacaaataccccttagaaagtcttctgcaaacccatttctgaaaatggtacattatagggtgggtatagatgcatagatatgggattatgtatgatatatatatatatacacacacacacaaagggatagagagattacctctcttaacccccattttaattactatgtctaggttttttaaataaaaatcttttctttttaacatgtttcttttcttttccggaatattggaatattctgttcttgatccagatgaaatctgattgagcagtgtacttacaagttgtactgtgtatgtgtttcctatattgttatatttcaataagaagcttaaaatgtttaaaaataaatggttaaaaggttttatgttatgtatattttaccacaataaatgcaaaaaataaaaagtctgtgttctaaaaaaaaaaaaaaa

SEQ ID NO: 40657 - DNA, 1030 bp, Homo Sapiens
ctttgttttcagctttaaaaagtttaacgggtcatgccaatgatcagaaaatctgtaagaattttagagcaatttttctatgtacagctatgttaaacagtctgaacatgagactttttctttcaagttgaagattattgtcatcgttttaccactaagttggttgagacacttacttgtaatactttaatttttttaaagtgtttttagaaacaagttgtttgaaaaccaattagaaattagaatatttgccagattataagcagatggaatgcagtgtaaaactgttaacaatgctaataaaattatgagtcatcagattggtacagttttccctgccaagatggtcatattgataatgtaagacaaattttagtattacttgcattatgtgtacctaataggtatatcatactggtactgagcatatatagaaaatactattcatagaggagtcatcaccacccaacctccttgcctgtgtaggcatatttcttctgaacctgaccacacaagtacaacattttggtaacttcagtcttttcagtatttttgtaatcttagccatagtcctatgagaaatgtacataagagcaaacaattcaggatagaaattagcagaaagctgggaatgatgtgaaataactggcagcatagtacagaaatgtaaggtatatgttttgcttctggatttttagaaattgtgctaatcatgtttacaaattaaggcatattcagatgtctgctattatgtttaatattgatttgataaaaaaatggaattaggtgtagcttagagtataaatgagtcctttttaaaatgtgtatctgggaagtagggctaattaaagaaatccttttattttcaaagaatgaactttaattggaccactcatcccccatttacgaattggtatccataagggttggctggattttgaggataaaccggctcggggttaattatattccaagggaaggtcctttacatccttcattggattaccaaattttccccaggaaaatggat

SEQ ID NO: 40658 - DNA, 1095 bp, Homo Sapiens
  misc_feature (798)..(798): n is a, c, g, or t
  misc_feature (864)..(864): n is a, c, g, or t
  misc_feature (886)..(886): n is a, c, g, or t
  misc_feature (1048)..(1048): n is a, c, g, or t
  misc_feature (1066)..(1066): n is a, c, g, or t
gcctttctcaaagtggaagtctcatcctcacttctctggttacagtgctgggccatgggtaacttacaaggcttagcaggaactgtctgcgcactcccccttcctgcccactaccttgtttccctccagttgcgagagaaaacattgattgagcattaactatgtgccaggcttgtcctaagtcctttgcatgtattcactcaaacaatcctcacaacattcctatcacatctcccatttcacagtgagggttctaaagcacgtagtgggtgaggaacttgtccagggtcacacaactaagtgggggtggagaaacatcaaatctaggtggtccaggtggtggccagaacccatcagcacctcactacagctgcctccagtttctcgctctaggaaatactcttccctgtcaactcctgttgtcctctgggctcagttgacatgtcatctccttgaggaggacatcctgagatgctccccgactagggtgggcacccacttccacactccaaatgcctatttgacctgtgtatcgctgcatccccactgcctggcagatagcaggcccctaataaatatgatttgagcaaataaatatagttcttcaaaaaatagggaggacttcttgcttcaggtaacggtaggctaggacatttggaccaaccctcctgcagaaaatagccatttattttgatgcaatatatctggctatgactagagatttcaaatatttggagggctattatgtgaagaactaaacttactctttgtgacatagaggtcagaaattggtcgttntcatagagtatgagagagacagattgtgctcatcataagtatcttttttaaagttagacttaatanatgggctgcctttggtagtggntgagttctctgtcacgaaagagatcagccacttgctctgagaaagcatggagaatatccaacatggtaagggtcgaccacctcatctctgaggcccccctcctcacttaaggtgccatttgcaggtgggaaccactggggctgagtgtctcaagaacctggngtttcaccagctgggtgnaaaccctggggcttgggttggttttggga

SEQ ID NO: 40659 - DNA, 819 bp, Homo Sapiens
ctgcctgtctcggctcccaaagaactgggattacaggcatgaggcaccgtgcctgtcccatgtgtacttaatagatatttaccatatacaattattttttaatttaaataaatcaatgaacagtgttattttttaaatcttgtggctttaatacaccctttcaattctcagggagtgttttggtgatacaggctggggagttaaataaatgaacgaataaacttagttgttatccattcaaaaaaaaaaaaaaaaaaaaaaaaaaaaaaaaaaaaaaaaaaaaaaacaaaaaaaaaaaaaaaaaaaaaaaaaaaaaacaaaaaaaaagaagagagagagagaagagaagaaacaaataacaaatcaaaaaagaagaagcaacaaaaaagcaaagcgtaaacaacacagagagcgcgggcgcgagcagaggcgagccccccttgagtgagaacacattataaaataccgcagcgaagacgagggtagcgtttacagaaagacggagcagcgttcctcgagcgggagggacaacttcacctattaacaacctgaatctagcttgtggaagaacagaacaacaccactcggtcggagggaggacacaaacaaatgacgtgataacagtaacatctccatcctctgcatcgaaaggattaccacacccccgttcgggcggcgagacaaaaataaatgatagtgaaagttacatactacagcggtagcacaataaacgacacgtcagactactatgatcggctataatagtcataaatgtttgcgagcacaagccgccgagtttattcgatcacgagacctctt

SEQ ID NO: 40660 - DNA, 1029 bp, Homo Sapiens
  misc_feature (7)..(8): n is a, c, g, or t
  misc_feature (18)..(27): n is a, c, g, or t
  misc_feature (708)..(712): n is a, c, g, or t
  misc_feature (714)..(714): n is a, c, g, or t
  misc_feature (716)..(716): n is a, c, g, or t
  misc_feature (718)..(718): n is a, c, g, or t
  misc_feature (720)..(721): n is a, c, g, or t
  misc_feature (727)..(727): n is a, c, g, or t
gcccgcnngaatatgccnnnnnnnnnnaaagaggctggtccggtccggattctcgggattgaaatttgcttttggcatcttcttcagtagcccaaaactgtcctgccgttttccaagaacactttccgtccataatgaggcaaggggaataaattgatacaaattcatgatttgagaagtggattgtttccctctcttctacgagtttggatccctgatcagtagacagacacataagacaactttctactgtgcaaattaaataaggattctgccagcaggccttcctttccattaccgcctatttccatttttcaagacaagtaaaaataatagtggaacaatatcttcaaaaaaattactagagcaacataatgcatgatatacaatatataaaataggacagcagaatccactacagaaataaaacatgggacttgggacagattgcattatgctctgaaaagtgaagtaactaagggtaaccgtaaagcttcgtatttatagactgcctttcccctgaggatctcagagtggttaatgttccaggagcgagggtgcttatggacttctgcaccattacttaagcaacttcattttttggcagaggtgccagcttgatatgaaaccacatgctgtgcaaggaccatttatataattaactccatttttgtaacacacctgcttctaagtggaaatcaactaccnnnnnanananannatattnaataaaacaaaaattttctcaattaataatcccaataaattcaattatatgttttcacttgcggcatcagtattatcgcatcgccattggtgtccggcctccgattactcgcccttagcctccctccacatcatatattctgggggggggcgcccctttcataaaaaaaccccgcggagggggggggggattaattatagcgcctcacccaccctttttttttttttaaaaaaaaagggcgccccccatagtgagagggggtgctttttatatataataaatccgaagccttgcgattcctt

SEQ ID NO: 40661 - DNA, 748 bp, Homo Sapiens
cggacgcgtgggtcgcaaaatttagaagtgaaggatggttcaatttgataacatttaaaattttttgaattttctttatggtaattagaggtgaatcacttaaaatatagatacaaacttactctatagggtattatttttataaattggcattcagacagcttctgtgaaacatactaggagtatagtctcaaaactggaatggaattcctcggcctgctattacaagaaattattttgtcaagtatggcagactttcattgtaaaatttgtacattatttttcggcaaatcttcacaaatacaaaggggattgctgaggagggctttaggatcaatattttccaggatttttctctgtttatttgtgtgtttctgttcagtagtcttttactttacagttgttttaggagcctttcaagaaggtttacccaagtatttaggtgtgctaactgactcagcagcaataatttaatctactaattaaaaaaaatacctttattggccgggcatggtggctcatgcctgtaatcccagcactttgggaggctgaggcgggcaaatcacaaggtcaagagatcgagaccatcctggcaacatgatgaaaccctgtttctactaaaaatacaaaaagttagctgagcatggtggttcatgcctgtggtcccagctacttgggaggctgaggcaggagaatcacttgaacctgggaagcggaaggtcgcagttgagccaagatcgcacattga

SEQ ID NO: 40662 - DNA, 479 bp, Homo Sapiens
tttgtctgggaatggggacaccaaaactcatttggcagcagaggtgaggtaaggccatttgtattgtctgttctgttagtagtcatacatgccacttatccctgccccagtccctgttaggagtgttatgtgggtatactgaacgtggaccttccccgaatccaaagaatccagatgctttgaataagatcatggaccttccgggttctacatcgccagatgttgttcatcttctatcttttgttttgcgaaaattggttttttatgtgtattggggttattctgtggaagaaataagctgtgggtcaagattaaagaactttaaacaacttctggcatgtggaataaacacgatctgaaggaacaaaattttcatttgactacatttttgatccaatttgcacccagtgtttaagttaatcacagtgcttggcagtttgtgttgctggatcaaggctttctcactgaaaaccatgtgc

SEQ ID NO: 40663 - DNA, 586 bp, Homo Sapiens
  misc_feature (390)..(391): n is a, c, g, or t
  misc_feature (412)..(412): n is a, c, g, or t
gttgagagatcatgctactgcagtccagcctgggtgacagaacgagaccctgtctcaaaaaaaagaaaaaagaaatttgtgaagttctactgctctagttatgcagggtggcaggatggcattggtaaattgacttgaagtgagaaaaaataatttctggttttattctaagtatttaaaactgtaaattcataaccatgattcatgattttgattacaagtcttatgaattcttagaacttcagaagtggccgggtgtggtggctcacacctgtaatcctggcactttgggaggccaaggtaggcggaccacctgaggtcagaagtttgagaccagcctggccatcgtggtgaaaccccatctctactaagaatacaaaaactaattgnnggtatggtggtggcacatgcnctgtaatcccagctacccaggaggctgaggcaggagaatcgccggaacccgggaggcggaggctgcagtgagctgagattgggccactgcactccagtctgggtgacagagcaagactccgtctcaaaaaaaaaaaaaaaaacttcgaaagagacactcgtaaaaacaaatagg

SEQ ID NO: 40664 - DNA, 487 bp, Homo Sapiens
  misc_feature (458)..(458): n is a, c, g, or t
aaaaagcataattacgttaaacaatttttttgcgtcttgtgtgcggacttccacatggctggtttggctgccttgcttcccattttcctggatggcttcagtccgcaggccacagctgcagccagcccgcccctccctctgctgactgccccttggaaaggaaaattgacccggattcttcccgcctgtctgggagtagaatccaaccatcggggatggaggccctggcctccatgaggctgcctctttttgctgggctgctcttcctgtgcctgtctggcctggcactgccaccccggctggactgaggctgttcctgctggctgccggggctgcctttccccaaccccacccaacactttcagaatgtcagtctgaggggccctgatgggtggggacatggggctcccaggcttcttccattgtttttctaaaaatgaaagtgctgggagctttanactcgggccgcaggttttatggtaaagtg

SEQ ID NO: 40665 - DNA, 779 bp, Homo Sapiens
  misc_feature (758)..(758): n is a, c, g, or t
tatggtctctgggtatcatggctattgagatggtagaaggagagcctccatacctcaatgaaaatcccttgagggccttgtacctaatagcaactaatggaaccccagaacttcagaatccagagaaactttccccaatatttcgggatttcttaaatcgatgtttggaaatggatgtggaaaaaaggggttcagccaaagaattattacagcatcctttcctgaaactggccaaaccgttatctagcttgacaccactgatcatggcagctaaagaagcaatgaagagtaaccgttaacatcactgctgtggcctcatactcttttttccattttctacaagaagccttttagtatatgaaaattattactctttttggggtttaaagaaatggtctgcataacctgaatgaaagaagcaaatgactattctctgaagacaaccaagagaaaattgcaaaaagacaagtatgacttttatatgaaccccttctttagggtccagaaggaattgtggactgaatcactagccttaggtctttcagcaaacagcctatcagggccatttatcatgtgtgagatttgcattttactttgctgactttgttgtaatagatcccattcattgtcccctttggggtatttccaatacttgaatggcagattggagtttttcagagtatgtgtttcatctgctagtctttctctccttcatagcttttcttttctggacttgctccctttgagttgcttttgcngttctcatgcctagggcagtg

SEQ ID NO: 40666 - DNA, 401 bp, Homo Sapiens
  misc_feature (379)..(379): n is a, c, g, or t
catccataacacaaaaaagtgaggtttgatgcacagtaaaaggaatcattatttaagttagtctgagttatattgtattttggaaatgctccacattcaatatttatgccacatactctaaaaccaaagtatgtagattaaaaaaaaactatttccagaaataagcttgctgaatcaccacaggcttaatttatttattttaactaccagtttcctgaatgtttttgtctaattggcctatctgcagttgcccttggtccacccttgagcccactctttaagcctgtctgtcacttagaggaagtacaagtacttcctgctgagaataaagccttgatcgcaatttcagtggaattatcaggggaagtgtgaggattangtaggggttaaatgtcttaaac

SEQ ID NO: 40667 - DNA, 457 bp, Homo Sapiens
tctagaactagggacgggcaggatggtctgggcctgctcctccttcctctgcccctctgccactccacactccagcacagggctgggacaggggcttggagttcctgcagtggcggccacacttccctccctccctcccttcctcaggagccgccagtccccaagttggctgtggttgggcacctggtttgggtcctgcagagctgggctcaggcctgggctctgaacctgtgaacccttgctgtgttacgaaactttccttcctctgagggccttgaaccctctccttttcttcttttgggggtgggggttaactttattttctcttccctgtatctgcctctcccttccctcaatttcctgttttaaaactgaatggcacgaaattgttttcctcaactcggagattcctgtatggagagaatcaatttctatatttgcaataaatttcttattt

SEQ ID NO: 40668 - DNA, 571 bp, Homo Sapiens
agtactcaatgtaggaatgcactaaaaaaaaaaataggctaatataaattacagaatttcttctggcctcttttagatttcttctgtgtctttggccctgggtgtatttacttgccttttcaaatagcttgtgcttttattccaccttattggcttgccaaatattatggtcatttagaaaaaaatagacatgttaaccgttgtgtgtggctctcacttggtttgaaatggtggcttggggaaaaacacagaactttaataaaacaatatttggacttttattcagtgagtaaaacttaaaagttcaacagtttcccctgaggaagataaaatatcttgggttctttggttgctgggactaacaggtagtcagtaatattggttttatggttttagcagttctttagcccgtggtatttcagtgttgggtttcatagctatgaataggcataggtactaatagataaggacatattttatactttgtgtggggggtgtgtatgggtcttccttttcttattacataggtacataagattctttcctgatggccatgtgatgatgttgacaa

SEQ ID NO: 40669 - DNA, 652 bp, Homo Sapiens
tcaccttgtggcagctggcatgtgatgccgtttctggggagacactagcaaagttgatctgacaagtaaagaggagagatgatggtgtaaggtgctttgtttcaaacttctttcttgacctgtcaggttttgaaggcgcctcaatggctctttttgtcatgtgaaaattgtagtcttaggtagttatgaagcagttatctcttctcaaattgtgaatgctgctgtttaattgattcacttagcatttgaaactgtcacgcattaataattgcgaaatcctgtagatactgcgtgagtgtgtcatgcttaaatgtgtagttatcagaaaattaatatccttaatgaaccggtgctttcaaactaacattgcatgaaatctcttttgccctttcatttgctgaagccacatccgccagtttgccgagaatcacctctcgacagtttgctttcttgatgcccgacaaatgccagctttgctgtgggtacatcgcgtgctcaatgacaataaatatagtaattatactggagttagtaattaacataattgtagtcaattacgacaaatacagtgcagagctaaataaatgagaggggagaaattagcaagctaattgatttatctttaccttggtttctattacaactggcaggg

SEQ ID NO: 40670 - DNA, 839 bp, Homo Sapiens
tgaacattgtctagaggcatgcagaatgggccagcatgtgacataccgtcgtaggcctctagtgagaaactctaactaaactaggctgtcctgaaccctggtatagatcatttactttatgccagaagttgggaaagcaccaaaatcttcacgtggtgtgtgtccaggcagacattcaggagctcgtgctgtgagatctaaagttgttatttgatagtccaaaacaaaaggcatgtctatagggcccgcagtgcttccctggttccatgtgtgctcagtgtgttcatgacagaatcaagtgtgctttccttattgaggagcagaaaatcattgtgaaagtgttgaaggcaaaagcagagtcagaaagctctattgaaaatgaaacttttttggcctggtgcggtggttcacacctataatcccagcactttgggtggccgaggcaggcagatcaagaggtcaggagatcgagaccatcctggccaacatggtgaaaccccgcctctactaaaaatataaaaattagctgggtaggctacatgctgtggctcacgcctgtaatcccagcactttgggaggctgaggtgggcagatcgcctgtaatcccagcactttgggaggctgaggtgggcagatcacctgaggtcaggagttcgagaccaaactggccaacatggtgaaaccccgtccctactaaaaacacaaaaattacctgggcatggtggcaggtggcctgtaattcagctaactcggaggctgaggcaggaagaatttgcttgaaccccagaaggcaaaaggtagccagtgaagctgaagatcatggcccattgcaccttact

SEQ ID NO: 40671 - DNA, 832 bp, Homo Sapiens
  misc_feature (655)..(655): n is a, c, g, or t
  misc_feature (763)..(763): n is a, c, g, or t
atttgtgtcagattttccctgtcctgtattcagaaattgagtccataatctcagctcataaggtgcttgataattctaatataacaactaaaactgtcaaatgaagtctcttattctgagaaataataagtctttgtgactgtcataaaacaggaaacaatttttgtttgtttttagagacatagtctccctgtgttgcccaggcttgtcttgaacttctgggctcaatggatcctcccttcctcctaagtagctgggattgcaggtgcatgcctgagaaataataattcttgccgctaatttagtccttctgtatgttattttaagtaagtatttagtctgttcctttagtaattcttctataagtcatggaagacagctactgttggtaactgctggaatgatgtgcagactgagaatatgaaaacagaaactctgacactgaaagtgattggtcacataggcaaatgttgatttattttccaaaaaggaacctggaagagtgaggagttattttctagagttaacctgaagcagtggccgagtgccatgcacacgtgtaatctcagcactttgggaggccaaggcaagaggatcacttgaggccaggaatcgagaccaggctggccaacatggcaaaacccatctctactanaaatacaaaattatctgggcatgtggcacgtgcctgtaatcccactagggaggctgaggcacaagaaatcacttgaacccgggaggcagaagttgccagtgagcccgngaatggtgccactgtgctccagcctagtgacacagcagaatctctccaaaaaaaaaaaaacaaaaaaac

SEQ ID NO: 40672 - DNA, 518 bp, Homo Sapiens
cccacgcgtccggactcgctctgtcacccaggctggagtgcagtggcatgatttcggctcactgcaacctctgtctcctgggttcaaacgatcctactgcctcatccttcggagtagctgggattacaggcaggtgccaccatgcctggctcatttttgtatttttagtagagagggcgttttgccatgttggctaggctggtctctgtccgtcctctgagctcaagctaagccatcatatcccagtgacctgcacatatacatccagatggcctgaagttactgaagatccacagaagtgaaaatagccttaactgatgacattgcaccattgtgatatgttactgccccaccctaactgatcaatgtactttgtaatcctcccacccttaagaaggttctttttaattctccccacccttgagaatgtactttgtgagatccacccctgcccgcaaaacattgctccaaactccaccacctatccccaaacctgtaagaactaatgataatccacc

SEQ ID NO: 40673 - DNA, 773 bp, Homo Sapiens
  misc_feature (596)..(596): n is a, c, g, or t
acccctcaggtttgatcacttgtcagaatgattcacagaattcagggacatgctatgcttacaactacagttttattaattgatcaataaagcaaaaggatataaatgaaccagtcaaagggaaagacacatagatctgggaggacaccaaacgcaaagctttcattgttctctccccgtggagtcaggggctgttacctttccagcacatcgatgcgtgacaatgtatagagtattgccaaccagggacgtgctcctgagcttcagtatttgtcatttttattggggcttccttgcataggtacgattgattgaatcattggcatgtgactcaaactttagcaccctcatttccccagaggtgatcttgttagcatccactatctaggggcccactctgagtcaccttgttagcatcaacttagaggtgtgggcccgctatgataacaaagatactgctgatcgggcgcggtggctcacgcctgtagtcccggcactttgggaggccgaggcgggcggatcacaaggtcaggggatcgagaccatcctggctaacgtggtgaggccttgtctctactgaaaatacaaaaaattgngcgggtacggtggcgggcgctgtggtcccggctgctcgggagctgaggcaggagaatggtgcaaacccgagaggcggagcttgcagtgagccgggatcgcgccactgcactccagcctgggcggacagagccagaatcccgctctcaaaaaaacaaacaaacccacaaaacacaagg

SEQ ID NO: 40674 - DNA, 587 bp, Homo Sapiens
cggccggctatttggtttttgtattttttgggggttttactgtgttgcccaggctggtcttgaactcctgagctcaggcaatctgcctgcctcagcctcctaaagtactaggattacaggcatgggccaccacgcccggccttatttttatttttgagacagtctcactctgccgcccaggctggagtgcagtggtgcgatctcggcttaccacaatctctgcctcccaggttcaagcgattctcatgcctccgtctcccaagtagctgggattacaggcacctgccaccatgcccggctaatttaacgcccagctaattttggtatttttagtagagatggggtttcaccatgttaaccaggctggtctcggactcctgacctcaggtgatccgcccgcctcggcctcccaaagtgctgggattacaggcgtgagccactgtgcctggctgatttttattcttttagttaaggctggttgatattaccttgtgtgtatataccacatgttgtttatccattgttgttgatggacatgtgggtggtttcaccttttggctatgtgaataaagctgctatgaacactg

SEQ ID NO: 40675 - DNA, 348 bp, Homo Sapiens
ttctagtgattgcaccctttaaataggaaatgccttccagctacttgggcagtgcgatacttgtttagttgtaggcccaggagcctcatgcaaagaaaaattcttatcagaggttcccatttcagttttctttctgggctgttctgttgcacattttgttgttgttgggctgacatgtattacggcatttctttataagcccccatggctcctcttttcagtagattaattatgttattactcaaagggaaatgttgaacaaagcaatggcgactccattttattaatcttaaaaaaaaaaactggaaataggccaggcacggtggctcacgcctgtaatcccagcac

SEQ ID NO: 40676 - DNA, 701 bp, Homo Sapiens
  misc_feature (651)..(651): n is a, c, g, or t
ttttttttttttttttgtggagaattggaactcttattactgatggaaatatagtggtatgcagctgctgtagaaaacagtatgatgattttccaattaaatatagaattgtcatttgattcagcaattgcatttctgggtatatacacaaaataattgaaagcggaggcttgagggtatatttgtataccagtgttcactgcagcattattcacagtagtcaaaaggtagaaacaacccaaatacccaacagatgaatggatagacaaaatgtgttatatccatacaatggaatattattcagccataaaaaggaaatccttctacatactacatcatggatgaacctttcagacattaagtaaatcacaaaaggacaatactatatgaatccactgatgtgaggtacctagactagtgagattcatagagacaaagtagaacaaagattacgttttgtcacagggggcaggagggaatgggaatttattgtttaaggggcacagagattagtgtgggatcatgaaaaagttccggaggtgcatagtggtgactggtacatacaacgaatgtatttaatgcctttaaactgtaacttcaaaatggttaaaatttaaatcttacgtacattttgccacagtaaatttttanaccaccaaaaaaaaaaaaaaaaaagcctacagccgcgcctcgtgccgaat

SEQ ID NO: 40677 - DNA, 657 bp, Homo Sapiens
tgcaggtgtgagccaccgcgtccagccagctttattattttttttaagctgtctttgtgtcaaaatgatagttcatgctcctcttgttaaaacctgcaggccgagcacagtggctcatgcctgtaatcccagcattttgggagacctcaggtgatccgcccgcctcggcctcccaaaatggtgggattacaggtgtgtgggccaccgtgcctggctgattcagcattttttatcaggcaggaccaggtggcacttccacctccagcctctggtcctaccaatggattcatggagtagcctggactgtttcatagttttctaaatgtacaaattcttataggctagacttagattcattaactcaaattcaatgcttctatcagactcagttttttgtaactaatagatttttttttccacttttgttctactccttccctaatagctttttaaaaaaatctccccagtagagaaacatttggaaaagacagaaaactaaaaaggaagaaaaaagatccctattagatacacttcttaaatacaatcacattaacattttgagctatttccttccagcctttttagggcagattttggttggtttttacatagttgagattgtactgttcatacagttttataccctttttcatttaa

SEQ ID NO: 40678 - DNA, 891 bp, Homo Sapiens
accaaggtgaagaaatcctggtggagaggaacagtggctcccatcagactggaagactgccttaggcctgccacaggcagcacccacagcttccacagtcagcttggctgttggtccaaagacagggtttcatggccgcacagccagagctcctgtgtcatcagccaccatacctagcaacccctgctgacgatcacgtctgatttttggcatgcatcaagtccagcatatggggaactggatttattttgcatagaggcataaacagtaagggatgtcatgataacttatcacatataatttagaagcaaaccttactatttttttattttcagagaccgaaaggaagaaatagtcttaaagaataaaaaggaaaaaattaggttggatataaaaaaattaatagcaaagatgattagactttaacacaagtttctaaaaagacatcctccctggagatcttttaaaaatagggtaaattccatctcacgcccccactcctgcctagatgacatatccgggcatagatcactgatgtattcaattagatcaaggcttcttacaagtgatggaaacatttgagctagatcatttaaaataatcacaggggtttttggttttgaggtttttttttttttttttaaaccatttcaagagagtctctggatttcttgatccttgatttgggggtttcatgttgcctgggagcttcagcagggcctcatcagccctggcccggggggctgctcccagctctgtgctccccgataggtggccctgcgctttatgcacatcccttcttaacataagaaaaatgtatggcctttccaaaaaagggatttcaagacagaatcacccccagggggagggtccaccccccagaatgttaag

SEQ ID NO: 40679 - DNA, 643 bp, Homo Sapiens
  misc_feature (596)..(596): n is a, c, g, or t
ctccctggttcgatttcctgatgtagaatcattgtgttgctgatttttcagttgaaaatgtttaaactgcttcctttgagaacaagtttgagttttagtaagctgtaaagctgttttatttgattcactgtgaataagacaagtacaaaaaaaaaagtgaaaacacagcacatttcaagtgtaatcccctttggaatttttccaaagtcttagtatatgtctttgtgacagaaaaacatagatgggacaggtaaatgaaatgttcctagttgcatagctgttaaccatgcttcaaaaataaatcattttttaccacacctgaaaaaaaaaaaaaaaaaaaaaaaaaaaaaacatgtcggccgcctcggcccagtcgactctagactcgagcaagcttatgcatgcggccgcaattcgagctcacttggccaattcgccctatagtgagtcgtattacaattcactggccgtcgttttacaacgtcgtgactgggaaaaccctggcgttacccaacttaatcgccttgcagcacatccccctttcgccagctgccgtaatagcgaagaggcccgcaccgatcgccctttccaacagntgcgcagcctgaatggcgaatggaaatgtaagccgtaattatttgtt

SEQ ID NO: 40680 - DNA, 602 bp, Homo Sapiens
cctgacagaagtgaaaatatgatatcagaaatctgtaggtctgcatgcatggacctagtgtttacatcagctcccttcagacatctggggacctctctaatcctgcctaatttggggactttttctgcaggattgtaatgtaaaatagttctttagctcttggagatttttaataatacgagttattaaaaaccaccaccaccagaaacttgattaacttgattaccctgttgagtagagaggtcttaaccaccgaaaacactgatatctttatgtgggcatgctcatgcaaacacatgtgtgtgtgtgtgtgtgtgtgtgtgtgtgtgtaccacagtgttttataaagcacagcctaattgattatataggacaaaaattgtataggaccctgggtcagtataaatgctaatggctgacaaagttcacaaagagatgtattgggcttactcctctgtacaatcctcgggttgcctgccagtgtatatgtgtgtattgggacagacattcatttatggtcattcagtcaataggtagagtatatgtgtctatttagaggaaggcatatagatgctagaggctaagggggaaaaaccagtatg

SEQ ID NO: 40681 - DNA, 729 bp, Homo Sapiens
agcgggagtttctcttttcccctcccttcttcttcaccttcttccttctatttatccttctgtttcatctacaaatatttgagtgtcactgtgtctaggcagtgtgccagacattgggattcgttggtaagcaagagagagaggcatggcctctgtccttatgagcttgcagtttatcatagtgttacttatctagtctgtcctgccttcaaggttcagtggaagcccgatcttcatgtagtcctttgacttctttggcccttgcaaacctatccctttgacctatgctactttaaatctgattcatacaatttagcatttattgatataatttcttatactgtgggataattgtttaaatatcttgttttactggctagagtatagttccttaaggacagagactgtcatgttattatttttttttttggcaatactgagcccaaaggttttgatttcagtctgccctgctgaatgttgaagttactagtagctcttgggacttagaagtagtgatgagataatgccttgcttttagtttatttcctatttggttatttaatgttccttttttgaaatggtatgggctggccgcagtggctcacgcttgtaatctcagcactttgggaggccgacgtgggtggatcacctggccaacatggtgaaaccccgtctctactaaaaagacaaaaagttagccaggtgtggtgccgggacctgtaatcccag

SEQ ID NO: 40682 - DNA, 747 bp, Homo Sapiens
cgatgatcggagacatcctgctgttcgggacgttgctgatgaatgccggggcggtgctgaactttaagctgaaaaagaaggacacgcagggctttggggaggagtccagggagcccagcacaggtgacaacatccgggaattcttgctgagcctcagatactttcgaatcttcatcgccctgtggaacatcttcatgatgttctgcatgattgtgctgagaaaactcaagcagattgcctttccatctagcactggggccataactctgatactactgttaacgaattgtgagatttgctgtaaatggatttaggaaaagacacgacgggagaatctggtgttcttggcctctgtgggtccatccctgtatgcttcccccagaaagagagaggacaaaaagttgtctgtcctgagtgattgagactccgaatgtggggttgctgtccagtctgcgtgccaccccagtggctgtttgcgaagatgcttccaggacataggagatctggggaggatggcatttcaccctcatcacaaggaccgtgatgtattcccaggaagactgttgccaaggtatcctacctggcagagaggatctgagagcatgtatgagacttgcctaggaacaaagaaggcttgtgaggagatcaaggaacttacatgaaattgtaggaacggccaggggcagtggctcaggcctgtaatcccagtactttgggaggccaggtgggagaattgcttgagcccag

SEQ ID NO: 40683 - DNA, 425 bp, Homo Sapiens
tgaaatcactaagactcttgttccagggaagagaagaaacaaaaaactgaaggaataaaaagtttaagccacaaagcattaataggaacacttggacctgtacaagagatatgctgaggggcatggggaaggaattccttccttctcaagctgtaggtgtcaggctttggccgtgaaaatgacagtggattttctactccttcagcaaactttctggaaaccccatcacctgccacgtgtgtgtggaggtgctgtgtgggtatacaaaggcgaattaagatgtgatcctgggtcagggacagtggctgccacctgtaatcccagcactttggaagaccaaggtggaaggctcacttgagcccagaagtttgagaccaacctgagaaacagagtgagatccccatctttacaaaaaaaaaaaaaaa

SEQ ID NO: 40684 - DNA, 578 bp, Homo Sapiens
tctgtgtttgtgtcgcgagcccttgagccgcatccaccggacctcttccaccctgaggcggcgatcaaggacaacccctggcccagaggagggcccttcacaaaaggtggaccgggccccccagcccaccctggtggtgatgctggaagacatcgccagtcctagaccccccgctgagggcttcattgatgagacccccaacttcatcatcccagcacaaagagctgagcccatgaggatagttcgccagccaacgcctccacctggggacctagaacccccattccagccatctgctctgcctgcagaccctctggagagcccaccaacagccccagatcctgctctggagctcccatccaccccaccaccgtccagccttttacgcccccgcctcagtccctggggcttggccccgctcttccgttccgtccgctccaagctggagagctttgctgacatcttcctcacgcctaacaaaaccccacagcccccacccccgtcccccccaatgaagctggagttgaagatcgccatctcagaggccgagcagtcaggggctgctgagggcactgcgt

SEQ ID NO: 40685 - DNA, 562 bp, Homo Sapiens
gctaagaggcgactcccatgcatcggctaatagcccggagacaagcattcgacacagagttgcagcctgtcaagaccttttggatcctgattcagccatccatcgttattagtgaagcaaataagcaacatgtaagatgtcagaaatgcttggaatttggacattggacttatgaatgcacaggaaaaagaaaatacctacataggccctcaaggacagcagaactaaagaaagctttaaaagaaaaagaaaacagattattattgcaacaaagcattggagaaaccaatgtagaaagaaaggccaagaaaaaaaggtctaagagtgtaaccagttccagtagcagcagcagtgacagttctgccagtgattctttatcagagagtgaagaaacatgtacctggttactgctcagaggacagtgcctctcttcaaagctcccctactttctcatccttagtcttgttttcatcctcttgtctcttttccgccttctcacttctttctttcgttctcctctcctctccctcctcctcctcttttctgccttttttgtgtgctt

SEQ ID NO: 40686 - DNA, 773 bp, Homo Sapiens
tctagcgaggtgacagcgtagaaccagagcatcttttggggggagggaattcagcggatcagtcttaagaggagcttttttttggagcgagaaatcatataaaataaaatgaaataaaacaaggaggaaggcaaccagctgttaggggaaaaataaggcagataaaggagcggggagagaaattaattgccaaccaggaggagttgggctgtatttttcaaaggtggggagagtggagcacacaccttgaggaggaaagcgagaaagaaaagaaaaaagcaagtggaaaggggggctcgcccaagaagggtgaagaagcgaagaaagtcgaggcgccgaggctcccaaagctggcaactccgggtggcggtgcaagggcgaaatggggggcgggggggaaccgtcggacatgcggcctctggagttgggtgctgcaacctggggcctgctgaaacgcccccccttgggcttcccggctgggcccaaccgtcccccgccccgggccccggaaagaaccccctcggcctgggctgaaaccccccgacgcccccgccaaaaggggcccggggccaacctggcccccacaccccgggccggggcccctcggtgcaatcctccccccaccttttccgcccccctcccaaatccccccttatccctccggggggggtggcgccttggggaaaaacaacgtgtgccccgtttccctcccgcgcgggggtggccgatactaaacccgtgccagcaggtaaaaaggagggggcggccccccc

SEQ ID NO: 40687 - DNA, 687 bp, Homo Sapiens
  misc_feature (3)..(3): n is a, c, g, or t
atnatgctttttgagttttataaatctccaaacttcaaaactagtagatgctggtataaaacctaataatttcagttcaatctttacattctccagggtccacttttcattctcttaagtacaagcctatttctcagtttggcatagtgccaagaacattgataaatgttggccccaaaatgattgtcaaagttctgttcacttaaattcactgtaattagtaagaatagttatcatttattttgggtgccttcaaagtagactgtgctaggcaacaatttctcttgataatctcacaatagccttggcatttgaagaaactttggcctagaaacatttatgcccccaagatcacacaactagaaagaagcagaagttgatttatctcctaaatctatgtgacttcaaagctggtcatcctaccactatgcctggttgcctatatcatttaatgtgatgaaggcactaatgtgacacccacaccgggctcaatttattagtaatccttctatatcacagccacacaagtgcttagagttcctggctgagatcagtctatataattatattacacttctcaagtttagtagtgctagacaaataggaagggagttttacattctttgtttatttgcaataatttcatgattgtcgtaattaaactatagcccgagtttaaagaagaag

SEQ ID NO: 40688 - DNA, 672 bp, Homo Sapiens
  misc_feature (622)..(622): n is a, c, g, or t
gcgaattcggcacgaggattacactggggtgagactacctagggggagtgagtgtggactctgaaagaaactgacgtggggcactccagcagctagaagctgaagttgagatgaggaggagggtctaacaatggagactatgagggagtagccagagaggtagtgtgacagtcaggagaggcgggtgtcctgtaagatacgtgaagaaggtatttggagaaggaaggcatgtttggatttgacaagcattgctaagtggtcaagaaagacacaggccaacttgaccattggatttgactgtttgatgatggtcagtaaccttgatgagagtggtttcagtggatttgtgtgcattaaagccagactgggcagggcacagtggctcacacctgtaatcctagcactttgggaggccgaggcaggcacatcacctgagatcaggagttcaagaccagcctggccaacatgctgaaaccccttctctactaaaatctaaaaattagccgggatgatggcaggtgcctgtaatcccagctactcgggaggttgagatgggagaatcgcttgaacccaggagatggtggttgcagtgagccaaggtcgcatcattgcactccagccntggggggctgagcaagactccgtctcggaaaaaaaaaaaaaaaaaaaaaa

SEQ ID NO: 40689 - DNA, 611 bp, Homo Sapiens
gcagttggcacaagacacgggactcaccatccttcaagtgaacaattggtttattaatgcccggagaagaatagtgcagcccatgatagaccagtccaaccgagcagtaagtcaaggaacaccttataatcctgatggacagcccatgggaggtttcgtaatggacggtcagcaacatatgggaattagagcaccagggctgcaaagtatgccaggggagtatgtagcccggggtggtccaatgggtgtgagtatgggacagccaagttatacccaaccccagatgcccccccatcctgctcagctgcgtcatgggccccccatgcatacgtacattcctggacaccctcaccacccaacagtgatgatgcatggaggaccgccccaccctggaatgccaatgtcagcatcaagccccacagttcttaatacaggagacccaacaatgagtggacaagtcatggacattcatgctcagtagcttaagggaatatgcattgtctgcaatggtgactgatttcaaatcatgttttttctgcaatgactgtggagttccattcttggcatctactctggaccaaggagcatccctaattcttcatagggacctt

SEQ ID NO: 40690 - DNA, 483 bp, Homo Sapiens
ggagaccctgtctctaaaaacaaaacaaggacccagcctagggtgaaggcagttctggaagtggagctaggatgggaggcgtacgactgagtgaaggaagacggcagggaagctgtgccacatcctgggttcttgtgggaagaacgggaacaagctccccaccataagcagaaaccaaactcagaaaggcagagcagagcccagtgtgtggtggctcacacctgtaaccccagcactttgggacgccacagtgggaggattgcttgagcccgggagtttgagacaagcctgggcaacatagtgagaccttctcccctcttcaaaccgacagaaaaaaattaaccgggcagctggacgtggtggtgcaggtctgcagtcccagctactcttgaaggctgagctgggaggatcacttgagcccaggaggtcgaggttgcagtgagcagtaatcccgccactgcactctagcctgggtgacagata

SEQ ID NO: 40691 - DNA, 1113 bp, Homo Sapiens
cttcatatagggacaccagtcatcgaattggaggttcactctactcaagtatgacgtcaccgtgatttcactgattttatgtcccaggccgtattctaacaagggcacatcctgtgttctgggaagggcgtgtcgctggggaaatactcttcacccggctgcaacctctcactgtagaactgcctctgtggagaagcccaaagggcatttgcggcttctaggagccaagtaggaggaggctgggatccgtgtttcaggcgggactccaggcttgggcgggcctgatactcgagtccacatgccccctctagagaggaacctgtctcctgccagggccagggaggggggcactggctgcttctgtattttggggtttggggccctggagcttcccatgcggaattgccgtccctcctcctaggcgagtcccagggccaccccatcccacagggacccgggcgccagcttctgaaagcatggggcatctgcggaagaactgggttgtttcccagctttcgtccctgcggaggggcgatccggcccctccatgtcagcagtgtttggtcgtccacatgcttgtcagccccacgctgtgctcctgcgtctcttcccgtctcatccatctggatgcttgacacctctgacagcatccctttcctgtcatcttagggcagcttcaggaaaccgaaaaacaggcttgtgtccttccattaacccctttatccacaagttcagtatcagcatgagccctggggagctccaaggctgcagccaggagccccgtagccagggatggtcctggctgtgctgctgcaccagggccgccttccccaccttttccagaggaacctgttctacggccagaagaacaagtaccgagcaccccgagggaagccggccccggcctcaggggacacccagacccctgcaaaggggtccagtgtccgggagcctgggcgcagtggtgttgaggggccacattccagctgagtggccttgctctgtgtgagccccgtgcgagggccctgcttgtagctggaccctggaaccttctgtagctaagagggaatcctggccccctccccagaagccatttgtcaataaaccatttct

SEQ ID NO: 40692 - DNA, 324 bp, Homo Sapiens
  misc_feature (302)..(302): n is a, c, g, or t
ttttttagagacagggtcttgctatgttgcccaggctggtctttaattcctgggctcgagagagccactcatccccatctctcaaaatgttgggattacagccatgagccaccatgcccggccaaacttcagccttgaatattagtgattttgccatattagtttaccatctgtacaattatttgctttatatttttctttaaattggctcattattcacttaatgaaattattgcaacaggaatcttttgtatcacttctgtaaatggaaaaccagtctcatttgccatcaatagaaggtnaaacatgaaaataaataccatg

SEQ ID NO: 40693 - DNA, 804 bp, Homo Sapiens
  misc_feature (751)..(751): n is a, c, g, or t
  misc_feature (775)..(775): n is a, c, g, or t
agaggtaatcccgcacggtgcgcacacacactggcctgcgcccactgtctggcactccctagtgagatgaacccggtacctcagatggaaatgcagaaatcacccgtcttctgcgtcgctcacgctgggagctgtagaccggagctgttcctattcggccatcttggctcctagtatttttaattaagcacttgtgttctgattagtggccaaataaatgacagtcagaacttcagctaaggtacaataaggttttgctgtggcgtggcacctggtctctttctagaaggaaagttcaacatacagcacaattctggacacattgtattggtttgatgctcctacctggaacaggtggagctggtctcttgggcagcctgacatctggtccactcctctgtcctatgccgggatcatcatgaccgtagagattatgtcactgttttgcatccttgttacataactcagttcctggtagattactatgtcagagagtcacaatgaccttgcacaataacagtacaacctcgcctttgtttccaaacatcagctcctcctggatacacagcccctccgatgcagggctgcccccgggaaccgtcactcatttcggcagctacaatgtttctcgagcagctggcaatttctcctctccagacggtaccaccgatgaccctctgggaggtcataccgtctggcaagtggtcttcatcgctttcttaacgggcatcctggcttggtgacatcatcngcacatctggtaatgtgtcattanggtcacagcagctgagacggtcacactac

SEQ ID NO: 40694 - DNA, 215 bp, Homo Sapiens
  misc_feature (19)..(19): n is a, c, g, or t
  misc_feature (133)..(134): n is a, c, g, or t
  misc_feature (168)..(168): n is a, c, g, or t
  misc_feature (187)..(187): n is a, c, g, or t
  misc_feature (202)..(202): n is a, c, g, or t
  misc_feature (211)..(211): n is a, c, g, or t
ataggaacctggtctcctnagaatttccattttccaaacctggtatcatctcctagttggaagaagtggtaggcccacgaacgcaaatgcaggagggagaggtgccaagaagcagctcagcctcccgagtagnnggggattacaggtgcctgccaacacacccagctnacgttttgtatttttagtngagatgggggttcancatgttggncagg

SEQ ID NO: 40695 - DNA, 399 bp, Homo Sapiens
gctcgacaaagtattaggaactacacacatcaatgcaaaaatggaaaaatcacattctgtttttgaaaagtgatcttcccatgaacatattttcagtgacattaagagtttcagtttaaagttgggtatggtggctcactcctgtaatctcagcactttgggaggccgaggcagaaggattacttgaggtcaggagtttgaaaccagcctggccaacgtggtgaagccccatctctactaaaaatacagagatttcccgggcgtggtggtgggcacctgtggtcacagctgctagggatgctgaggcaggggaatttcttgaacccgggaggcggaggttgcagtgagccgagattgcaccattgcactctagcatggtgacagagtgagactccatct

SEQ ID NO: 40696 - DNA, 669 bp, Homo Sapiens
  misc_feature (558)..(558): n is a, c, g, or t
tagtgttttcttaaaataagactgatttaaagcttatctagcagatagttttaaacacagattaaagaaaactagattgggtacaaatgtttggcttcccaagtgagaggccacatgtacatcaacagtactttccaacttaacactacgacccccattttgatggtgacagaattggaaacgggggacagtgatgagagcatcaccctcctgtcacttacagatggtcccttgggactggatttttcctgggagaccattgaccccaagaaccctgaaaacatgatatgcggtagcagaatggattagattgctgttagctttctggtaggtgaggggacctgaaaagaacagggccaccagcatttcaagggaacagccattccaattttcagaggttgattctcttggaattatttgacctgaggccataggaaagcaaagggttaaaaaagtcacgtttgacatgccagcctggggagctggacattggatacccgtgtgagcctcgtggaacaccataatcaaatgtgaaaattagagttgattaattaaagnaaaagaatttaagtctttatttctaaactgatgcatgaggacccccagtgagcaatattcccccaaggcaaatcaaccaaaagcaaaactgttttgaaaaaaaaaaaaaaa

SEQ ID NO: 40697 - DNA, 670 bp, Homo Sapiens
ggtcgcttgaactgggaggtggaggttgcagtgatctgggactgtgccactgccctctagcctgggtgacagagtgagactccatctcaaacccacaaacaaaaaaacaccattaggcaaacaccataggaatagttgttgcagacaagaaacacctatgaatgccgaattagtgaacagaagtatgatgggaaacacgattttgcatggttttaagatcccttcacaagatactaattacaaagggaaaaacagtcattatagtgaataagcctgacagaaaccaccttaacccagtgatcaagttaacatcaccactaataagacatactgataccatgtaccttccaatatgatgcactgagaagggcacaattgtcacttctgtggtgttgtcagaaatgtgcaatctcagtgcaatcaggagaaaagatcagacaagcccaaactgagagacactctacaaaataactggccagtacgttttgaaagtgccaaggccgtgaacaataaggaaagactgaggaacagtcatggactggaagagagtaaagaaatatgataactaactgcattgtgagataccgatttagatgttggattaaaaaagggacagaataagatttctcaatgtcaattatttggttttgaaaatggactggggttagga

SEQ ID NO: 40698 - DNA, 496 bp, Homo Sapiens
ccacgcactaaaatctaggtggtgattcaggaggagcaggggaagacagcctcctatggtggcatgaataagatgcttccagaactagtagggaaataactaacctcttcaggctttatcaggcctggaggggaaccttgctcatgttagcaagaaaggtatcctagagaagccactcaaaaggctccctaatccagcctgtctccacatacatactgaaaattcttccctactctgaggcagggtgtagtggtttaggggtttctccagactggaatcctacctatctgtaccgacaattgagcaaacaacagttgagagagtccaaaaaaaaaaaagttttaaaatgtgattgatgtactttaccatgtttactttatgcatgcattttatgggggaggggaggtcagaataattcacccaaatctagtggtcttatttcataggctaatctggtttatatttgcattaaagatactggagggcaatatttaca

SEQ ID NO: 40699 - DNA, 1114 bp, Homo Sapiens
  misc_feature (849)..(849): n is a, c, g, or t
  misc_feature (912)..(912): n is a, c, g, or t
  misc_feature (957)..(957): n is a, c, g, or t
cccacgcgtccgcccacgcgtccgggcccctggctggcccaagagccgggtccagatacgcgcgcctgattccaggcgtcataaccaacccggggccgcgaggctgggatcaggcaccccggagccgcttgcccgtggccgggctgctctccccctctaagcctaagcaccgccagtcgcggcgctgcgctttccgccgacctcccagagcgtcccgccgtcgccggcggccagcctcgcgcaggaccagtgtggcgccgccctgctgttgctggggggcgcccgaggcctccattccttgcccaggcttccggctctcggggcggcctcccttccgcccacgctccagggcttccccggctcccgagctccgagcttccaccacatcggccggctcaggacagggcttccactgtaaagtcggctgccagacgtgttggagctcaccggatttgtccctggtgccttatttagttcacttggtgaggtcatgtttttttcctggatggtgttgatggtagtagatgttcttcagtgtctggacattaaaatcttgggcatgcagcaccatatgagaggtttaaaaaataaaattaaaaaagagaaaagaacccagagttgatctctgcagcatgccatcactgctggggatgaggaaacggtgatttcaggactgttttttctgtctcttcagtgcctctttcagtgatctgaggttaaaccagagggacaatcagtggagccttctttctgccgtcttgctttactctcacgcccaagaatcagaattcagaacttttaataagaaaagctttcagaactcaggaaagacagggaagacattctggntctcatgcttaacattggactgttcttcacttgagactatggaggatttcatcaacagaccangaagcaaccgcctggggctcaggatttgaccagtagttcggccancagacgaaggagaagtcccctggaaaactccggggcaatcttgggaacccgaactctttttttttgaaacaagtttgttttgtcagggaaggcccgggcacttgaaaaagcccttttcttggaagtgggggctcaggggaaaaccaaaaagggggcc

SEQ ID NO: 40700 - DNA, 583 bp, Homo Sapiens
gcagcgagccgattccgagcagccctccaagcgtccccgttgcgatgacagcccgagaaccccctcaaacaccccttccgcagaggcagactggtccccgggcctggaactccatcccgactacaagacatggggtccggagcaggtgtgctccttcctcaggcgcggtggctttgaagagccggtgctgctgaagaacatccgagaaaatgaaatcacaggcgcattactgccttgtcttgatgagtctcgttttgaaaatcttggagtaagttccttgggggagaggaagaagctgcttagttatatccagcgattggttcaaatccacgttgatacaatgaaggtaattaatgatcctatccatggccacattgagctccaccctctcctcgtccgaatcattgatacacctcaatttcaacgtcttcgatacatcaaacagctgggaggtggttactatgtttttccaggagcttcacacaatcgatttgagcatagtctaggggtggggtatctagcaggatgtctagttcacgcactgggtgaaaaacaaccagagctgcagataagtgaacgagat

SEQ ID NO: 40701 - DNA, 539 bp, Homo Sapiens
gaaaactgaaatggaacaggggcagaaaatagcacacttttactctacgcaactgttgctttttcatgttcttcaggaattttactgggataattatccaaataaattgcaagcattctatccaaatggagctctttctgagatgaagagaattctcaatgtcaagatttgaacaagaagagaatggaatacacaatatggacatccataaaaattcatcagagagcattttactactgagctgcaaagggaaaaacttaaaatggatatgaaaagtgaagaaagtgatcataggagaaaaccatttcagatgacaagagcacctcaaaggcagcagcctcaaggagcagccatggccccagacttgtcgcacggatgcagaaaacttaatggaggaggctgaggtcagaatgggaagagtttttaaaaaataaaaaggggagctaatatgtgaggaactgattgctgtgcattattttccactgaacagaccttcttttaacttctaatctcaagcacatagcagctgttgttttcat

SEQ ID NO: 40702 - DNA, 544 bp, Homo Sapiens
caggttggcttctgtatcatccagcctggcctatagtaggtgtcagtaaatctctcttgacttaagtagatgctgttaggtccaccttacagataaagaaactgaggaatgaagaggctgggcccacaacaaggagatggccaggcaggatttgaacccaggcaatctggcccagaatgccctcccctcacatgccacactctgctgcctagagcatggaggtggcatacgctggggtctgtgccttgagcctcacggagaggggcccaactgaggactcgccctccccctccagggtacagaagtgcaggtggatgacatcaagcgggtctactcactcttcctggacgagtcccgctccacgcagtacatgaaggagtaccaggacgccttcctcttcaacgaactcaaaggcgagaccatggacacctcctgagttggatgtcatcccccgaccccaccctgttttccaccagagttctgacactgtgactctgtataaaatggttgggaagctgcaaaaaaaaaaaaaaaaaaaaaaaca

SEQ ID NO: 40703 - DNA, 515 bp, Homo Sapiens
cgcctgtcctgatcatggccaccaaccgtggcatcacgcgaatccggggcaccagctaccagagccctcacggcatccccatagacctgctggaccggctgcttatcgtctccaccaccccctacagcgagaaagacacgaagcagatcctccgcatccggtgcgaggaagaagatgtggagatgagtgaggacgcctacacggtgctgacccgcatcgggctggagacgtcactgcgctacgccatccagctcatcacagctgccagcttggtgtgccggaaacgcaagggtacagaagtgcaggtggatgacatcaagcgggtctactcactcttcctggacgagtcccgctccacgcagtacatgaaggagtaccaggacgccttcctcttcaacgaactcaaaggcgagaccatggacacctcctgagttggatgtcatcccccgaccccaccctgttttccaccagagttctgacactgtgactctgtataaaatggttgggaagctgca

SEQ ID NO: 40704 - DNA, 443 bp, Homo Sapiens
ttagtagagatagctgtgttgaccaggctgcgaactcctgacctcaagtgatccgcctgcttcggcctccgaaagtgctaggattacaggcatgagcactgtgcctggcctggggtttctaattttcttaattcttacaacttcttatgaagacttttactaatatggctttttccaggcttcccaaactgtatttcaggttataataattttattgttctgtttcttgcagagtaccaagttcgatccatagcaagtcatgttcgtcctgacaggcagactctcttatttagtgcaacttttcggaagaagattgaaaagttggccagagacatcctgatcgaccctattcgagtggtgcagggagatattggagaggtaaccctaagcagggctggatgggaccttaatgggtttatttctcatattatggaacacagaat

SEQ ID NO: 40705 - DNA, 558 bp, Homo Sapiens
ctgactaaggaccctttttggcgaggcagctcccaggcagctttgtagcagatccatgcagaatgtaagcggtttggaaaagcatataatcttcgatctatgtggccgtatatggaggagggagtatgtgggagcaggccaaggcccttcaggagggggcagagattgttgtgtgtaccccaggtcgactgatagatcatgtgaaaaagaaagctaccaatcttcaaagagtctcttaccttgtgtttgatgaagcagatcgaatgtttgacatgggatttgagtaccaagttcgatccatagcaagtcatgttcgtcctgacaggcagactctcttatttagtgcaacttttcggaagaagattgaaaagttggccagagacatcctgatcgaccctattcgagtggtgcagggagatattggagaggcaaatgaagatgtgacacagattgtggagattctccattctggacctagtaaatggaactggcttacccggcgtctggtagaatttacctcttcagggagtgtcctcctctttgttactaaaaaagcca

SEQ ID NO: 40706 - DNA, 381 bp, Homo Sapiens
  misc_feature (299)..(299): n is a, c, g, or t
  misc_feature (377)..(377): n is a, c, g, or t
ggtgattccagtgacacagacacacgtttggactgtcttgtactatgctatgcactgttctgctcttttttgaattggaacatgagaattgaggtccatgtaattttgagtttcagtagttttttgctcacattagtctcatttttgtttttcctcttgtaggctgccatttatcaaatcgaaattatttcctcagaggaaaaaggtttagggtatcctaaggactttaaaatctcagtacgtttttttttaaagtatgttgtctcattctattgaggaagttatacaacatacagggntctagggtctagccaggggccatctagtttagtccaagacagctgtgttaccaacgtaggccttgaggcccgggggancggt

SEQ ID NO: 40707 - DNA, 475 bp, Homo Sapiens
ctcagatgagacttgccagttttgctgcagtaatgtcagcaaaagagtctctctctttctgactctatagacttaagtaagggtttacaggctttcattttaaggtatgactgatatttagagaacaagactaaaccaaggtcaaggggaaaacagttagactgtgaacctgcagaccactccactgcacccagtgtggccgtacacctgtgctgaacggccagagacttcctggtcaatactcccacagataaaagactgcaggatctgcttatacacaaatccatctttcgctgggaacccacaactcataacaactctcctaatgccaagtcatcaaggcctcttgaaagagaatcataaaaaacaaagaatttcaaacttggaaggaaacctaaagtttactggtgaggagcttgaactgagtagaagcaaagaatcatactccagatgagaaacgccccatgcactgagc

SEQ ID NO: 40708 - DNA, 509 bp, Homo Sapiens
gctcgacgacatgcccagggttgttgaatggccaatgattactatcccacagggtgagtaatctcttttctccctcccttggggcattcccatgtaggcagaaaactcttaaattaggagctggttggcagatcataaaaatagattgagccaggcaccatggatcattcctgtaatcccaacaactcaggaggtcaaggtgggaaaatgcttgaggccagaagttcaagaacaacctgggcaacataacaagaccttgtctctaaaaaaattttaaaagttagctgagcatggtggcctgtgcctgtagccacagctacttgggatgctgaggtgggagtattgcatgagcccaggtgtttgaggatgcagtgagccgtgatcatgccactgctctccagcctgggcaacagaacgagaccctgatagtttgaggatgcagtgagctgtaatcatgccactgcactccagcctgggcaacagagagagaccctgatggtttgaggatg

SEQ ID NO: 40709 - DNA, 659 bp, Homo Sapiens
cgacggcggccctggcagggaaggatggagacgctgaaggataagaccctgcaggagctggaggagttgcagaatgactcggaggcgattgaccagctggccctggagtcccctgaggtccaggacctacagctggaacgggagatggcactggccaccaaccggagcctggcagagcggaacttggagttccagggtcccctggagatcagccgctcaaacctctcggatagataccaggagctccggaagctcgtggagcggtgccaggagcagaaggcaaagctggagaaattttcttcagcactgcagccagggaccttgttagaccttctgcaggtggaaggcatgaagatcgaagaagagtccgaggccatggctgagaagttcctggagggcgaggtgcccctggaaacgttcctggagaatttttcctccatgaggatgctgtcccacctgcgccgggttcgcgtggaaaagctccaggaagtggtgaggaagcccagggcttcccaggagctggccggcgatgcccctccaccccgtccaccacccccggtgcgcccagtcccccagggaacaccccctgtggttgaagagcagccgcagccaccattagccatgcctccctaccctttggcctacagcccatcccccag

SEQ ID NO: 40710 - DNA, 576 bp, Homo Sapiens
  misc_feature (575)..(575): n is a, c, g, or t
gggatcaaaagaggccctaactttacttcccaaatggtgctttttaaaaaacaccatcactacattaggggcaattttttcacacctccctgtcttcagaatgtaaagggtggggattatgtctctgtttaatatgcagccccctgcactgtggggtttggggcatgttcagtaataagaatgaatacaatagacaaagggggtgtgatgagtgttaacttggttgttccagaggtaaaccaggtctcagggaagagcctggagctgctattgcttaggaagttgtacgtgccttgaaatgtccactacctgaggacgcagcatctggtgggcccggggctgctggggccaaggagggaccttgaccttctggtgcctgcccctccccggcctacgtgccatccgcgtgacgctaggtcagcgctgccggttctttaccaaatgtgcttgcttctcctaagttatttataaagagaaatcactaatggactctactggtttgagtgcttctgagctggatgaccgaccgcctgtatgtttgtgtaattaattgccataataaactttgatgagtna

SEQ ID NO: 40711 - DNA, 470 bp, Homo Sapiens
  misc_feature (185)..(185): n is a, c, g, or t
acggaacaagagagataaccttaaactctgactgccggtgagctggacggaacagagccatatttctcttctttcaaaagcaaatgggagaaatatcactgaattctttttctcagcaaggaacatccctgagaaagagaatgcatccctgagggtaggcctctgaaatggctgcttcagggcanctgtcttttatggtcgcagctgtggggatgaaataagccccagtttcccagagtgctcccaggcttattaggacgaggaaattcctgcctaataaattttggtcagaccagttgtctgctctcaaaccctgtctcctgataagatgttatcaatgacaatgcatgcccgaaacttcattagcaattttaatttcaccccagtcctgtggtcctgtgatctcgccctgcctccatttaccttgtgatatcttattaccttgtgaagcatgggatctctgtgacccc

SEQ ID NO: 40712 - DNA, 758 bp, Homo Sapiens
  misc_feature (599)..(599): n is a, c, g, or t
  misc_feature (739)..(739): n is a, c, g, or t
gggtttgtggcatgatagctcattttcctttatcgctgaataacattctcttgtctggatgtactgcagcttgtctgtccattcacctattgaaaggcctcttggttgtttccagttttggcagttaggaataaagccgctctaaacattctcgtgtaggttcttatgtgcacataagttttcaccttgtttgtataaatgtcaaggaacccaattgctatgtcatatggtcacaatacgtttagttttgagaaattgccagatggtcctccatagtgcccatacctttttgtatttctttttttttttaaattcataatcagtgtttttattattttcgatgatggctcatttctaagttaagtgatgtatactgtctacatttcccatctataagcttttgtttttcctggacttttgttacctaattttgatttgcttaggttattattttttttaatctatggcatgtcttcctatcgctgtgtacaatggctttcagtagaactttttacatcttcaaactcatcagataactgtgttttaatatctttttctgaggacattcctcccaaatccctctgttctgctccacttgnggctgataggtccttttctggtttgagacagggtctcactctgttgcccaggcttcagtgtagtggcacgacgaaaaccagagaccctttgttcacttggttatcttgctgaccttcccctccactattgttccctgggnaccctgccaaaatcccctt

SEQ ID NO: 40713 - DNA, 883 bp, Homo Sapiens
  misc_feature (794)..(794): n is a, c, g, or t
  misc_feature (814)..(814): n is a, c, g, or t
  misc_feature (823)..(823): n is a, c, g, or t
  misc_feature (843)..(843): n is a, c, g, or t
ctgcgcatagaagtggaggccgtgcggtttctgaaggaggagccacacaagctggacagtctcctgaagcgtgtgcgcagcatgacagacgtcctgaccatgctgcggagacatgtcactgatgggctcctgaaaggcacggacgcagcccaagccgcacagtacatggctatggaaaaggccacagccgcagaagtcctgaagagtcaggaggaggcagcccacacctccggccagcccttccacagcacaggtgcccctggcgatgcgaagtcggaagtggtgcctttgtccggcatgatggttcgccacacgcagagctcccctgtggtcatccagccctcccagcactccgtggccctgctgaaccctgctcagaacttgcctcacgtggccagctccccagccgtcccccaggaagcaacctccactctgcagatgtcgcaggctccgcagtccccacagatacccatgaatgggtctgccatgcagagcttgttcattgaagaaatccacagtgtgagtgccaagaacagggcagtgtctatcgagaaagcagaaaagaaatgggaggaaaaaaggcaaaatctggatcactataatgggaaagagtttgagaagctcctagaagaagctcaggccaatatcatgaagtcaataccaaatctggagatgccgccagccacaggcccactgccaaggggagatgccccagtgggacaaagtggaacttttcagaaagattctcccaaattcggaacagggacttggaaaaagctggggggggaaaagtngcccccctccctccttccgnccacctccntcggtcggaagctaacctgncccagggatccggggaactccacccaaccacgaagggtct

SEQ ID NO: 40714 - DNA, 411 bp, Homo Sapiens
tgtactgcaaaatttcaatcaacatgacaacttataatgagtggagatttcatattaggtactaaatattatagtattatttctattttctttttccaaataagaagcttggattattttattttgtggtctttatcattaactttaattctttctgtactgtgtataatatttttatattattggccttaccataaaattatttagaaaggttgtcaaaataagttatacctctttggcaatagatagatgtatacatctacctactatgatctacaattttaggttaagtgaagcttgggggggctactgacttggttaccttcttgtctcttgtcccaaagatttaaactgtgtacctttgtatagctcttctgccccattttgacttctgagatgaaagtatttact

SEQ ID NO: 40715 - DNA, 612 bp, Homo Sapiens
  misc_feature (5)..(5): n is a, c, g, or t
  misc_feature (11)..(11): n is a, c, g, or t
  misc_feature (14)..(14): n is a, c, g, or t
  misc_feature (19)..(20): n is a, c, g, or t
  misc_feature (26)..(26): n is a, c, g, or t
gcgcncgcggncanaggcnncctgangacggtccccagagagccaccggagacgcagctcacctgagagacggagccccggctcgcccgtgtgcagagggacaaggcaaaatctcagcaagttcggacctctagtacaataaggcgaacctcctctttggatacaataacaggaccttacctcacaggacagtggccacgggatcctcatgttcactacccttcatgcatgaaagacaaagctactcagacacctagctgttgggcagaagagggtgcagaaaagaggtcacatcagcgttctgcgtcatgggggagtgctgatcaactaaaagagatcgccaaactgaggcagcaactacaacgcagtaaacagagtagtcgtcacagtaaggagaaagatcgccagtcacctcttcatggcaaccatataacaatcagtcacactcaggctactggatcaaggtcagttcctatgccactgtcaaatatatcagtgccaaaatcatctgtttcgcgtgtgcctgcatgtagaaggaataagtctgaattagaaaaggtattcattaaagaaataatgggaaggaagaatatccagccgtggacataccag

SEQ ID NO: 40716 - DNA, 488 bp, Homo Sapiens
  misc_feature (64)..(65): n is a, c, g, or t
  misc_feature (113)..(113): n is a, c, g, or t
  misc_feature (471)..(472): n is a, c, g, or t
ctccgtcccacttcaggcagcaggctcgagtttgaggccatacatcaggggatccccttgactnnttttgggggaaccttggaagtcacagtttggggtcacttgagaccggncaggaatgtttgcatgacctacctcaggaggggaggcgaggaagagtaatatttagcattcaggacccacccaccctatgccggcttctgtgccaggcacttccttttatcggttcatttaacctggtgactggctcttatcacttctagtttacaggtgagggaaccaagtttcacagaggctaagtggcgtgcccctgatcactcagatagcaagtagctaccccaggagtctaaaatccaggtctttcatctccgaagtcaatgctctttccaccatgctgcctatctcagagcaggaaaaacaaacaaaaaacaacaacaaaacctggctcgtgctgggcgtggcggctcacgnntgtaatcccagcccta

SEQ ID NO: 40717 - DNA, 600 bp, Homo Sapiens
catctgcgtgtgtttatgtgtaggatagtatcttacttagtccatatctctgcaaaatcagtattctacttaggcaaattttacaggtcactgaagcttaattctttactatgtattatgtgtatatactgtagataaatacatgtatgcatactgatcttcacccttcatcctggaagaattacatttcacagccagttacatcaggttgagatcactctaaaagccctctctacaaatgctgtatcaaatctctaaatctttgttcttagcttttagtcttgaaaatgtattttagtcaggccaggcgcggtggctcacgcctgtaatcccagcactgtgggaggctgaggcgagtggatcgcgaggtcgggagatcgagtccattctggctaacatggtgaaaccccgtctctactaaaaatacaaagaattggccgacatggtggcgggtgcctgtggtcccagctgttcggaggctggggcgggggaatggtgtgagcccgggaggtggagattccagtgagctgagatcacgccactgcactccagcctgggcgacagagcgagactccgtctcaaaaaaaaaaaaaaaaaaaa

SEQ ID NO: 40718 - DNA, 766 bp, Homo Sapiens
  misc_feature (616)..(616): n is a, c, g, or t
  misc_feature (707)..(707): n is a, c, g, or t
  misc_feature (734)..(734): n is a, c, g, or t
cataattcagcatacgatgagtatgagtctgttttggaccccatccaaaggagttagttcctagaagtacttggaagatttattctcatttatcatgaggcatcctaacaggagactaaaaataatcacgatgacaataatagtaatcagttgttacacttgtattatgtactaagcatcgtgctaagcatgttaaagttcacctgtttttgaaaaggcacttcatgaccttatgtgggttgcgaatctagtgggtcataaacaatttctgaaatgaaagaaaagtaggaaaaaacacagagtgcattatacatactaagttgatttattttttatttttttattttttttgcaaaacttcctttttgatcatgtggctagtgattaaaagtttggaagcactgcctcgtttccaatcttaactgccttgctagttaagtattattagccccattatataagtgaggaaacaggacgagagaggataagtaatttggccaagctgacacagtgagtggccaagctagaattttgaacctagatctgtttgacttcaaatccaatattttcacttctatagtgatgataaaatattgaccaaggtatggaataaatngatgctaatcatgttttctttgtgaggactacatgggtttttatttcagctaaatggagaaacacagcatagaattcaggtgacatgttcngatgagagtgatgattttcatcactanatctaatatctgaccttttcctggagtgtgct

SEQ ID NO: 40719 - DNA, 469 bp, Homo Sapiens
ggaattaaaagaaatcaaagagtgtgtaagcagaaactcagttgtacgtaagaaaacccaattccccctgagaaagagaaagagctggagtcctttaaaaattcactgcctgtttttctggtggctagtgagtgttagctctcctcccttcccaggcattgtgaagaccctgtttccctagctgtgcagctgcaaggtcactagacagataaactcaagtcgcaaaacatgtttttccttgaaaagtaagaaatgatgtaatgcatgtcttgactgaataactgtctttgtttcttgcttctgtaatatgcttccccctgcacagatctccccctgccccacgaaatgcttaaaagctaacttaactctttgttcagggctcagtcctttggatgttaatctgactgggccggagcacctaaataataaatattctcctgaaccccaaaaaaaaaaaaaaaaaacgcgg

SEQ ID NO: 40720 - DNA, 764 bp, Homo Sapiens
  misc_feature (764)..(764): n is a, c, g, or t
gatgttggctagttgaactggggtggtggcagctctaaaatgcctgccttatgtagctggcaactggtacctgttgtcatctggcatcagctggtattagccagggttcttttggggatgtctgctagggttattgttctcacccatgagggtgagatagagtagggtaatgccatttagagttttagaagcccttttgtctagctaagaggatccaggagggcagtagtttaaatctttcagaggtcttaacaaaggaacatccttgacttgattttaaccctaaagccacatgttataggcagtaccctggattgatctaagccagtatctgtaaatagtgtattctagaatcacggggactatagggatcatctaggatgatctaggacgagtgagaatagatgagagaccttaagctgagaacaaataatggacgagctggacatgtgatgcatgcatgtagttccagctacttgggaagctgagggaggtttgcttgaacccaagagttcaaggctataggctgtcgtgtgctctgatcatgcctatgactagccactgcactccagcctaggcaatattaatgcgattctgtctaaaacaattacaattgttacagaggtgggggatttgtcccaagtcacacttttactaatttatggcagagctagaactaaactggtatgagtaaatcttcttttggggcctcgttaagaaagcaataatagggccccgggtaccatggtcctgccttgtatccn

SEQ ID NO: 40721 - DNA, 677 bp, Homo Sapiens
cccccccaggaccccattcacgaagctagggtgcccctctccagctctcccagacccccccaggaccccacacaggaagctagggtgcccctctccagctctcccagacccccccaggaccccacacagggagctagggtgccccctctccagctctcccagacccccccaggaccccacacagggagctagggtgcccctctccagctctcccagacccccccaggaccccacacagggagctagggtgccccctctccagctctcccagacccctccaggaccccattcacgaagctagggtgcccctctccagctctcccagagccccccaggaccccacacacacactctggctcccccaggggctctctttccgtttctctgactaggaaaatgtgatttctctcagtttttgccatctacaccctcaggttaaacccatgagagaatggaggaagatgaactgggaacctccccagatcagtgttgactgctgtattctgacagctcttgtctattctcagaggctgcaggttgcttttcaaaattgcgtccagaggccaggcatagtggctcacacctgcagttccagcgatttgggaggatcacttgagtccaggagtttgagaccagcctgggcctcatagtgagacctcctttctacaaaaaaaaaa

SEQ ID NO: 40722 - DNA, 707 bp, Homo Sapiens
tatggccgggggacccggaagcggatctcgcggggctactggcgctctcggcccacacaatatgacctcggggaggatgcgaggaagatgaactgtgatgatccacttcttcttaatgaatgactgacttacctgagaaagaaactcagaggaagaggaaagaaagaagaggagggaatggctctttctcagggactgtttacattcaaggatgtggccatagaattctctcaagaggagtgggagtgcctggaccctgcccagagggccttgtacagggacgtgatgttggagaactacaggaacctgctttctctcgatgaggataacatccctccagaagatggttctcaccttgcagcctgtggacagagcacactgcctcttccttagaatcctacaaaatccgacccttttattttactcccgtaccttttatttctctcccttttctagctttctactctatccgggaacttagggagaccttagtcttcctgattccatattcttctaagatttgcctctgaaagttgcttttgaaatacacattccggatgggcgtggtgcctcacgcctataatcccagcactttgggaggccgaggtgggcagatcacctgaggtcgggagttcgagaccagcctgactaacatggaaaaaccccgtctctactaaaaatacaaaaattagccgggtgtgttggca

SEQ ID NO: 40723 - DNA, 579 bp, Homo Sapiens
agcggtgccccgcctgctgcggtggcaccagccaggaggcggagtggaagtggccgtggggcgggtatgggactagctggcgtgtgcgccctgagacgctcagcgggctatatactcgtcggtggggccggcggtcagtctgcggcagcggcagcaagacggtgcagtgaaggagagtgggcgtctggcggggtccgcagtttcagcagagccgctgcagccatggccccaatcaaggtgggagatgccatcccagcagtggaggtgtttgaaggggagccagggaacaaggtgaacctggcagagctgttcaagggcaagaagggtgtgctgtttggagttcctggggccttcacccctggatgttccaagacacacctgccagggtttgtggagcaggctgaggctctgaaggccaagggagtccaggtggtggcctgtctgagtgttaatgatgcctttgtgactggcgagtggggccgagcccacaaggcggaaggcaaggttcggctcctggctgatcccactggggcctttgggaaggagacagacttattactagatgattcgctggtgtcc

SEQ ID NO: 40724 - DNA, 491 bp, Homo Sapiens
ttttttttttttttttttttttttatgtggtggcgtgcaggtagaggaggtttgtaaggaatagtggtttaatatcacagagctagaagctagtttcagcagaaccagaattagaatctggacttctgtgccttactaagttttattagcattcattgggtcttactcttttgacttatttaattcactaatggattttaatggtttattggattgtatgctggtgcagttctttgatcttgagcctagctttctctttctccttttttgggaactttattgggtatgttggggcatgtttacacacacatcttgctgccttgggttcttgcaagttgtgtgcgtgttttatctgcccctactagcttttaggtgtcttgagagcatgactctggcttactcatctgtctattccagaagaccttgtctgttcttggcatttattaactaattttctaagactgggttgaagtagttgcatgtcaagttta

SEQ ID NO: 40725 - DNA, 395 bp, Homo Sapiens
gcacccaggccatctagcataatgttttgcatagttgtcagcagataaatattgaatgacaaaactcagatggaggaaaaagaacaaaataacctagttctcagaaagatttaatgagcaaatgggaaaatgtcaaaaagatttgcaatgccattcctaaataactatttccccttttagtcattagaaaacgtctaaacactttcaacattaaatctttcacttgcattttaacagagcactacttaattttgggttaccttttatatactttgtacattttaaggtgattatactggagatagaagggggttagactctagatgtgtgttgtccaatacagtaactttcagccaccagtggctattgagcacttgaaatgtggctagtctgaa

SEQ ID NO: 40726 - DNA, 660 bp, Homo Sapiens
  misc_feature (596)..(596): n is a, c, g, or t
cagattctccaagatcaaaatgaaggaaaaaatgttaaaggcagccagagacaagggcaggtcacctacaaggggaagcccgtcagactaaccgtgggcctctcagcagaaaccctacaagccagaagacagttgggtccaatggtcaacattcttagagaaaagaatttctaacctagaatttcatatctggccaaactaaccttcataagtgaaggagaaatccttctcagacaagcaaatgctgagggaatttatcaccaccaggcctgccttgcaagacctcctgaaggaagcactaaagatggaaaggaatcagaatgatgctggcctcataaaatgagttagggaggatttcctctttttctattgattggaatagtttcagaaggaatggtaccagttcctccttgtacctctggtagaattcggctgtgaatccatctggtcctggactctttttggtgatggcatcagctgagaagggaaggaagcccatgtgaggacactgaagaaggagtgagcagacaataagaagcccacagaagacagagaaggaacaactagagggagaagccaaggcagacactacccanagcagtccttcactacagtggcagacagacctgaaaattttcatctgaagcagcagagtgaact

SEQ ID NO: 40727 - DNA, 1182 bp, Homo Sapiens
  misc_feature (304)..(304): n is a, c, g, or t
  misc_feature (340)..(340): n is a, c, g, or t
  misc_feature (426)..(426): n is a, c, g, or t
  misc_feature (454)..(454): n is a, c, g, or t
  misc_feature (471)..(472): n is a, c, g, or t
  misc_feature (477)..(478): n is a, c, g, or t
  misc_feature (505)..(505): n is a, c, g, or t
  misc_feature (507)..(508): n is a, c, g, or t
  misc_feature (514)..(514): n is a, c, g, or t
  misc_feature (577)..(577): n is a, c, g, or t
  misc_feature (745)..(745): n is a, c, g, or t
  misc_feature (851)..(851): n is a, c, g, or t
caaggggagttttgcattttcacatcttacataatggatgaacagagaactttagttcttagtaagaaaacaaaaacattgaaccatggatagaacagtggggagctctcttttgaacaacttgtaggttgatgagtaaatcaacactagcacttatgtctatccagaaaataatcaggagattatcacagctcatgagataagcacagtagatacgttatagcttttaaacaaatttctttctaaacacaataaaaggagaaatttaattgttttgcttaagataaaaacctaagtaggctgngcgcggtggctcacgcctgtaatcccagcactttgngaggctgaggtgggtggataaggaggtcaggaggtcgagatcatcctggccaacatggtgaaaccccatggctacttaaaatacanaaattagccagtgtagtggcgtgcaccncgtagtcccagtactcnnagagnntgagcaggagaatcgcttgaacccagnanngtgagntacagtgagctgagacagcacccgtgcagcttgggcgacagagcaggactcggtcttcaaaanaaaaaaacaggaaggataaaaaaacaaaacaaaaacaaaaaaaccttgcggcggtttggccccagcgacttaagattggccaagttatgcatgcggccgaattttaacttacttggccatttggccttatggggtcggtatacaattaattgcccgggtttcacaagngggactggaaaaccctgtggttcccaattaatgcgctggagcaaatccctttcgccgttggcggaaagcgaaaggcccgaaggatggcctttccaaagttgcgacnctttatggaaaggaaattgagcggtatatttgtgaaaatccggaaatttgttaaacacccttttttaccaaggcccaaatggaaaaccctttaataaagaattcccctttagggtgagttctcacttggacaagtctcttttagaagggccccacacaaggggaaaaccttttaggcgggccatttggaccaccctctaaaattttggcggggcccagaataatggcccctagggccccctatcttctgcaaaagccccactgccggataatcggacccttagcctggcgcctcggttacacctccttctttctttatggtcctttcttcg

SEQ ID NO: 40728 - DNA, 601 bp, Homo Sapiens
tgaacaccttgagcgagaacccataatagaacaacttagcaaaatgttctttattctaagtattgttggcatcttcgtggacattggcgcagatgtcagaagaaaccggaacctccagaagacagatgatattgaggttcttggggaattaaagagaaatattaccctctgcctcatttgccattggagacagtgcaatctggtgtatgcactaataataataataacatgtcttttcatattttaaaaaaaaacacaaaatctttaggaagctgaggtgggtggatcgcttgagtcaggagtttgagagcagcctgagcaacatagaccccatctctaaaaaaaattagccaagtgtggtgatgtgtgtctgtggtgccagctacttggaaggctgaggtaggaggactgcttgagctcaggaggttgaggctgcagagagtggtgatcatgcctctgcattccagccttggtgacagagcaagaccctgtctcaaacaacaacaacaacaaaaatcaaaatctatgcaaaatttaaacccaatcttgcgctagtcttgtgggaatgaagattaatttacctaaaaatgctcctctggtt

SEQ ID NO: 40729 - DNA, 416 bp, Homo Sapiens
tttttttttaacgctattttatttttgagatgaagtcttgctatgttgcccaagctggtcttgaactcctgagctcacgtgatctacccaccttggcctctcaaagtgctgggattacaggcgtgagccactgtgcccaacttaaaaaacaggttttgaaagcaagtttgataaagcaatttattacaattttctcttcttcaacaagctattatttcagctctaactctggtcatatacttgtttttggatctctgcttctttttctggcaacatattcaagaatttaaatattcactaggctttatggagcagtaaattcggaataatgtttaaacaaatactcctaaaatatttttcaacaaatgtttgtaaatggatgttgaaagtaagcctgttttaaaaaaaaaaaaaaa

SEQ ID NO: 40730 - DNA, 453 bp, Homo Sapiens
  misc_feature (6)..(6): n is a, c, g, or t
ctgagnatcgcaccactgcactccagcttgggcaacagagtgagactctgtctcaaaaaaaaaaagaaaggaaaagaaaggaccacttgttatagaaagcctgtcttttaaggtagctctggaccttttcagaggcagccaaattgcccctcatggttcgtcccccacatccccgcctgcctggcctaagtcctccttccccctccccaacagttaaataagtctttgtctccattacaaaacaaatctcagagctaccttcaaagaagagccagccctcagttggtgaatgaagatactttgacattttcctatgagcatggtgaaacaggtttaatttgtattaaatagcttgaagcaatccttattgggaattacaaggtggaattttagtcacaggaaaataaagcatttcacaagctacttactttcatgaacaaaaaaaaaaaaaaa

SEQ ID NO: 40731 - DNA, 501 bp, Homo Sapiens
attccaagaaactgaaatagaacacaatagggagagggaaagagaaagcaaaagaatagtgaatggtattagctctgatcttgaggttagggcagctagttccatgtttattctgggttttgcaaattcaaaccacactgtcatcaggcatctttaaatagcagtacactccagtggttaagcttggtttctgtgactcagttacctcttttgaaaaatgggggcagggcgcggtggctcacccctgaaatcccagcactttgggaggccaaggcgggtggatcatgaggtaaagagatcgagaccatcctagccaacatggtgaaaccctgtatctaccaaaaatacaaaaattagccagccgtggtggcaggcgcctgtagtcccagctactcgggagtctgaggcaggagaattgcttgaatctgggaggcagagattgcagtgagccgatatagtgccactgtactccagcctggcaacagagcaatactccatctc

SEQ ID NO: 40732 - DNA, 380 bp, Homo Sapiens
  misc_feature (336)..(336): n is a, c, g, or t
  misc_feature (361)..(361): n is a, c, g, or t
  misc_feature (367)..(367): n is a, c, g, or t
tcttcaggatatttggtttctatgataaggtgataaacatggatggcttgatcttggagccaccaaactacattgagctttaaattctccattgggtacaatggttacatgcttcttaccctaaaactctggacttacaagtcatagttgtatgtaagtattaaattcactgaatgagatttttctctagacagatatcctttctgaatctggggtttcctgggctggggtgcaatggctcactcctgtactttacaacaatttgggaaggcccaggcaggaagggattgctttggaagcccaagagttcggaggacccagcctgggggccagggnaaagttgaggaccttcatcttcttnattttnaaaaaaaaaaata

SEQ ID NO: 40733 - DNA, 318 bp, Homo Sapiens
aaaactcagccagcctcatgtccaacatctcatgggcttgctccagttctctgcactttccaaagtgatagctgactaatcaaagatattgtgataatgaattgcctaactacgcagcctgccttcttctcttctagcatgtatttgattaggggcctgctgaaaccaattaagtaaataattcagtatgactttatgaactacctactacatgcatggcttaacacaggcagcctcaagaggctgaggaaccaaagacggaaaaagcacaacttatagtccagctatagagacagacttttaggtaagtaatcatac

SEQ ID NO: 40734 - DNA, 753 bp, Homo Sapiens
  misc_feature (731)..(733): n is a, c, g, or t
  misc_feature (736)..(751): n is a, c, g, or t
cctgggtggcgaattcggacgaggagacatgcccttgtcacttcggcctgagtcccagaatgagaagttacatggagcagacctgaacaagattcacaacctgaacagaatcactgcagccaatccacaaacctaaaattgtctacattcctgcctgggcatggtggctcatgcctgtaatccagcactttgggaggccgaggtgggcgagtcacttgagtcaggagttcgagaccagcctggccaacatggtgaaaccctgcctctactaaaaatacaaaaaattagctgagcatggtggtgcatgactgtaatcccagctacttgggaggctgggtcaggagaatcgctttaactgggaggtggaggttgcagtgagccaagatcacgccactgcactccagagtgggaaacagagcaagactccacctcaaaaagaagaaggagaaggagaaggagattatctacattcctgaggaggagaagttgtacttaaactaccttgatccaacttccagctttacaatcattgccccccaccatgcatatatcatacatatatacctgctagcatgaatacctgcatcatatctagaattaatgggaatagtcatagggccaatctttcttatatcaagcaagctgaacaagggtccaagggataaggccacagctacttcctcctgctttagaacagagctaaataaacctgttcctaagtcttgtgaaannnaannnnnnnnnnnnnnnnaa

SEQ ID NO: 40735 - DNA, 537 bp, Homo Sapiens
  misc_feature (13)..(13): n is a, c, g, or t
cggcggcgccggnttttttttatttttttttattttttattttctcacagatgcagttcctgcattagtattgataaatgtgtggctgctccacttggagtgttttcaaagcataaatcacagcattgatggtgctgtggtttggctcttccagccctcttaacaacggtctgatggacttggcgagagtctagccacgtgttctggcctctgtcactctcatggctgaaacgcatgcacacccacagatgggggccccgtggtagagatgtgcctctacttgtcaaatagactgactccaaattcggaaatatgcctcaggaatctagaaagatagaaaaggagtcttcgtcactgtagggtctcattcacaatatggaggagagatggaggggagtttttggtataaattttgcctcataaaaattctccacgttgttttgtactgtatgagggtagcgagaaattagttgatggttaacaatcaagctggagaagaatatcctcaatttttcacatggaaaatgaaaaactaca

SEQ ID NO: 40736 - DNA, 498 bp, Homo Sapiens
  misc_feature (131)..(131): n is a, c, g, or t
  misc_feature (334)..(334): n is a, c, g, or t
  misc_feature (445)..(445): n is a, c, g, or t
cacagcttgaatctcagcatcaacccattagccatgcgactgcctatccattgtgtttgtgtcaccaaagaatacagccatattcttgtaggtttagaagatggcaaattgattgtagtgggtgttggcangcctgctgagatgcgttcaggtcagctttctcgaaaattttggggatcgagcaagcggctcagccagatttcagctggagaaactgaatataatactcaagattccaaatccagaataacaaaacaacagagatgaacatgaacctttagctactagcaccatccattcactatactacactttattgaagacacttcattanaattggaaacttcctgcgttaattcatctggtaagattctcagtcactggacaatcaaagccatgttagttacgtgcttcattaagactgccttgcttttgtaaaacaagntcataacaccattccaagcatcaaataaatctgtttgtttcacacaatgaaaa

SEQ ID NO: 40737 - DNA, 600 bp, Homo Sapiens
tctcatgactgatgtgtgtcctgaaggagggatctttagaaaattgttcaagttacatcgtgacaacatactggaacttgggaaagccccacatgacaattcagctactttcaagtgactctgttccatgtccctaggcctgtgtgctcttaaaaagttgcaatcatgtggtaactgccattttgaattactaatattttatcatattcatttattttggcatgttaaatagcaacactatggcatgatagaaaaaacatgggctaggccgggtgcggtggctcacgcctgtaatcccagcactttgggaggctgaggtgggcgattcatgaggtcaggagttcaagaccagcctggcaacatagtgaaaccctgtccctactaaaaatacaaaaattagctgggtatggtggcatgtgcctatattcccagctactcaggaggctgaggaaggagaattgcttgaacctgggaggtggtggttgtaccaccgtgtgtccctcccctgtgtggcacaagatgagtaacgactctgtctcaaaaaaataaaaaaaataaaaaacatacataaaaaaaaaacaaaaaaaaaaaataaaaggg

SEQ ID NO: 40738 - DNA, 865 bp, Homo Sapiens
tcccagccccctacccactgggacctctgtttgtagtcagagtttgtttggctacttcctttgcaacccccacccccaacctttttctgcatggtagatgaaaaattgaaagtacctctgattggtccctttccacaaccaatgaggctggtcatgggccaagtcttcatttgcataggagtataactttgtaacttcacttcagccttttcccaatcaatcagagatttgcatagggtgtaactttgaaacttgcttcagcctctgataggtcccctccctcaaccaatcagactgattgtgggcactacttcatttacaagggtgtacatcaagtaaccaatgggaaacctctagaggatatttaacccccaaaaaattcggtaaccaggctcttgaaccacttgctcaagccactcccaccctgtgaagtgtaccttcattttcaagtaaatctctgcttatgttgacctcaaaaaaaaaacaaaaaaaagaacacaccgaaaaaaagaaaaagaaaacacacccgaacaaagacagaagggagggagcggccaaagaaaacacacaagagaggggcagaaagaggggtgcggccgcgacaccacagagattgtgagtaagaaactaacggggaccgccacccatctgagaggcgtcaagcggcacgatagttcacgcacgcagaagaaagccaagaccagcgacgatgagaaatacagtagaacaaggacaggggagctagaacagaaagagggggaaccagaagggagagaaacatctgtgcagaagcaggagcgcgaacaacactaatgcgtggtggaggagaaagaagagggcggcgacactacgtcgtacgagaaga

SEQ ID NO: 40739 - DNA, 419 bp, Homo Sapiens
aaatgtcaaacatttttcaaagtcccaataaatttgtattgtcttctgtttaacagtttgattactaccttccatggttctggaaaattgaatttaaatctatgaaggttaaggtaaaaaaatgagctttacatcattcttagtttttgtattatagaagatataaaaatctttggaaagactttaattcagtgccttttgtgagttgggaaattatgtcaaaactcagtggactgaatattaataaaactttctcagcatcttactagactctggagaaaaagaaaaaaattatacatcatatattgaaggaaaattaacccagaatccagcagagagcacaaaggagcctaaatagagagcacaaagtacacatgtggatgttccactactttaaaatagaaagaccttatgggaaa

SEQ ID NO: 40740 - DNA, 548 bp, Homo Sapiens
atttattttgcagtcagaaactacctttcccatgctgcctgtgactgctttatagtctcaaatgttcccaacatgctcttccttaaggattagactcaaactttttcctcaaaaagcttatcctgcccctgtctttccctctaggataagacagacatccctgcctctgctcccctaccacttagtgtacaccttgttacagagctcagaacactgaattatggccatttatttgaaaatcttcctggccgggcatggtggctcatgcctgtattcccagtactttgggaggccgaggtgggctgatcacttgaggtcaggagttcaagaccagcttggccaacatggtgaaatcccgtctatactaaagatagaaaaattagccggtcatggtgttgtgcatctgtagtcctaggtactctactcgagaggctgaggcaggagaatctcttgaacccaggaggtggaggttgcagtgagctgagattgcgccactgcacttcagcctgggcgacagagcaagactctatctcaaaaaaaaaaaaaaa

SEQ ID NO: 40741 - DNA, 714 bp, Homo Sapiens
agcggaggctgggaggagagaaaaggtctgcctttgacatttgtaactgctgagaactgaaggtcagatacagtcctttccactaagaaatggctgctcaccgaagagctcatgagatttgctactgctgtcacctctcatggcttggtggtctgaaaatattgtagaaagaaaagagtttcctatgcctcagcaacttgtgaaataccagattaagtttgtggacactgtctccaggataaaaagtttttaggctgggtgcggtgtctcacacctgtaatcccagcactttgggaggctgaggtgggtagattgcttaagcccaggaatttgacaccagcctgggcaacatagcaagaccctgtctcaaaaataaacaaatacataaataatttttaaacaagaagtttttaaggccgggcactgtggctcacacctgtaatcccagcactttgggaggctgaggtgggcggattacctgaggttgggagtccaacaccagcctgaccaaccctgtctctactaaaaatagaaaagtagccaggcgtggtggcgcatgtctgtaatcccagctacttgggaggctgaggcaggagaatcacttgaatctgggaggcggaggttgcggtgagctcagattgcaccattgctctccagcctgggcaacaagagtgaaactccgtctcaaaaaaaaaaaaaaactttccaagcgct

SEQ ID NO: 40742 - DNA, 456 bp, Homo Sapiens
  misc_feature (456)..(456): n is a, c, g, or t
agttgcttctgtcttcctgcagtttgtataaaagataaaacctctcacatggcatatgtatttatactacacatagaaaatataattaggcaataagctaaaatactactttgtaataaactgtgtagcatactgtttaagagtaagtactggtaactttaattttgttgataggtttttgaaataacctgttatagccgggcgcggttgctcacgcttgtaatcccagcattttgggaggccaaggcaggcgaatcacctgaggtcaggagtttgagaccagcctagccaacatggtgaaacccccgtgtctactaaaaatacaaaaaaattagccagacatggtggcacacgtctgtaatcctaagctattcagggaggctgaggcaggagaatcgcttggtcaggaaggaaggtggaaggttgcagtgagccaggattctcaccactgtactn

SEQ ID NO: 40743 - DNA, 689 bp, Homo Sapiens
tttttttttttttttttttactgtcaaaagggtaaaaatttttatttttatttttatttatttattttttttgagacagagtctcgctctgttgtccaggctggaatgcagtggtgcaatctcaactcactgcagcctctgcctccctggttcaagtgattctcctgcctcagcctcctgagtagctgaagtaggaggatctcttgagctcaggaggaggtcaaggctgcagtgagccaagaccatgccactgcaccacagcctgggtgacagagcaagaccctgtcccccacccccccccaaaaaaaaacaaacaacaacaacaaagaaatatattgaaataactggtatcttcaatacaatgttgaataagagtggacatcattggttcccaatcttagggcaaaactttctgatttcatcattaagtatattagctgtaggtgttttgtgtatgccctttaaaaattattttattttttgtagagaagggtcttgctatgttgcccacactggtcttgaactcctaggctcaagcaatccgcccatcttgtcctcccaaagtctgggattataggcatgagctactgctcctggcctatggatgccctttatcagtttcaggaattcccttctattcctaattggctgagaggtttattttcctttcatgaataggtattaaattt

SEQ ID NO: 40744 - DNA, 402 bp, Homo Sapiens
gaagggtcttgctatgttgcccacactggtcttgaactcctaggctcaagcaatccgcccatcttgtcctcccaaagtctgggattataggcatgagctactgctcctggcctatggatgccctttatcagtttcaggaattcccttctattcctaattggctgagaggtttattttcctttcatgaataggtattaaattttgtcaaatgctttttctgcatctattgagatggtgatatgggtttgtcttatagcctgttagtatagtaaattatattgattgattttaaaatattaagccaaccttgtattcctgggatgaaactaacttggtcatggtgcattattgtttgtatttactactgtattcattttgctaaattttaaaaggatttttgaa

SEQ ID NO: 40745 - DNA, 843 bp, Homo Sapiens
  misc_feature (28)..(28): n is a, c, g, or t
  misc_feature (121)..(121): n is a, c, g, or t
  misc_feature (357)..(357): n is a, c, g, or t
  misc_feature (360)..(360): n is a, c, g, or t
  misc_feature (376)..(376): n is a, c, g, or t
  misc_feature (433)..(433): n is a, c, g, or t
  misc_feature (442)..(442): n is a, c, g, or t
  misc_feature (452)..(452): n is a, c, g, or t
  misc_feature (458)..(458): n is a, c, g, or t
  misc_feature (488)..(488): n is a, c, g, or t
  misc_feature (547)..(547): n is a, c, g, or t
  misc_feature (554)..(554): n is a, c, g, or t
  misc_feature (562)..(562): n is a, c, g, or t
  misc_feature (578)..(578): n is a, c, g, or t
  misc_feature (586)..(586): n is a, c, g, or t
  misc_feature (588)..(588): n is a, c, g, or t
  misc_feature (599)..(600): n is a, c, g, or t
  misc_feature (602)..(602): n is a, c, g, or t
  misc_feature (605)..(605): n is a, c, g, or t
  misc_feature (611)..(611): n is a, c, g, or t
  misc_feature (614)..(614): n is a, c, g, or t
  misc_feature (653)..(653): n is a, c, g, or t
  misc_feature (656)..(656): n is a, c, g, or t
  misc_feature (661)..(661): n is a, c, g, or t
  misc_feature (695)..(695): n is a, c, g, or t
  misc_feature (701)..(701): n is a, c, g, or t
  misc_feature (709)..(709): n is a, c, g, or t
  misc_feature (718)..(718): n is a, c, g, or t
  misc_feature (724)..(724): n is a, c, g, or t
  misc_feature (727)..(727): n is a, c, g, or t
  misc_feature (732)..(732): n is a, c, g, or t
  misc_feature (750)..(750): n is a, c, g, or t
  misc_feature (753)..(753): n is a, c, g, or t
  misc_feature (759)..(759): n is a, c, g, or t
  misc_feature (769)..(769): n is a, c, g, or t
  misc_feature (778)..(778): n is a, c, g, or t
  misc_feature (793)..(793): n is a, c, g, or t
  misc_feature (805)..(805): n is a, c, g, or t
  misc_feature (811)..(811): n is a, c, g, or t
  misc_feature (818)..(819): n is a, c, g, or t
  misc_feature (840)..(840): n is a, c, g, or t
agactgggcagtgttggccgctggcggnagcgctggggcagcatgaagtgcctggtcacgggcggcaacgtgaaagtgctcggcaaggccgtccactccctgtcccgcatcggggacgaanctctacctggaacccttggaggacgggctctccctccggacggtgaactcctcccgctctgcctatgcctgctttctctttgccccgctcttcttccagcaataccaggcagccacccctggtcaggacctgctgcgctgtaagatcctgatgaagtctttcctgtctgtcttccgctcactggcgatgctggagaagacggtggaaaaatgctgcatctccctgaatggccggancanccgcctggtggtccanctgcattgcaagttcggggtgcggaagactcacaacctgtccttccaggactgtgantccctgcangccgtcttcnacccancctcgtgcccccacatgctccgcgccccancacgggttctgggggaagctgttctgcccttctctcctgcactggctgaaattaccctnggcattngccgtggncccaaggtctcctgcncacttccncnaagaagaagcnnanacnctgccnaanccatggtgactgaaattttcttggaaaagaagatttcancancttcnggcccagaaagggtggcatcacttctgctcaagnaatccnggggtccnaacttttcnaaatcnccnaattnaatcttacattccttttnatnctccancaggcccccntctttcccntcaaggaatcttttnttgaaaggcccntttttnttggccnnctcccaaaaccaaaccccctnccc

SEQ ID NO: 40746 - DNA, 415 bp, Homo Sapiens
  misc_feature (404)..(404): n is a, c, g, or t
aggcctctcagcctagtttgggtacttctttgtgctttcattacaccctgtgtttcctggccttggatttactatgctattggtagtgcttatcttgtttacccactaaaccaacttggaggtcaacatgattctgtacctggaacacctgacaggtagtggacacttagtaaatactctatgaattcatgtaagtagttatggcatgcagcttttcagtcactcaaacctgacctcttacactagcgtgccatagagcctacatttcctacactcagccaaattctttaaagagatatccatatttttgagcactagtatgttccaggccttggggatagatatatagctatagtgggatgagacagagtaagtcctgttctcataaaagccatgtgtttttnaggagcccctt

SEQ ID NO: 40747 - DNA, 324 bp, Homo Sapiens
gtatgttaacaataattatttataacaatattttgtattggatagcacattccatctgaatatttcaaattggcatggtcccttctaactggcattaattcattcatcttgcatccccaagtaataaagttattcccatttttaaatggagaaatcaagattcatgcatttcagtgacagatgttcaaattcagaagaaaatctctgtttgagtttgtctttgccttgtaatacgtatttgtcactaggcctccattattaaataagaaattgaaccttggcatttagtcctatggatctttacccacccaagcacggaggtaa

SEQ ID NO: 40748 - DNA, 483 bp, Homo Sapiens
  misc_feature (63)..(63): n is a, c, g, or t
  misc_feature (128)..(128): n is a, c, g, or t
  misc_feature (137)..(137): n is a, c, g, or t
  misc_feature (471)..(471): n is a, c, g, or t
tggttctgagtcgccgacctcacctcacctcacctgcgcgcgttgttgcccctacggagcctnctggagtccaggatcggcggagttcgaaaacgaacttcccacgtttgctatgttgccctttgganacaaaacangagaaatggtcaatgcatggtttgctgagagagttcacaccatccctctccattgaagaatataagaccacgttgaaaataatcaagcaagctattttagctacagacctagcactgtacattaagaggcgaggagaattttttgaacttataagaaaaaatcaattcaatttggaagatcctcatcaaaaggagttgtttttggcaatgctgatgacagcttgtgatctttctgcaattacaaaaccctggcctattcaacaacggatagcagaacttgtagcaactgaattttttgatcaaggagacagagagagaaaagaactcaacatanaacccactgatc

SEQ ID NO: 40749 - DNA, 771 bp, Homo Sapiens
  misc_feature (618)..(618): n is a, c, g, or t
gggagggacgagtccacgggacagcccaaaggcaacatgacggaaccttgccaaaagaaatggtcaatgcatggtttgctgagagagttcacaccatccctgtgtgcaaggaaggtatcagaggccacaccgaatcttgctcttgtcccttgcagcagagtcctcgtgcagataacagtgtccctggaacaccaaccaggaaaatctctgcctctgaatttgaccggcctcttagacccattgttgtcaaggattctgagggaactgtgagcttcctctctgactcagaaaagaaggaacagatgcctctaacccctccaaggtttgatcatgatgaaggggaccagtgctcaagactcttggaattagtgaaggatatttctagtcatttggatgtcacagccttatgtcacaaaattttcttgcatatccatggactgatatctgctgaccgctattccctgttccttgtctgtgaagacagctccaatgacaagtttcttatcagccgcctctttgatgttgctgaaggttcaacactggaagaagtttcaaataactgtatccgcttagaatggaacaaaggcattgtgggacatgtggcagcgcttggtgagncccttgacatcaaagatgcatatgaggatcctcggttcaatgcagaagttgaccaaattacaggctacaagacacaaagcattctttgtatgccaattaagaatcatagggaaagaagttgttgggtgttaccccaagcccatcaacaagaaa

SEQ ID NO: 40750 - DNA, 669 bp, Homo Sapiens
gagagacaagagaggtgggatttggatttggagggatttctgagatagaacaaggcttgctggttgattggctatgggcggttgttcattctgaggcctctaggttgggagcctgggagatggtggtgccattatccaagtaaaggaatactgttagagcagatttgtcagggggaaatagttctggtttgaacttaagtttgtaatgcctgtaggccattcaggctatatccagaaaccatcttaaaatttgtaagaggggagcaggagctggagatgaaaatttgtgtaaatggtagttaaaatcttgagtggatgagcacagattcttatctgggtcattggttaggtgaaattgcaatcatggccaggcgcggtggctcacgcctgtaatcccagcactttgggaggcccaggtgggcggatcacgaggttaggagatcgagaccatcctggctaacatggtgaaaccctatctctactaaaaatacaaaaaaaaaaagtagccggccgtggcggtgtgcgcctgtggtctcagctgctggggaggctgaggcgggagaatggtgtgaacccgggaggcggagcttgcagtgggccgagatcgcgccactgtactccagcctgggtgacagagcaagactgggtctcaaaaaaaaaaaaaaaaaa

SEQ ID NO: 40751 - DNA, 213 bp, Homo Sapiens
ctccatgttagccaggatggtctcgatctcctgacctcgtggtctgcctgcctcggcctcccaaaagtgctgggattacaggcgtgagcgaccatggccggccaactttattcttttagatgtggatgtctagttgttccagaagtatctgttaaaaatgttactctttctccattggattattttggcaaccttataaacaatcaattgaca

SEQ ID NO: 40752 - DNA, 707 bp, Homo Sapiens
actgtatgtaactaatactggcatctaggtagagggtagggatgcatctcagtatcctgttatgccccacaccaaaggattattgagccccaaatgtcaatagtgctgatattgagaaaccccagtccaggcttcatgtacttatctggcctctctagaacactggttccttaacttgaatgtgcatcagaatcacctgggggtcttgttgaaattcgggttgctggaccccacccccagagtttctgatttggaaagtcaggtggggcctgagagttggcatttctgccaagtttccaggtgacgttgatgctgatgctgctagtccagggaccacacttagaaccacggctctacaagaaaggagggttatttgtcactgtgcttgcctatgtacaaccaccaagaaagaatactgaatacagaaattagccaggcatggtagtgtgcacctgtaatcctcccacctcagcctcccagagtactgggattacaggtctgagccactgtgcctggccagactttgtaatgtaagaaagtgttgcctagatcctccatggactccagcctgtctagattattcctgctcttcagtgattagagtggtttctaggcttcttgatggcacaaggatcacaaaaaattatttttatgctaacagtgaaaagattacagcaagaatggtttggagtaaaaaaaaaaaaaaa

SEQ ID NO: 40753 - DNA, 860 bp, Homo Sapiens
  misc_feature (44)..(44): n is a, c, g, or t
tttccacatcaaatatacatgtaaagatgtatataagatataantctgaagataatcaaacagctattaactggatttctgcatttcgcctgtccttcaaaaccagcctcaagtctacctttatgttgagagagtgtatctttaactcatggtgttcgctttctcctttcacatttcctgtaaactcatcatgaattgccttgtttattgttttgatttctcattcaacaacaccggaatactctgtgtttagggtaaccttagacttcagttttcctgaggagtttcagtttacacgtcttgcaccggtacaattaacagtgcccctttcaggttaaaaagtgtctcagtgtagttcataaattatatagtcaccccatgtgtgcagcaatcagagctttttcaatgcaaagttgattatgatgggcataaatgaatcataataaaaagttctagtatgatcccatctgactgggcttcttgtgatggcccatttcaacaccatgggtgtcattagtggcttcacaatggttcttcttgtaaattccctcatgacctagagttttgatttatgccatcctagcccactttaagctctgactcatgctgggattgccctaaacagggcagggcagactaatggaatgcgttgcattgtcctaacatttcttaacctgcccaaggttgaacatgcttgtttgtttttcttttgctctccaaaaatctttatgctagcgtaaaggcctgttgtaatcacataaattactcactatgtaacagggagagttgaaatttgtccctggaaacataaagattatatataaataaaagcctttaaaaaacctaccctatttgagaaa

SEQ ID NO: 40754 - DNA, 974 bp, Homo Sapiens
tgctgtggatgacctctgatgtgcctgccctatgtggacctatactccctgtgtgatgacgcctgatgtgcctgctcctagatgaccctaccctgtgtgatgaccctgatggcctgccgcagggcccctcccctggtgagaccccgaggcctggccagggcccgttcccggtggagacccgatggccgtccatgggccctcccgggagacccgaggccgtccagggccctcccgggagaccctgaggcctgtccagaatcttgtgattccaaagatccgctaacctctgttttaggggaaatcagtttcttgcctgcgtgtgtgttcagctaggggttcaatggcccggctgacgatggctcagcctgcttggggaggggccattagttcttcccacgcagagacttgccctcccactcacctgataagttgagtgcaagcatgtcgtctccgtacatgaaagtaagcctgaagactcaggtctcgtctctcattttctgaacgacttttgacatagaactgattttttcccacattgagaactagctccaagatggccatggtcgcctctgactgggctatatgtagggggccagacgcagggactagcagatgtagcctaagtacaactagcaagtcctgtggaggcatcacgttcaggtcctgctaacccattatacctaagactctatgacgctgcccgtccgcagtgactcacgcctgtaatcctcagcataaggggaggctgagactgcggcggatcacttgaaggccaaggagttggcgaccagcctggacacagttgcagaacccggtctcttactaagactcctacacactatgccagcgcattgctgcacatgccgcatgaaccagcaacttgcccaggttacacattgcaggctacctgaaccacgagcgtgaacactgtgtggccaatatctgaccgtagacctcacccgtgccaaatccca

SEQ ID NO: 40755 - DNA, 744 bp, Homo Sapiens
  misc_feature (685)..(685): n is a, c, g, or t
ttttttttttttttttttaatttagtaaaaaattacttacactttaggttttaaaaagtttaacacatttaagatttagagtagctaagagtaatgtccattcatttatcctaagtaccaaataatatgttaattcctttgtccctgactggatcttccaaattctgtctagttctaaaatattgggcttaatatttttatgaagccacaggttatagtgacctcgtgtgctcttcctttctaaggattcagtataatctctgagtcttttgccatcaaattttgaaagttttatgaagtcactttcttgttcctgttgcctagttgtcctggttgttaggagcatgttgacttttgagattaacacctcttatacagaaattaatttcctgaaaaggaagatttattgattcaaaatcattgatttctttagtttttgtttctttttataactggcacatcgtaagtgcttagtgctatatttttatttctaaaaatccaatctgctgtaacatttccccataattttgactccgaattacaaagtattaagatagattatattgtagttcctggctatgtgataatagttactcatttgtatcttttaatgtgtcagtgaagtattaattattgacttaagaagttgagtagaaagatgagagcataacctttggcacttcanattaccccctagtttgaagtcaggttatgagccaatacatgtttgtatggcactttgta

SEQ ID NO: 40756 - DNA, 941 bp, Homo Sapiens
cccacccatccccattcagaatccagatctcaccggaaacattcttgttgccacagcctacctctcccttgcacctttcgcttgagtagctccctgggacagtgctaaaagcttcaggctgcctagacaagtctccccaccaagccactccctgtacagaatctgttcttgagcttgtgctctgatattctcgattctaaacatgggtaggctatattccttttaatcaagttcttcaagctgaacctggtgaatggctttgcaagtgccatttttcagggactaaacatatcgtgctacaaaatcaatagatgttatattcaaagttaattatcatttctaggtaaatttaaattaactgagaatttccttgaacgttttgttgttgtcatccttatgttttcctccttaagaggcagaccatgtgtcaatcttacaaatccagctacgccctctctttgcaacctcctgagatgctctgcaggactttatgtggtgactacctgtcctccttcagggactgcaggcctgtgattatgaaatagaaataaagcaaaattccccagctcataaaagacttcactcacaccacgtggtgccaaccaataggagtaagatgggctacgtgaaaattgcaagtacttgtggagaacgattagaccgcttgattcaaataatgtcactacctataaagaaatttaatccggattatcaagcccttggtcaggtctctgaactaatattagaggcacgaggaacgaaatcacaaaaaaaaacaagggggcggctaaagatccacaagggccaaaattgctcccggtcttgacaagggcccaagagcgtataagaagacgggcgttaaccgaggaaagcctgctctggagaccctgggcatcgcaaccaaagcggaaatagatggaacttcgtgttgttatacacag

SEQ ID NO: 40757 - DNA, 701 bp, Homo Sapiens
agcgggggtttctaggataggtctgaaaatgctttcatttgcaacacatttagaaagtagctttatttggatattacagacaatctaaatatatcatcagtttttaaaagtgcctatgtgaagtgatttttaaaaagagcctatgtgaaggggtaatcttgcttgttcttgttactaatttctcatagatgtttttctgcatatataagaacgaaattatttatttactatggttgtacgtgcctcaaataaacaagaatgatatttcctgttttatttacttatgttgggtaaatatgcttattgaatttttaagagaggattttttaccatctccatttttcttgtcattatgttttgtagcttatttgagggtgtctaaatataatttcatattttattggttcaactttcactctgaagaaatccgtatgttagtacattttgaggtatttttcttgttcttgtgttgtttaactatgactcctaactgagtagtcttatatttcaattacaaaatacattttttaagaaagggaatagagcagcaaaaatgataaggaaaatgttaaaagttgtaatatttcctttactcttaacaggattatatatagaacatgctcacttacaaaaataggatgatgaagtttagagcataaggcaggcttcttgtatatacttatgctgtcaaatgttatatg

SEQ ID NO: 40758 - DNA, 728 bp, Homo Sapiens
caaaacttctcagacaccgagttgtagaaggaagggctttattcagctgggagcatcggcaagctactgcctcaaaatccgagctccccaaatgcacaatttctgtcccttttaagggctcacagcactaaagatttcacatgaaagggtcgtgattgatttgagcaagcagggggacaagagaatgattcaacgaagaatgaaataaaaattgaaacagaatcgcagagctcatatatggaaacagaagaactttcatcaaaccaagaagatgccgtgattgtggagcaaccagaagtgattccattaacagaggaccaagaagaaaaagaaggtgaaaaagctccaggcgaggacacacctaggatgcctgggaaaagtgaaggctccagtgacctagaaaatactccaggtcctgatgttgaaatgaatagtcaggttgacaaggtaaatgacccaacagagagtcaacaagaagatcaactaataggggcacaagatgaagcgaaggaacaaagaaatggaactaaatgacaatcctcagcatcgcaaggcctctcctggctctgggggagctcgggaagatagcagcacacgctgtggaggagggtgggggtggggggaaggcaagtcccatggaaaggacggggaatcctttactctaatttctccagctgcattttgttccgtttatctgcagaaaaagaaagaaacaagaacaaaaaaaa

SEQ ID NO: 40759 - DNA, 902 bp, Homo Sapiens
ggcctcacgtggagatgtgcctggtgtgcctggcagagccctttcaggctttgcttctaggagagtggtggaggaaatcagtcatttcaaaaccttttgtttttcttttgtacagcaaaaagatggcaccctttgcagcagggggctacatgccccctctccggttaaagcacttaccctctctgtggtgttggaaccatggttggtggcatccttatccccaacggtaaggcgggagggctgccctgttgccggggagtggacccgggcttcggcatcaacaagacctgcacagttacgagacctgcacagagaccatcttctctggtctcttaaaaaagtctagagacttgtgtcagtttttctctggcccacagagaaaaggcggggataaaatctggcaacttgagccaggtgcggtggctcacacctgtaatcccagcacttggggaggttgaggtgggtggatcacctggggtgggagttcaagaccagcctgaccaatgtggagaagcccgtctctactaaaaatacaaaaatagcagggcgtcatggtgcatgcctgtaatcctagctacttgggaggctgaggcaaagaatcacttgaacccgggaggagggagtttgcagtgaggccaagatttgcgccattgccctccagggctgggcacaggagagaacttccgtctcaacacacaacaacacaaaaaaaatttttgcggggctggcctggagagattttaaaccatctcttgggccgggccggagtaggaaaatgccacggtccaagactcgtcgacaatgtctggtccccaaaaacgcggccacggttgacccacggctgcctcgctctcggcggacaccccgccgcggagaagaccagccacatgcagaaagacgct

SEQ ID NO: 40760 - DNA, 465 bp, Homo Sapiens
taactctgtactcattgcgctgtctccttattctcagccggggcttctcattgttgatcatgaagaacttgaatgtcacatctctgggcttccgatccctgaaggaaattagtgctgggcgtatctatattagtgccaataggcagctctgctaccaccactctttgaactggaccaaggtgcttcgggggcctacggaagagcgactagacatcaagcataatcggccgcgcagagactgcggtgagggaaagggtctgctaggtggtgagaatagggagtcagggaggagagggctgaaaggactattctgccctagacgtgggagtagggttgagggatggaaccaaggagaagggggctgttaggctggaagcagtaacgaggaagaatactgaagagagggcttgctgggagtcctcagactcctctcctaaaccaacccttcctttccagtggcagagg

SEQ ID NO: 40761 - DNA, 580 bp, Homo Sapiens
aagagggtgcggacgctagtgaggaagatccgacaccggccggggaggaagacgttaaagacgccagggaggaggacggtgtggacaccattgaggaagacctgacacgggccggggaggaagacggtaaagacaccagggaggaggacggtgcggacgccagcgaggaagacccgacatgggctggggaggaagagggtgcagactccggggaggaggacggtgcagacgccagcgaggaagatgatacaattaccaatgaaaaggcacacagtattctaaattttttgaagtcaacacaggaaatgtatttttatgacggtgtctccagagatgcagcttcagctgccctcgcagatgccgctgaggagctgctggaccgcctcgcgtcacacagcatgctgccctcagacgtgtccatcctgtaccacatgaaaacgctgctgctcctgcaagatactgagagattgaagcatgctctggaaatgttcccagaacattgcacgatgcctcctgaccatgccagagtaatctcagctttctttagttactggatcacacatatccttcctgagaagag

SEQ ID NO: 40762 - DNA, 582 bp, Homo Sapiens
  misc_feature (439)..(439): n is a, c, g, or t
  misc_feature (561)..(561): n is a, c, g, or t
aagcactagcaacaactctatatctggatcattgaagcgcttggaagatactactgcacgatttacaaatgcaaatttccaggaagtctctgcacacacctctagtggaaaagatgtttcagagactagagggtcagagggcaaagggaagaaatcttcagctcacagctcaggtcaaaggggaagaaagcctggtggtggaagaaatccaggaacaactgtgtcagcagctagcccttttcctcaaggcagtttttcaggaactccaggcagtgtaaagtcatcttctggaagttcagtgcagtctccccaggatttcctgagctttacagactcagatctgcgtaatgacagttactctcactcccaacagtcatcagcaaccaaagatgtacataaagggagagtctggaagccaggaagggggggtaaatagttnttagtaccttaattggcctcccttcaacttcagctgttacttcacagcctaaaagctttgaaaattacctggagattttgggtaattccagccttcctacagcaggatataagcgggctcanacttctggcatagaaagaaga

SEQ ID NO: 40763 - DNA, 607 bp, Homo Sapiens
  misc_feature (32)..(32): n is a, c, g, or t
gccgacatgtttttttttttttttttttgatnctagaggaaaacaaaacactgtttattaatgaaacatcataacaaaatttaaaaggcaatacaagaatgagagaaaatataaaacagagggataatatctttaataggcaaagacatatgtaaaaacgaagcagaaaagtaggtgtgtgaatgacaattcatagatgaggaaattcaagagccaataaatgcatagaacactttcaccactaataaaagaaatgcaataagtatctgcatatgatacataatgttgcagatgtttataatttacataaaagatactgaactagggctgggctcagtggcttatgcctgtaatcctagcactttgggaggctgaggtaggcggattgcttgaggccaggagttcaagaccaacacggccaatgtggcgaaaccccgtctctactgaaaaatacaaaattagccgggtgtggtggtgggtgcttgtagtctcagctacttgggaggctgaagcaagagaattgcttgaatccaggaggaggaggttgcagtgagcccagatcatgccactacactccagcctgggtgacagagtgaggcactgtctc

SEQ ID NO: 40764 - DNA, 758 bp, Homo Sapiens
gtgcttttaaatcagcattccccaacatggtctaatagtttctcaagatgatccatgaaaataaagtgtttttttcattagttgggaaatgatgtatgggatagctcttcaacccactctcaaatagatacaacgtatgttagcatattaaggttcgtgatcaggccgggctcggtggcttatgcccataatcccagcacttgggaggccaaggtggacagatcacttgaggccaggagttcgagaccagcctgggcaacatggtgaaaccccatctctattaaaaatacaaaattagccaggcgtggtggtacgcacctgtagtcccagctactcggaggctggaggcaggagaatcacctgaacccgggaggtagaagttacagtgagccacgattggggccactgcactccagcctggggcaacagagtgagagtccatctcgaaaaaaaaaaaaaaacaaaaaaaaaaaaatttgggggcgcgcctttgggagctcggggaaaagtttttctaacacatcatcttgcgttggggcgcgcggcgccccagtgtgttaggtcacacactgggccaagaagcggtctcccacagggaagaaccgggcgcgaggacaaagggggtcggttgtccccaccaaataaaaaaagcggcggcgggaccacgcagggtttcggaaccaactccgaggggctcggaggcacacgggcgtctccacaggggtcaaggaacgtattcgcgcgcctgggggtgggct

SEQ ID NO: 40765 - DNA, 380 bp, Homo Sapiens
  misc_feature (336)..(336): n is a, c, g, or t
  misc_feature (342)..(342): n is a, c, g, or t
tttttttttttttttttttttttttgggagacactgtattttattggaaaacattgatatatatttttcttcacagcttgaactgaacacaatattgcccggtttaaaaaaaacaaaaccaaaacattccgaaaatgtccacagcctcacgcctacctgcccttaccctcagctcttggctgggtctcccactatgccccatccctccttccctcaaaggctgggtgccagaaggtggatgaaaagaaattctcaaaactgggcaggtcccaggaaaagccacttgatcgacctgggcaatgaggggaaacacggggtggggggtggggtcccccnaccccnacacatgccacctgtccctggctcctgggggtggggtg

SEQ ID NO: 40766 - DNA, 623 bp, Homo Sapiens
aaattagctaatcagattaatgatctccgccaaagtgtaacctggctgggagatagagttatgaacttgcaacaccgtatgcaattacagtgtgattggaatacttctgattattgcataacgccttatgcttataatcaagatcaacatagctgggaaaatgtctcaagacatttaaaagcctgggatgataacttaaccttggatatttcacaacttaaagagcaaatctttgaggcttcacaagcccatttatccacagttcctggctcacacatttttgaaggcataactaaacaattacctgattttaatcccttcaaatggctcaaacccgtcagaggatcattgttgttactggcattattaatattggtatgcttatgttgtctccttttagtctgcagatgcctctaaggagtccgaaaccaagtccgaagtcaacaacaagcaatgatggcgatggcgattctagttaataaaaaggggggagatgtgggcggcaagccacccaggcaccgaggcaagagacagaggacacgagctgttccagtataataaaatataaaacaagaatagttataccagatatagatcttagatatgattatatacgaatatca

SEQ ID NO: 40767 - DNA, 542 bp, Homo Sapiens
cacgaggctcaccttcatctactgtgaagtgatgagaacaggacttgatagtggtgtattaacttatttatgtgctgctggatacagtttgctaatattttgttgagaatttttgcaaatatgttcattgggaatattggcctgaaattttcttttccactgtgtctctgccagaatgtttgtatcaggctgatgctggcttcatagaatgagttaggcaggagcccttcctccttgattttttggcatagtttcagcaggattggtaccagttattctttctgcatcttgtagaattcagctatgaatccatctggtctagggcttttgtgttggttggtaagttttttattactaattcaacttcagcgcttgatattggtctaggaggggtttctgtctcttcctggttcaatcttgggagattgtgtgtttccaggaatttagccgtttcctccagattttcttctttatgtgcatcgacttgagtgtaaacataacttatatgcactgggaaaccaaaaaatctgtgtgacttgctt

SEQ ID NO: 40768 - DNA, 939 bp, Homo Sapiens
gtggctgcttcgtggcgccctggggctctgacttccctcagcccagcaggccacagggcctgcctgcaccacgacactcgctggttttatggcaggaggcagaagccgtggaagcgaatggaaaacagcacagctgacttcacagtagtagatactggtgacacttcatggctgcgacccagaatgaacttaatgcacacagggacgcagggtgtcactggtcctgggcctttgtccatgactaggtggtcagcaggacttctgcagctgactgtgcaatggctaaatgaaaaaaaggccacagactaacctccactttcctgtcttcaaaattctagtgacactgggaatgctataggacctcctactattctcttaaggtcctaggaaagtttcaggaactagggaaaagactgggtactgaggctgtgtccccagatgtctgcttccgaagcagccgcgtcatgacgggtttctgctgaggaagtggtgttggcagggccccatatgccctctcgggttgtcaggggtgggagacaggctgtatgggggtccttcatgtgcagatggaacagcatcgcctcacagctgtgcagacgaacagatgtggtctactgccacgaacaatgcggcataaaactgatcaatattataataaagatttgtcttcttcatctccatatctacaaagtgattctacattttcttggacaacactggagggcccgctcagtcttggcactgacgctggaggccatctccagctccctggcccctgtggcgagctggcggcttcaggtgtcacaggccggctgctccaggccttcgagggggaagctggctcctgtggggggagttgggggctcggtgggccccctgggggttggagctattcgaatggagttgaagggtttggggggagtccgaatccggctcctt

SEQ ID NO: 40769 - DNA, 828 bp, Homo Sapiens
gggacctgcgtgctgccgagagaggaagcgaagggcaccatctttgtattttgtgtcatgacttctcaagagaagacagaagagtatccttttgcagatatatttgatgaagatgaaactgaaaggaattttttgttgtccaaacctgtttgctttgttgtatttgggaaaccaggtgttgggaaaacaacattagcccgttacataacacaggcatggaaatgtattcgtgttgaagctttgccaattttagaagaacagattgctgctgaaaccgaatcaggagttatgttgcaatcaatgttgatcagcggtcaaagcattccagatgaacttgtcataaagctaatgttggagaagctcaactccccagaagtctgtcactttggttatattatcactgaaataccatcactttcacaggatgccatgactaccttacagcaaatagaattaattaaaaacttaaacctgaaacctgatgttataatcaatataaagtgtcctgactatgatttgtgccagagaatttctgggcaaagacagcacaataatacgggatacctatacagtagagacccgtgggatcctgaagtcattgagaatcataggaaaaagaagaaagaagcccccaaaggccggaaaaaggagaaagagggagcaagaaggaagatagagccagtaaagaaggaagaaggcttttttattggcccgaaatggcgaattggtggggcttgaaaattctttcattcaatctaagggttcaaagaggccccgcaagaattaatatttgggcaaaaatggcgtccaaaaaacaatttcggactc

SEQ ID NO: 40770 - DNA, 603 bp, Homo Sapiens
gcagcctaacccctcgtgcacttgaagggaaccccagagcttctgcagagccaacactgagggccggagggaggggcccaagcccagggctgcccactcaagaggcaaatgggcagccaagcaaaccagacacttctgatcaccaggtgtctctaccacagggagcagggagtatgtgagtctccttcattgtgctgatggactaccagctggcagggccagggggtgggtgggcgtgaaagccctcccctccactggacagcactgccccccagctgagggaccagctctacttccacctggagttgcacagtctcaggctgggggcctcaggagaggtcacagcccctcagtctcttctccttcccctgcctgcaacaggctgcctgccccgccttccccaacacctcgctccatatgatagagcgtggcagctgggagcaggcccctgcccgtggtgggcccctaaagcaatagcaccgtaggccccctgccctcttagcacaagaggcccaggccctggcctggccttcgtgccctttattcattgtcaataaatccgctcagaccattaaaaaaaaaaaaaaaaaaaaaaaaacgcgg

SEQ ID NO: 40771 - DNA, 852 bp, Homo Sapiens
tttttttttcaggagagaaatagaaacaaacaataaccgtatgaagatgtcctgttaaatttacaacactaacgatgtagactctggaaatgcctaataagtcaaagaagacgtattaaagctcttttctgcttaaggtgacatctttgaacactttaacacaaagttgactcttctcgtaatggttttcatcagcgcatctgcccttatactcttcaccaaacacacttgagaactgtaacttcgtcaagcactttctgtcctgaagcttttaccagtatctgctgtcttttgtaattatgcatcctagctaaggcacagaagactgaatgaatgcaaggattcattaactctttgaatttgttaaatactaacagttaaccattagaagtggttcaatgatgtaagagtcacactgcttcaactttttctttgttgtagtttttaaattgtcgatttttagctatttgacagattaaragcaaaataatcatgccatatttagtcctggagttcaagtctaaatgttgatgtgaaaaattattgtagtaaacttttaatatggcaaagcaaccttaagctctattttagccaaatgaaacataatctgaaattatattagaacatttcccttgtcttcaaactgtttggtgtacagaatattgatatgcagcttggtggatttcaccagttaatgcacattcttcttccctcctcccccattaatatgtatactgaaaaatgtgcatttgtctgaggaattattttgtttgctaccacttaatgaatctcaaaattttgagtaaatgtacctcagtctaatcagactttttatgacctttataactacat

SEQ ID NO: 40772 - DNA, 590 bp, Homo Sapiens
acaaatgcaggtatcaagtgcttggactccatgtgctgtttcccggaaggagaagcagcgtgtgcatctgttggaagaatgctggaacgagttataggaagatgtagtccaacccacatcagcaggtgtgaaatctctctaagtagcctttgctgcagatgagtatcctatctggaacaggatgaacctgccgctctagatacctaataaatcagcagctggttttaccaactgaagcaggaagtctgctatttattagcactctttggtggtagatttcactttgtggctttggggtaagggctttttcactcacaaacgaagagaaagcacctttgaagagacttcatctaatgaacaaaaaattttgtttcataatctttctaaaatgtgctcagtaggagtgtgtttatggtactcttttatggtttgtataactttcttttttaaattatacatatactatttcctttttatttttttaaaatttttttgctttttgtctttacaaaataatctcaacataacagtgaagtcaaaggctttccttttcttactctgtatggatattttccagctggttatttgag

SEQ ID NO: 40773 - DNA, 1018 bp, Homo Sapiens
  misc_feature (631)..(631): n is a, c, g, or t
  misc_feature (637)..(637): n is a, c, g, or t
  misc_feature (663)..(663): n is a, c, g, or t
  misc_feature (708)..(708): n is a, c, g, or t
  misc_feature (784)..(784): n is a, c, g, or t
tgggcttcagtcatgcctttattttcttttttggatcctatttactaatagggaaagatacatctctgcttggaaatggccagatgttcggaaactggacatttggcactttggtcttcacagtcatggttattacagtcacagtaaagatggctctggaaactcatttttggacttggatcaaccatctcgttacctggggatctattatattttattttgtattttccttgttttatggagggattctctggccatttttgggctcccagaatatgtattttgtgtttattcagctcctgtcaagtggttctgcttggtttgccataatcctcatggttgttacatgtctatttcttgatatcataaagaaggtctttgaccgacacctccaccctacaagtactgaaaaggcacagcttactgaaacaaatgcaggtatcaagtgcttggactccatgtgctgtttcccggaaggagaagcagcgtgtgcatctgttggaagaatgctggaacgagttataggaagatgtagtccaacccacatcagcagatcatggagtgcatcggatcctttctataccaacgacaggagcatcttgactctctccacatggactcatctacttgntaaggngcagtagtactttgtggggagccagntcacctcctttccctaaaaatcagtgtgatcaccctggtaatggncacactagctctgaaaattaattccaaaatctttggtaatagttcatacccactccgaagttattaatggccaacnaacagaaagccttagtaccagccccttccaaccccccttatttgaatcctgaacatgtttaaaatttgagaataagaagaacattttcatctcctttggccgggttgggcccctggggcttaaggggaatcctaaatggcattttccgaccgggttgctggaggccattaattttttaaaattaaaagggagaaaaaaaaaaaaaaaacttctatataaaaaagaatttttttt

SEQ ID NO: 40774 - DNA, 336 bp, Homo Sapiens
ttggccgcctactactactatacggctgcgagaagacgacagaaggggtgtttaagggcatttcacagatgggaaataaggtgcagagggctagagagatgggctcaaggctgtggtgccagtgacactggcttcccctgtgttgtcctttgctcttgaacatcacgccacgcagcagcagaacaaagataaagaaccaattccaaaaccaggcgtggtggcttatgcctataatcccagcactttgggtggccaaggtgggaggatcacttgagtccagaagtttgagaccagcctgggcaacacagtgagaccccatctcataaaataaaaaaa

SEQ ID NO: 40775 - DNA, 491 bp, Homo Sapiens
gaggtgccaggatgtctcctctgcgtgaagagtagatgtagatgaggctggaattatctatcctagctgcccagacccatgtgcctttgttttatgtagttacagcacctatgatacatatttgttaccatgtatgtcactatgaacctcctctggaggatggagaagtcaaataccttaattattccaacacaagcttgcgtgaacagataatcatcactacgagtatattgtgtgcctgctaagcaccacgcctgagataagcatttgctgtggtttgaatgtcccctccaaagctcatgctaaaatttaattgccattgcaacagtgttgcaaggtgagaactttaagagatgatcaggtcatgagaactctgccctcgtgaatggattaatacccttatcgcagtagtggacccccttttctcttgctgtctgtctctcatgttagcttgtgcttcctcctttcaccatgggataacacagcaagaa

SEQ ID NO: 40776 - DNA, 917 bp, Homo Sapiens
  misc_feature (801)..(802): n is a, c, g, or t
aggagattggctttgagacgaccagaaatattggttcagcccctgaaagtttccaacaggaaatcatctggttttagaagaagttttcgtcttagtagaaaagataagaaaacaaataaatccatgtatgaatgcaagaagagtgatcagtacgacacagctgacgtacccacatacgaagaagtgacaccgtatcggcgacaaactaatgaaaaatacagactcgttgtcttggttggtcccgtgggagtagggctgaatgaactgaaacgaaagctgctgatcagtgacacccagcactatggcgtgacagtgccccataccaccagagcaagaagaagccaggagagtgatggtgttgaatacattttcatttccaagcatttgtttgagacagatgtacaaaataacaagtttattgaatatggagaatataaaaacaactactacggcacaagtatagactcagttcggtctgtccttgctaaaaacaaagtttgtttgttggatgttcagcctcatacagtgaagcatttaaggacactagaatttaagccctatgtgatatttataaagcctccatcaatagagcgtttgagagaaacaagaaaaaatgcaaagattatttcaagcagagatgaccaaggtgctgcaaaacccttcacagaagaagattttcaagaaatgattaaatctgcacagataatggaaagtcaatatggtcatctttttgacaaattataataaatgatgacctcactgtggcatttcatgagctcaaaacaacttttgacaatttannagacagagacccattgggtgcccagtgagctggttacatccataacctaggagaaatttccataattggcttttttctatagagtgcatgattgaaatccattacggttttggga

SEQ ID NO: 40777 - DNA, 572 bp, Homo Sapiens
gaacaacttagagagccggtgtgacgatcggtctggcttgggtcatctcctttgtcctttgggctcctgccatcttgttctggcaatactttgttggaaagagaactgtgcctccgggagagtgcttcattcagttcctcagtgagcccaccattacttttgttttagccatcggtgttttttatatgcctgtcaccattatgactattttatactggaggatctataaggaaactgaaaagcgtaccaaagagcttgctggcctgcaagcctctgggacagaggcagagacagaaaactttgtccaccccacgggcagttctcgaagctgcagcagttacgaacttcaacagcaaagcatgaaacgctccaacaggaggaagtatggccgctgccacttctggttcacaaccaagagctggaaacccagctccgagcagatggaccaagaccacagcagcagtgacagttggaacaacaatgatgctgctgtcctcctggagaacttcgccttctccgacgaggaggacattggctccgagacgagagccatctactccatcgtgctcaag

SEQ ID NO: 40778 - DNA, 811 bp, Homo Sapiens
  misc_feature (580)..(580): n is a, c, g, or t
  misc_feature (795)..(795): n is a, c, g, or t
cttcggaatggagacacggcttcccccaaggaatatacagctggcagagaggctgatgacatcgtgaactggctgaagaagcgcacgggcccggctgccaccaccctgcctgacggcgcagctgcagagtccttggtggagtccagcgaggtggctgtcatcggcttcttcaaggacgtggagtcggactctgccaagcagtttttgcaggcagcagaggccatcgatgacataccatttgggatcacttccaacagtgacgtgttctccaaataccagctcgacaaagatggggttgtcctctttaagaagtttgatgaaggccggaacaactttgaaggggaggtcaccaaggagaacctgctggactttatcaaacacaaccagctgccccttgtcatcgagttcaccgagcagacagccccgaagatttttggaggtgaaatcaagactcacatcctgctgttcttgcccaagagtgtgtctgactatgacggcaaactgagcaacttcaaaacagcagccgagagcttcaagggcaagatcctgttcatcttcatcgacagcgaccacaccgacnaccagcgcatcctcgagttctttggcctgaagaaggaagagtgcccggccgtgcgcctcatcaccctggaggaggagatgaccaagtacaagcccgaatcggaggagctgacggcagagaggatcacagagttctgccaccgcttcctggagggcaaaatcaagccccacctgatgagccaggagctgccggaagactgggacaagcagcctgtncaggtgcttgttggga

SEQ ID NO: 40779 - DNA, 289 bp, Homo Sapiens
gattccccttgcccatcagagaggagcatttcaatctgctttcctgccttacatcaaggtgggcaagggattataattaattgcagggctcaagccaccaatctatgaagacctcaggccagggggtgaggaattagtgctggatttgaagctacgcactcagcctcaagaactccctggaatatccctgagaacatggggtttgaacggattttcagcctttttctgttcttgttttgatggttttgtgtaagaggaaatacaaataaagttatagccctttactgca

SEQ ID NO: 40780 - DNA, 676 bp, Homo Sapiens
gcacagtactacatggctttgccggctactttgagactgtgctttatcaggacatcactctgagtatccgtccagagactcactctcctgggatgttctcatggtttcccatcctcttccctattaagcagcccataacggtacgtgaaggccaaaccatctgtgtgcgtttctggcgatgcagcaattccaagaaggtgtggtatgagtgggctgtgacagcaccagtctgttctgctattcataaccccacaggccgctcatataccattggcctctagccctgcgtgccaagtgtccagagccttggaagcagcttcaggttctgctcctgtagtacagaaggtgcagtacatctatgggctgtgattccccttgcccatcagagaggagcatttcaatctgctttcctgccttacatcaaggtgggcaagggattataattaattgcagggctcaagccaccaatctatgaagacctcaggccagggggtgaggaattagtgctggatttgaagctacgcactcagcctcaagaactccctggaatatccctgagaacatggggtttgaacggattttcagcctttttctgttcttgtttcgatggtttggtgtaagaggaaatacaaataaagttatagccctttacttgcagaaaaacaacgcgcacaaa

SEQ ID NO: 40781 - DNA, 722 bp, Homo Sapiens
tggatatagaagatactaaaaactataaaaattagatagcagtgcttgcttctttatagatacattagaaatagtgttccaaataacatacttgaatatcatctttgaagtaaacaccatgttagactccctggtgataccactcttgaattggttaatatgtaagaacattgttttttattaccagttgatctctcaaatgaagtgatgactttttccatattctgtgtacccttgagcatgttgtgtctttttaaaaaacaaaaaaaagaacaaaaattattttttaaaatgtaaatatttattaccatcagacttggaaaatggaaagtattttattgtcatgattgaatttagattgttacctgtattttgttcaggtttgagacatataaaagaccccacctgtaatagaaaggaatatagacccttgcctcacctgtattgctgtggatgtgttttgtgggtttttcattcgattttacaaaatagggaaaggcacttccagttgtatttagtaggcagttgttgtgaatcatttttttctcttataggaggagattcctctctagccatgtttctgttaaagtttcattaattgaagcccaagtttactttttactgtacatacttattttctaattggatttgaaatcagcatgattttgtttgacaaagcaaagtttaagattgaggtcagaaatactttaatggagcaaaga

SEQ ID NO: 40782 - DNA, 943 bp, Homo Sapiens
  misc_feature (656)..(656): n is a, c, g, or t
  misc_feature (727)..(727): n is a, c, g, or t
atacttccgaagagcggaccagggctgctgccagcacctgccactcagagcgcctctgtcgctgggacccttcaggtaggacagctcccaacgctgtggggactctcagcaaaacttctccttcctttccacggctctgcttcttctgacctcatcttagttttgctttttcttttcttccttcgctatttttctatgatcctctaagaaccaagtccttgaaacttttggctcaaagtggatacagagacaactttttctagaaagttcagaaaagtgtattttgaggacggagtctggggaaatcaatgggatggggctaaaatcgtgcctggcagtgaccgggttcttgttctaggatgtggagggagcagggactttgaaacaaactgggataggatcctgtttatggaggaaacaccacacaccttggaaatgacatcgggaactggccagatgtttttcacctcctccgttttgattccgattgcttcaggacttgaactgttactccgctcgctggttgttggttgggattttttgggtggtggtggatagataactggttttcagtttatttttgacattgcttttcctgcctgtttgcttccctattcacttctgtttaaatttaagtattttttttctcctcacangatgggaagaggggggattgggtttgtttaaagaaaactgttgggcccgggcacgggtgggctcatgcccntgtaatcctagcactttggggaggcctgaaggccggcgggatcaccctgagggtcaggaagtttcaagaacaagccttgggccaaacatgggtggaaacccctggtcttctacctaaaaaataccaaaaaaagttaccccgggccattgaatgggccaaaggtggcccctggttaaatttccaaaccctaaccttggggtaaaggccctgaaaaaa

SEQ ID NO: 40783 - DNA, 635 bp, Homo Sapiens
ctgcaggatgacttgaaagtagggcatccttcacccatctgaagggaggaaatagtggcaggtgacagtctgcatgtgcagttttcagatgccttcacctgaatgacatctacctccatcaggaccccagatgtctgacagccctgtgtgacaccaagataagtaacgtatgtagtcttcttgtcatgtaggtcccaattaaattactatagctcagatgggggtaggggacttaaaattatgatgtgaaaaattatgtagagtatcagacttttttttggggggggacggagtcttgctcagttgcccaggctagagtacagtggctcgatctcggctcactgcaacctctgcctcctgggttcaagcgattctcctgcctcagcctcccgagtagctgggactacaggcacctgccaccatgccaggctaatttttttattttaagtagagacgaggtttcaccatattggccaggctggtctgaaactcctgaccttgcgatttgcctgccttggcctcccaaaatgctgggattacaggtttttttgtttgttttttgagacggagtctcactgtctcccaggctggagtgcaatggcgcaatctcggctcactacaacctctacctcctg

SEQ ID NO: 40784 - DNA, 849 bp, Homo Sapiens
cctctgccggtgctgctgcgccctgcggagctccgaacacgtgcgcagaggctggctgtggcagatgcaactgcaggatgacttgaaagtagggcatccttcacccatctgaagggaggaaatagtggcaggtgacagtctgcatgtgcagttttcagatgccttcacctgaatgacatctacctccatcaggaccccagatgtctgacagccctgtgtgacaccaagataagtaacagttgtctgctggttctcagcttgaagaagattctgcagtccttattgatcctttttcttggcgttaccattttttgaagcaaagttaacctagctttctagtttgagctttctttttggccgtctttaaaaaaaattttttttttaatctataaaatagacaagagctagttctacaatgtccaagtcattccagcagtcatctctcagtagggactcacagggtcatgggcgtgacctgtctgcggcaggaataggccttcttgctgctgctacccagtctttaagtatgccagcatctcttggaaggatgaaccagggtactgcacgccttgctagtttaatgaatcttggaatgagttcttcattgaatcaacaaggagctcatagtgcactgtcttctgctagtacttcttcccataatttgcagtctatatttaacattggaagtagaggtccactccctttatcttctcaacaccgtggagatgcagaccaggccagtaacattttggccagctttggtctgtctgctagagacttagatgaactgagtcgttatccagaggacaagattactcctgagaatttgccccaaatccttctacagct

SEQ ID NO: 40785 - DNA, 415 bp, Homo Sapiens
  misc_feature (123)..(123): n is a, c, g, or t
  misc_feature (143)..(143): n is a, c, g, or t
  misc_feature (155)..(155): n is a, c, g, or t
  misc_feature (364)..(365): n is a, c, g, or t
  misc_feature (378)..(378): n is a, c, g, or t
  misc_feature (386)..(386): n is a, c, g, or t
  misc_feature (394)..(394): n is a, c, g, or t
  misc_feature (401)..(401): n is a, c, g, or t
gcgcgacccggcggcgggacaggcttgctgcttcctcctcctcggcctcaccattccagaccaaaattgaaaaaatggttgacctcacccaggtaatggatgatgaagtattcatggcttttncatcctatgcaacaattatnctttcaaaaatnatgcttatgagtactgcaactgcattctatagattgacaagaaaggtttttgccaatccagaagactgtgtagcatttggcaaaggagaaaatgccaagaagtatcttcgaacagatgacagagtagaacgtgtacgcagagcccacctgaattgaccttgaaaaatatttattccaatttctttggaattggcctcctgtattccttnnagtggtcccgganccctttanaagccatncctgaancttcaggcctattt

SEQ ID NO: 40786 - DNA, 1126 bp, Homo Sapiens
  misc_feature (60)..(60): n is a, c, g, or t
cccgggatgccgaggaaacggtagcttaggacagttggctgttaagtgacactgattcdntccgccccgcctgacccccgagaaggaggcttgtcccccgctgcgtgagggggtggggaagtgggtagtgaattcggatctacctgggaggggggagtggaagttcccgccccggagagcggcgaggcggcagccacagttgattatggaagattcccacaagagtaccacgtcagagacagcacctcaacctggttcagcagttcagggagctcacatttctcatattgctcaacaggtatcatctttatcagaaagtgaggagtcccaggactcatccgacagcataggctcctcacagaaagcccacgggatcctagcacggcgcccatcttacagaaaaattttgaaagacttatcttctgaagatacacggggcagaaaaggagacggagaaaattctggagtttctgctgctgtcacttctatgtctgttccaactcccatctatcagactagcagcggacagtacattgccattgccccaaatggagccttacagttggcaagtccaggcacagatggagtacagggacttcagacattaaccatgacaaattcaggcagtactcagcaaggtacaactattcttcagtatgcacagacctctgatggacagcagatacttgtgcccagcaatcaggtggtcgtacaaactgcatcaggagatatgcaaacatatcagatccgaactacaccttcagctacttctctgccacaaactgtggtgatgacatctcctgtgactctcacctctcagacaactaagacagatgaccccaattgaaaagagaaataaggttaatgaaaaacagagaagctgctcgagaatgtcgcagaaagaagaaagaatatgtgaaatgcctggaaaaccgagttgcagtcctggaaaatcaaaataaaactctwatagaagagttaaaactttgarggtcattattccmataaaagtgtttgawtcctaagaaagaaawatttttgtgggcatgcwtaaaataaatrgatttcctagtggggttataaataaarggcgaamyggagcttttttttaggtttccaawcaagg

SEQ ID NO: 40787 - DNA, 591 bp, Homo Sapiens
tggccggaggcaaggagggttgagagccactggcacaggggcagaagaggctatttcttccattccgccccctctttgttgcggaggcaaactgaggttcctggagtcagaatctatcagtcgtggtgactgccctggttgcacttaggttgtgacagttggaagtgtcatgtacaacatgcggcgattaagtctttcacccaccttttcaatgggatttcatctgttagttactgtgagtctcttattttcccatgtggaccatgtaattgctgagacagaaatggaaggagaaggaaatgaaactggtgaatgtactggatcatattactgtaagaaaggggtgattttgcccatttgggaacccccaagacccttcttttggggacaaaattgctagagctactgtgtattttgtggccatggtctacatgtttcttggagtctctatcatagctgatcggttcatgtcctctatagaagtcatcacatctcaagaaaaagaaataaccataaagaaacccaatggagagaccaccaagacaactgtgaggatctggaatgaaacagtttctaacctgaccttgatgg

SEQ ID NO: 40788 - DNA, 766 bp, Homo Sapiens
ctaatgtttgtatttttagtagagacagggtgtcgccatgtttgccaggctgatctcaaactcctgacctcgtgatccgcccgccttggcctcccaaagtgctgggattacaggcgtgagccaccgcacgcggccccttcgtgccttttgaggaagcagcagccttggtcatggcccataagaactcagacttcaactgaaaaaagtggctcttccctacacaacagtccaggaagctggatattgggagtgtggtgagacgagaactgacccatccataagctattctggattctctgtcactctcagccgtggagcatcaagcaggcttcctgaagcttcgggaggacctggcttcagctgctgtctcagctgctcgaatgtaacatggttccgtagttgagacttcagtcatcctgagcaataaaccagctcatccactgaaaaaaaaaaaaaaaaaaaaaaaaacaaaagtgttgggcgcgactacgccccctcgaaaaactcctcaacagcccttccctgggccgccccgcccccactatgctcacgcgacccccgtgcgacacacgccgctcccccacgcacacccgcgcgcgccacaacccaccgcccccgcgcctcccgcccacacacaacagccccccgccggacacccacgcccttccgtcacaccacccccgcaggcgccccccaagccccaccacacggccaccaacaccccagcgcctcccccaccgcacccgacactacaatagcccgccgc

SEQ ID NO: 40789 - DNA, 550 bp, Homo Sapiens
tttcttgaatatttttgacctgcagttggttgaatctggggatatataatctatggatacagagtgctgactacatatccatattttatctagctatcttataaactgaaaagatttccaacttaaaaacatgacactaaaaaaaagctcatattaattgtgatgttttacaaatcacaacatcagtacctcttatatatttcatctcattttaaatatggtctggtcacacttagggtcctttaaaataatgagatattgtataagaatatgcttaagaatagggatctgtatttgactgacaaagggtaattaaaatctatttctatctctatttaccaaataccctatctttaatgcatttttgtaaatctctggaaatcataatatagtcaaagttttaaaaagaagaccttaggctggacatggtggctcatgcctgtaatcacagcactctgggagggtgaggtgggtggactgtctgagcccagaattgaagaccagtgccggcaacatggcaaaacaccatctctacaaaaaaaaaaaaaaa

SEQ ID NO: 40790 - DNA, 684 bp, Homo Sapiens
  misc_feature (621)..(621): n is a, c, g, or t
gcggccgcggctgtaggctttaaataataagttacctttaatacagattcaatatcagacaaaaatatgttttaaaattcttgctcatatttttgctagttccagggttttttttatttctttatgtagatatgtttttatatagtatcatattaattttacctaaataaattctttctttacctaaataataattttttattttttatttttttgagacagcctgggcaacagagcaaaactccgtctcaaaaaaataaaaaaataaaaacctgtccaggttttttgtttgataaattttgtttttgaaatgattttcaaacctaactttacccatgtagccatgaagttaaaacaaaatcctagagtttatgctgtcattgtaagcaattacagatgatggccattacaaaacttcattttactctttgtggaagactagtctccatttcatatgcaatagaagattcaactctcttttgcacttgagaatactaaaagtaaatgtattttagtaaagaaaaaaaacccacatgtaaatgaatgtgtgtcttggagcaactgaattctattcaaaactttggaaggaaacagcaaagtgttagaatacgtgatttttanagtgtatgtataaataaataccgtgagtaaaaaaaaaaaaaaaaaaagcctacacctcgtgcc

SEQ ID NO: 40791 - DNA, 724 bp, Homo Sapiens
ttttttttttttttttttttgtttttgttaagactgtctcttgtaaaaaatgtttgcacagttgtcatatgtttgcatgacaagctgatcatggttccttacaaagtatacccaaggtatttgctctcaaccttttctcgccacccagtgcacacacacagaaattcactaacatgggtgctcaataattgttattgacaagaattccaaacagttggtcaaatgactttttacttacaacatggagccataagtcataagataatttaatttatgaagaatcaatatgaaataaagacttaaagctcaatcttgttacctgtttggtgaacaactctggaaagtcaggataaaggaaagccaagtcgacagctgctttatctaagcagtaagaatatgcagatgggaccctcttctgttctcctaccatgtttgttccaggattccaatttgaaatctgtatgtgccccttgacacctcaatgctttgtcaagcacctcatttctctggctttagttttatagacaaagaaaccaaatacatggtgatggagcagcttatcacagtatgtttttagaaacaccaatgctaaaattaccagtccccaagtgtcaggtgaaattactataagaattaagtgagaattactttgatctaaagtattaatgaaaatggtagtgtcagtcatgattctggataattactcaaatagacaattttaaaa

SEQ ID NO: 40792 - DNA, 454 bp, Homo Sapiens
gagttgggtcttgctctgtcacccaggctagaaagctggtgtgatcatagctcactgcaacctccaactcccaggctcaagggatcctcctgccttggctcctgggtagctgggactttaggcctgtatgatttctaactgtgatgtgatgagatcccctcccctggctctgtgaggcctggggctgggcttttccaggagtaggagagggtgaattttggtgcctgcaaagcagcctggcctcgcgtgatgccaaagcaaaagcttggggcctggggcagatggaatctggcttgcatctgggggttaactgggcagttgtggggcactggaatgagaggagagggagagtgggactcctgagaccctgctgtgggatgagggtgagagaatggcagggaggtagacaggaagcacagaccctcagccccctgggacttggtgccaggttggt

SEQ ID NO: 40793 - DNA, 524 bp, Homo Sapiens
agggggctgagggtctgtgcttcctgtctacctccctgccattctctcaccctcatcccacagcagggtctcaggagtcccactctccctctcctctcattccagtgtcccacaactgcccagttaacccccagatgcaagccagattccatctgccccaggccccaagcttttgctttggcatcacgcgaggccaggctgctttgcaggcaccaaaattcaccctctcctactcctggaaaagcccagccccaggcctcacagagccaggggaggggatctcatcacatcacagttagaaatcatacaggcctaaagtcccagctacccaggagccaaggcaggaggatcccttgacctgggagttggaggttacagtgagctatgatcgcaccagctttctagcctgggtgacagagcaagacccaactcttaaaaaaaaaaaaaaaaatacaggaaatgactaatgaacttgactccatgaaattgaaacttacgtggaaaattagtccaaagcctaaaag

SEQ ID NO: 40794 - DNA, 388 bp, Homo Sapiens
  misc_feature (5)..(5): n is a, c, g, or t
gtatntgagagaaggacagagactctcactgagggacagaccagctaaaccagaaatcttaagagggaaagtaacagtgtgtgattcaagacataggtattcaatcaaatatccttttactttcgtatatgcatggaacatcaaatcactaaatagttggtgcttcttcctcaactccaaagtcaactaggtaaagtggctcaggatgtgctttaataacctctaatgcctaaacaaacataaggaaagttagtttcagggataatcatctctcccaatgtgcaagacagaaatacggatatggtgacctataaaggggtcctcaaagccatgaattctcaacaatcaaggcatggggaaacaggagctttttggtcaaatgagcaaa

SEQ ID NO: 40795 - DNA, 519 bp, Homo Sapiens
aataggtggttatgtgctttgaccaaataggctgcccactggtcgtgtttccctttgctcattgaccaaaaagctccgttttcccatgccctgagtgtgagaattcatggctttgaggacccctttataggtcaccatatccgtatttctgtctgcacattgggagagatgattatccctgaaactaactttccttatgttggtttaggcattagaggttattaaagcacatcctgagccactttacctagtggactttggagttgaggaagaagcaccaactatttagtgatttgatgttccatgcatatacgaaagtaaaaggatatttgatggaatacctatgtcttgaatcacacactgttactttccctcttaagatttctggtttagctggtctgtccctcagtgagagtctctgtctcgttctctctctctctctctgtctcgctctgtctcctctctctctccctctccctctttctctctctttctctcacccgtctaggagcgtaatcg

SEQ ID NO: 40796 - DNA, 400 bp, Homo Sapiens
gctcgaccagttactgagctgaaaggattaaactctgcagcttccccagttgcccttcctccatgagagcagtgcctgcccccagcattctgtggcacttggaagacaagacagaggccaaatgcagatttttaccctgggcttccctctacagtgtggaactcaggttgtttcttctttcctccctgaaatgacatgagtttgcagcggatggtgaactgaagaaaccataggaggctctgtcttcttgcctgaatttcagttggaagcttggagatttggggttcaacagagataaggaagtgtaagccttcatcccgtctggtggttggcgatcacacaccgctctgtgctgaggctaatggccatgatcagagttgaccaaaaaaaaaaaaaagtc

SEQ ID NO: 40797 - DNA, 829 bp, Homo Sapiens
  misc_feature (644)..(644): n is a, c, g, or t
  misc_feature (690)..(690): n is a, c, g, or t
gcgagacgggtttttggcagaccagctagaccccatctatgtggcctacaacatgtagtctcgtctcttggcttccatggacttttctagagatgtagacattgttctccgtgtccactgaagcgtgcagacacagggcaacactcaccagaatacagccatttgtggtgagagtggaggaggaagaggaggaggaagaggacttctcacagcagccacgattggcatgggggtgaaatgtgaatttaccactgaatttcgctcagaaggactttggattactgccttcagtttgttggaaaagcccatttcaaaaactttcttttcttttctttcttttttaattattggataataagtgctttcttcgtaaatgtggtattttgttaagccgaaatagcaattaaaaaaatatcctgccctccagatgggttcttttaaacaatttatgtagtgtgacaaagaattgttttctctgttttaatgtgtcatgaaatcttaatgacatggatctgttactaatttaagccattgctagatctcatccttttaggaaagtttgaggtacgagaaaaccttccaaatagcaccttccaattagataatagcagctttctttgtcagaaatgtgctgaagaaacaangctggtaacggccttcgaagtagtatagatgagaagaatataatangtgtatttcgcaatatctgcaatatcttgactaactaaagataatagttactctcatagtatatgacaacgttattattgatcctagacttaagagaactcagaataagctgatgtgtaataatgtgatctgtgagaca

SEQ ID NO: 40798 - DNA, 404 bp, Homo Sapiens; identical to SEQ ID NO: 36097

SEQ ID NO: 40799 - DNA, 320 bp, Homo Sapiens
taacatgcaatattcagaaagacgtaggaagatatgacccgctgagagagactcactgttctggctctggccataagaagaatagctgctctggccatagcctgaagtgtccgtggactggctataaccactgtaactctgctgtccgtagggctgactgcactgctgggaatagccctgcacgggctgggtggggtaggccccatagctaaataaaaggaaaaccagcgtgatcagaaaacatggcgtgaccacccttgccctctacaaactctggaagcccaaaaatagcactcacctttgggttgcttgtaccgctg

SEQ ID NO: 40800 - DNA, 317 bp, Homo Sapiens
aacaagcacacaaaggtgagctgctatttttgggcttccagagtttgtagagggcaagggtggtcacgccatgttttctgatcacgctggttttccttttatttagctatggggcctaccccacccagcccgggcagggctattcccagcagagcagtcagccctacggacagcagagttacagtggttatagccagtccacggacacttcaggctatggccagagcagctattcttcttatggccagagccagaacagtgagtctctctcagcgggtcacctcttcctactctttctgaatattgcttgttccgct

SEQ ID NO: 40801 - DNA, 580 bp, Homo Sapiens
gcttgcttgcctgtgcgcgcgtgcgcggacatggcctcaaacgattatacccaacaagcaacccaaagctatggggcctaccccacccagcccgggcagggctattcccagcagagcagtcagccctacggacagcagagttacagtggttatagccagtccacggacacttcaggctatggccagagcagctattcttcttatggccagagccagaacacaggctatggaactcagtcaactccccagggatatggctcgactggcggttatggcaatcaagaccagagtggtggaggtggcagcggtggctatggacagcaggaccgtggaggccgcggcaggggtggcagtggtggcggcggcggcggcggcggtggtggttacaaccgcagcagtggtggctatgaacccagaggtcgtggaggtggccgtggaggcagaggtggcatgggcggaagtgaccgtggtggcttcaataaatttggtggccctcgggaccaaggatcacgtcatgactccgaacaggataattcagacaacaacaccatctttgtgcaaggcctgggtgagaatgtac

SEQ ID NO: 40802 - DNA, 646 bp, Homo Sapiens
gttgggtacctctgccttcaggtcttttatgagatgggactgtggtcttaactgaagctggactgggaaagcatgagcctttaagctgactcatgtgaaaatggcaggtttagtgtggctggagagcctgactttccttctctctactggtctgagcaccccctcaggctctgttatgtgggtctctacatggagcatctcatagcattgaagcttgcttcctgtgtttgaggtatacaatagagagagagaattagacaaaaaggtgtacacaaaaagagacagagaaagattgagggcgcaaacaggaaaaacccagtaggagaaaaatgagagctttaaaaaaatcttgacagggtgcggtggctcacacctgtaatcccaacactttgggatgctgagacgggtggatcacctgaggtcaggggtttgaaagcagcctggacaacatggtgaaaccaccgtctcttctaaaagtacaaaatgagcaaggtgtggtggtgcatgcctgtaatcccagctacttgggagactgacgcaggggaatcatttgaacctgggaggcgaaggttccagcaagccgagatcacaccactgactcctgctgggatacaaagagcgaaactgtctcaaaaaaaaaaaaaag

SEQ ID NO: 40803 - DNA, 486 bp, Homo Sapiens
  misc_feature (151)..(151): n is a, c, g, or t
agcgttcagaggatccccggaagcacactgcaacaatattatggcaatttatcctcaatgaaaatcttccagagtccttttattttaggaatatcctgtaaacaatcaaaccaccagaacatgatagtacaacagtaaacatgttctcttngcattaaactggaagatatctgtttaataaacaaaagaaaatgtaggaaaggtacttagagctcttactttctaagtacagaacaccctagacaattcaaggcatcttaatctccatcaagaacaaaaaaaaaaataattttggtcatgcggttaaatccatcattagggataaaacgggtgcaaatgggtcaaagggatccaacaaacacggatgtccaagcgggcatatgggcaactattacgttaacggggggtcaatagagagttaaaaagatcttccctttcttctggttcttttccagggttctggaagagttctggtggttctaaaat

SEQ ID NO: 40804 - DNA, 423 bp, Homo Sapiens
  misc_feature (9)..(10): n is a, c, g, or t
  misc_feature (16)..(17): n is a, c, g, or t
  misc_feature (98)..(98): n is a, c, g, or t
  misc_feature (124)..(124): n is a, c, g, or t
  misc_feature (242)..(242): n is a, c, g, or t
  misc_feature (288)..(288): n is a, c, g, or t
  misc_feature (309)..(309): n is a, c, g, or t
  misc_feature (311)..(311): n is a, c, g, or t
  misc_feature (385)..(385): n is a, c, g, or t
  misc_feature (396)..(396): n is a, c, g, or t
agaatttgnntatctnnaatcatgactccttgaaaaatagttaatcctataaaatgggatattaggccaatggatttatatattgaactttgtaattntgtctatttgaaaatgaccataaagntccatgatgtggtaataattagctattttgatgaagttcatatttccctgtgagactataaggctagtgattgagccaggccgaacacctatgtctctctagagattgtgtcattgtnctctactcaccatcaatacatgcattaacttacaaagcgaaagggnacttgggtttcattatttaanantattcctgtccaggcatgggtgggataacacttgtaatcctcccactttggggagggccaagggcagggagggntccacttgagncccgggggttgggaggaccaggccttt

SEQ ID NO: 40805 - DNA, 279 bp, Homo Sapiens
tttcatttttgagagttttattttccccataaaaataaatagcggtaaacgacctagcgcagagatcctaaacattacattcagagaaacatttggggtgctttgtctatgcttgttatgacttagctttagaaagtaaatgtccttacacaccttttttttcttttcatgggcttaacatatgctttctagagagcaccttaaattttgccacttaagggcactcaaatagtgtaacaccccttttattaaaaacataaatccccatgtaaaaaagtg

SEQ ID NO: 40806 - DNA, 551 bp, Homo Sapiens
  misc_feature (8)..(8): n is a, c, g, or t
  misc_feature (125)..(125): n is a, c, g, or t
  misc_feature (385)..(385): n is a, c, g, or t
  misc_feature (443)..(443): n is a, c, g, or t
  misc_feature (445)..(445): n is a, c, g, or t
  misc_feature (451)..(451): n is a, c, g, or t
  misc_feature (457)..(457): n is a, c, g, or t
  misc_feature (519)..(519): n is a, c, g, or t
  misc_feature (539)..(539): n is a, c, g, or t
aaaaaaantttgaatcaagtacccagggacacaaacactgcggaaggctgcagggacctctgcctaggaaagccaggtattgtccaaggtttctccccatgtgatagtctgaaatatggcctcgngggaagggaaagacctgaccgtcccccagcccgacacccgtaaagggtctgtgctgaggaggattagtgtaagaagaaggaacgcctctttgcagttgagacaagaggaaggcatctgtctccttcccgtccctgggcaatggaatgtctcggtatcctgattgtatgttccatctacttagggggaaaccgccttagggctggagatgggacatgcgggcagcaatactgctctttaaggcattgagatgtttatgtgnatgcatatctaaaccacagcacttaattctttaccttgtctatgatgcagagaccttngntcaggngtttgnctgctgacctctcacaattatcctatgaccctgccacgtccccctctccgagaaacacccangaatgatcaattactaaggnctcagggccgcc

SEQ ID NO: 40807 - DNA, 588 bp, Homo Sapiens
acaccacctgactcagaatgcacacataagctgcttccctggtagcaaagctcttcactcctgagtgactcttatcaggggcagttgggcattctcaattggattacgctgacaagggaaaaaggcctgcggtatgttatttcaacaccatttggcttcagaaatgcctgtctcgacctttttgccctcagagtctacttctctcttcttgctttctagagggtcaccagcctgctcccatgcatgttctttaccctgcaaatattggcccatgttcctggagacagaatgccatcattcacaagatggatcatgtatcacagactaataaatcatagcatgataaaaaaagaaattagttcatttacccctctaacatttctgtatccagagacagacgacaaaagctttttggttttaggcttttctgtctgtatctgtacattccattttaggagaaagtgttaggtctcatatgctacttttctgactatgctgtacaccccaggaatatatttcttgcgaaagtcaagattgatagtgatctacaaaaatgtctgatgtatggtaagctccgtagacagaagc

SEQ ID NO: 40808 - DNA, 803 bp, Homo Sapiens
gtgcatctctctcagctgctgagagctgaacagacgttgggatgacttgcctgcagaaaggagctaccgactgcaggtctcctctgagctgaactgttgctcaataaagcacctcttcaccttgctcaccttctacttgcccacatacctcattcttcctggactcaggacaagaactcgggacctgccaactagcagggctgaaagaggtgtaacataaacagggctgaaacgcaccccttgcttgccaaattgcaggcaagaagaagagaagagagaaggagacaagagctgtggcccttcagggagcccagacctaggagctccccaagccagggctatgatgccttctttggggttctgcagttcctgcatctccaagtttctgggcgccactgcattccctgatacccacagtggaagctgtttgcagtcggcctggtccagctgcagcctcacagggatctggcacctgtgccggtgcctggagctgcccaccccactgcagctggcatgcttgactgtgtgcagtggccagatcccatgcttgcttgctcacacacccttcactgctctgtacccagatcacccttggcaagtgtgggatccaaaccactagcatgacccgagtggacagaacgaacccagggggcccgagcaaaacacaggtaaaggcaccaccagccagaggcttcatgcagaaaagtgatgtctcaggattccggaacacttgtgccctttgatctctcagagctgctgggggattctgaaaaaattctttctcgaaaacaaaaaaaaaaaaa

SEQ ID NO: 40809 - DNA, 582 bp, Homo Sapiens
agtgggtcagtgtcttctgcctgtagtcccagttacttgggagacttaggcagaagaatcacttgaacctgagagtcggaggttgcaatgagctgagattgcgttactgcactccagcctgggcgacagagcgagactccatctcaaaaaaaaaaaaaagggaaaatcacttatcagcttatccatcataagtctgtgtatatggcatatctttttattatgcaatggaataaaaccattattagaaacatgccaggttggttgtcttggtatcgtttagtaagaaacaaagattgaaaatgagtcctggtggaccgggcacggtggctcgcgcctgtaatcccagcactttgggaggctgaggcgggtggatcacaaggtcaggagatcgagactatcctggctaacatggtgaaaccccgtctctactaaaatacaaaaaaactagctgggtgtcgtggtgcacacctgtagtgtcaccagtggcactccagcctggtgacagacgagactctgtctaaaaaaaaagaaaaagaaaatgagtcctgcctggtggctcatgtctgtaatctcagcattttg

SEQ ID NO: 40810 - DNA, 498 bp, Homo Sapiens
  misc_feature (459)..(459): n is a, c, g, or t
  misc_feature (488)..(488): n is a, c, g, or t
aattcgcggccgcgtcgacggctgcgagaagacgacagaaggggagggatctaggcaccttggttccagtgtcttccttttgttctcactgccaaactgcctgtcctgggatctagttatcttggccctgcactctcaacatgagtagcgaacacttaaattgggttttcaacagtcccagctttcactgccagggtcccagtcagattccaggaatttgcgccctaactttgcttgctaatcctggtttagagctatcccacttattaatcctaattcttagtcctgcctgtgagatatgagtctacaggagactcagagctcccaccctctcctcctgctaacccttctcacaccctcaagaggagttagaaagaggtcctgtcattctcactctaaggaaatggaatagaaataatcccttctcccaaccttcccggtaataggatttcgacaagnggctgagatgggcactaggcgggctcccngctttggttt

SEQ ID NO: 40811 - DNA, 884 bp, Homo Sapiens
  misc_feature (718)..(718): n is a, c, g, or t
aacctctatctgacaggccaggatatcttcacctgtggactggtcggggccctgcaaggtgccctgctgtgcagcagcgccatcctgaagcggaacttgtactcagaccttaagaatcttgattctaggatccgggcacagaagaaaaagaattagttccatcagggaggagtcagaggaatttgcccaatggctggggcatctcccttgacttacccataatgtctttctgcattagttccttgcacgtataaagcactctaatttggttctgatgcctgaagagaggcctagtttaaatcacaattccgaatctggggcaatggaatcactgcttccagctggggcaggtgagatctttacgccgtttataacatgccatccctactaataggatattgacttggatagcttgatgtctcatgacgagcggcgctctgcatccctcacccatgcctcctaactcagtgatcaaagcgaatattccatctgtggatagaacccctggcagtgttgtcagctcaacctggtgggttcagttctgtcctgaggcttctgctctcattcatttagtgctacgctgcacagttctacactgtcaagggaaaagggagactaatgaggcttaactcaaaacctgggcgtggttttggttgccattccataggtttggagagctctagatctcttttgtgctgggttcagtggctcttcaggngacaggaaatgcctgtgtctgggcagtgtggttctggagctttggggtaacagcaggatccatcagttagtagggtgcatgtcagatgatcatatcccaatttctatgggaagtccccggggctggtcttcctttattcatcggggtgggcagccttggtttctca

SEQ ID NO: 40812 - DNA, 637 bp, Homo Sapiens
agcgggggggcgggcgcctgtagtcccagctactcgggaggctgaggcaggagaattgcttgaacccaggaggcgggggttgcagtgagctgagatcatgccactgcattctggcctgggtgacagaatgagactctgtctcaaatagtaaaaaaaagccaagaaaccagaaaacaaccaagcaaagtctgagaaactgtcacagcctagaggaacctggagacagctgatccctaaatgtcacgtgggatcctgggctggggctcctggcgagagcacaagcaagcacattggcagggaacactggaggcaacactactgcacactacaagctactgcgcgctcttagggcttaactaaaacaaacacagtgaacagcacaagaggaaccacacacaagaaaaacgtgtctcccaggcgcgcgggacccccggcgcccaatagaggcgccctagaactccccttccgaagggagggacccccgatatacacacccactttgtgcgaatccccttttagagtgaaacggcgttaaattaccaaacatctttgggccttcaaacacctgtggtacctattacgctgttaccccccgtcagtctaaccatgtggtaatccggctcacaaaattttgcca

SEQ ID NO: 40813 - DNA, 841 bp, Homo Sapiens
ccattctcggccataccatcttgaggttacaaaatgaatggggactcagagcatggccaaaaacagattatagtggtaagcaggttttagtggcaagacaccttatgggagggggaaaagatgaggcctggctagcataagtggtcttgttaggtagatgaaatctcacaggtagcagccctcagaaagaattgatggtaaatacttcttttcgacctttaaaggtgtcagagcctcagttaattgttcctaaatctaaagagaagccccacataagtgaagattttatccactgatgcaaatctctcccaccaaagacagctttgcagggctacttctgtttgcaaggccctttgaacagctgtctcaaaatatgtcaaagaaggatattttaaggtgaaatatttttatttctttcactaacgtgtataaatacttcattccttttttattgccaaataatatgcacggacataggacattttatttataaagtcatcggtgctgggtaaggtgtcagagccccgcgtcgaatagtggttgactcgccgtcgcaatggtcacacctgtaatcccagcactttgggaggccacggccgggtggtcacctgaggtcaggatttcccaaagttccagaccaagcctggccaacatggtggaaaacccgtctctactaaacattacaaagattacccacggtgtggtggtgccgtggctgtaagtccccagctactccgggaggcgggggaaacggaggaatcgcgtgggcccggaggtggcagttgcaaagggcccaaacaggccatgggatcagacggggccacaaagaaatcagtgtcca

SEQ ID NO: 40814 - DNA, 521 bp, Homo Sapiens
  misc_feature (7)..(7): n is a, c, g, or t
ctacgancccagttttcggcacgagggatcgtgccattgcactccagtctaggcccaacagcaaaactccgtctaaaaataaataaataaataaaactgaatgaatataaacagaaaccacagatgctattacatattaaattgataatataaccattacaggcgtgagccaccaagcccggcctaaaacatttaaaaatgtttattttaaacatacataagacatgcacacataaagatacgcatagcatgattgagggcttggtgttttgtttctgtaacactggatttgaaacgaaactataatgagaatgtatagcagggctgggcgaatgacaggcttgcttatgactggagggtcaagggctattgagtgcaaaagctggatgtaatcagattagctcagtgttttgtttttatagctatgcattttagcgtttaaaccatggtaaagaacagcttttaaaaaaaaatcgcttctcagccttttggctaagctcaagtgtaaaaaaaaaaaaaaa

SEQ ID NO: 40815 - DNA, 453 bp, Homo Sapiens
  misc_feature (162)..(162): n is a, c, g, or t
  misc_feature (284)..(284): n is a, c, g, or t
  misc_feature (364)..(364): n is a, c, g, or t
  misc_feature (392)..(392): n is a, c, g, or t
  misc_feature (437)..(437): n is a, c, g, or t
  misc_feature (442)..(442): n is a, c, g, or t
  misc_feature (447)..(447): n is a, c, g, or t
  misc_feature (451)..(451): n is a, c, g, or t
gatccgggcccctgccctcctctgcacctgaccacactccctactcagggctagtctgttcttcccggacatcttctggtagccgtgcaggagagggctgggtggggcagaggccaggaggggacctggtgtgtcacctgcccaccacctggctcatccctnaggcccaccctgaccctacattacataggttacgtaagcctactgtggctgttgagcaaagcatttctcctttctgggcctaatttgcactagatggggcctgtggtcccaaaagtagggtnagtaggttggggtttgctgaaaacccttgggtcaagttttgggaaagatgagtggtttgtcctgtaactgcctttccctngcctgggggtattgtgaactcaagaccnttgccagggtaaggccatgaggtttggggaaacctggcccaaggngttgnggacngcantt

SEQ ID NO: 40816 - DNA, 982 bp, Homo Sapiens
cttggctgagcagagggaactaggggtcggcagaaaggattatgggtggaaaacattggctcttccttggggagtgatgctggggaaagggaagagagtggctcagcctgcaggtaaataggctagaaaagccaaggccaaaggctggmkgggagaggacagtcagcatgtccagcctggggtctgggtgtagggttatcccttctccctgtgccttcccatctcgtccatgagcctaggtcttggagccttgtgttggaggctgctgtgatgtcaggaacggggatctgtctagcttttgrccacttcctgggacctcacgcccctgttgacagatggagattgggcagcagggccttgctgcattgttatctgctgttccgacttggtttgtcttgtccaagggtgacgaaagagccaggcaccagggtctcatgggatgaggtacagggtgggagatgkgggaggggctgkgggctgaagggagcaagaaagctgtagctgtgtggggctggcaggatgttgaagaccgcctctgctgctctcacatggggactgggcccagatcctgcttggtcacacccagcccagaagacgggtcctccagttccagtgactcactgcagttatggtgcccgcggcttctggtgttggggacctccgtgccgttggggaagacacaccagcagtagccgatgctcccatagcactggagtggcagatagttgccgttctcgtcgcacttgggcctgaatgaacccgggtggacagcagggatgtggctgacctcttcctggcacttggtcagtactttcggtggagcgtcagtgggcttttgctccaaggagtgcctgctcatttcaaacaggagccaatggtgcatccagctctcaaagacyttcagtctatggtctcatggtgtcyttaagtgtctcaggttctcgggaagctcccttcagtggggggtaacttcagggggcag

SEQ ID NO: 40817 - DNA, 589 bp, Homo Sapiens
tcctgtaccagcagcagggccggctggacaaactgacagtcacctcccagaacctgcagctggagaacctgcgcatgaagcttcccaagcctcccaagcctgtgagcaagatgcgcatggccaccccgctgctgatgcaggcgctgcccatgggagccctgccccaggggcccatgcagaatgccaccaagtatggcaacatgacagaggaccatgtgatgcacctgctccagaatgctgaccccctgaaggtgtacccgccactgaaggggagcttcccggagaacctgagacaccttaagaacaccatggagaccatagactggaaggtctttgagagctggatgcaccattggctcctgtttgaaatgagcaggcactccttggagcaaaagcccactgacgctccaccgaaagtactgaccaagtgccaggaagaggtcagccacatccctgctgtccacccgggttcattcaggcccaagtgcgacgagaacggcaactatctgccactccagtgctatgggagcatcggctactgctggtgtgtcttccccaacggcacggaggtccccaacaccagaagccg

SEQ ID NO: 40818 - DNA, 922 bp, Homo Sapiens
  misc_feature (46)..(46): n is a, c, g, or t
gctggaccggtccggaattctccggatctgtaagaagaggcttttntggcccagaaagccttacttattttacatcttccagtttgtccatcccatgagttagagttcgtcttgactctgcaagctagaatcaaagaattatgaaagtaagatcatttagatttgaccaagggcaccattaaatggtgtcaggttttaggaagcagacgggtgtataaaaagaaaatgaacaaagatttcacttattggggatcaggcataactggatgcctggattgtcctgccacccagctgccaccaataaaatcattcatcactctgcaagagggaccagatgcttccatcatcagtactccttgtttttctgttatctcctttgaggtagctaaaaatggcagccaaaaaaaaaatgttgaggcttttctcaagtatatactcatgttattttgcagaagatagggtcaacttcttcagttgagttatctgaaagtgttgggcagtgacaccatgccaaacactgttaaattcatgccattaaaaacagtggagtgttctgcaaagcccgattctctgcagctttaagactggacagtattgaaatattcacaggaatcttccaagccgtgaaagcttaatattaaacagcccttttaattgcaaaggagaaaaaaatggagacacttgtgaaaccttgcattctgagtgctgccacaaataaattaaggaattccagaatttcttcatctacttctgcagtcttaactctgaattaatgactgtatatatcaaacttcagatcttaaaaaacatcagctcgcaagaagctgaggccaggagaatgacattgaacctggggaggcggaccttgcagtaagcccgagactgagcccctgcacttccagcctggggcaataaagcaaga

SEQ ID NO: 40819 - DNA, 498 bp, Homo Sapiens
ataccttatcctgttttaatctgagtgactctctctcagctgagagagctggacagactccattttagcctcttcacttgcagtccccttatccccctcccttaagggaataactagtgcaagctgactccaagcacatccaggaatgcacttactgataagatattgaggcaagctgtaccagcagctcctggggacgtgctcagtggatggtacccaagcccctgcatttatctctttgtgatagtttaagcccctgcacctggaactgtgtatttttctgtaactatctctgtaaccattaattttttttaactttttgcgtgttctgcttctgtaaaaattgcttcagctaggctccccctgccctatttagaccacggtataaaaagaaatctatccccttcttcggggctgagagaattttgagctctagccatctctcggtcactggcaataaaagaactcctgaattagtctcagaaaaaaaaaaaaaaa

SEQ ID NO: 40820 - DNA, 962 bp, Homo Sapiens
caggaatctgaaatataacttgccaaaaacacacagttggtgtggaatggtcattagaacctggggggcctcttcacggactccctgctcattaagggattcagtggtccagagtctaagatcctattaagtgtttgattcaaacctctacccgaggaagggctgttaccttactcctggtcctggtttcaagctcattcctgaaattccagctggtttctctagcacctagtgttgtttacaagaaggccacggtgctcttagcattcaaactgcagatactaaacagatgctgtgatttattaaagagttagccatatttcaacaagaaagggaaatgatggctatattcattacttacctcaaagcatgctgcaagaaaattagttagttacttgtcatgctttgaaatctctggatgaaaggtgctttggaagcacaaaccattatcacttgtctcatagggattgtccccttgaacatccagcagtgttattttacagaagacaaattaactgaaggcttttcttttattacatctaaagagctctacataaacaggtaacattcaataggtaaacaatttttttccaatgcatgtaataaatattttcacttggtacttttatacaaactgacattgtctactatacatttttaaaagccattttactggtttggcatgcggtatggaaattctaagagagaaagttttaaggcaatgaatcacagatttaagttcatggaatttatggtaactttatctgtttatgtacattttcccctttgttaaacaattaacagcagcacactctgggaccaccagctattttccctctctttctgaaatctaagctttgtatttaattaaaaaacagaattcracatctattggataaaacaaaattcttactaaaataatttcaaatgtgstttaaaaagtcctgaagatcttgaargtt

SEQ ID NO: 40821 - DNA, 872 bp, Homo Sapiens
agcatcaataccattcaaaaatagacgaactaattgaagaaactgttaaagaaatgataacactcttggttgcaaagttcgttactatcttggaaggagtgctggcaaaattatccagatatgacgaagggactttgttttcttcttttctgtcatttaccgtgaaggcagcttccaaatatgtggatgtacctaaacccgggatggacgtggccgacgcctacgtgactttcgtccgccattctcaggatgtcctgcgtgataaggtcaatgaggagatgtacatagaaaggttatttgatcaatggtacaacagctccatgaacgtgatctgcacctggttgacggaccggatggacttacagcttcatatttatcagttgaaaacactaattaggatggtaaagaaaacctacagagatttccgattgcaaggggtcctggactccaccttaaacagcaagacctatgaaacgatccggaaccgtctcactgtggaggaagccacagcatcagtgagtgaaggtgggggactgcagggcatcagcatgaaggacagcgatgaggaagacgaagaagacgattagaccatttggtcctagagtctgctgggacagagtcctgtaatcagtgcatgtccttagtctgttagttaaacccattaggaattttctgtcaactaccatgcccatgagatgtttatcaatacaactgccattttagctatgtggtaccaagattagcaaatgaccttcatatccactgatttcctgatgtccatgtctatatgtttacaagcaatatggagcaccattctttaaatactgttcatggagaatacatagtctaaccactaggcgtgtccctgttat

SEQ ID NO: 40822 - DNA, 743 bp, Homo Sapiens
ccacgcgtccgaacagctccatgaacgtgatctgcacctggttgacggaccggatggacttacagcttcatatttatcagttgaaaacactaattaggatggtaaagaaaacctacagagatttccgattgcaaggggtcctggactccaccttaaacagcaagacctatgaaacgatccggaaccgtctcactgtggaggaagccacagcatcagtgagtgaaggtgggggactgcagggcatcagcatgaaggacagcgatgaggaagacgaagaagacgattagaccatttggtcctagagtctgctgggacagagtcctgtaatcagtgcatgtccttagtctgttagttaaacccattaggaattttctgtcaactaccatgcccatgagatgtttatcaatacaactgccattttagctatgtggtaccaagattagcaaatgaccttcatatccactgatttcctgatgtccatgtctatatgtttacaagcaatatggagcaccattctttaaatactgttcatggagaatacatagtctaaccactaggcgtgtccctgttatcagcaaagatcaatgatgcttcattcatgtactatgtatgcattggtggtaaatggatgtgagggcaagtacatcaagtaccttcactctgtttcacgtatgtggaatgccagttaattaaatgagtaccgtaataaattaatttaagcccccaaaaaaaaaaaaaagggc

SEQ ID NO: 40823 - DNA, 633 bp, Homo Sapiens
ctcggccagaggtttcatttttaactgaatatttacgaaagctgaaagcgtgcgaggggggtggggtggaaatagcggctgcttcttttccaaggatttatttaatggggatgtgttcaaggcaagaccgaattcagaaggatatcgacgtcgtgatccagaagtccagagctgaggactgcctgtttgcagatttcagatactcagactccacctttacttttacctatgttggcggccccagaaggtgctgtcattcagagtccacaggatggatgaatggatatgaaaatgaacaaacgtgtgacacaacactgcatgatttaccggcaatgactttctgatcaagcctgaacatcccaagacaaccatgctgtgaagaagtcggtctaccccactggagaaggaaaggctgttcagggaagtgaagatgccccagctgacagtcaccacctgccagacatgtgagcaaggctgtctgagaccttcagtctcagtcaagccatcagaaagttgcagccagttgagtgatcccaagtgagaccagcagcgataatgcccagtttgccaaaacagaattgtgagaaataataaatcattgttgttttaagccaggtgtgggcagacattttc

SEQ ID NO: 40824 - DNA, 491 bp, Homo Sapiens
atgttttttatgtcttatttgagaaatccttctataccccaagatcatgaggatgtttcctgtgttctcttctgaaagctatatagtctttgtcatttaggtttatctttatacgtggtatgaagtgtaaagttctacttttaattttttgcatattttattaggataggatgggctttttctgtagtaataatccctaaatctcaggggcttaatatataaaattgtctcatgcaaaaaaccactgggtctagggcaattgctatctactgccgtctaatctccctctagtggcttccattggtagaccctaacaggaagccagctgataagggaatctgggaaatgtagtttacagagtggcagctacagtagaacagtagagactacaaggatgagcttgcagctgagaatagaaacgtgactggcacactaggtggtttgtttgtaggttttttcttttcctgtttgagacttttttggattcttga

SEQ ID NO: 40825 - DNA, 622 bp, Homo Sapiens
cccgggatggcccacaataacctcggggtgaagaggccacgtctcgggctccctccccgtcaggtctcatgtccccaagccgcctgcctggaagccgcgaacgggactgggaaaatggcagcaatgcctcctccccagcgtcagtgcccgagtacacaggtccacggctgtacaaagaacccagcgccaagtccaacaagttcatcatccacaatgccctatcacactgctgcctggcgggcaaggtgaacgaaccgcagaagaatcgcattctggaggaaattgagaaaagcaaggccaaccacttcctgatcctctttcgcgactcgagctgccagttccgggcgctctacacgctgtcgggggagacagaggagctgtcgcggctggcagggtatgggccccggaccgtcacgcccgccatggtggaaggcatctacaagtacaactcggaccgcaagcgcttcacccagatccccgccaagaccatgtccatgagcgtcgatgccttcaccatccagggacacctctggcagggcaagaaacccaccactcccaagaagggcggcggcacccccaaatagccccacccgggcggtccacgggccgggccctgtgtgct

SEQ ID NO: 40826 - DNA, 883 bp, Homo Sapiens
  misc_feature (798)..(798): n is a, c, g, or t
ctttcggaaattggaacatatgatgctggaatggatatttggggaggagaaaacctagaaatttcctttaggatttggcagtgtggaggaactttggaaattgttacatgctcacatgttggacatgtgtttcggaaagctacaccttacacgtttccaggaggcacagggcagattatcaataaaaataacagacgacttgcagaagtgtggatggatgaattcaagaatttcttctatataatttctccaggtgttacaaaggtagattatggagatatatcgtcaagagttggtctaagacacaaactacaatgcaaacctttttcctggtacctagagaatatatatcctgattctcaaattccacgtcactatttctcattgggagagatacgaaatgtggaaacgaatcagtgtctagataacatggctagaaaagagaatgaaaaagttggaatttttaattgccatggtatggggggtaatcaggttttctcttatactgccaacaaagaaattagaacagatgacctttgcttggatgtttccaaacttaatggcccagttacaatgctcaaatgccaccacctaaaaggcaaccaactctgggagtatgacccagtgaaattaaccctgcagcatgtgaacagtaatcagtgcctggataaagccacagaagaggatagccaggtgcccagcattagagactgcaatggaagtcggtcccagcagtggcttcttcgaaacgtcaccctgccagaaatattctgagaccaaatttacaaaaaaacgaanaaaataaggattgactgggctacctcagcatacatttctgccacattcttaagtagcaaaaaaggaaaagtgctttcctcctctg

SEQ ID NO: 40827 - DNA, 535 bp, Homo Sapiens
tttttttttttttttttgcaaaatgaaactgaagctgaaagaaaggagaattcgagtgaaccaagagaaatccaaagacctgtggaaggaggacttaaaatgaaagtgaagcaagagagggaaggggaaatgaagtgaaaatggcgtgagggtgtgagagaggtttgggttaggaaacatgtttttagtgctatttccaaccaggggtcgcaaactcagcagcctgtagaaacaggggtgggaggtgggggggaagctgtgcccacctttaaagagggggccattgctcagccatgcagaaaaaaatggggcaacaagctggcaatcaggttttttttttttaaagtgaaacttgatgatttttaaacaagtaattaaaaaaatgtccaaaacaccatgtgggccaaacatttgtttgagcctgggggccaccagtttgcgaccactgccttacgtagttaacaccctgagtatgtatacagtcatattttttgttttggatatggtagtgttatatatacttgggggcgtgata

SEQ ID NO: 40828 - DNA, 1121 bp, Homo Sapiens
  misc_feature (710)..(710): n is a, c, g, or t
  misc_feature (716)..(716): n is a, c, g, or t
  misc_feature (722)..(722): n is a, c, g, or t
  misc_feature (731)..(731): n is a, c, g, or t
  misc_feature (739)..(739): n is a, c, g, or t
  misc_feature (744)..(744): n is a, c, g, or t
  misc_feature (749)..(749): n is a, c, g, or t
  misc_feature (764)..(764): n is a, c, g, or t
aggagtttgagaccagcctggctaacatggcaaaacctcatctctactaaaaatagaaaaattagctgggcatggtggcgcgtgcttatagtcccagctacatgggaggctaaggtgggaggatcacttgagccctggagatcgaggctgcagtaagccaagatcgcatgctactgcactccagcctgggagacagagcgagacgctgtctcaattaaaaaaaaaaaaagtggagaactggcagtgacctctactgggggccatggcagggaggggagccttctggaagggctgccttggagattggaatggggactcccagggagacctgcgttccatccctgcctgcctcacccctgccacagactctgcacaccactggatggtgggtccaagcctggcacagtccctgtgcttgtcagagtcattattatgattaatatcaattacgatgccaaaaattgctgggcaaactttgaagacctcaacttgttacaatgacgatgatgatgattcttggcggttacacaatccttcctcctgggggggaggcagctaggaggcccagcaggggggcttctatgctgctgagctcccctagggagttggggtagtctgtgccaactccaggcagctgctgtggcctcacccctgggccccccaattttgggtcatccatcctcaaatacactatttttgcttgtaaaaanaaaaanaaaaanaaaaaaaanaaaaaaanaaaanaacanacaaaaaaaaaaaanaaaaaaggggggggcccctcctaaagaatcccctccgagggggcccaaggtttacccgaacccagtttttttttgaaaaaagggggccccctatagggaggtccgtatttataaagcttggcccctgggccggccttttttacaaccctccgggactggggaaaacggcctaaccttggggaccttttgtggaggaaccctaacctctcgggggggggaacaaattggggccaaattcccccccggagatatttaaggcttctaggggaaatacaaaaaattttttaaggggaaaagggggggtaaaaccaacctgcattgtgctttcccgcctgagagaattttccttaatccgaa

SEQ ID NO: 40829 - DNA, 476 bp, Homo Sapiens
ccgggcgtggtggcggccgcctgtaatcccagctacttgggaggctgaggcgtgagaatctcttgaacccaggagatggaggttgcagtgagcagagatcgtgccactgcactccagcctgggtaacagagggagactcctccgtctcaaaaaaataaataaataaacttgtgagctggccccaacccctcctaggaatcacagctccccgtactggtgccgccgcagtggccaagttgcgacactgcccacggcccctccctctgatgcagattcagggcttctcttcgatcatgttgggttttgattctgtttttccttgactgcaaaaccctctttcctctcctcttttgggacaagagccctggttttctacgctgcccttggccaccacactgcctgccccacgagctgggaggcaggttttgtacggtacgttgttattgatatgatataaaacatcaaacgtcaaaaaa

SEQ ID NO: 40830 - DNA, 543 bp, Homo Sapiens
  misc_feature (534)..(534): n is a, c, g, or t
tacgggcatgtgctatcacacccaacctgatacattgcctttataaatttttttttctttattctaaaaaccagaaaaaacaaaactggatacatgtgcagaacatgcagaccaagtgtgttggggacttgagatgcgtacatgagtgtgatgtttcctgctgaaagcacaggtgagacgtggtcttgtaacacagtggttaagaatgtgactttggagccagcctgctaggggctgaattctgactcagccatttactaactgtgtgaccttagtctgtctagtgactggtgttgtcataagaagagagggacacagagggaagatggccacatgaagatggaggcagagattgcagttatgctgctgcaaactaaggaatggctctggccctccaaggattgctgataaccaccagaaactagaagagacaaggaaggattcttccctagagccttcagagggagcatggccctactgacacctggatttcaaacttgtagcttcctaaactgcaagagaataaatttctgntgttttaag

SEQ ID NO: 40831 - DNA, 642 bp, Homo Sapiens
ccggcagctgccaaagtggtgacaagcaatccagaggaccatgaaaggatcttaatgcaagtcatgaacttgaatgtgccgatgaggcctggcattcttgtccagagacagagtaaggaagtgttggccacacccttagaaaacagaagggacatggaggcagaagaggagaaccaaataaatgagaagcaagagcctgagaatgctggagaaactggtcaagaagaggatgatggtttgcagaaaatacacacatctgtcactagaactccttcagttgttgaaagccaaaaaagacctttaaaaggagtgacattttctagggaggtaattgttgtggatcttgggaatgaataccctacacctcgaagctatactcgagaacataaagagaggaaatgaagctcaaaaaagggtaagagtgaaagaaaatgtaacgtttgactaacgttgaaagactgagggtacaaaatcatgttgaaacaacaaaacaatggggaattaagcaaataaagatattattttacctttgtgcagaaaggagtgagccatgtgcaaaattctgtaagtaaaatacttagagcttgaatataattttttaaaaattcaaatctgagttcaagaaattgattgtattgccct

SEQ ID NO: 40832 - DNA, 509 bp, Homo Sapiens
atcgagcttctgctctaggggtgactgcagttagagcaggaggatggtcaggcgtcaccaacaaccccatcacccagtaacaagaaccttgactctctcagtccctctgcatcaagacacttacccatttcccacctcatgcctgctaacttgaatgaaacaatcgctgggaaagcattaagagaattaaggctgggcactgtggctcatgcctgtaatcccagcactttgtgaggctgaggcaggcagataacttgagccccggagtttgagaccagcctgggcaacatggcaaaaccctgctctcccaaaaaaatacaaaaattagctgggcgtgctggtgtgcctgtattcccagctacttgggaggctgaggtgggaggattgcttcagctggggaggcggaggctgcagggagccaagactgatccattgcacccagcctgggtgacagagcaagaacctgtctctaaaaatgaatgaaaggaaggaagaaagagagagaaaga

SEQ ID NO: 40833 - DNA, 478 bp, Homo Sapiens
caaccgggactccttgcgtgaagtccctctcactctctacctccttcttttacgtggactctgccaaagaccaggataccagaatgcagtggagtgaccaagtgtagtgggaccttgggaacgcgagtttggagccaggcggctggggtttgcatcctggttctgcccctccttagctggctgacatggcacaagccacttaccctctctgagccttactgtcttcagtggcaaatggatctgtcaacgggccccattgcctggggttgttactgctgagattaagggatgcttgtccatagaagcacttagcgttgtgcctggcacatagtgtatggtggataaatgggacttaggactaaaactcatgccttggtgtgtttttgcagtgatgttttgttctggggtgcatcacaagagacaaggttcttggccgggcatggtggctcaagccaataatcccagcactttgagaggc

SEQ ID NO: 40834 - DNA, 605 bp, Homo Sapiens
  misc_feature (237)..(237): n is a, c, g, or t
ctgctccggaggctgaggcacgagaatcgtctgaacccaggtgattctgcactctacttgggctctgtctcaaaacaacaacaacagcaacaacaaaaactgtggtatttttaatgaactaaatattaatctactaacacagcataggttttatgattactgcaattcaaaagtcataataaattttaaaacaaatcctcctgtacctgttgtggtgcatgcagaaacttttcctgntcaacacacttatatggcactatatagggatataccaaatagctcaggtacatagtgaatacaactttaacacttatattgaaatgctaatcttacttgccaatattagtggcacattagcataatttaacttttataaaattatggaaaacagtttaaaattattctccctaatattagcaaattgcattaatggcatgtaccgtgtgccagtttgtttccaaataaacaaaatgtaccttgatatgccacttcagagccagcagagggagctcatacttttttattgttttcaacttactgaagaaaatttgcttttaaaagctactgtgttataaccaatgagaaccaagaaaaaaaaaaaaaaa

SEQ ID NO: 40835 - DNA, 670 bp, Homo Sapiens
caagaaatgaaagtaaacactcatatttgtaagtctgttcctcaacttccatcaatcaagtttaatctaaatcaaggattcaaactgagaagcatttaaggaccaagaaaaagttaattagcccagtataagtcaacaagaaatggtaagcagtatggaggaaaagaagtgccacacccttctaggcatccaaattcaagcatttacaatgtacttcatgaagcagtaccctatacagcactaataacagcccaaacttgcttgacatttctacataacacattattcattaattcagaaaagcaacaaatagaattcttaaaactcctaactttatttttaattaatataaaggaggaaccaacaacaacaaaaaattgtgtgggagttagaaaataaggactaggcgcctgggcgcggtggctcacgcctgtaatcccagcactttgggaggccgcggtgggcagaacacgaggtcaggagattgaggccatcctggctaacacggtgaaaccccgtctttactaaaaaatagaaaaaattagctgggcgtggtggcgggcgcctgtagtcgcagctatggaggcttgaggcaggagaatggcgtgaacctgggaggcggagcttgcagtgagccaagatcgcgccatacactccagcctgggcgaca

SEQ ID NO: 40836 - DNA, 650 bp, Homo Sapiens
  misc_feature (617)..(617): n is a, c, g, or t
  misc_feature (635)..(635): n is a, c, g, or t
tgtcgctgcccgtaggtggttgtggccactgtgcccggagggaggcggcggtggccagtaatgcctgggaaactcctctggggggacattatggagctggaagcacccttggaggagtccgagagccagaagaaggagaggcaaaaggtgcgctgagcatgggccgcgcctccttttgggctgcgccggcttgggcggggaggggaactgtctgtccctgatgatggcctgtcagaaccgggccggagcatccgagggcctcccttcgcgccgccctcggccctctggggtcgctcagggaccgtttccacctccaccctcccgacctggagaaagatggccctgggctttgggcctctcctccgcgtggcccctcagcccttcccgttggcgcctgaatctcagatgggcagactcaagctcccatcaccatggaatctgttctttctcttctgaagcagtgacgcttgccatttcgttttcattggccttcttagaagatgattaagaaaaaatgattgctttgaatatgtgttgcttctgtcaccccgtcccctgtgcaagaatcctggggaaagcgatcttaggtttacagaccctcaataactagtctgtanaggcttaaggaaaagtgnactgacacttgccag

SEQ ID NO: 40837 - DNA, 481 bp, Homo Sapiens
ggcagactcaagctcccatcaccatggaatctgttctttctctcctgaagcagtgacgcttgccatttcgttttcattggccctcttagaagatgattaagaaaaattgattgctttgaatatgtgttgcttctgtcaccccgtcccctgtgcaagaatcctggggaaagcgatcttaggtttacagacctcaataactagtctgtagaggcttaaggaaaagtgtcactgagacttgccaggatttgtcagtgatggagatcgtgtgggttgcattattaatagcctttactgtcagtattttcattcaatccgcaggtgtttattgaacctaatttgtaccatactctttgctgagtaccaaggaggttaaactaaataagtaaagaaatggtctctgctctcaaggagcctgtagaggagttgtagtctttcctcctcccagccccctgccctccaaaaaaaaaaaaaaaaaaaaaag

SEQ ID NO: 40838 - DNA, 636 bp, Homo Sapiens
  misc_feature (12)..(12): n is a, c, g, or t
  misc_feature (550)..(550): n is a, c, g, or t
  misc_feature (591)..(591): n is a, c, g, or t
  misc_feature (624)..(624): n is a, c, g, or t
ctccagcatggnaaccacaggttactctaaatgtgacttttaaaaatgaaattcaaagctttctggtttctgatccagaaaatacaacttgggctgatatcgaagctatggtgagtgttactttattttgtttctccttggtttaagcatggttattttttccaaaggtagctatttttagcagtgttgtttcatagctgtgaagtctgtcatagttaccatttctgggccttttggaaaattgcttttgatagggtttcagtattcatatatgagatgtgccccaataaagggaaccaacacataaatttccttttgaacattttagaaagggaaggtaaaattgtttttagtgagataggatttagaaaacctattaattttagaaccagtatgaggagtgaattggtgtgggctccacccaaccagatcccaaggaaatgttctcttgtgtgaggatatgacttgtgttttgcacaaggatataacttgtgttttgcaagagcctatcaattgtttttattgctaggtcagaggttgagtatctcanagttgagcaggaaaaactttcatacctgcttagacagcagntcaccctgttcccgtttttttgctaagggctcntccctcctcttg

SEQ ID NO: 40839 - DNA, 528 bp, Homo Sapiens
taacagcggagcaccacaccgggagaagcgaggcggagaaactgacgaattctctaatgttagaagaggaagaggacataggatgcaacacttgagcgaaggaaccaagggccggcaggtgggaagtggaggtgatggggagcgctggggctccgacagagggtcccgaggcagcctcaatgagcagatcgccctcgtgctgatgagactgcaggaggacatgcagaatgtccttcagagactgcagaaactggaaacgctgactgctttgcaggcaaaatcatcaacatcaacattgcagactgctcctcagcccacctcacagagaccatcttggtggcccttcgagatgtctcctggtgtgctaacgtttgccatcatatggccttttattgcacagtggttggtgtatttatactatcaaagaaggagaagaaaactgaactgaggaaaatggtgttttcctcaagaagactactggaactggatgacctcagaatgaactggattgtggtgttcacaagaaaa

SEQ ID NO: 40840 - DNA, 679 bp, Homo Sapiens
tccaaaaactgccgtggagagggggctgggggacactcgtgacacctgtcgggcggcacatgtgatgggtggagcacccaggttctccaagcagcaggaggctctgatggacccccctcccctggcggggggacgctactgctagaagcagcgaagggcccggtgccccaggtttcagctgcctgccttctgccgtaagttgccccagcaccttcgtgcttttcaggagcgtaagctgagcagactcagtcgtcccagtggtcagtgtggctggggcagagggacacacggtccacaagacgtccatgctctcggaatgctccaggggtttggctgtggggctccaccaccattgcctgagcccggagccagaggctcctcccacactgcctggtctgccccacagagcatcagtgccacgccaggtgaggacagcgctcaccagacaaccaggcctgccagcccactgacgctgacttccggacctgcagaactgtgagaaagtacgtttcgcttctttgtaaactgcctggtcagtggtggcagcacagatggaccgacgtggacctcgacgcgaatggcgggctctgggcgctgaaccggtggcggcgtagctcaccgaacacccagggggaccagaactctctggcttccactcagttgtgacttgtctatttta

SEQ ID NO: 40841 - DNA, 972 bp, Homo Sapiens
ggctttcttaaaactataatcctagcagaggacatcagatattgtgtagtcgttagcaagatcatcataggcaaacatatatccgttccaaggctaaaagtgaccttaactgtatttattctcaaagggaaaggaaatatcagatgtttatttggttatagaatgcttttttttttttggggtccattcctgctgtgtgagtatttggcttcaacagtatggccaggttcctaaaatggtctaaaaacatgattgggcttccattttggcagctgcacggtaccagtgcaccgggtttctatatagtaacagtgtgcaattctaattatgggactgtgcccgtgtttttagttttcaaatcaattctctaatctcgggtgatggtgtgatgtaaagaggtgctatgatggtcatgcaattattactaaatatggaatcaaggcccagagctttatgggatctcacttggtggtgtgtaagtgctctaaacgtagcagtattattattaacacggtccccagagtaaccctgtaggcctaaagtactcagttttaagacaaacatacttcccatgcggggtacttccttatggtaacatgtaccatgtaagacgatcgagtgacctaaagtagagaggtcctgaccttcgagaatgggctccttcgggtaagtatcagtgacagcggagagggaccacggatggggagcaggataacaggcacatcaattacacctttgtcaggagtccagcgtaggcagctccaggactggggtgaaaagaaaagccccttgcgacacgaacagtgacggagtacacagaagccaatctccgggccacatccatctaaaggagcggaatcacggaaaagacgcaacttacagggcaccataagtccaaagcggacaacacgccacgcgctacacactgacgaaagagaagcgcgtaaattacaacagcaccatcaacataca

SEQ ID NO: 40842 - DNA, 618 bp, Homo Sapiens
gaaacagtctgcatgcagtaaattgaatttttcctgcaactggaatgatttgtttaattcttctttgaacactgccctttctccagtaagaacactaatgatttgctaatattttttaaagaaatctgtttttttaattagttaagctcagacttcctcttattttttatcctagagaaaactgctaaaagggaatgatatatcagtactattcttctaaaacaactttttaaaaatgattatacaaagccaaatatgctcattatataaaatttagaagcaaaaagaaggaaataaaaattttccataattctaccagctagagataatggtgttagaatatattcctttctaatctgttttctatgcatgcacaaacacatatgtgagcacatatttataattttattctaaaaaataggacactgctgtacatattgttttacaatctaagtcatataattataatattctttaaacatatttatgagtaaaatattaaaacttatacaaaaaaataacagaatggcattttagctcattcattgatttttataaaatatttaacacactccctggtttgtagttagcgttcaataaatgctaaaaatttatctt

SEQ ID NO: 40843 - DNA, 781 bp, Homo Sapiens
atgatttaggtggccaggatgatagtaaagtacttgtgttctgctggttaggctaagctgaagtgacaaatggccctcaaatgtctggtttcaacaaaagttcatttgcttttgttgaatgtctggcacatgtctgtcagccagcaggcacctgggaccctgctccgggttagcttcaccccgggactcgggctgccatgtctgacacgtggtggtccactggcagagggacacacgatcggggcaagttctgctggcccttaaagcttctacccagaagtgaccattaaccacttctgcctacattcactgggcaaatcaggtcccatggcaacgtgagagggcatgtactctccctgaggggcagcaaacagtaactaccaaaaccaatgaatattttcattttaatagtttaatgtatgtttatagtaatataaaaagtcttttcagtgtgtgaaaaaaagacatgttgtaggatgggatcctggaatggaaaaaggacattaggtaacaaactaaagaaatctgaggccaggcacagtggctcatgtttgtaatcccagcactttgggggattgaagcgggcggatcacttgagcccaggagtttgagaccaggctgggcaacatggcaaaaccccgtctctaccaaaaaaatgcatagattagccgggcgtggtggtgcatgcctgtagtcccagctgcttcaggaggctgaggtggggaggatcacctggagtgagcctgaagaaggtcaagggctgcgggtgaaccggtggatc

SEQ ID NO: 40844 - DNA, 483 bp, Homo Sapiens
tacccaggttggagtgcggtggcgtggtcgtggcttactgcaatctcaaattcctgggctcaggtgatccacccaggtagctgggactgcaggtgtgtgccaccacacccagctaattttttttaattgtttttttgtagagactgggtatcgctatgttgcccgggctggtcttgagctcctggcctcaagcgatcctttcacctcagcttcccaaagtgatgggattgcaggtgggagccactgcatctggcccttgtctcttatttctgtcatactaaacattgtacttctttttctgcattagaattaaattgctccattaaatggacttttatcagctttgataaactgtattcccagcattgagaacattgcttagtggatagtaggtattcacaaaaaaaattagctgggcgtggtggtgggcacctgtaatgccagcttctcaggaggctgaggcaggagaatcacttgaaccca

SEQ ID NO: 40845 - DNA, 801 bp, Homo Sapiens
aaagtgccttgttctgaagattgaataagagaatctgaatagtgcttaacacaaagaagtgctcattaagtttgctgttatttttgttgttatgtgtctaaacaagaacattattttctcaaatcagaatctgggcatactgtgttcaatgtccctggtctaaaagaagcattaagttatgctatgaaaaagcataaaacgcagtgatttttggtcttgaacattctctttaatttggaatctaaaggcttttggaagcagttttgtatagtataaggtatgcagacagaagagagtcaggaggcctcagagccaccagtcccttcccgtgtgatgtggaatgaatcatttgggaaaatatctgagtgcttgaggtcaaagcctctggaatcagactccctggacttaaaccccatcttcagtacttagaaccttgggcaagttacttaatctcagttaagtataaggacatcagtattcatctataaaatcagtacctactacatagttacagtagcagtatctacttcatacttattgggaggattaaacacggtaggagttaatggtagaaaccattttagcataagtgactggcgaacagcgaagtactccaattccctgtttgggaacctggtattacttcaggttaatccggacatctctgaatcccttccttctgggcaatatgaaaggctacctactttgggggtgttgttggcccactatgttttgaaacgtctttcaattttcaccacagcgacctttcccgttttcctggttgcgcctttttcaaaaact

SEQ ID NO: 40846 - DNA, 815 bp, Homo Sapiens
aagaagagtatgaacggcaagaaagagagcacaggctgtcagctgcagatgaaaaggcagtttcggctgcagaggaagtaaaaacttacaagcggagaattgaagaaatggaggatgaattacagaagacagagcggtcatttaaaaaccagatcgctacccatgagaagaaagctcatgaaaactggctcaaagctcgtgctgcagaaagagctatagctgaagagaaaagggaagctgccaatttgagacacaaattattagaattaacacaaaagatggcaatgctgcaagaagaacctgtgattgtaaaaccaatgccaggaaaaccaaatacacaaaaccctccacggagaggtcctctgagccagaatggctcttttggcccatcccctgtgagtggtggagaatgctcccctccattgacagtggagccacccgtgagacctctctctgctactctcaatcgaagagatatgcctagaagtgaatttggatcagtggacgggcctctacctcatcctcgatggtcagctgaggcatctgggaaaccctctccttctgatccaggatctggtacagctaccatgatgaacagcagctcaagaggctcttcccctaccagggtactcgatgaaggcaaggttaatatggctccaaaagggccccctcctttcccaggagtccctctcatgagcacccccatgggaggccctgtaccaccacccattcgatatggaccaccacctcagctctgcggaccttttgggcctcggccacttcctccaccctttggccctggtatgcgtccacca

SEQ ID NO: 40847 - DNA, 530 bp, Homo Sapiens
ctgtctgcaggtcatgactggaatggtacttgctgcttttaaagagctaaaaggtttttaaaagcttgttcatggaaaaagctttcctcaaggcttctcaagctaagggaacagagcgtccttgagaggcaggaggattcacaggaaggccctccccgactccctcttgtccacctacatttagccatatgacccttctgatctcctttgcctaagtccgaggcttaggcctagcactgtaggatgggtaaacaaaacgttatttgtggactttttgaccttaagacttttagagtctggtcaaggggacaaaaaaaaactgcttacatttcagagcagaccagccaccacactattggagatatattggagatctccccttgactcactaattgaaaagcaaaaaagggcaggtgtggtggctcatgcctgtaatctgagcactttaggaggctgaggcaggcagattgcttgagcttaggagtttgagaccagcctgggcaacatggcgaaactctgtctctacaaaa

SEQ ID NO: 40848 - DNA, 960 bp, Homo Sapiens
gcagtggattacctagaaatagaggttctgaaagaccaagtacttcttcagtatctgaagtatgggctgaagacagaatcaaatgtgatagaccgtattctagatatgacagaactaaagatacttcatatcctttaggttctcagcatagtgatggtgcttttaaaaaaagagataactctatgcaaagcagatcaggaaaaggtccctcctttgcagaggcaaaagaaaatccacttcctcaaggatctgtagattataataatcaaaaacgtggaaaaagagaaagccaaacatctattcctgattatttttatgacaggaaatcacaaacaataaataatgaagctttcagtggtataaaaattgaaaaacattttaatgtaaatactgattatcagaatccagttcgaagtaatagtttcattggtgttccaaatggagaagtagaaatgccactgaaaggaagacgaataggacctattaagccagcaggacctgtcacagctgtaccctgtgatgataaaatattttaccatagtgggcccaaaacgaagatctgggccaattaagccagaaaaaatactagaatcatctatttctatggagtatgcaaaatgtggcaacctggagatgaatgtttgcactttatgggaagaccaacaagtttaccgggcagaagttgaagccctccattcttcggtatgacagcagtgttaaattccatgactcgggaaactatgaagagtgttactgagcaatatcaaagccattcaacagaggctgggaggaagacaggcctaagaatcaatcttgaatccgaaagggagtgtgcacaaaaaatcattgggcaccacaagttcacaccacccggtcgatgatggaaagagcccttgtggaacagccgtcgacaccgggacatgtgaaccactctcaaaaggggggaacatagaaacaaag

SEQ ID NO: 40849 - DNA, 635 bp, Homo Sapiens
gggtcgcaccccgcccaggcccctctcccgccccaggtctctcagtcttttttctcagggcgtgtagcttcctgcacacccggaagcagatcgcgcggggaaaagatcacagcgctgcgcgtcagtttccgtctacctggactaaacatttgcttcgccccgtctgcctgaatcgaacgtgcacttggcagtcttcccttgtccatacccgtttcctggggatcgctacggaccttaaaataccagcaacagccccttcgccccaaggtcttgctctgtcagactagagtacagtgccatgatctccgctcactgcagcctcaacctcctgggctcaagcagtctttctgcctcagagtgctgggattacagacgggagccaccacgccaggcctacgagatttgacttgtaaagaattaattatattgactgagagagaagcccagaagaggaagaagaggaaagaaaaggagtcagggatggctcttacacagggacctttgacattcagggatgtagccatagaattctctcaggaggagtggaaatccctggaccctgtgcagaaagctttgtactgggatgtgatgttggagaactacaggaacctggtcttcctgggtatccttcctaa

SEQ ID NO: 40850 - DNA, 673 bp, Homo Sapiens
gcgctgcgcgtcagtttccgtctacctggactaaacatttgcttcgccccgtctgcctgaatcgaacgtgcacttggcagtcttcccttgtccatacccgtttcctggggatcgctacggaccttaaaataccagcaacagccccttcgccccaaggtcttgctctgtcagactagagtacagtgccatgatctccgctcactgcagcctcaacctcctgggctcaagcagtctttctgcctcagagtgctgggattacagacgggagccaccacgccaggcctacgagatttgacttgtaaagaattaattatattgactgagagagaagcccagaagaggaagaagaggaaagaaaaggagtcagggatggctcttacacagggacctttgacattcagggatgtagccatagaattctctcaggaggagtggaaatccctggaccctgtgcagaaagctttgtactgggatgtgatgttggagaactacaggaacctggtcttcctgggtaaggataattttgctctagaagttaagatctgccctcgtgtatttttgtattttctctgttgtctttcttgggagcccttccattatttgactgagactgaagccttgttgactcacaaataaaaagcttcataatgctgaaaaaaaaaaaaaaaaaaaa

SEQ ID NO: 40851 - DNA, 896 bp, Homo Sapiens
caaccgtgctgcgatctaaataccccaaaaccaaaaagtatctagttacagaatggttgaatgacaaagcagagaagcaagagtgccctgttgagtgccctttacgtatcacaacggatccaactgtactggcaacgaccctaaacatgttaccaggtcttatccattccccgttaatttgcaccacccccaaagcactacattcgcttgggctcaccctttatccctgagagacgtcgaaggccccttctgcctgatggcacattcagctcctgtaagaagcgctggataaaacaagccttagaagaagggatgactcaaacatcatctgtaccccaagagactagaactcagcacctataccaaagcaatgagaatagtagctcttctagtatctgcaaagacaatgcagacttgttgagcccattaaagaaatggaagtctcgctatctgatggagcagaatgtcaccaagttacttcggcctctgtctccagtcacaccagcccctcccaattcaggctcaaagagtccccagctggccacacctggctcatctcacccaggagaagaggagtgtcgaacatggatacagcctcatgtttttcaccagtcacatctcttactactgctagtcgctgcaacactcctctacagtttgagaacatatcctcccctgagagttcccctgcgcataggcccgagtccctgtcacccgagcttggtcaccgaaaagacctggattttggcaaaagtaggatacctggactccaacataacagctgtgctgatagaacttccctactcaatcaggtccttctgacctggctcctcatcctacctcggaccaacttctgagactggtttcccaagcagagtgggcatggacttagaacc

SEQ ID NO: 40852 - DNA, 553 bp, Homo Sapiens
ttacgtatcacaacggatccaactgtactggcaacgaccctaaacatgttaccaggtcttatccattccccgttaatttgcaccacccccaaacactacattcgctttggctcaccctttatccctgagagacgtcgaaggccccttctgcctgatggcacattcagctcctgtaagaagcgctggataaaacaagccttagaagaagggatgactcaaacatcatctgtaccccaagagactagaactcagcacctataccaaagcaatgagaatagtagctcttctagtatctgcaaagacaatgcagacttgttgagcccattaaagaaatggaagtctcgctatctgatggagcagaatgtcaccaagttacttcggcctctgtctccagtcacaccaccccctcccaattcaggctcaaagagtccccagctggccacacctggctcatctcacccaggagaagaggagtgtcgaaatggatacagcctcatgttttcaccagtcacatctcttactactgctagtcgctgcaacactcctctacagt

SEQ ID NO: 40853 - DNA, 866 bp, Homo Sapiens
  misc_feature (462)..(464): n is a, c, g, or t
  misc_feature (469)..(469): n is a, c, g, or t
  misc_feature (471)..(471): n is a, c, g, or t
  misc_feature (473)..(473): n is a, c, g, or t
  misc_feature (475)..(475): n is a, c, g, or t
  misc_feature (505)..(505): n is a, c, g, or t
  misc_feature (528)..(528): n is a, c, g, or t
ggagagatggagtctcactgtcttgcccaggctggtgtcaaactcctaggctcaagtgatcctcccacctctactaatatgaattattaggctatgctaatatgaatttgtatactaatatgattgaaattagtttgacttctataataattgttctcccagattgggcttctgttttgatagtagaactaaattattaggctatttcaagaaattaatatattactggtagaaaaactgaagctacaaaatggcctggtttctcacttcagttaaatttgtgcttctgagtgcttgtattctaggtgaaaccgcactgagaaggtatttgtggcctatacgctgattcattgattagacttctttgcacagggagagctgctaaaaattactgcggtgaacaggtacgaagaaaaagactgttctctgcccttctttttgcaataaaatattacaaactannnaatgnanananacaaatgaaaaaaacacaccaaaaattttnaatgccacgagaaaaaaaaaaancccccttgggcggcccgccttcggcctctcgagaacttttctaaaaccattcgttgtggggcgcgggcccccagaaggaaaggggaccctgggccaatacttgtttccctaaggaaatcccgggccaatgaactaggggcttggaatttctccaccataaaaaaaaacgccccggggggcaaatccgaggggtttttggaacaaattcccaagaatgggagttttttggaggctctttattggggattttattcaaagggggagcccacaggcggaccttcgaaatttcaaaattaacgcccccccgccttggccaattttatggcaagaaaactgtt

SEQ ID NO: 40854 - DNA, 891 bp, Homo Sapiens
cggacgcgtgggtcgacccacgcgtccggaaggttcatagttgagttgtatgtacaggcacacaaaatttgtccttggatagacacatatcaatccacttccttctcctctctgaatttctttatttaaaaaaaaaagtagagatggagtctcactgtcttgcccaggctggtgtcaaactcctaggctcaagtgatcctcccacctctactaatatgaattattagcctatgctaatatgaatttgtatactaatatgattgaaattagtttgacttctataataattgttctcccagattgggcttctgttttgatagtagaactaaattattaggctatttcaagaaattaatatattactggtagaaaaactgaagctacaaaatggcctggtttctcacttcagttaaatttgtgcttctgagtgcttgtattctaggtgaaaccgcactgagaaggtatttgtggcctatacgctgattcattgattagacttctttgcacaggagagctgctaaaaattactgcggtgaacaggtacgaagaacaaagactgttctctgcccttctttttgcaataaaatgttacaaactaaaacaaaccaaacaaccccaacaaaccacctacaaccacaaaaaaaagagggggccgcccaaaaaaaccccctcaaggcgccccatatcatgcatataccccggactgagagcaaacaagaccatgcccctcatgacctgaaggtctacataacaccccaagtccaccgccccgaaggttataaaaacggtacgcagaagcgggcaaaacgaccgtaacacaggagaccactgtgggacaaggacacccacacctgaggggcggaaaacaacatggggcacgacgactcagca

SEQ ID NO: 40855 - DNA, 879 bp, Homo Sapiens
cgaccttgttggcttgcatttgcatgttttataccaaagcttatactgtactatgtgaagccatcagaagtcgcaagggaattgttaataacataaaacatttttatactaagatcatttgttttgtaattcgtttttaaagagtggcttggatgttttgaaaatactactgaatatgttaatattcttttaaatcttagattgaaaaatgatacattacttaaattgatagctcctaatatatttttaaaattacaactaaaagaagacttcttctgcagggaaaatggtcagcaaagtgaaattaacaaattttaaagtttttcccactctcgttggacagtaaatcagtgaaaggactgccccagttgagagtttgctctctttaagtatagaatgtttcctcttaaacaaattgccaatcatccagcctttactacttagccctctgacaaagtgccttactggctatttaatattacccagcttttatgggcaagtttacaaacattgttttttaaaaaattaaaacctgcaatgtttcgtgattaaaacaagtcttattgcattgtttcactcttagctcactgattggaaaaccatttgtcattttgctctgtttgatatcctcactattatggaatacattgtgcagctaaaacaatttccctttgcgcctagtggacattcatgaatgtgtactacacgcgagaagaaacaaaagcccgaaagaacacttgtgggatttcttgaattttgttgtactaaaagagcacgtcttaacccggacacgtttccaaatagtagatctttggaacacttcacaagggcattacatccgtgccatatcccagcggtctccacagatacgaaccacaa

SEQ ID NO: 40856 - DNA, 237 bp, Homo Sapiens
gatccacccgccttggcctcccagagtgctgtgattacagctgtgagcctccgtgcccaggccagtgttctctcttaaatgtgtttcaatatggtggacatttattgagcacttgtgttgggcgtttcaacaggaggcactggtacgaaaagtagcttgttctagttcatatatcatttgcactttgcttaacttgtataagtactttttactgtttaataaatattttattagaaa

SEQ ID NO: 40857 - DNA, 783 bp, Homo Sapiens
cctgggtggcgaattcggacgaggtcagaaaccgagaggacagactgccgtgttgccaccacaggctggaccatggacccccaagagatggtcgtcaagaacccatatgcccacatcagcatcccccgggctcacctgcggcctgacctggggcagcagttagaggtggcttccacctgttcctcatcctcggagatgcagcccctgccagtggggccctgtgccccagagccaacccacctcttgcagccgaccgaggtcccagggcccaagggcgccaagggtaaccagggggctgcccccatccagaaccagcaggcctggcagcagcctggcaacccctacagcagcagtcagcgccaggccggactgacctacgctggccctccgcccgtggggcgcggggatgacatcgcccaccactgctgctgctgcccctgctgccactgctgccactgcccccccttctgccgctgccacagctgctgctgctgtgtcatctcctagcccagcccaccctgccagggccaggacccagacttcagcaaatgtggctcacacagtgccgggacatgccgggacatgcggggtggctgttgtcatgggcgtctgccccttcacaccaggcactggggctcagacccaccaggaaggtggccgttcagcccgagctcctgaaacggaatcccaggtcctgggctggagagggacacccctgattacctttaggccccaggaataaaagcagggttgatctttcctccccaaaaaaaaaaaaaaaaa

SEQ ID NO: 40858 - DNA, 747 bp, Homo Sapiens
  misc_feature (746)..(746): n is a, c, g, or t
ggcgctgaagctgctctgtctcatgcgtcctcctcatttctggatccagagccagggctgccaggagtagccagagagctctgtgtggtgatgttcatattagtgaggtttaccttgaccacgagcagtgggaaactcaaaataatggtggcttatttctcatctaaaaacatcccggggtgggtggtctgggactgatctggtggacccaggctccgccttgttgcttgactgttggcagcacctgcttacttaccactcatggtgcaagatgacacttcagcctccgccaaaatgctcaccttccagccagcaggaagtcggaaggagaagaaaggggacagagccccatggcgtccatccttagaggatgctgccacctgaacctctgctttcatcctgttggtcagaacccagtcacatgaccacacccagtggcaacggaggctgggaaatatagtctttattttgggcacccatgtgtccagcaaaactgggggttccatcagtcggcaagaacgggagagtggccgatgcagtggctgatgcttgtatcccagcactttgggaggtcgaggtgggcagatcacctgaggtcaggagttcaagaccagcctggccaatatggtgaaaccctgtctctactaaaaataaaaaaatttagctgggtgtgctggcgcacctgtagtcccagctactttggggggctgaggcaggaaaaatcgctttgatcctgaaaaggtggna

SEQ ID NO: 40859 - DNA, 487 bp, Homo Sapiens
gaggacagggttggccagagactacaggagccacagactaagggcacagccaaggaaggaccccaagaccccgtcctgtgttggtgtgagctgggaaagccgcccagggaaagggctgtgcagccacccagtgctgctgaaatcagaaatctgccctcaaaacccctggaaccaggaagcccagctctgccctcctcctggggccctcgggtccacgtcagctggaagggagacacctgggatcacagaggggcagctggggtggggctggagccaagaggcagtgatgggcagctgaccactccctcagacaggagctggcccatgcccctgccatcctctctgctcaactctctaccacatgtcacagctggcatcgcaagctaggggaaatagctggaccatgcacgattgtaaagaagacattcagctgttactatctgtaaatgatatgatgacagaaaaccccgaaattcacaggtaaatc

SEQ ID NO: 40860 - DNA, 1069 bp, Homo Sapiens
ggctccggagaagcggcgcctcctccccgccaggaccccgaggcggggggttcccgccttctcttctgagcgcctcttcccgctgcgcccgcatcagtctgggcctggcccagggtccccggtggagacgtgtttttttctccaaccaccgtgcccctctgtttaaaagcagccagtcaacctttgtgtcctttctccagaaggaaaagcatctcagctgttgtggaaaagggccccagcgtcctcttgtcaccgacagggcgattgcagtgcgttccggtcattttttccaggacactttctgtcttcatgacaggaacatcgagaagccaaggctagtggctgggttactgatggattactgatggattcttctcagcacttagtgacctttgaggatgtggctgtggactttacccaggaggagtggactttgttggatcaagcccagagagatctctacagagatgtgatgttggagaactacaagaatctcattatactagcagggtctgaattattcaaacgtagtctcatgtctggatcggaacaaatggaagagctgaggacaggagtgacaggagttctgcaggaattggatttgcaactcaaagacaaaggctccccacttgctgcaagatatttctgcagaaagatcaccaaatggagtacaattggagagaagcaataactagcagagaaactggtattgaactctaaccaattcgggaaaagtcttcaatgaacacccatttcttatgactcacattgataactcacattgggagagaaacttctgaggataatcagaggtggaacaggccttaagaaaagaacttcctcataggctttaacaagaaaaagtcctgctgaggggaaaaaggctaaggggtggtagccatggacaaagccttcaaccggttcccaaaatcttatagggcagaatagaatcccacccacggagaacttggggttgatgccacaacgacaaaacacgaacacagaaagcagaccaaaaaaagagataaggcgcaataataggggcggaggaaaaaaagattagcagcct

SEQ ID NO: 40861 - DNA, 361 bp, Homo Sapiens
gtattcttgttgcctgaaggaagaaagctcttttcaaagcagaaaattggtatccagagctttagattcaggtctccttaggacattcttttagaaagaaatatgcatttatatcataggcatagagtcaacactttcctcaaaagcaatgtagaccacattagtatctcatgtcacatttcctcaccctgcttttatgacaagttaggatagagaaaccatcagttccttaaagggatttggatatatttttttaggacagcagaacggataagaaatttagaggagtcaggatgagtggcacaaggatacaaaaaaggcaaaaggacttcaaagttaggcgaaaagaattaaacgttag

SEQ ID NO: 40862 - DNA, 757 bp, Homo Sapiens
tgctgaagagtgacatggtcatgaagtacctgggcctgaagctgggacccgcactgaaactctgctaccacattgacaaactgaagcaagccaagttctgacgtttttaaaaagacagaagcgaaacccaaaacaacagatcccaagattatcttctgccttaccaatatcccgccaacatcacaaaatagactctcctcttaaaattaacagccacagagacgtggtcttttttataaaactgtgtgaatcttggcctttggaagaatttaacatggaccttttcgagaggctcctctgtcttcataattgccaaaaaattacaaaagcctgtgatttttaacatccctgttatgctgatttctctttaagtgggtcctatttgcataacgagagagtggggaactgaatgcttatgcccaaggagagttctggagggttcaaaggatgaaagaaggacctttgtccctgcggtctctgcaggacaacccctcagcacatctgcctctaatctgacctggggacctatcccatgtgagccttgttgtgcctcagtctggaaggctgacttctgaagatgactgctacaaccttgcactgtgctggacaaccttgaattattttaccgccgtgcacgacaacggcaacaaaacaacaattttttgggcccaaaacaatcgaagaagggggtccccgataagggcgacggtaggaattaggacctcattgatgagaaccgatgtcagcttagaggcgg

SEQ ID NO: 40863 - DNA, 619 bp, Homo Sapiens
ccgcatttcaccattatgagtaccttttcaagaatgttagatttaatggagtgctaaatggtctttttcattactgctatgagtgataaattgtcttgaccaagatagcatgttgcagaataaagttttgaaagttgacagaggtattttctcagattcattcattatcatgtttagcttgatgttctcaacgttttatactattaggagataattttccattttgggtagaaatagttttagtgtatttaaatatggttagtatagattcagtaatttagtatagccatttgtttttacatttacatatatttattcaagaaagtttgaaaatgggaggtataatattaaaaaattactcttcccctcctgggaatcaagcaaataaacagcaaatgaacctgaacttacctttctcttttaaaagcaattgttattggaaggtatatattaattccaatgatattactgtttcttaaaagatattttttgggatgtctctttgtaattgccaaatgttaggttgcatgtgacagctttaaatgttacaagtatcagagaattcaggatttgccatgggctgcgaaaatagagaagtggataaccaaggtaatgtaga

SEQ ID NO: 40864 - DNA, 667 bp, Homo Sapiens
atactattaggagataattttccattttgggtagaaatagttttagtgtagttaaatatggttagtatagattcagtaatttagtatagccatttgtttttacatttacatatatttattcaagaaagtttgaaaatgggaggtataatattaaaaaattactcttcccctcctgggaatcaagcaaataaacagcaaatgaacctgaacttacctttctcttttaaaagcaattgttattggaaggtatatattaattccaatgatattactgtttcttaaaagatattttttgggatgtctctttgtaattgccaaatgttaggttgcatgtgacagctttaaatgttacaagtatcagagaattcaggatttgccatgggctgcgaaaatagagaagtggataaccaaggtaatgtagaagactgttctaattaccgggggatcaagatgaggaaaggttctcagtgacaactctctagtagacaaagaaataggaaatgaaattaacaagaccagcctgttatttagcagatagggcctgggaggacagaatttaacattgataacaccaatttaatgtttcatgaaagatcgtattagcaatgatgttgaatcttggtagccaaaaaatttttttctggaacaaacacaaacaacaaaaaac

SEQ ID NO: 40865 - DNA, 862 bp, Homo Sapiens
  misc_feature (25)..(25): n is a, c, g, or t
ctgggctgtcccttcctacttcagntaactcctgcgaaagagggaaacaaagttttatttttacttgaaggttccatttttaaaaggttgtttttgtaagctgctaggatctgagctgcgcgtacccccgcggtagctcgcccgcgtgggctggggacggggcgggaaatggcctgcgtgggcctcctccgctgctctcatcctgcacggacccgtcctgcatgggcacgccctgcgtgcacgggcctgcccgcgtggacgtgccctgcgtgcacccttccttcagggacccgcccttgaacggccctccggacgtggacactcgtatacgcccaccctgcgtgggatctccctgcgtggacccatcccgctgagcctcttctcgcgcagcctccctctggccccctgggaagctaccctggttgtccgctgtctcctggctggggggagctctcattgattctgtgatgatgcatgacagaagagcatttgttagctttgctttgcttttctttcttttttgagacagcctcgctctgttgccaggcaggcttgagtgcagtgggcgcgatctcggtcactgcaacctccgcgtccgggttcaagcggttctcctgcctcagcccccccgagtagccgggtattgcaggcgcctgccacgacgccggtaatttggtatttagtacagacgggttcacaggtggcagtggctcgaatcctgactcgtaatcgccgcctgctccaaaggcgggttcaggcgtgagcatacaccggcgtatttcttaaaaataattaggaagaaacccacaaaaaaaagggggccaaaacccaggggcataccccattgtaacgccatggttac

SEQ ID NO: 40866 - DNA, 405 bp, Homo Sapiens
  misc_feature (2)..(2): n is a, c, g, or t
  misc_feature (14)..(14): n is a, c, g, or t
  misc_feature (280)..(280): n is a, c, g, or t
  misc_feature (311)..(311): n is a, c, g, or t
  misc_feature (380)..(380): n is a, c, g, or t
  misc_feature (390)..(390): n is a, c, g, or t
  misc_feature (396)..(396): n is a, c, g, or t
cnaaacttcccganagcctcaccctcccaggaattccctgctaagtgccacagtcatctcttcaccactcggtttccactctcccatccttgcaccgagatcccactgttaggcctttttcaagcacggaccttctcatgctcagtctctctgtgggtgtggaagtgtctactgggtgggcctcacagaaggttccagggcctggtacaagcccaagggaaatgatgatccaaaatggacttccgataaagtttctgccactctgcattgggggcttttngtagggagtccagttcaattttataaaaatnaaaatacatgtctcgcacttctgagtttggcagactcaggtccattctgttattttggcaaacgagggncaaaaagganagggtnggctgggtt

SEQ ID NO: 40867 - DNA, 495 bp, Homo Sapiens
ggcagaaacggctgctgggcagctgatgggcaggagcttaccaggctggcttgctctgagctgcggttactgtgtccaggccccgggttctcagaactgtcatacataaagtacacagaaatgaagagaaaagtcgtgaatactcacaagctgagattgagtcctaatgaggaagccttcattttgaaggaagattatgaaagaaggcgaaaactaagattgctacaggttcgagaacaagaaagagatatcgccttacagataagagaagacataaaacagaggagaaatcaacaatttacacgtttggcagaggagctaagggcagaatgggaagaatcacaaactcagaaaatacagaacttggaaaaactgtatttggcaagtttaagaagtatgggagagggacatcgacaggccaaagaaaatgaacctgatttggatgctttggcacagcgggcagcagaaaaaaaaaaaaaaataataaaaaaaaaa

SEQ ID NO: 40868 - DNA, 725 bp, Homo Sapiens
aatattttttactggttctatgatgctattgttatctagataccaaagtgaaacatcatacacagggaaaactctgataatatcgcttatgagtggatctgtgaaatttcctagtaaattttggcaaaccaaatacagtaacatataaacaggaatgtacaccagtacccagtacagtgtatccctggaatgcaacgttatttcatcagctggaaatgattagtgcaacagactgaaggaagaaaacaacatggtcatctcaatagattgtggacggctggaagtggaggctcacgcctgtaatcctaatactcctaccaacagtgtataagcattcctttttctctgtaacttcaccagaatctgtttttttgtttgtttgtttgtttgtttttgactttgtaatagccatgggctgggctcagtgactcacgcctgtaatcctagcactgggggaggctgaggtgggcggatcacttgaggtcgggagttcgagaccagcctggccagcatggtgaaaccccatctctactaaaaatactaaaattacctgtgcgtggtggcaggtgcctgtagtcccagctactcgggagtctgaggcagtagaatcgcttgaacccaggaggtggaggttgcagtgagcggagattgtgccactgcacttggacctggctgacacagcaagactatgtttaaaaaaaaagagagaaaaaaaaaaaaaaaag

SEQ ID NO: 40869 - DNA, 691 bp, Homo Sapiens
agaagcaatcccatataacggcgcccaggatgagggagtcaacggttttaggttaggcacagttatcctcattttttgaagaaagcttaattgttgcagtgtttatctatgagtctggactaaatcctaggtgtcttaattccttaatgagtcgaggcgttctcaggttgtatggattttgtgaagtaatggagaatgctactgacgtctccaaagatgcgttttctaaggaaatcaccccgcccccgctgtcgtcattgacatagttttaaattacaaaaagttaaataaagtaattgggtaccaagttaatatctacaaataaatagccttctaatttacaaatatcagttagaatacatagttgaagaaaactaatatttacaatagcagtaaaaagataaagtattgtggaagaaacttaaaggttcagaactattaggaaagaactttaaaatactactaaggggcataacaatgtgaacaaataaatataccatgtgacattaagaagtgtgcgcaaacttaagtgaatgtattaatttactgtgatcttggtcgggtgcggtggctcatgcctgtaatcctagcactttgggaggccgagatgggcggattacctgagatcaggagttcgagaggagcctggccaacatggtgaaaccctgtctctactaaaaaaaaaaaaaaa

SEQ ID NO: 40870 - DNA, 795 bp, Homo Sapiens
gggacttggagtggtccgcaaggtgaggagagttgagctcaatgaaaagaaggtagatttttgccttttttatgcagaacaatgtcttcaaaaaaatcagaacagaaaaaataagatgcattctaatggatctttgacactttttggtaatgaagcttttagttcccatagagttgtgtgtaggtcagaaaatctgccaagtttcttactctatgttcagctcaagtttgctctggcaccaaagaggagagaaacggggggttgcagaaaacagggggttgagagctttatctttttgtcctttactttcatctaaaaaaaaaaaaactttctatgtaagtcaaaaggcatactaattttatatttcagtgtttctttgagtttcatttagaccatacaagctgaccatgacatatgacttctatgtgttcagtcacttaagatcatcaaatgcctagactttgtatttgaaatctttggcatcccttctaacttgtgttttgcagttaaattactttggagatgagatagaaatctgaaccaaaataattattgtaactatgcaactcttatttcctaccttggcttaatgtgttcctatgtgaactgtgtttgtttggaacaatttaaaaatatatctcctctcatcctttttctttcctaccatagtaggctttggtgagcagatatgaaaattgtgatgacccagctgggcacagtggctcgcgcctggtatcccaccactttgggaggctgaagtggcgggtcacctgaggtcaggatttcgagacagcc

SEQ ID NO: 40871 - DNA, 494 bp, Homo Sapiens
ggcagagtagggggaagagaaagcctgaaatggcccccacccccaatgcctgtgttagtgatcccccagcttccctttggtcaggctggagagggaatgggagtgaagcttgatggaggccggcaagtgcgaagtcagggatggtctaagagggctgagaggagaattccggaacctcaggaccttgctcactggctgctggctggggctgtgaagctgtccagtctagaactcaaagagtgatggtacaggctttagagccagacaacctgagtgtgaatccagcttcaccacttcattcattcactcacccattcattcaacaacatatttgaagcacatactttgtaccagggacttttccaggcaccggactacagctatgaacaagacaaacagtccctagcctcccaagagccgtcacttcagaagggcagacatgacacgcaaacaaaatgatgccaggtggtaccaagtgccttggggaaacagtg

SEQ ID NO: 40872 - DNA, 526 bp, Homo Sapiens
cggaaaaatggggggcgcgtggggctgtgaagctgtccagtctagaactcaaagagtgatggtacaggctttagagccagacaacctgagtgtgaatccagcttcaccacttcattcattcactcacccattcattcaacaacatatttgaagcacatactttgtaccagggacatttccaggcactggactacagctatgaacaagacaaacagtccctagcctcccaagagccgtcacttcagaagggcagacatgacacgcaaacaaaatgatgccaggtggtaccaagtgccttggggaaacagtgccacctttctgagaccgtttctccatccgtctatggagctgataacaccagtccctcagggtggaggtgaagactaagaggttgctttgagagggggaacttggtggctttttttcaccacctagaacctggcacatactgagctctcaataaaagtatattgaaccaacaaaaaaaaaaaaagtcgacatcgatacgcgtggtctcgtagctgac

SEQ ID NO: 40873 - DNA, 568 bp, Homo Sapiens
agcgggtgggttctgggccagcccagcctggaggaggtgtgagaggctgagccactgctcagcttagcggggggaccacttagtgaccaacaccctgagggaggccccagcatcccctacctagcctggcagcagcagcgggataaataggggggcactgctgcctgtgagccagcccagcatagccatgggtgtgtgggggaagcagacagagacagggtcttgctccgctgtccaggctggaatgcttcggtgtgatgacagcgcacgttaacctcgaattcctgggctcaggtgatcctcccacttcagcctcctgacttgctgaaactacaggcacccgcctccaccgccaggcccagcccacagctcctttgacctcagtgacaggcactcacctacctgacccccaaactgaagcctcacttttcccagccgtgtccacaccctctgggctaccccattaccatgacaagtattccctctgctccaggagaaaagccaggtcccagacctgacccattaaaacccaatcattccaaaaaaaaaaaaaaaactctccagcgct

SEQ ID NO: 40874 - DNA, 589 bp, Homo Sapiens
  misc_feature (302)..(302): n is a, c, g, or t
  misc_feature (326)..(326): n is a, c, g, or t
  misc_feature (353)..(353): n is a, c, g, or t
  misc_feature (389)..(389): n is a, c, g, or t
  misc_feature (421)..(421): n is a, c, g, or t
  misc_feature (478)..(478): n is a, c, g, or t
  misc_feature (587)..(587): n is a, c, g, or t
tggctaaaagttctacttacagtttcttacaaatgttgccagcatagttggaattgctttccttagtattttttgaggaataatgtttacaaagatacttctcagtgtataggaataaaaatgttcttctgcttcttgcattttccagaaatgtaaaaagggaaaaaaaaaggaaaaaaaaaatgctcttttaatgatgctgttaaatgatgttgtcattcttttaaaaaaaaaaaaaccaaaataatacttggccaggtgcagtggctcatgcctgtaatcccagcactgtgggaggccanggcggtcggatcacttgagcccanggttttgagaacagcctgggcaacacngcaagactctgtctctgcaaaaaatacaaaatttanctgggcttggcggtgcatgtctgtagtcccanctactcaagaggctgaggtgggagtatcacttgagcctgggaggtcgaggctgcagngagctatgattgcaccaccatacttcagcctgggcaacagagtgaaaccctttgtcaaacaaaacaaaccaatactcagttctggtttctcagctttgtaattttttgntg

SEQ ID NO: 40875 - DNA, 827 bp, Homo Sapiens
  misc_feature (487)..(497): n is a, c, g, or t
  misc_feature (676)..(678): n is a, c, g, or t
  misc_feature (680)..(682): n is a, c, g, or t
ctaggctatggaagatcaattctgaggacaggctgtatatacacatattgttattgttttagtcagaaactaggatggagctaggtgctgtgactcacacatataatcacagcactttggaaggcccaagtgggacgatgacttgagttcaggagttgaagaccagcctacacaatatggtgaaacccatctttacaaagaatacaaaaaattaggcaggcgcacgcctatagtcccaactgctcaggagacttaggtgggaggatgggctgagatgatcctcccactctcattcacttctgtcaggctagactctctctccttttcattggcttgtcttagctattaataagtctcggctgggcgcagtgggtcacacctgtaatccgagcactttgggaggccgaggcgggtggatcatgaggtcaggagattgagaccatcctggctaaacacggtgaaaccccgtctttactaaaaataccannnnnnnnnnnaataactgggccgtggtggtgggcccctgtagtcccagctactcaggaggctgaggccaggaaaatgggcatgaaacccaggaaaccggagcttgcagtggaacccaagattgtggcccttggaactcccaccctggggagaccagagcgaaaaattcctttctcaaaaaaaaaaaaannnannnaaagggttaaattctcctgacccaagggggccccttgggttcccaatctttaatccccaggaaacttttgggaaaagcttttaaggggggccccgaaaaaacccgggaagctccggggagttttcaaaaacccacccctggtttc

SEQ ID NO: 40876 - DNA, 383 bp, Homo Sapiens
taagctgatatcgaattcgtatcggccattatggccgggtaattcaggttgtgacaacctctctgaaggaaatatataggatgctataaaagtgactagagcaaggaacggcctaattgagctaagataatcaggtagggtctctgtaaggagttgacattaagctaacaactaaagaataagaagccagccatgtaaatagcttggataagagctttccaggctgaagggaatggaaatacacaggcctagaggtaagaaggagatgggtgtcttccggaaactgatgaaaagtcagagtggctcagatatgctgatatgtcccctggtattttttaaaatttttggccgggtacagtggctcatgcctgtaatcccagcac

SEQ ID NO: 40877 - DNA, 431 bp, Homo Sapiens
tttaagtgaagcaactttattcctcacagataggcagcaagggacaataaaagcttaagattcatggcaggtctgtcaaagctcaggatagtttcccagggcagttagagtcagctacatgcagtctagtctgcatgtagctgagggaccttcaaagcatgctccactctgggtttcatacctaggggatacttgacgtcctgggctaaagcaccataagatcctgttttaggagggatgggaacacagcttagtttgatctggccagttcctccttatctgagaatgttccatttccagcacattctacagttattctgagaactacaagagagaaagaggggatgagctgggtcaccagtgcaatccgaagacttgttctgtaagctgctcagacattgggatgaatttatagacctaatctactactg

SEQ ID NO: 40878 - DNA, 815 bp, Homo Sapiens
ataaatcaatatttttagaataaaggttcacaaagacctaaatatatgtgacttaacatatgatgaagatacaattttagtaagagaggaaaggatggattctttaataaatagtatgggaccatgcctaggaatttaggaaactaataaagctgactccctcctatatactatatgccaaaataaatttaatatgggttaagtatttaattaaaaacataacactcttagatatttcagatgaataattttaatatatgaaatcaagaaggtccttctaagtgcgagtcaaacaccatgaatttaaaggttaatagatggactaatttaagatttaaagaccctttattcaaaaagcagcatcaaaaaaatggaaatacaaattacacactggcaattattatttatgacatatattcagatgaagatgtattttctttataaagagctcttacaaatccataataaaaagacaatctgaaaacctgtaagatagagaaaaagtagcaaaaattaagaagaggtatatcacaagagaaatggcagttccgtatgtacatcaaagtggtactctattaggactgacggacgatttacaagtgaataatttggctatcggttggaagatggaagaagtaggcgaatcgcactgtggacgggtttctctcctgggggggggggagaaataatcacttcgaagggggggaattcaaatgaattcaatttaaggttcttttaaaaaaaaaaattgggcggccaaattcactggcgcaaaagatgtaacggaaggtaaagcgggaaagtgttgccgcggc

SEQ ID NO: 40879 - DNA, 872 bp, Homo Sapiens
gtacgcgtgggtgaggccttgtctctacaaagataacaataaaaacattagcatgacatgatggtgtgcacctgtagttccagctatccaggaggttgaggtgggaggattgcttgaggtcaggagtttgagaccacagtgagccataatcaggcccctgcattctagccctgggttgacagagtgagacccagtttcataaaaagagattgataagaaactcttgatgcaactcattataattttaaatggaaactaattcttgatattaccttagcagtgtgtccccgagaaagtgtcagagcctttacgtggaccttctcatgaaaaaggaaacagaatagtcaatggaaaaggaaaagggcctcctgcaaaacgtccttccttgaagcctagcactgaagtggaagatcctgctgtgaaaggagcagtacaaagaaagaatgtacagacattgagagcagaacaaaccttaccagtggctttagaggaagagcaagaaaggtgtgaaagaagtgaaaagaagcaatcacaggtcaaagaaggaaataatacaaacaaaagtgaaaaaatacaactatcagaaaatgtatgtcatagtacatcttctgctgctgctgacagattaaccaaagaaagaaagattgggaaaacgtatcctcagcaatttcccaagaaactgaaaggaaagcctgatagatgcatcttaagaccagaaagtgaagaaaaaaacaaatgttaatatgcttgtacaaaaaaaattgagaaggaatttaggaaagggagacccgcccaaacccgcaacagggggacatcgccaagccagcggaggcgaccgtgactgggccgcgtcggccgaccgaaaagaaggc

SEQ ID NO: 40880 - DNA, 877 bp, Homo Sapiens
tttgtacaaagaacaagctttgtacagagaacaagcttggctttttctcccaacgccgaggatgctgttgatgctgccacgtaatagcataattttgggtgtcctcaaggacagaacttccactttgaataatggaagttagaacaatgaatttcacaggggaataactattaatgactgacgtgaagaaaatatgccattgtttattccctcctgcatcatttccataatttgcttttgtactgtcaatttagaggaaatgtgtgatgctggtgttttgtttggcctgtttgtttgatgctgggggttttatgtgttgtaccctttaccccttacattgtgtaatttgaaagtgacaaacaaacctgcagtaaaagtccttgattggcatcttcattcggatgatggagagcctttgtggtagtgtttgcttatgtgaacagcaggcctttcagataagagaagtggcttttccttggtgatgaaggggtagagattgagccatggggatggtttaggttaaagaatgcttttttttggccatcatgaggatctaacaacagagtacaaggaaggatgccctaggtcagcatgcagggtggtaggagggctttcatcttccttacccaagcctctcttttcacttttctagaaatccagaagttgttatatgatgaaatagcctcctttaacgcttatttctgggtgccaacggaaggcccattcctctaacatttccataattttactcaaaggcctatgatcctaaacatttcaccaagggcatccaactcaacctgggaggctgcctaaaccagcctccacctctggaaatttggactttcgtttttacccgtggggcctgttttgaatttca

SEQ ID NO: 40881 - DNA, 393 bp, Homo Sapiens
acagggtctcactagattgtccatactgctcttgaactcccaggctcaagtgatcctcccaccttggcctcccaaagtgttgggattacagggtgaaccaccactcctggcccaaaaacatttttaaagactgatttaatgaaaattctgtggttagtatagccaataaaaagactgacttggctttgacttccagctctactaccaaaacccacgagagtgtgacaacctcaccaagccttaagttcttcatccataaaatggggataaaagttacacctaccacatatgattgttatgaaaagaaagaggtagcaagtagcatatttagcacagtcctggcatacaataaatgctcaagaaacacttcataaatcggagacattctgaaca

SEQ ID NO: 40882 - DNA, 711 bp, Homo Sapiens
gcgtccatggccaccgctgcgactgaggagcccttcccttgtcacggtctcctgccgaagaaggagaccggagccgcctccttcctctgccgctacccggagtatgatgggcggggggtgctcatcgcagtcctggacacgggggtcgacccgggggctccgggcatgcaggttacaactgatggaaaaccaaaaatcgttgatatcattgatacaacaggaagtggcgatgtgaatactgctacagaagtagagccaaaggatggtgagattgttggcctttcaggaagagtgcttaaggttgaagtacaatggcacaatctcggctcacctcgacctctgcttcctgtattcaagtgattcttctgcctcagcctcccgagtagctgggattacaggcatgcgccatgacacttggctaattttttgtgtgtttttagtagagatggaattttgccatgttggccaggctggtctcaaactcctgacctcaagtgatccacccacctcgacctcccaaagtgctggtattataggcatgagccaccatgcctggcctcatttatttttaaatagctgcagtaatcccggctttagattaaagcacatgaactaataatatcactagtgttcaacaggtagaactcatattgtggtaccatatgtattgctattagatacacgtcaacacaacttacacgacaaaaaaag

SEQ ID NO: 40883 - DNA, 582 bp, Homo Sapiens
gtccatggccaccgctgcgactgaggagcccttcccttttcacggtctcctgccgaagaaggagaccggagccgcctccttcctctgccgctacccggagtatgatgggcggggggtgctcatcgcagtcctggacacgggggtcgacccgggggctccgggcatgcaggttacaactgatggaaaaccaaaaatcgttgatatcattgatacaacaggaagtggcgatgtgaatactgctacagaagtagagccaaaggatggtgagattgttggcctttcaggaagagtgcttaaaattcctgcaagctggacaaatccctcaggcaaatatcatattggcataaaaaatggctatgacttctatcctaaggcactcaaggaaaggatacagaaagaacggaaggaaaaaatctgggaccctgttcacagagtggcccttgcagaagcctgtagaaaacaggaagaatttgatgttgccaacaacggctcttctcaagcaaataaactaatcaaggaggaacttcaaagtcaagtgagaatgctaaattcttttgagaaaaaaaacagcgatcctggccc

SEQ ID NO: 40884 - DNA, 745 bp, Homo Sapiens
  misc_feature (727)..(727): n is a, c, g, or t
  misc_feature (745)..(745): n is a, c, g, or t
ctcagggtctgccaaggtgggggtcaagggccatgggggcaggtagctctgcctgcaaagcccacaagcatgtcagatcacctgggctgcagacagacaaacacctgagctgttctgaataccttcaggttcctggcctccctgagcaagtgcagaaatttttaccttcaaggatcagggtttttctgtttgtttgttttttaacacacacatatgtgaacaaagagtatgcgtttgtactggcagaagaagcgtctggtaagacaaccagcaagttaacaatggtcacctccagaaatgggctgggtaaaccaaagaatttttttgtttttgttttttttgagtcaggctctagctctgtcacccaggctggaacgcactggtgtgatcacggctcactgcagccttgacctccctggctcaagcaatcctcccagctcagcctcctgagtcgttgggactacaggcacgtgccaccacgcctgacacattttttaaatttttgtagagacagtgtttcaccatgttgcccaggcaggtctcaaactcctgggctcaagtggtcctccagcttcagcctcccaaagtgctaggattataggtgtgagcccacagtgcccagccccgtagtggagaatttctgttgaatgaaccaaaagcaacttgccaacctctccatgcaccatgtgtttcagaggagaaagcacagtgaagaatgcagtgtgtnctgaggtccctgttcacn

SEQ ID NO: 40885 - DNA, 564 bp, Homo Sapiens
ggtaaaccaaagaatttttttgttttacccagcccatttctggaggtgaccattgttaacttgctggttgtcttaccagacgcttcttctgccagtacaaacgcatactctttgttcacatatatgtgtgttaaaaaacaaacaaacagaaatgggctgggtaaaccaaagaatttttttgtttttgttttttttgagtcagggtctagctctgtcacccaggctggaacgcactggtgtgatcacggctcactgcagccttgacctccctggctcaagcaatcctcccagctcagcctcctgagtcgttgggactacaggcacgtgccaccacgcctgacacattttttaaatttttgtagagacagtgtttcaccatgttgcccaggcaggtctcaaactcctgggctcaagtggtcctccagcttcagcctcccaaagtgctaggattataggtgtgagccacagtgcccagccccgtagtggagaatttctgttgaatgaaccaaaagcaactgccaacctctccatgcaccatgtgtttcagaggagaaagcacagtga

SEQ ID NO: 40886 - DNA, 955 bp, Homo Sapiens
  misc_feature (732)..(732): n is a, c, g, or t
  misc_feature (756)..(756): n is a, c, g, or t
  misc_feature (798)..(798): n is a, c, g, or t
  misc_feature (814)..(814): n is a, c, g, or t
  misc_feature (822)..(822): n is a, c, g, or t
  misc_feature (824)..(824): n is a, c, g, or t
  misc_feature (829)..(829): n is a, c, g, or t
  misc_feature (833)..(833): n is a, c, g, or t
  misc_feature (851)..(851): n is a, c, g, or t
  misc_feature (883)..(883): n is a, c, g, or t
  misc_feature (900)..(900): n is a, c, g, or t
  misc_feature (948)..(948): n is a, c, g, or t
ataacagcggtcggtccgattccgggataaggattcagggagcaggcgatgcccaaagcgtggagaccagcactgctctctccccagtgacaggtgcacgcccagatcacggatgtgtcgggaacagctgtgctcctgctgctcagcgtccgtcactccaggctgggagcgggtccccaagcttctggctgggcctatccgtctccactctcagtgtgggggtggggggcgccaacagcacgcatttgctctctgcacttctcgtctgataatgggcagagggtccttctgcagccccaaaacatccctaggcaggagccctggggccccaagcagccagggaggtgagcaccaaggacctcccagagagcgtcaccttccgtcgagggaggcccagcctgggggcggtgtctgagacttggaatcaacgcttccgttggtggcagtaaatcctgtccctaaccctgcagtacagctgtgccgtgtacaggagggtgctgtctgacgccagacacctggactacagatcgcagcctgattcctggtcattgctccactgaaccccagaccccagcctcgttctgggccctcatcccctagatccagggaccccagccccatttcagcccttgggcccttgtaggatgcgaggccctgggccccagcccccagcccatccgtggcccaggcactggggggctgaggtcctctgagaagggacacagggcctgnggggctctctcagcccatcagcangagaagactgactccagaaaaatcagcgtttgtaccactcangctgcaaagactgtgntcgtcttncnagctncacntcagagtcatgaagcccntgccagatgtcacagagtcatgagccctgccngatgtccattgaactcnaccgagccatcagtaacagaggaatggctgatactgcaagaacgctcnatgctgc

SEQ ID NO: 40887 - DNA, 581 bp, Homo Sapiens
atacgctgggcgcgtcccgggggtcacgtggtgcagagcacgcagagtccttctgtcggttggtcctggagcggcgcagccggagtggggccgtgaggagaataaaggcagccccgttgatgactgaaaatgacaaagcatccacctaacagacgaggaatcagctttgaagtgggagcccagttggaagcccgggaccgtttaaaaaactggtatccagctcacatagaagacattgactacgaggaaggaaaagtactcatccatttcaagcgttggaaccatcgttatgatgagtggttctgctgggacagtccttatttacgccctttagagaaaatacagctgaggaaagagggcttgcatgaagaggatggatcttctgaatttcaaataaatgagcaggtccttgcttgctggtctgattgtcgtttttacccggccaaagtcactgctgttaacaaggatggtacttacactgtgaaattttatgatggagtagttcagactgtcaaacatattcatgttcaagcttttttccaagatcagaatattgggggttattggttaggcctaaagaa

SEQ ID NO: 40888 - DNA, 731 bp, Homo Sapiens
  misc_feature (728)..(728): n is a, c, g, or t
cataccttctattgaagaatttgttatcaggaaactaccagtcctgctttacaggaagtctgttatcagatatcagatggcaagttccccatgtcttcagatgttcaaacaatattgtggatggtctagaaagagtttaagacatgctgttaaatgtagggctagataattctctgattctttgatgtagtctggaaagaaacaatccattgtccagttaataaatatttagtgttttcatttttaagacactcacaatccacaaatgtccctagcaatttattatttttaaagaaaatgactttttattccttgctagtgaaaaatgtacaatttatatgctgcactgagaaaaataacagatatactttcttccattcattttcatcccaaacatataaaaaataatccattgattgttccttgcattgcatatcttattaaaagatatttcctacatgcaactaataagacatgctgactgttgtcagctctaaatttatgtaaagattttttatttttgttaaaatgtttgaaatttgctttttgctccacacctcacctgtttttgataaatctgtgctaataagtacataggaggtaataaataattgagttgtgagaaacccaattctccatttttcaagaaaacacaagtagcactactctctttatcccttgggactccttcctgtaatttgaaagggggggctaatggtggtggcagntgt

SEQ ID NO: 40889 - DNA, 400 bp, Homo Sapiens
gtataattggctgggtgtggtggtgcacaccggtgatcccagctacttgggaggctgaggagttcaaggctgcagtcagctatgatcatgcccctgcactccagcctgggtaacagagtgagaccctgtctctaaaaaacgaaaaaaactcagcaggttattctgtggatattagcaaactgattgtaatgtttataaggagaggtaaaaggcccagaacagtcaactcaatattgaaagagaagagcaaggttggaggacccatagtacccaatttcagtacttttactataaagccacagtaatcaaggccacgtggtattggtcaaaaaacagaaaaaatagatcaatgaaacagaacagagagcccagataaaaacctgcataaacatatgcaact

SEQ ID NO: 40890 - DNA, 686 bp, Homo Sapiens
ttctgtgataggaaggcaggactcctgaatgggaagggggtaagggcatgatgagtgtgtcatcatccagagaagaggggtacgggagccccagtatttcagaatatgggaagggggtaagggcatgatgagtgtgtcatcatccagagaagaggggtacgggagccccaatatttcagaatatgggaaggggttaagggcatgatgagtgtgtcatcatccagagaagaggggtacgggatccccaatatttcagaatatgacctcaagccaggaggaggcttcctcctctccaggtaacttcagtctctcttggccacagataaagcagaccatcttggtgagaaatggaatgagccctctgttactttgtaaaagcaagaatgggccaggcgcagtggttcatgcctgtaatcccagcactttgggaggctgaggcgggtggatcacctgaggtcaggagttcgacaccagcccggccaacatgatgaagcctcgcctctactaaaaatacaaaagattaactgggcatggtggcgggcacctgtaatcccagctactcgggaggctgaagcaggagaatcacttgagcccaggaggcggaggttgcagtgagcggaggttgcgccattgcactccagcctgggtgacaagagtgaaactccatctcaaaaaaaaaaaaaaag

SEQ ID NO: 40891 - DNA, 865 bp, Homo Sapiens
  misc_feature (650)..(650): n is a, c, g, or t
  misc_feature (706)..(706): n is a, c, g, or t
ggcttaatagctgtaggtccagtgtaagagttccgctattcggtctcacacctacagtggactacccgatttttcgcttctcttcagggatgagtcatgtggtggtgaaaaatgaccctgaactggaccagcagcttgctaatctggacctgaactctgaaaaacagagtggaggagcaagtacagcgagcaaagggcgctatatacctcctcacttaaggaacagagaagcatctaaaggtacgtctttaaggcaactttgtagacctaacctttagcagctaatcaaagcctagggaagaaagtaactttaggaggtctataaatgtttttggtcccctcctgtgcctctttcagactgtctttaagaactagcactttctgttttgtggaacagttggtataatgttgaatgatggatagttgtttccttgtggcaaactgagcccaaagaatctgagtttgtatagtggtttatctgttggtaaaccatttatgttttgaaatttgaaaaccagtgtatttgtggaccacaaacaacaccaaaaaaaaaaaagttgtttgcgcgccctgggacccaggaaaagtttttcgaacccatgcgtctggggcgggcaccagatgagttatggaactgggtcacagctggncccaagagaaaaccgctcagcacatggtgcggtttcccctaaaaaaagcgcggggnccccgtgtcggaccaccgaaggctgcggggtcaaggttcaccacagggccaggtgctacccctccgcgcgctgcgaaacacgacaaccacgaaagacggaaaacacaacgacagaacaggacgaccgagacaaacaaccgacgagctcaagaaacagaa

SEQ ID NO: 40892 - DNA, 785 bp, Homo Sapiens
cgcttaatagctgtaggtccagtgtaagagttccgctattcggtctcacacctacagtggactacccgatttttcgcttctcttcagggatgagtcatgtggtggtgaaaaatgaccctgaactggaccagcagcttgctaatctggacctgaactctgaaaaacagagtggaggagcaagtacagcgagcaaagggcgctatatacctcctcacttaaggaacagagaagcatctaaaggattccatgataaagacagttcaggttggagttgcagcaaagataaggatgcatatagcagttttgggtctcgagattctagaggaaagcctggttatttcagtgaacgtggaagtggatcaaggggaagatttgatgatcgtggacggagtgactatgatggtattggcaatcgtgaaagacctggctttggcagatttgaacggagtggacatagtcgttggtgtgacaagtcagttgaagatgattggtcaaaaccacttccaccaagtgaacgcttggagcaagaactgttttctggaggaaacacggggattaactttgagaaatatgatgatataccagtagaggcaaccggcagtaactgtcctccacatattgagaattttagcgatattgacatgggagaaattatcatggggaacattgaacttactcgctatactcgtcctactccagtgcaaaaacatgccattcctattattaagggaaaaagagacttaatggcttgtgcccaaacaggatctgggaaaactgcagcattt

SEQ ID NO: 40893 - DNA, 438 bp, Homo Sapiens
cacagccttgtagccgggagtcgctgccgagtgggcgctcagttttcgggtcgtcatggctggctacgaatacgtgagcccggagcagctggctggctttgataagtacaagcccccgaaaggatggagttccttctgttgtgtcaatcgccttcattttagtgaagtttccactcgcctgtcatgcatacaacttcggaggaggagatgatcgtttggcagatgaggcccgggaggggagcgacttgccgatgccatcctgctgatgtctccacttctgctcccggcagggacttcctaagcggcagcttgtggcgctagggccaccagatgaaagggaggtgcacaggaaggagctgtggagtggaaagagcgcgggctttcgagcacatacaaacctgattacaaaagtcagatttctttaaaaaaaaaaaaaaa

SEQ ID NO: 40894 - DNA, 550 bp, Homo Sapiens
cacgagggttacaagaaattcgggaatcccttaggaatttatctaaaccatctgatgctgctaaggctgagcataacatgagtaaaatgtcaaccgaagatcctcgacaagtcagaaatccacccaaatttgggacgcatcataaagccttgcaggaaattcgaaactctctgcttccatttgcaaatgaaacaaattcttctcggagtacttcagaagttaatccacaaatgcttcaagacttgcaagctgctggatttgatgaggatatggttatacaagctcttcagaaaactaacaacagaagtatagaagcagcaattgaattcattagtaaaatgagttaccaagatcctcgacgagagcagatggctgcagcagctgccagacctattaatgccagcatgaaaccagggaatgtgcagcaatcagttaaccgcaaacagagctggaaaggttctaaagaatccttagttcctcagaggcatggcccgccactaggagaaagtgtggcctatcattctgagagtcccaactcacagacagatgt

SEQ ID NO: 40895 - DNA, 406 bp, Homo Sapiens
  misc_feature (344)..(344): n is a, c, g, or t
  misc_feature (349)..(349): n is a, c, g, or t
  misc_feature (370)..(370): n is a, c, g, or t
ctgagaagctcatgaagaacagaacagtgaagcttacactgaagcagtaagttatgcttttgggacatggtacattatttgaagatttaagttaaagaaacttcttttccttttcattatgtgaattctaaacatttatttgaacatgactccagcataccttaagttgtattttccaaacgtcaccttttatatatcacacaaattaaacagttccattaggccatgctgaggattcgacttacacttcaaaactaatttaggctgtgaggactagttcagggagccaaatattccattttatattcttataatttgctgttttaattttttcttttggaaantatcnggaccccttaataggtataangtaaattggttagggccggggacggcgtctcacacc

SEQ ID NO: 40896 - DNA, 724 bp, Homo Sapiens
catgaacggaattgtcatggtttcctgatagcattacctggaattggaagaatcggttgaggaccctggaatgttgaaacagaagtccttcctctcatttcttctgtgttgccaagaactatttttccaacaagtaccatatctttcgaacatttggtaaagttgtgaaatcattttctattttaaaaattattattattagtttcttccagtttcataaaaatgtgtgtttgatgacttagaaaagctgtaaagtaaggcatagtaacttgtaaatacgtctataaatatttggacaatgacttaactttagaattgcttcaactagagtgtatgtatatatagatagatagatacatagtctctccatatatctatatacacacacaatggaatattattctgccacaaaaagaaggaaatcttgtttgtgccaacgtggatgaacctggaggacattaggctaagtgaataaggcaggcacagaaaggcacataaccacatgatctcacttatatgtggaatctaaaaaagttgatctcgtagaactagattgtagattagggggtggggtaggtgtggtggggtggaggttgttggtcagaggatacagtttcagctggatagaataagttctaaagatcaattgtgaaaccgtgatgactataataatacagttgacccttgaacaacataggttctaactgggtgggacattatactg

SEQ ID NO: 40897 - DNA, 456 bp, Homo Sapiens
tggtctcgatctcctgacctcgtgatccgcccgcctcggcctcccaaagtgctgggattacaggcgtgagccactgcgcccggcctgttgtacagttattaaagttatcatttaacatggaagaagatgagttcattggagaaaaaacattccaacgttattgtgcagaattcattaaacattcacaacagataggtgatagttgggaatggagaccatcaaaggactgttctgatggctacatgtgcaaaatacactttcaaattaagaatgggtctgtgatgtcacatctaggagcatctacccatggacagacatgtcttcccatggaggaggctttcgagctacccttggatgattgtgaagtgattgaaactgcagcagcgtccgaagtgattaaatatgagtatcatgtcttatattcctgtagctaccaagtgcctgtactttacttta

SEQ ID NO: 40898 - DNA, 640 bp, Homo Sapiens
  misc_feature (637)..(637): n is a, c, g, or t
  misc_feature (640)..(640): n is a, c, g, or t
gggtcaggagttcgagaccaggctgaccaacatagtgaaactccgtctctactaaaaaatacaaaaaaaattagccaggcgtggtggcgggcgcctgtaatcccagctacttgggaggctgagacaggagaatcgcttgaacccaggaggcagaggttgcagtgagctgagatctcgccattgcactctagcctgggcgacaagagagaaactccgtctcaaaaaacaaaaacaaaaacaaacaaaaaagaaacaactggtttatcatattattcacatgccatacaatttactgtcttaaagggcataattgaatggtttttagtatattcacagttatgcaataattaccactatcaattttagaacattttcatcaccccaaagagaaacttgatacccattaacaatcactcctcactctccatttcccttagcccctggcaaccaccagtctatttttttgtatctattgatttgcctattctgggacatttcatataaatagaataatatctgtaatcctagcacttttgggaggccccaagtggggtggatcttttgaggtcagaaagtttgagacccagcctggcccacgtgggtaaaaaccccctatctcctacccaaaaaatccccnccn

SEQ ID NO: 40899 - DNA, 866 bp, Homo Sapiens
  misc_feature (607)..(607): n is a, c, g, or t
  misc_feature (796)..(796): n is a, c, g, or t
  misc_feature (800)..(800): n is a, c, g, or t
  misc_feature (802)..(802): n is a, c, g, or t
  misc_feature (805)..(805): n is a, c, g, or t
  misc_feature (807)..(807): n is a, c, g, or t
  misc_feature (817)..(819): n is a, c, g, or t
  misc_feature (838)..(838): n is a, c, g, or t
  misc_feature (843)..(847): n is a, c, g, or t
cattttctggaatttaagggtgttgcattatttcatcaatcatttgttgacaaaaaagaaaaactaaaaaataaatttaaaatgtgaaccttcaggtattgagtaacacctttatcttggtatagaactgatacttttttttgattttgaaatatctgataataatttggaatgaagtaaggttctgttaaaatatatttgaagaccctttaaagcagtgaatctgaaacaattttcacacccttaagtggttgatacgtacctattttaggtattttgaggtatttaccataaactaaatttagaaattttttagattcacttgaagtaaacattacaaacattggatacggtggggttttctttagattttacttgagagaaggtgagtacaaagcaatttgcagttgttgtaatgacaagattactgcgcaagtgtgaatccaaacagtatagcttttaaattttaaagcatttggtaaattatcgctgagtttttttctgttgccaatagcaaactgcttttccattaatggagaattcatgcctttcaagcattttaaatatgacaatatttataaatgtatggtttggaggaatcgtttanattctctttcctaattttctttcttttgaagatagattctttcaacaagtaatttgtagtaatgactgtgttgacttcaattttggagcgcagtagctatgttaaagatgaactatttggtctcattgaagccaacacagaacttgctgctgtgttttttcttcagtgataataaaatacttaccgaanaaananaananaaaaaaaaannnaaaacccaaacccaaacancccannnnnagggggggccggcctaaaa

SEQ ID NO: 40900 - DNA, 586 bp, Homo Sapiens
atgaccgtcgccgtgagagggatgaccggcgtgatctaagagaaagacgagatctaagagacgacagggaccgaagaggacctccactcagatcagaacgtgaagaagtaagttcttggagacgtgctgatgacaggaaagatgaccgggtggaagagcgggaccctcctcgtcgagttcctcccccagctctttcaagagaccgagaaagagaccgagaccgagaaagagaaggtgaaaaagagaaggcctcatggagagctgagaaagatagggaatctctccgtcgtactaaaaatgagactgatgaagatggatggaccacagtacgacgttaagtctcaagataatggatttaaactggtgtcttaaataggtttgatcacattcaaggattattatacttgtgcttcaaccaatctaaattggattctttaatgttgtttcaccataacacaaaaagcatgaacttgtattaatcctatataatagattgatcatgcaccatatccacaggaggttggaaaaaccatgccattttctggaatttaagggtgttgcattatttcatcaatcatttgttgac

SEQ ID NO: 40901 - DNA, 1094 bp, Homo Sapiens
  misc_feature (912)..(912): n is a, c, g, or t
  misc_feature (944)..(944): n is a, c, g, or t
  misc_feature (966)..(966): n is a, c, g, or t
  misc_feature (1002)..(1002): n is a, c, g, or t
  misc_feature (1074)..(1074): n is a, c, g, or t
  misc_feature (1093)..(1093): n is a, c, g, or t
tccatcacctggtcccaatcatacttctaatagtagtaatgcatcaaatgcaacagttgtaccacagaattcttctgcccgatccacgtgttcattaacgcctgcactagcagcacacttcagtgaaaatctcataaaacacgttcaaggatggcctgcagatcatgcagagaagcaggcatcaagattacgcgaagaagcgcataacatgggaactattcacatgtccgaaatttgtactgaattaaaaaatttaagatctttagtccgagtatgtgaaattcaagcaactttgcgagagcaaaggatactatttttgagacaacaaattaaggaacttgaaaagctaaaaaatcagaattccttcatggtgtgaagatgtgaataattgcacatggttttgagaacaggaactgtaaatctgttgcccaatcttaacatttttgagctgcatttaagtagactttggaccgttaagctgggcaaaggaaatgacaaggggacggggtctgtgagagtcaattcaggggaaagatacaagattgatttgtaaaacccttgaaatgtagatttcttgtagatgtatccttcacgttgtaaatatgttttgtagagtgaagccatgggaagccatgtgtaacagagcttagacatccaaaactaatcaatgctgaggtggctaaatacctagccttttacatgtaaacctgtctgcaaaattagcttttttaaaaaaaaaaaaaaattgggggggttaatttatcattcagaaatcttgcattttcaaaaatcagtgcaagcgccaggcgatttgtgtctaaggatacgatttttgaacatatgggcagtgtacaaaatatgaaacaactggttcacacttgcaccctgatcagacagtgctttctcatttgntttgcagagaaatggttttcatttcccgcggngtttcaacttcccctctgaaantctgattttatccaatttttttaagggctcctcttnatctccctttcttaaaggcactggttgctatggcaactttcctataaacctttttcattcccgtgggaacgnaaacctttaaaaatggcang

SEQ ID NO: 40902 - DNA, 613 bp, Homo Sapiens
ctgcctacgttagagttagatttcaaggcgagtcagcaaacccatcctttctgctcagtctcccgtactgttctcccaagttctttgttctgggagtcagaacccaagtgcaagaggagggcagaagagtctgatgctgttactttgcgatcctgctcttggtttccactgtccaggccatacaactctgtctactcccattagtatttaccaacaggtgttaaaggaaagctgaacaagcagcctactcaccgatctgctaggtggtcttccatgttcatggtggcttctgcagtttcattgagagtaacattgctgttaatacagatagatccagtagtagagacatcatcggtccaaaagactttgcatctcattagttgtccatagtgactaccaggaggtggctggcatctataacgtgtgggacgtttttatgtaaagaactgcctgtgtttttttttttaaccaaagacactgaccatagattgacttatacttttataagtctaattgaaatacttggggtactatgaaaggactgttccttgagtggctacgattagaaaatcaggactaacaaacttttctttgtctggaagcatatatattt

SEQ ID NO: 40903 - DNA, 549 bp, Homo Sapiens
ccatattggccaggctggtctcgaactcttgaccttgtgaacagagctagtcagatgtgaattgtatctgttgtaataaacatgttaaaacaaacaaaaattgttatttttcttttccttcggtcagtgcacattagcatttgaactacctggggattctttatcagaactgttcttgttgaatatttatacttaattgaaataattccttaagggaggttttgtttaaaacgtattaacaggaaattgtgtatgagatatttaatgaaataagaaattcaacaagaatgattaagtcacttcccaagtggttgtcatttgttaaaccctggtttacctgtcttgctattatgacatttcatttggaaggatgtttgtgttgtagctaactgttcaagtctggtgctgactgctgttcttagccatcacaaaacgctaaatttgtgtaattggagcttcctgctgttatctggaaatagcaggaaagcgcagctttgtatattgtttcctaaagtatattaaaataaaaaaagaaactattgctactat

SEQ ID NO: 40904 - DNA, 876 bp, Homo Sapiens
  misc_feature (811)..(811): n is a, c, g, or t
atgaaacttatcatcaattcattgtataaaaataaagagattttcctgagagaactgatttcaaatgcttctgatgctttagataagataaggctaatatcactgactgatgaaaatgctctttctggaaatgaggaactaacagtcaaaattaagtgtgataaggagaagaacctgctgcatgtcacagacaccggtgtaggaatgaccagagaagagttggttaaaaaccttggtaccatagccaaatctgggacaagcgagtttttaaacaaaatgactgaagcacaggaagatggccagtcaacttctgaattgattggccagtttggtgtcggtttctattccgccttccttgtagcagataaggttattgtcacttcaaaacacaacaacgatacccagcacatctgggagtctgactccaatgaattttctgtaattgctgacccaagaggaaacactctaggacggggaacgacaattacccttgtcttaaaagaagaagcatctgattaccttgaattggatacaattaaaaatctcgtcaaaaaatattcacagttcataaactttcctatttatgtatggagcagcaagactgaaactgttgaggagcccatggaggaagaagaagcagccaaagaagagaaagaagaatctgatgatgaagctgcagtagaggaagaagaagaagaaaagaaaccaaagactaaaaaagttgaaaaaactgtctgggactgggaacttatgaatgatatcaaaccaatatggcagagaccatcaaaagaagtagaagaagatgaatacnaagctttctacaaatcattttcaaaggaaagtgatgaccccatggcttatattcactttactgct

SEQ ID NO: 40905 - DNA, 670 bp, Homo Sapiens
agtgttgttgcttacatttagcactaaattttaacacagggtcagtgagtccaggttttaacttcttcatgcctggatgggataaaatgtaattcattgttaaattaattcatatttgtatttattaatcactgtgacaacattaaccatttgttcttaccaggaagtggtcagattatcatctgagttacagttagactggctaagtttggtattagatcaaggggaatgtccagtaaacagagaggtaagcatgatggaaataatgaagtggggtacacaggaaaaacctgactagtgaggaggagcagctgagagatagggtcagtgaatgcggttcagcctgctacctctcctgtcttcatagaaccattgccttagaattattgtatgacacgttttttgttggttaagctgtaaggttttgttctttgtgaacatgggtattttgaggggagggtggagggagtagggaagtggccttttacaagaattttgatgcataagtgtctattgtagggtttggatgatctagtaaagtgttttagaacccctttttatcccatgcaccattcagtaaacataaaaatcacaattctgctaatgtcatttggaacttcaaataaatatctgtctaaaacaaaaaaaacctccacaaccaacaaaagcg

SEQ ID NO: 40906 - DNA, 616 bp, Homo Sapiens
ggcttccttgctaatgcaccattagaagatattagtcttggggcaggatgattttggcctcattactttaccacccccacacctggaaagcatatactatattacaaaatgacattttgccaaaattattaatataagaagctttcagtattagtgatgtcatctgtcactataggtcatacaatccattcttaaagtacttgttatttgtttttattattactgtttgtcttctccccagggttcagtcctcaaggggccatcctgtcccaccatgcagtgcccctagcttagagcctccctcaattccccctggccaccaccccccactctgtgcctgaccttgaggagtcttgtgtgcattgctgtgaattagctcacttggtgatatgtcctatattggctaaattgaaacctggaattgtggggcaatctattaatagctgccttaaagtcagtaacttacccttagggaggctgggggaaaaggttagattttgtattcaggggttttttgtgtactttttgggttttttaaaaattgtttttggaggggtttatgctcaatccatgttctatttcagtgccaataaaatttaggaagacttcaaaaaaa

SEQ ID NO: 40907 - DNA, 522 bp, Homo Sapiens
  misc_feature (505)..(505): n is a, c, g, or t
gaatgtaccagggattgagttaggggagttggacagccccggctcctataggagtcctacttctctccagcatcctgtgccatcctcttgacgtaatcgctgtacattgtgtacacagcacctgtgtgagagaaaagaaataatgccccttggcatcaaacccttcacccgtcctctggctctcaggcgtcccaggggttcacctctagctgctcccttgagagtccagcttcccgctcatctttctgccccaggtcccaacagctgcttcaagcatctgaccacacaacctggggaaaccacttatctgacagttcacgaaacactttcacatgtattgtgtatctgagaaacctcacagcagcctgcaaggtaggcaggccaggggtggttattgtcatgttacacatcaggaaactgaggctcagtgagaaagatttgtccactgtcacacagttagcaagtggctgtctgctttttaatctcaagaggaagagaaattcanaaaaaaaaaaaaaaaaa

SEQ ID NO: 40908 - DNA, 1132 bp, Homo Sapiens
  misc_feature (630)..(630): n is a, c, g, or t
cttccaatcggactccacccagggacagtcttttctctgtctgtcttccaccactggcagattgtgcctggtgatcccctggacaagagcattgtcatccgccccttggagccacagccagctcctcacctggcccgggaattcatgatcaaaacccgccgtaggaagggcctcagtgaagatgtgagcatcagcaaattcttcgatgatcctatgttgctggaacttgccaaacaggatgttgtgctcaattaccccatgtgagtgcgtggactcctgggagctcctgctccctacagtgggctgcaactcctgtacttgaagctgagacctcatatgacgtggccttcgtgttgtcagagagtgtctggaagctgctgttgccatcttgaacaactcaccaacctccaacccagagccccagtgagagaggagcatttggcctcctgcttccttctgtggcctctgccgggctccattcccaaggaaaagagaggagcttgggctcacagaaagagaaggggatgaaaccccaaggggccctatctttgggatttacatggaattttattttctacaagtttgaccttagccatggtttgcaagtgaacagaacattctgacctctantacgccacgcccccacccgcgattttctattattccgcattccgcacccattaccttatgacacaacttttcagggggggccgccctaaaaaaatccccccggggggcccaagtttacccgcaaaccaaatttttcttggaaaaaggggccccccatttgggggttcactttagacattcttgcacctggtaccccccttttacactatatatcgagtgccccacaaacgccacccctgtacaattctttgaaccgaaacatcaccttctctgagtggagaccctcataccggcgccgctatctctcttccgccccatgtcgtcaccaccacgccgttaaaccaatatacccccccaccacacttctatacttggggacgccatagattttagcagttaacaccgctaaaccctcctaacccctcccactttacacgcccacttcatcccacgcctcaccatatagactaccgctcagcctttacgggccctttcctctcgg

SEQ ID NO: 40909 - DNA, 728 bp, Homo Sapiens
cgggtgtctggaggctgtggccgttttgttttcttggctaaatcgggggagtgaggcgggccggcgcggcgcgacaccgggctccggaaccactgcacgacggggctggactgacctgaaaaaaatgtctggatttctagagggcttgagatgctcagaatgcattgactggggggaaaagcgcaatactattgcttccattgctgctggtgtactattttttacaggctggtggattatcatagatgcagctgttatttatcccaccatgaaagatttcaaccactcataccatgcctgtggtgttatagcaaccatagccttcctaatgattaatgcagtatcgaatggacaagtccgaggtgatagttacagtgaaggttgtctgggtcaaacaggtgctcgcatttggcttttcgttggtttcatgttggcctttggatctctgattgcatctatgtggattctttttggaggttatgttgctaaagaaaaagacatagtataccctggaattgctgtatttttccagaatgccttcatcttttttggagggctggtttttaagtttggccgcactgaagacttatggcagtgaacacatctgatttcccacagcacaacagccctgcatgggtttgtttgtttttttactgctcactcccaaccttttgtaatgccattttctaaacttatttctgagtgtagtctcagcttaaagttgtgta

SEQ ID NO: 40910 - DNA, 579 bp, Homo Sapiens
  misc_feature (11)..(11): n is a, c, g, or t
ttaaggaaggntacctgtttatgtataatcttgtgcaattcttgggattctcctggatctttgtcaacctgactgtgcgattctgtatcttgggaaaagagtccttttatgacacattccatactgtggctgacatgatgtatttctgccagatgctggcagttgtggaaactatcaatgcagcaattggagtcactacgtcaccggtgctgccttctctgatccagcttcttggaagaaattttattttgtttatcatctttggcaccatggaagaaatgcagaacaaagctgtggttttctttgtgttttatttgtggagtgcaattgaaattttcaggtactctttctacatgctgacgtgcattgacatggattggaaggtgctcacatggcttcgttacactctgtggattcccttatatccactgggatgtttggcggaagctgtctcagtgattcagtccattccaatattcaatgagaccggacgattcagtttcacattgccatatccagtgaaaatcaaagttagattttccttttttcttcagatttatcttataatgatatttttag

SEQ ID NO: 40911 - DNA, 572 bp, Homo Sapiens
gctttttaaacctgtctgcagtaggacactgaaaacagcaagaacttcggggtgaacacccgctgatcctttaacaaggatttctggcaggaaactcacaaaaaggagaactgaaaatttagacatacagttggccattgtaaaaaacatcagtttcctctcatacattccaagtaaaccaagtaaaataagtgttggagtaacacttgcataaaagaatttaaggagtgatagctctttctgttctgccattcccaacattcctgggggaaaggagactcaatgagttaatactatttcactgagcccaagatggaaacttggtttgacctaaaacatctgattaatataggctagctgatttcttaaaaattcgttgcattgaaggatattttgcatgtctgtaacacctgtcaatacttgtttgtattgatttctgatattcttgcagctgactacgtgtaattgggcagatcagcttttcagtagattatgctgcatcctcgtggcaaaattctgtattcttagtgattgttacaaacccctttattgctgtctgagaaagtgaaaga

SEQ ID NO: 40912 - DNA, 480 bp, Homo Sapiens
gtgctggcattcggaggtgtacctttatcttcctttctagtgtctgaccctgcaagcctaatgttggtttgaacccttttggtttgttcagttgccagcctccatctctcccactgtatggccgtgcctagaccgatggcagccatcgaatattcctctgggctcacggggtgttttccacccccctgcagcaactaagatggtgggggagagggggttagaataaagcatctgaatacagttttcaggacctcaagcagacttcctagagacttgtttctgagacagttctttgccttcacttccctgctagctgggaaagaagagtggagcagagactctgcctggccactgagaacagccaaattcacaaaccctcagtggggctttgtttttggattttctccggactcatcagtaaacctgtagaagtgtcgctttccagccttttgtttctggatcctcaaaactcagaacgtg

SEQ ID NO: 40913 - DNA, 844 bp, Homo Sapiens
  misc_feature (49)..(50): n is a, c, g, or t
gccttccttcaattttatttttgttttcttaatgatgttaagcatttanntgctcactggaaacaaacaaaaagcagctgaaaaagtgcatcaactcctctttttctgagaaacatggagcagcgcacgcccaggcgatgccagtctgtgtgccgtgatgccgcactgtgttccccatgacagtggtccatcatcgtgcactcgtcatactcagaagtccaaagttcattcttctttaaagtagcctctataactctgtttattttataaatagtattccttatggctgccactcttatttacctttaaataatttctgaaatttaaccttttcagaatgcattgttgaaacaagataaagattgccttttttgaattttttaaattttgtttttaaaagcatataccaccttagttcattcatgtatcctggtaaagcatcttaatcagacttatttttaattactgaatatttcttagacgttttgggacagattttatgtaatctttataagtatgatttctgaagaaaagcaaatgcattagtatgtttgccttaaacttgtagactaaaccaagtattgtaaaataaacagcgataacagtgatagtttttaactctatggtcattgtatcactctggaaaatgtggagtagctgtaataaatctactcctgtattatgctttacagtgcaggtcttagtttttcttttttctcatttcttttgaaatggcatctcgaacaaagtccaccaatccctttacaaaagaatgaactgctcctctgtgtgtacttcatagaaagtggaatcggacagaggcaggttagtgacagttattcct

SEQ ID NO: 40914 - DNA, 825 bp, Homo Sapiens
cagctccgccatggctcctaaaggcagctccaaacagcagtctgaggaggacctgctcctgcaggatttcagccgcaatctctcggccaagtcctccgcgctcttcttcggaaacgcgttcatcgtgtctgccatccccatctggttatactggcgaatatggcatatggatcttattcagtctgctgttttgtatagtgtgatgaccctagtaagcacatatttggtagcctttgcatacaagaatgtgaaatttgttctcaagcacaaagtagcacagaagagggaggatgctgtttccaaagaagtgactcgaaaactttctgaagctgataatagaaagatgtctcggaaggagaaagatgaaagaatcttgtggaagaagaatgaagttgctgattatgaagctacaacattttccatcttctataacaacactctgttcctggtcgtggtcattgttgcttccttcttcatattgaagaacttcaaccccacagtgaactacatattgtccataagtgcttcatcaggactcatcgccctcctgtctactggctccaaatagaccatgtcagcttcaccccctggctttgtgtctatgggtggcctgtggtatatggaaaagtagcagggtggtcagggtgggagacacaagatgtttttatagtctagagcctttaaaaaacccagcagaatgtaattcagtatttgtttattggctgttttttgacagattgttgaaattaaatgaattgaaagggaaactcagagtactaggacgtttattaaaaggaaaaaaatgtcttgcaatgtgctgtaatc

SEQ ID NO: 40915 - DNA, 582 bp, Homo Sapiens
  misc_feature (541)..(541): n is a, c, g, or t
tcatacatgttattagttgttttctttataattttataaaaattattcatcgggagtttaacttccacttccatgctatcggatgtgttgggctccatgcaagaacttggaagaaaaacaggcaggaatgcatttgcataatgacccagatcatcattttctgcaactgagaattatatttcatcattgcttctagaagtctgcaattctttacttttctttggtgcattattatctaggtgccatcactggataatgtggagtgactagagaagtcatatatcactgtaaggtacagttagggtaacactttagaggtttattatttttaaaaaacttttcttgaactcctggccagcatggtgaaaccccgtctctactaaaaataccaaaattagccaggcgtgatggtgggtgcctgtgatctcagctacttgggaggctgaagcaggagaactgcctgaacccaggaggcggaggttgcagtgagtcgagatcgtgctactactgcctgggtggcaagggtgagactccatctcanaaaagaaacaaaaaaactcaaaaaggttttttttacttgtt

SEQ ID NO: 40916 - DNA, 847 bp, Homo Sapiens
  misc_feature (446)..(446): n is a, c, g, or t
  misc_feature (496)..(496): n is a, c, g, or t
  misc_feature (502)..(502): n is a, c, g, or t
  misc_feature (668)..(668): n is a, c, g, or t
  misc_feature (739)..(756): n is a, c, g, or t
  misc_feature (758)..(758): n is a, c, g, or t
  misc_feature (761)..(761): n is a, c, g, or t
  misc_feature (763)..(766): n is a, c, g, or t
gggggccaagcatatattgaactgagacatagggctcctgacggaaggcaacggctgcctttcagtgctccacctggcagcgttgtagaggcatcttctaatctgagacatggaaacttcattccccggccagactttccgggccctagacacacagaccccatgcgacgacctccccagggtctacctaatcagctacctgtgcacccagatttggaacaagtgccaccatctcaacaagagcaaggtcattctgtccattcatcttctatggtcatgaggactctgaaccatccactaggtggtgaattttcagaagctcctttgtcaacatctgtaccgtctgaaacaacgtctgataatttacagataaccacccagccttctgatggtctagaggaaaaacttgattctgatgacccttctgtgaaggaactggatgttanagaccttgagggggttgaagtcaaagacttagatgatgaagatcttgaanacttanatttagatacagaggatggcaaggtagttgaattggatactttagataatttggaaactaatgatcccaacctggatgaccctctaaggtcaggagagtttgatatcattgcatatacagaatccagaacttgacatgggagattagaaaagcatggtttaatganggaactagacctttccaattggatgataagtttagaataatccgagggtgggatcctggttgaacccggannnnnnnnnnnnnnnnnnanaanannnnaaaaacattgtcgggccggccttcgggccccttcggaaaaagcttttctaaagaaccaattctcttttgggcgcccggggg

SEQ ID NO: 40917 - DNA, 498 bp, Homo Sapiens
atctttgtttaaatgccaaaaatgtacttaaatgagttacttagaatgccataaaattgcagtttcatgtatgtatataatcatgctcatgtatatttagttacgtataatgctttctgagtgagttttactcttaaatcatttggttaaatcatttggcttgctgtttactcccttctgtagtttttaattaaaaactttaaagataagtctacattaaacaatgatcacatctaaagctttatctttgtgtaatctaagtatatgtgagaaatcagaattggcataatttgtcttagttgatattcaaggctttaaaagtcattattcctgggcttggtaagtgaatttatgagatttactgctctagaaagtatagatggccaaaggaccgttttgtattgcttcctgattaccagtctgattataccatgtgtgctaatatactttttttgttatagattgtcttaatggtaggtcaagtaataaaaagagatg

SEQ ID NO: 40918 - DNA, 888 bp, Homo Sapiens
taacttgcactaaatacatttaaatacttgattccatgagtcagtttattgtagtttttgatttctgtaaaataagagaaacttttgtatttattattgaataagtgaatgaagctatttttaaataaagttagaagaaagccaagctgctgctgttacctgcagaactaacaaaccctgttactttgtacagatatgtaaatattttgagaaaaaatacagtataaaaatagttattgaccaaatgctaccaggctctgcagcagctcgggggcttataaaatgttcatagggatgttacaatataattttgtgttataaaatatgccattataattatgtaataaccaaaatttcaacctagagtgttgggggttttttggaaaccgcagtctattagtactcaatggttttatacaccttacttctgacagagcggggcgtatgctacgactacaacttttatagctgttttggtaatttaaactaattttttcatattatattgttgcatccctacttcttcagtcaggtttttttgtgcttacaatttgtgataactgtgaataactgcttaaaaatacacccaaatggaggctgaattttttcttcagcaaaagtagttttgattagaactttgtttcagccacagagaatcatgtaaacgtaataggatcatgtagcagaaacttaaatctaaccctttagccttctatttaacaccaaaatttggaaaaagtaaaaaaaaaaaggagatgggattatgcttacgcctgcaggactctggcaataggggtttttggaaaatgtaattttaaaaaggggttggatgaactgtttggtttactttccttaaaaaaaaaaacccggtcttgggcttggctggaa

SEQ ID NO: 40919 - DNA, 813 bp, Homo Sapiens
gtctatgttaacaatgaatgggcaaccagtgttggggaaggagggagctttggagaacttgctttgatttatggaacaccgagagcagccactgtcaaagcaaagacaaatgtgaaattgtggggcatcgaccgagacagctatagaagaatcctcatgggaagcacactgagaaagcggaagatgtatgaggaattccttagtaaagtctctattttagagtctctggacaagtgggaacgtcttacggtagctgatgcattggaaccagtgcagtttgaagatgggcagaagattgtggtgcagggagaaccaggggatgagttcttcattattttagaggggtcagctgctgtgctacaacgtcggtcagaaaatgaagagtttgttgaagtgggaagattggggccttctgattattttggtgaaattgcactactgatgaatcgtcctcgtgctgccacagttgttgctcgtggccccttgaagtgcgttaagctggaccgacctagatttgaacgtgttcttggcccatgctcagacatcctcaaacgaaacatccagcagtacaacagttttgtgtcactgtctgtctgaaatctgcctcctgtgcctcccttttctcctctccccaatccatgcttcactcatgcaaactgctttattttccctacttgcagcgccaagtggccactggcatcgcagcttcctgtctgtttatatattgaaagttgcttttattgcaccattttcaatttggagcattaactaaatgctcatacacagttaaataaatagaaagagttctatgga

SEQ ID NO: 40920 - DNA, 901 bp, Homo Sapiens
gagaatcatgtaaacgtaataggatcatgtagcagaaacttaaatctaaccctttagccttctatttaacacaaaaatttgaaaaagttaaaaaaaaaaaggagatgtgattatgcttacagctgcaggactctggcaatagggtttttggaagatgtaattttaaaatgtgtttgtatgaactgtttgtttacatttctttaataaaaaaaacactgttttgtgtttgcttgtagaaacttaatcagcattttgaaccaggttagctttttattttgtacttaaaattctggtactgacacttcacaggctaagtataaaatgaagttttgtgtgcacaattcaagtggactgtaaactgttggtatattcagtgatgcagttctgaacttgtatatggcatgatgtatttttatcttacagaataaatcaattgtatatatttttctcttgataaatagctgtatgaaatttgtttcctgaatatttttcttctcttgtacaatatcctgacatcctaccagtatttgtcctaccgggtttttgttgttttctgttctgtataatagtatctaatgttggcaaaaattgaattttttgaagtatacagagtgttatgggttttggaatttgtggacaccgatttagaagatcaccatttacaaataaaatattttacatcctaaacaaaacacaacccgccaaacgagacaacccacacccaaaaaaaaggggggggccccctctaaaaatacccctcaaggggccccaagttttacgggtaccccatctttttttgtaaaaaaggggccccctaatagggagccctaattattaatcatagccactggccccgtcctttttacacactccgtgaatgggaaaaaactgctaaccttgg

SEQ ID NO: 40921 - DNA, 649 bp, Homo Sapiens
cacgcgtccgataatgtgtctgtgttgcttcaaattggtctaaaaggctatcctgctgaaagtcctgctttcctatctagcatttatttctctggcaaacttttctttcttttcttttttaaagtaaacttgtgtattgagtcttaactgtatttcagtattttccagccttatgtgttacattattccaatgatacccaacagtttatttttattatttttttaaacaaaatttcacagttctgtaatgtaggcacttttattttcattgtgatttatatataaggtaatgtagggttatatttgggagtgactgcaagcatttttccatctgtgtgcaactaactgactctgttattgatcccttctcctgccctttcccaggtaatttaaattggtcatggtagatttttttcatagatttgaaaaacttttaggttgttaccaagtatgaagtataaatctggggaagaggttttatttacattttagggtgggtaagaaagccaccttgttacaaattttttaatttccaaaataatctatattaaatgagggtttctgatctgtactttgtgtttagctacctttttatatttaaaaaattaaaaatgaaaattacgttcttacaagcttaaagcttgatttg

SEQ ID NO: 40922 - DNA, 500 bp, Homo Sapiens
tgctttgtgtcacctcagtgacttacagtcccccttggcatttagttggtactagagccagtcatccttaacaaatcttttcacattttatttctttcacatgtagtcatcttcaaaaaggaaagatttggaattttagaaaaggggcaactcttctttttagcattctcatcagaaagtcacaaaaatcgatggaatcatttccactgggaagattgaccttttgtatttatttgtggggtaaattaataagcattccagatgcttgcagcttcctgcatccaggagatgctgtgttccccgtgatgcagctggaacccaagctgcagcaggagatgcaagtttcaggatgttccccactgagctggaggaatatctacagcagtgatgcttgaaatttttgtatgaattattttgtcgtcctacccttttcctccaaaacaaaaattagaggattattttaatactttggattcttcccccttttttgagaaataaag

SEQ ID NO: 40923 - DNA, 563 bp, Homo Sapiens
gtaaaggctgttctggctttttatcttcttagctcatcttaaataagcagtacacttggatgcagtgcgtctgaagtgctaatcagttgtaacaatagcacaaatcgaacttaggatttgtttcttctcttctgtgtttcgatttttgatcaattctttaattttggaagcctataatacagttttctattcttggagataaaaattaaatggatcactgatattttagtcattctgcttctcatctaaatatttccatattctgtattaggagaaaattaccctcccagcaccagcccccctctcaaacccccaacccaaaaccaagcattttggaatgagtctcctttagtttcagagtgtggattgtataacccatatactcttcgatgtacttgtttggtttggtattaatttgactgtgcatgacagcggcaatcttttctttggtcaaagttttctgtttattttgcttgtcatattcgatgtactttaaggtgtctttatgaagtttgctattctggcaataaacttttagacttttgaaaaaaaaaaaaaaaaag

SEQ ID NO: 40924 - DNA, 820 bp, Homo Sapiens
  misc_feature (623)..(623): n is a, c, g, or t
  misc_feature (796)..(796): n is a, c, g, or t
gcacgaggaggaagaggaagctaattgttgacagtgtcaaagagttggatagcaagacaattagagcccaacttagtgattattcagatattgttactactttggatctggcaccgcccaccaagaaattgatgatgtggaaagagacaggaggagtagaaaaactgttttctttacctgctcagcctttgtggaataacagactactgaagctctttacacgctgtcttacaccgcttgtaccagaagaccttagaaaaaggaggaaaggaggagaggcagataatttggatgaattcctcaaagaatttgaaaatccagaggttcctagagaggaccagcaacagcagcatcagcagcgtgatgttatcgatgagcccattattgaagagccaagccgcctccaggagtcagtgatggaggccagcagaacaaacatagatgagtcagctatgcctccaccaccacctcagggagttaagcgaaaagctggacaaattgacccagagcctgtgatgcctcctcagcaggtagagcagatggaaataccacctgtagagcttcccccagaagaacctccaaatatctgtcagctaataccagagttagaacttctgccaganaaagagaaggagaaagagaaggaaaaagaagatgatgaagaggaagaggatgaagatgcatcagggggctatcaagatcaggaagaaagaagatggaacaaaaggactcagcagatgcttcatggtcttcagcgtggctcttgctaaaaactgggaggctgaatcctatcagntttggcttgaagtttatggtcgaa

SEQ ID NO: 40925 - DNA, 1079 bp, Homo Sapiens
taaaaactaacggcttctctgatatttattgtaagttttagtactgatctccttttccagtgctgcacactcctggtttggaactttaatagcgttgcaacgaaatcctatatccagtttcctgtaatttaattgaagaaaaatacatccaaataaagactttattattaacagaccagatagcatcagaaatcatgtgactgttatgattatcagaatatgtcttaactttttagggcaaagttaacactgaaagttctagcttaagtgttgaaacttttgtgggaaaaaaaaatcacttttgaaactcagacttcagtgtatacccaataatttaaaattatgtgaaatgttttaaatttgtgaactcgtaattactgttttaatgattcagtttcttcagagtggtaattgtataaaattgctattgcagctttatattcaatatgatgtgcctgtaaaccaaggagttttccccgtttgtaaaaagacattgtagataattgaatgtttgattttagaaaggtcattagtttcttgttacacattttgttagtctggtttttgttgcttatcgggtttaatattgttcttgaaaatagttgatgctatgttatgtataacttttctaataaaagttgtgttataagctgtaaaacacccccaccgcccgccgcagacaaaaactaaggccgcacgaacaacacagcacgcgccaaaccacaaccccgcccacatccatcaccattttttgggggggccccctcccaaaaaacccccctgggggggcccacagctttcccgggtcacccatttttcttgtaaaaagggggcccaaaaaagggaggccttaataaaaaactcaggccccgcggccccccttttatacaaccccctggacggggagaaacaggcccaactgtgggaactctttctggaaagcccctctcctctcgggggggggaccaattttggcccccactctctcctccaaagttttaccgcctccgcggagaaatttaaaactttttcagggggtaacgtggggcacaaaacaaccgccaaatccctcgggcgcg

SEQ ID NO: 40926 - DNA, 625 bp, Homo Sapiens
gcacgagctgaaacccacagcccaaccaaaccttgagaatgcgaaacattccagaggcagtagcctccaaagcacacagagcccctggccccgccgcggctctcactatctgtcaggggaggttgtacaggtgaatgagccggggggctcatgttcctgcctgcagaacatttctgtactagtgagaagagggaatatgcattgcagttcagcaaagccggaattctgtgttgaacagatgtctgtctccctagtgtgtgactcacaccttgtggctgccttcagagcgccacctccagatcagatggggacacacaacccctggatatgtttcattgtcagattttgtgcttgattttaagaatggaattgtgggtatctttcctttttttttaatgtatcttaactgttgcctgtcagtgtttacaaactagtgcgttgacggcaccgtgtccaagtttttagaacccttgttagccagaccgaggtgtcctggtcaccgtttcaccatcatgctttgatgttcccctgtctttccctcttctgctctcaagagcaaaggttaatttaaggacaaagatgaagtcactgtaaactaatctgtcattgtttttaccttcctttt

SEQ ID NO: 40927 - DNA, 507 bp, Homo Sapiens
gggaaatgggtattttagacccaacacaggttctaaatttaaaacaaataataattggaacaaataaaggttcttgtacccagagtgattctacatgggaaaaacaaaccagcttttttcagagagtgaccgaataggaagaagggattcagaaatatgatgtagtagaacatgccctgcaggaagaaaatgttttctctcctgcgtatgttaagaggaaatcagtttaaaatgcctgctaatcaaatgtcgactcagctaaccatatgtccaggttgctgcagagtttctttcaaatctgagtgttgcctgctgaactcggaggggagtttggagaaattttagacagcagctctgtgttctttttttgccgcagccaataagataatagcagaattagccaatcctaaaaccttctaaagacgatttttgagcatcccactgggattatttaatttttctttttgacgtgtgtttttagtttagaagtgctgtattccacaaggt

SEQ ID NO: 40928 - DNA, 600 bp, Homo Sapiens
gatagttactgaccgggaaactgggtcctccaaagggtttggttttgtagacttcaacagtgaggaggatgccaaagctgccaaggaggccatggaagacggtgaaattgatggaaataaagttaccttggactgggccaaacctaagggtgaaggtggcttcgggggtcgtggtggaggcagaggcggctttggaggacgaggtggtggtagaggaggccgaggaggatttggtggcagaggccggggaggctttggagggcgaggaggcttccgaggaggcagaggaggaggaggtgaccacaagccacaaggaaagaagacgaagtttgaatagcttctgtccctctgctttcccttttccatttgaaagaaaggactctggggtttttactgttacctgatcaatgacagagccttctgaggacattccaagacagtatacagtcctgtggtctccttggaaatccgtctagttaacatttcaagggcaataccgtgttggttttgactggatattcatataaactttttaaagagttgagtgatagagctaacccttatctgtaagttttgaatttatattgtttcatcccatgt

SEQ ID NO: 40929 - DNA, 895 bp, Homo Sapiens
ccgtggtcgtgtgcattggacagattgtcctgctgaaggatcagaggaagtgcttcagcatcgacaaccccggctacgagcccgaagttgtggcagtgcaccccggcggggacacggtggcaattgggggtgtggacggcaacgtccgcctgtattccatcctgggcaccacgctgaaggatgagggcaagctcctagaggccaagggccccgtgaccgacgtggcctactcccacgacggcgccttcctcgcggtgtgcgacgccagcaaggtggtcacagtgttcagcgttgctgacggctactcggagaacaatgttttttatggacaccatgcaaaaatcgtctgcctggcctggtccccagacaatgaacactttgcctccggtggcatggacatgatggtgtatgtttggaccctgagtgacccggaaaccagagtcaagatccaagatgcacaccggctgcaccatgtcagcagcctggcctggctggacgagcacacgctggtcacgacctcccatgatgcctctgtcaaggagtggacaatcacctactgaggagccccacccccgcctctggatggaccgaatcagggactagagtttaactgcagcggaacatgtcatttctctatttctgtgacgcgcccccatgcccccaccccaccacaagaggcaggagggcccagtcatgaccctcgtctctgcagggtgtctgtacacgttcttctgaaagctttagacagtaacagtttgcacatgaaaaataaagcgagcacctaaacaatgtggtggagcataactaaaacccacagccccaccaaaaccttgagaatggcaaacctttccaaaaggccgtaaacctcccaaaacaaaaaaaaaccccccgggcc

SEQ ID NO: 40930 - DNA, 771 bp, Homo Sapiens
ctgcagagagcgcagcatattttgactacaaggatgagtctgggtttccaaagcccccatcttacaatgtagctacaacactgcccagttatgatgaagcggagaggaccaaggctgaagctactatccctttggttcctgggagagatgaggattttgtgggtcgggatgattttgatgatgctgaccagctgaggataggaaatgatgggattttcatgttaacttttttcatggcattcctctttaactggattgggtttttcctgtctttttgcctgaccacttcagctgcaggaaggtatggggccatttcaggatttggtctctctctaattaaatggatcctgattgtcaggttttccacctatttccctggatattttgatggtcagtactggctctggtgggtgttccttgttttaggctttctcctgtttctcagaggatttatcaattatgcaaaagttcggaagatgccagaaactttctcaaatctccccaggaccagagttctctttatttattaaagatgttttctggcaaaggccttcctgcatttatgaattctctctcaagaagcaagagaacacctgcaggaagtgaatcaagatgcagaacacagaggaataatcacctgctttaaaaaaataaagtactgttgaaaagatcatttctctctatttgttcctaggtgtaaaattttaatagttaatgcagaattctgtaatcattgaatcattagtggttaatgtttgaaaaagctcttgc

SEQ ID NO: 40931 - DNA, 627 bp, Homo Sapiens
gtgtcagggcaagcagacaacacaatttcctatcagaatatgtccctcaacccccgaaacaaggcttctctcagcctccccaccagtgatggataacagctcctattctcagctgacctgactgagccaacccatgaactcttcactccttggggaagccacctcccatcacacccctgagcagagttagggaggaattctacttcccataaaaggacctctcctgagaggcaaaacctgttgcctccaccacggcttccctcttggctcattccaagcttggccaaattggggaagtgggatggaggttgccctgcatcccccctcctctgcctgagtgtgtctttgtaatgtcagctggcatcatacaaagagcaggagaagcaaacacccagaactcttttgctggtcagagattccctgagtgtctgtcctcacccaagcctgctctgtgtctgtgttgtgaagcttgagactcgggaaagaaatggggaggggggggcaggggaaatgttgccctaagaatgcttctcattcctctgttcttattgggtcctgtttttcgggagggtgggggtttggggggaagcttgaccttgtgtcttcgtcaataaactcacatttaca

SEQ ID NO: 40932 - DNA, 642 bp, Homo Sapiens
cgtaactcaaccattgtagactagctttgtgtttattcttcaggtccttgcgccttattgggtttttgtatattcaacgaactgaaatatttggaattcctatttctacgtatttggtggtccataagactttgtcaaatgtaaacctacagtttgatacgctttaaaatacctagttaagaggatgatttctctttaatcgtttaaatgttctgaaaattaaaatcttttgaggcacatgaagtgggcaccatatatcatctagagtccttactggtattcaggatgaaaatgttcacgctgcattaattgtcatttttctctcccatgttctttctcactttgatacgttaatactgataatggataaagagtgagtttttataataaatggttttggaaaggtattcataggaaccgcggttatttacttaaggttatggagtaaactagcttggaccttgggctgcaggacgactaggattcacccataacgacacagtgccctatgtttcttaacttcttgttgccatttgaaactctgtactcttatgtttaaagggttctgtatagccattttttttttcagaaagttacattgctttgtatagaaataaaaggcattattaaaatttgcttgtt

SEQ ID NO: 40933 - DNA, 602 bp, Homo Sapiens
caaaaagatggttaagaagtccaaacctgaaagaaaagaaaagaaaatgcccaaacccagactaaaggctacagtgacgccaagtccagtgaaaggcaaagggaaagtgggtcgccccacagcttcaaaggcatcaaaggaaaagactccttctcccaaagaagaagatgaggaaccggaaagcccgccagaaaagaaaacatctacaagccccccacccgagaaatctggggatgaagggtctgaagatgaagccccttctggggaggattaaaagtgatgatggtctggggagagattttattaaaaaaaaaaagaaaaaagagggaggaaaaaaaagaacctacttaagatagaacatggttttggctatggcttgactcatgggctttcagtgcttttttccatttgttgaaagtaacatttctctctctctctctttttttttttttttttttaaagcaaaccattgtatgtgtaagtgtttaagttacctttttgtctattggtctctttgccagccctcccctttcccaatgaaagccatgtcaaattaatcactggattgactgcttcatctttttatttttaatgaaaggtgt

SEQ ID NO: 40934 - DNA, 498 bp, Homo Sapiens
ttattcaaagaaaagctaaagcaaaaacactggcatatgaccatgcaagactgtcagtgccaacaaagacaacactaatcagcacatcgtacactggattgcagtgcttcccagattattgaaaaatgttacagacaacttgcctgatttttaaatgagcgtaaaaggccctctaacctatgcaggtttccccattatgcatatagaaaatgctagtatgttttgctcacttcatatgtaacaggtgcccttatgttgtgctgtatcctgtgctttttctgtgggaccattccattcaggagcaaagagcaccatgattccaatcttgtgtgtgtttactaacccttccctgaggtttgtgtatgttggatattgtggtgttttagatcactgagtgtacagaagagagaaattcaaacaaaatattgctgttcttcagttttgtttgtggaatttgaaattactcaaatttaaaataaattactggactgtggaaat

SEQ ID NO: 40935 - DNA, 594 bp, Homo Sapiens
  misc_feature (580)..(580): n is a, c, g, or t
tttataaatgctattgccaagaggaatgtggaagggcaggacatgctgtaccaatccctgaagctcactaatggcatttggattttggccgaactacgtatccagccaggaaaccccaattacacgctgtcactgaagtgtagagctcctgaagtctctcaatacatctatcaggtctacgacagcattttgaaaaactaacaagactggtccagtacccttcaaccatgctgtgatcggtgcaagtcaagaactcttaactggaagaaattgtattgctgcgtagaatctgaacacactgaggccacctagcaaggtagtaactagtctaacctgtgctaacattagggcacaacctgttggatagttttagcttcctgtgaacatttgtaaccactgcttcagtcacctcccacctcttgccacctgctgctgctatctgtccttacttgtgggcttctccatgctgtgccaatggctggctttttctacaccctcttttgagtgtagtttggtattttgtaattgagagctcattttcaaaaggccgaaaaagaccaccaatatttaaggcacaggnaaagtgtaaacttg

SEQ ID NO: 40936 - DNA, 577 bp, Homo Sapiens
ctttttcaagcaggcggaaagctgctgtttctcacgtttcagggagaggggtgagcggagggagacctgtgtccgtgccgtccggctccctgggtgggaacaggcaagggatcagatgcccctgacaccacgcctctggccacaccagatgcctctgcagtcctcgacagcctcttcagtgtccctcctgcggtgatgtccttactgtccccagccagggccggggaccggtgtttcactgaggacctgcattagaaacattttttaaattgttgtacaggaagagatgtgtctaaaacagcatcttaaagctgagtgtatttctttgcacaaggggtcatgctgatgaattcttctttcattctgatctttgttcagccaacaggagcgtccttttctaatgtcttccattcctaccccccacccaaaaacaaaagaaatatttgtagcttgctatctgtatttgaatttttagcaattttatatttagatactttgaaaaatgtaaatgactaatttggtcattaaatcttgtgacatattcgatattaaaatgatattaaaataaaagtcatat

SEQ ID NO: 40937 - DNA, 941 bp, Homo Sapiens
ggtggcaattcggacgaggcggtcaacgcgggtggagaggcgcatgtggacgtgcacgggatccacttccgcaaggaccctttggaaggccgggtgggccgagcctcagactatggcatgaaactgccaatcctgcgttccaaccctgaggaccagatcctgtatcaaactgagcggtacaatgaggagacctttggctacgaagtgcccatcaaagaggagggggactacgtgctggtcttgaaatttgcagaggtctactttgcacagtcccagcaaaaggtatttgatgtacgattgaatggccacgtcgtggtgaaggacttggatatctttgatcgtgttgggcatagcacagctcacgatgaaattatacctatgagcatcagaaaggggaagctgagtgtccagggggaggtgtccaccttcacagggaaactctacattgagtttgtcaaggggtactatgacaatcccaaggtctgtgcactctacatcatggctgggacagtggatgatgtaccaaagcttcagcctcatccgggattggagaagaaagaagaggaaggagaagaagaagaatatgatgaagggtctaatctcaaaaaacagaccaataagaaccggggtgcagtcaggcccccgcacacccaacccctatgcctcggacaacagcagcctcatgtttcccatcctggtggcccttccgagtcttcattccaaccctcttctgcctctgcccggttgtgagaacaaatgactatcctgaacaggggggaggggggtggggaacaaaaccagcccttatgggttttgggttcctgtatttttccccatgattaatgacccaaacccaggagaaaaaaaccccccttccaattaaggggggaccgaggggggagaaaagagaaaaagaccaacttggagccttcttgggcggg

SEQ ID NO: 40938 - DNA, 1051 bp, Homo Sapiens
  misc_feature (1038)..(1038): n is a, c, g, or t
gaccggaccgaaggagtagaaagcgctttccgtcctttcaaggacaactgtcgggaagggagagccgagttgcgaggtaggaggggagcactggcagggagagacattcttgactcctctcttccctggtgtgttgtgatccagggaatgaaaagaaatttgaccctggattggttctctccttggacttaaggaatcttaccttttccttccacaaagttctcccaggcaaggaccagctgcccattctgagcccagggcagcctcttcaaccattattggtctaacctggcttgtcaggaaaccaagcccacccttccacattgggcctggctgctctattctgtaccaagtactggagaaaaagcatcaagttcttagcccttgtagcttctaccctagtttcccatcctctctctgtggaggccaaaccaactctttgccagcagccacaacatgcattgacagcggcacagtgagatataactgatgggctttgaacctggttggccggggaagctgtaggggtggatagagctggctttccttctgggctgtctccatctgaccctaccccttccatgtccccacccacttcccacaaaaagtacaaaatcaggatgttttttcactgtccattgctttgtggttttaataaacaatttggcaatggaccaaaaaaaaagaaaacagtataaaaaaccccccctttccttggaaaaaagttggggcttttaaaaaaaaaggcttgggctatatccatattggggggcaacaaaaacaaggagccctgtttttggtcctaagaatataaatttctataattgtgcgcagttctccaacagtagaaaactcctggggccccagtagtgatcataaacaatcgttcatgatctaaatatatattttgccgcacaagggtgcagcatatatatcactgtttacatgggatcagacatacaagaactcctgctgtggtattctgccccttatactcgccctccctacatcatttttggggggggtcgctgatacttntgtcgctcccact

SEQ ID NO: 40939 - DNA, 752 bp, Homo Sapiens
tgtggacctcatgagcaagaaaattcatctgactgagaatgggataagggtggatattggcgatacaataatctatctggttcattaaactcatgcacattggagatttatcctggtttcttaggaatactactactctgattgtgtctactgattggctatcagaaccttaggctggacctaaatagattgatttcatttctaaccatccaattctgcatgtattcataattctatcaagtcatctttgattcctggacctaataaattttttttccctttctttgggtgtccaagagaaatggtttttgccaaactctttttaaaaaacaaattgttgctatttcctagaagtttctggtttttaagatgaacataaaagtgtcagtatgcttcttttatgaggtgtactttatactttgatgaaggctaaggtgtacctaacagctttttatagtatattcatttatggagttagctgtattttttttaaaaaaagaaaagtagtaaattagcagctttttttttttaaatgaagagaacttcatgatgatttaaaagaactaatgagaatattttgacttgacttcaattactaagtattttgtataaagaacaaataggtcctgcattttataagactttttaaagctttaattattcaactaagaaccaataatggcttcttcaaggctaatatcaatagtttataagcagtatatttcacctacactaaatatgggcattttaaa

SEQ ID NO: 40940 - DNA, 1099 bp, Homo Sapiens
  misc_feature (659)..(659): n is a, c, g, or t
  misc_feature (716)..(801): n is a, c, g, or t
gtccggaattcccgggatgttccctgccactacgtggagctcattgagtgaggctgagggcacatcttgcccttcccctctcagacatggcttccttattgctggaagaggaggcctgggagttgacattcagcactcttccaggaataggacccccagtgaggatgaggcctcagggctccctccggcttggcagactcagcctgtcaccccaaatgcagcaatggcctggtgattcccacacatccttcctgcatcccccgaccctcccagacagcttggctcttgcccctgacaggatactgagccaagccctgcctgtggccaagccctgagtggccactgccaagctgcggggaagggtcctgagcaggggcatctgggaggctctggctgccttctgcatttatttgccttttttctttttctcttgcttctaaggggtggtggccaccactgtttagaatgacccttgggaacagtgaacgtagagaattgtttttagcagagtttgtgaccaaagtcagagtggatcatggtggtttggcagcagggaatttgtcttgttggagcctgctctgtgctccccactccatttctctgtccctctgcctgggctatgggaagtggggatgcagatggccaagctcccaccctgngtattcaaaaacggcagacacaacatgttcctccacgcggctcactcgatgcctgcnnnnnnnnnnnnnnnnnnnnnnnnnnnnnnnnnnnnnnnnnnnnnnnnnnnnnnnnnnnnnnnnnnnnnnnnnnnnnnnnnnnnnnggggccggcccctcaaaaaattcccctcgggggggcccaaagtttaggcgtaacccactttttttttggaacaaaggggccccccaaaaggggaggcccttttataaacttaggccctggggcccgcctttttttaacacccccgtgacctggggaaaccgcgctaaccttggggaacttttgggaaaggaaacctttccttcggggggggggggaacaaaattggggaaaaactttcccctccgaagaattttaacccctcctagggggaaaaaaaaaaattttttaaagggggaaa

SEQ ID NO: 40941 - DNA, 689 bp, Homo Sapiens
  misc_feature (686)..(686): n is a, c, g, or t
cgagaggccctgcaggagaaggaagtgatgaagacaaaccagatgagacaggctttattacccctgcagacagtggccttatcactcctggaggcttttcatcagtgcctgctggaatggagacccctgaactcattgagctgaggaagaagaagattgaggaggcgatggacggaagtgagacacctcagctcttcactgtgttgccagagaagagaacagccactgttggaggggccatgatgggatcaacccacatttatgacatgtccacggttatgagccggaagggcccggctcctgagctgcaaggtgtggaagtggcgctggcgcctgaagagttggagctggatcctatggccatgacccagaagtatgaggagcatgtgcgggagcagcaggctcaagtagagaaggaggacttcagtgacatggtggctgagcacgctgccaaacagaagcaaaaaaaacggaaagctcagccccaggacagccgtgggggcagcaagaaatataaggagttcaagttttaggtcccctcacactagccctttttttggccctacgtctggatgcctgggcttcacacaagaaccacctctcccgcagttcccaaggacttgtcatttcatgttcttattttagacctgttttgtaaataaagctgtttcccaaggaaaaaaaanaaa

SEQ ID NO: 40942 - DNA, 699 bp, Homo Sapiens
cgttcattaagtataatatttggtgcagcacagagcatggtaacaagagactggatgctgcttatcgttccatgaacgggaaaggccccgtttacttacttttcagtgtcaacggcagtggacacttctgtggcgtggcagaaatgaaatctgctgtggactacaacacatgtgcaggtgtgtggtcccaggacaaatggaagggtcgttttgatgtcaggtggatttttgtgaaggacgttcccaatagccaactgcgacacattcgcctagagaacaacgagaataaaccagtgaccaactctagggacactcaggaagtgcctctggaaaaggctaagcaggtgttgaaaattatagccagctacaagcacaccacttccatttttgatgacttctcacactatgagaaacgccaagaggaagaagaaagtgttaaaaaggaacgtcaaggtcgtgggaaataaaaggcagttctacacagactgcagcaacggttgcatctgcatatcctaagaggaaaaaatgaccttcaagagaattaggacttttttcttaatttcactgacttcagagacgattgcagacttgcagtttaagtattggaatttcacaaaagacataggacttaactggaaaatgaaaaaaaaaagaaaaagaaaaaactaaacaaaaaatccctctaggtagtttaggtga

SEQ ID NO: 40943 - DNA, 572 bp, Homo Sapiens
aaggtgattttccagttgtaaatgtcatgcagcatttgaagggactgtgttttcttaaaaaaaaatcacagttacttctaaaccagatttcatttcttttattgttttatgtgccaaaccacgaagtgcattgggcttcaatctctgaacactgtagacccattagaagactgttccgattgttacaaattgtagtgcctgaaaacactcttaagctgattgtcttaacaaaatgaaagttctccaaagacaaaacagaacaattattataacaaaataattatggttgaaatgtctgtggttccttggaaatgctgcgctctttgtgtttttccatcattagtgcagttggaatgaatgtgtataggtcagaggtcttcgtgttcacattttaaaattaggtaaatgacctcatctttcaagcttgaattcatttttaattttaattttattttatacaatgtgtagacagttccctgttctctgcatttagaagtatacacaatataaatctgttaattctgtaagtaatttttataattatgatgtaactctatcttatccttaaaaca

SEQ ID NO: 40944 - DNA, 697 bp, Homo Sapiens
ccgtcgacccacgcgtccgcgagtagaagagaacttcttgaaactgacacatgtgcaaagacaggaagcagcacagtctcggcgggaggagaaaaaaagagcagagaaggagcgaatcatgaatgaggaagatcctgagaaacagcgcaggctggaggaggctgcattgaggcgtgagcaaaagaagttggaaaagaagcaaatgaaaatgaaacaaatcaaagtgaaagccatgtaaagccatcccagagatttgagttctgatgccacctgtaagctctgaattcacaggaaacatgaaaaacgccagtccatttctcaaccttaaatttcagacagtcttgggcaactgagaaatccttatttcatcatctactctgtttggggtttggggttttacagagattgaagatacctggaaagggctctgtttcaagaatttttttttccagataatcaaattattttgattattttataaaaggaatgatctatgaaatctgtgtaggttttaaatattttaaaaattataatacaaatcatcagtgcttttagtacttcagtgtttaaagaaataccgtgaaatttataggtagataaccagattgttgctttttgtttaaaccaagcagttgaaatggctataaagactgactctaaaccaagattctgcaaataatgattggaattgcacaat

SEQ ID NO: 40945 - DNA, 793 bp, Homo Sapiens
cgcgcggcggagctggaactgctgcagctgctgccgccgccggaggaaccttgatccccgtgctccggacaccccgggcctcgccatggctgaccagctgactgaggagcagattgcagagttcaaggaggccttctccctctttgacaaggatggagatggcactatcaccaccaaggagttggggacagtgatgagatccctgggacagaaccccactgaagcagagctgcaggatatgatcaatgaggtggatgcagatgggaacgggaccattgacttcccggagttcctgaccatgatggccagaaagatgaaggacacagacagtgaggaggagatccgagaggcgttccgtgtctttgacaaggatgggaatggctacatcagcgccgcagagctgcgtcacgtaatgacgaacctgggggagaagctgaccgatgaggaggtggatgagatgatcagggaggctgacatcgatggagatggccaggtcaattatgaagagtttgtacagatgatgactgcaaagtgaaggccccccgggcagctggcgatgcccgttctcttgatctctctcttctcgcgcgcgcactctctcttcaacactcccctgcgtaccccggttctagcaaacaccaattgattgactgagaatctgataaagcaacaaaagatttgtcccaagctgcatgattgctctttctccttcttccctgagtctctctccatgcccctcatctcttccttttgccctcgcctcttccatccacgtcttccaaggcctgatgca

SEQ ID NO: 40946 - DNA, 931 bp, Homo Sapiens
  misc_feature (570)..(577): n is a, c, g, or t
  misc_feature (579)..(589): n is a, c, g, or t
  misc_feature (591)..(602): n is a, c, g, or t
  misc_feature (605)..(615): n is a, c, g, or t
  misc_feature (617)..(626): n is a, c, g, or t
  misc_feature (628)..(628): n is a, c, g, or t
  misc_feature (633)..(633): n is a, c, g, or t
  misc_feature (637)..(637): n is a, c, g, or t
  misc_feature (639)..(639): n is a, c, g, or t
  misc_feature (641)..(641): n is a, c, g, or t
  misc_feature (662)..(662): n is a, c, g, or t
  misc_feature (671)..(671): n is a, c, g, or t
  misc_feature (673)..(675): n is a, c, g, or t
  misc_feature (677)..(680): n is a, c, g, or t
  misc_feature (684)..(684): n is a, c, g, or t
  misc_feature (686)..(688): n is a, c, g, or t
  misc_feature (691)..(692): n is a, c, g, or t
  misc_feature (700)..(700): n is a, c, g, or t
  misc_feature (702)..(703): n is a, c, g, or t
  misc_feature (706)..(707): n is a, c, g, or t
  misc_feature (724)..(726): n is a, c, g, or t
ttattatatacatttgctatcatacatgacagttgtgtcattattagagatttcagtaattaaaatgggaaacagaagcctaagttatttaccttatcaaaaccacgttccttggaaccacattattatgatggtttttgtgctcttgtacgttggatgtcttaagctgagtacagtttaggggatcctttctaatgacaggaaggcactgctttcctcaacactgtgatctgacctgtgacaagtctgtactatccactatgtaaatggctcacaagtcaattgcaaacaaactgaatgtacaaatcttagtgctggtgctgaaatctcttcagaatagtcatcatgatttaaaagtttgtttaaaaatttgcaagcatcaagtgtcaatcaaaactgaagatgaaacactaatgaatgttgaattctcatgcttttaggtgtacttcctttttagaattttcagttttctgctatttttaccgtaactatttcgtttaaatttgtttcatttaagtttcctacacgctaacttcgtttgtgcgattgaaataaaattgcagtatatannnnnnnnannnnnnnnnnnannnnnnnnnnnnaannnnnnnnnnngnnnnnnnnnnanaaaanaaanananaaaggaaaaaaaaaaaaaaanaaacccaancnnnannnnaacnannnggnncccgaaangnnaanncacaccaccaaccatannncccgggccgggggggggggcccccacccagaaactccccacaagggggccccctatgagaaccccctccccacaccgttaccttaaattccagaggggcgcccgcccttatgttggacctcacctcaaacctaaacagaccatggtgcaggggtgcgcacaccctgttaaacgattaactctcgttcgtaaactagattacttac

SEQ ID NO: 40947 - DNA, 639 bp, Homo Sapiens
cgcgtccggaatcttctgagaacgctgatgatcccaacaaagatacaagtgaaaacgcagatggtcaaagtgatgagaacaaggacgactatacaatcccagatgagtatagaattggaccatatcagcccaatgttcctgttggtatagactatgtgatacctaaaacagggttttactgtaagctgtgttcactcttttatacaaatgaagaagttgcaaagaatactcattgcagcagccttcctcattatcagaaattaaagaaatttctgaataaattggcagaagaacgcagacagaagaaggaaacttaagatgtgcaaggagatttaatgatttcaaagaaaataatggttctttgtttttaatgttaaccttttttaaatacaatactgatagttagaagaaaactattgtactcttttgttttagtggagaaataatagatgtctgttcatgtgttaagtgttatagcaaaaaaaatacacatatggttaagttaatgaatagtttttgttttatcagaatggcaacagacagaagtactttgtagagattgacttcctaagctacttaagacaacttgcaccactaagaaaaaaaatgtagaaccatttggaaaaatgaaatttagta

SEQ ID NO: 40948 - DNA, 1073 bp, Homo Sapiens
tgagcatctcaggccatcatcctgaaacttggcagccttcgtggagtataaggacagcattattagccatcattgggtttatgccaacaaaaggagagggagccataggttctctagattacactcctgaggaaagaagagcacttgccaaaaaatcacaagatttctgttgtgaaggatgtggctctgccatgaaggatgtcctgttgcctttaaaatctggaagcgattcaagccaagctgaccaagaagccaaagaactggctaggcaaataagctttaaggcagaagtcaattcatctggaaagactatctctgagtcagacttaaaccactctttttcactaactgatttacaagatgatatacctacaacattccagggtgctacggccagtacatcgtacggagtccagaattcctcagcagcatcctttcatcaacctacccaacctgtagctaagaatacctccatgagccctcgacagcgccgggcccagcagcagagtcagagaaggttgtctacttcaccagatgtaatccagggccaccagccaagagacaaccacactgatcatggtgggtcagctgtactgattgtcatcctgactttggcattggcagctcttatattccgacgaatatatctggcaaacgaatacatatttgactttgagttataatatggttttgtgacttatgagctgtgactcaactgcttcattaaacattctgcattgggtataatctaagaattgtttacaaaaagattattttgtatttacccttcattcctttttttgatccttgtaagtttagtataaatatatctagacattcagactgtgtctagcagttacgtcctgcttaaagggrctagaagtcaaagttccttggtctcactatttgatctgctttgcagggaaataacttgttttttctcatgtttcatcttctttttatgtaatstgtaaacttccctatattgscctttgaaatttttggataaaaratgakgtttaagtccaatgrgkatamtagtwctccawacacytattgggtmyckgttctac

SEQ ID NO: 40949 - DNA, 582 bp, Homo Sapiens
agttaatgaatagttttagttttatcagaatggcaacagacagaagtactttgtagagattgacttcctaagctacttaagacaacttgcaccactaagaaaaaaatgtagaaccatttggaaaaatgaaatttagtagttccaagtttcaaagaaatgtcaacattttattccattcaataaagaacaaaaccaatagtgtttttattactttcatctgaaacattccatgttttaatctgagccttgcagactttcatttggagtttgaacccgttttggttgcatttcatttttggagaacttaattaacgtgagattggcaattgaaatgcaggtgcagttttctgttaatgtcatgctgttgtttaggtaataagaaatattaagtaattggctttagattttgtaatttttttccctgagttcctgctagatttcgtattctagtagtcaatgtattttcagtgaaatgcaaaaatattcccattatctttgaccagtattaatttttgagatcttactgcttgtcacttgaatcccgtgattgtcatacatctctggtataagcaacatttgatt

SEQ ID NO: 40950 - DNA, 727 bp, Homo Sapiens
agggagagacccatcgaggagcacaggcagtttgggggcaactgtgatgtggacgtgtctttcatgtacctgaccttcttcctcgaggacgacgacaagctcgagcagatcaggaaggattacaccagcggagccatgctcaccggtgagctcaagaaggcactcatagaggttctgcagcccttgatcgcagagcaccaggcccggcgcaaggaggtcacggatgagatagtgaaagagttcatgactccccggaagctgtccttcgactttcagtagcactcgttttacatatgcttataaaagaagtgatgtatcagtaatgtatcaataatcccagcccagtcaaagcaccgccacctgtaggcttctgtctcatggtaattactgggcctggcctctgtaagcctgtgtatgttatcaatactgtttcttcctgtgagttccattatttctatctcttatgggcaaagcattgtgggtaattggtgctggctaacattgcatggtcggatagagaagtccagctgtgagtctctccccaaagcagccccacagtggagcctttggctggaagtccatgggccaccctgttcttgtccatggaggactccgagggttccaagtatactcttaagacccactctgtttaaaaatatatattctatgtatgcgtatatggaattgaaatgtcattattgtaacctagaaagtgctttgaaatatt

SEQ ID NO: 40951 - DNA, 684 bp, Homo Sapiens
ggcgtcttctgaccggtcaaggcgctcctcatcctcccgttcttcctccaaccatagccgagttgaatcttctaagcgcaagtctgcaaaggagaaaaagtcctcttctaaggatagccggccatctcaggctgccggggataaccagggagatgaggtcaaggagcagacattctctggaggcacctctcaagatacaaaagcatctgagagctcgaagccatggccagatgccacctacggcactggttctgcatcacgggcctcagcagtttctgagctgagtcctcgggagcgaagcccagctctcaaaagccccctccagtctgtggtggtgaggcggcggtcaccccgtcctagccccgtgccaaaacctagtcctccactttccagcacatcccagatgggctcaactctgccgagtggtgccgggtatcagtctgggacacaccaaggtcagttcgaccatggttctgggtccctgagtccatccaaaaagagccctgtgggtaagagtccaccatccactggctccacatatggctcatctcagaaggaggagagtgctgcttcaggaagagcagcctatacaaagaggtatcttagagagcagaagacagagaatggaaaagaaaaggaacagaaacaaaccaatacccaaaaaaaaaataaaaaaaaaaaaat

SEQ ID NO: 40952 - DNA, 499 bp, Homo Sapiens
tgaacagagttcagcaattttgattaaattaagacttgggggtgaaactttccagtttactgaactccagaccatgcatgtagtccactccagaaatcatgctcgcttcccttggcacaccagtgttctcctgccaaatgaccctagaccctctgtcctgcagagtcagggtggcttttcccctgactgtgtccgatgccaaggagtcctggcctccgcagatgcttcattttgacccttggctgcagtggaagtcagcacagagcagtgccctggctgtgtccctggacgggtggacttagctagggagaaagtcgaggcagcagccctcgaggccctcacagatgtctaggcaggcctcatttcatcacgcagcatgtgcaggcctggaagagcaaagccaaatctcagggaagtccttggttgatgtatctgggtctcctctggagcactctgccctcctgtcacccagtagagtaaataaacttccttggctcct

SEQ ID NO: 40953 - DNA, 722 bp, Homo Sapiens
  misc_feature (692)..(692): n is a, c, g, or t
  misc_feature (706)..(707): n is a, c, g, or t
gaggagttaaggctttccgaccaccttgtgttcccttttctgcgcagccatgtatcacgtggagttgctccttaccacacctcacgtgcccctgagccctatttcctgatttcttctgggctggacttccccgttctccaccagcagctccagtatcccaaactttctagtcctgctgatcctcccagcaacggggtggaaactggagggcagtgtctggtctgttttctaagaaacttatgaattctattatctttacaaatatgagaaaattttttcaatattttttattaatctttttataaaatgaaaagaaactcctatgatcgattaaggaaggtggttatggctgggtggttcaggggtttttttgggtttctttttttttttctttgtctttttaaccttaagctgtttaagttgaagcattctcagatgtttggggggaaacatcctcttaaaatgggtccttgtgcttgccttctggggaggcggtcctgagcaggtgaatcataaggcatttatgcatatgttatatgcggactgcacccacctctcccccccagcctttgcctcttgggttgttgtgctgctttccccttactttgctacatttctatagttaagttggttttacttgaatgattcatgtttagggggaaaatgaaaatctcccttaaaatttgtttcanctcctcctgcaaanntaaataatgaagtgg

SEQ ID NO: 40954 - DNA, 578 bp, Homo Sapiens
atgaaggggaggaaggagaggaggatgaaggagaagatgactaaatagaacactgatggattccaaccttcctttttttaaattttctccagtccctgggagcaagttgcagtcttttttttttttttttttttttttccctcttgtgctcagtcgccctgttcttgaggtctcttttctctactccatggttctcaatttatttggggggaaataccttgagcagaatacaatgggaaaagagtctctacccctttctgttcgaagttcatttttatcccttcctgtctgaacaaaaactgtatggaatcaacaccaccgagctctgtgggaaaaaagaaaaacctgctcccttcgctctgctggaagctggagggtgctaggcccctgtgtagtagtgcatagaattctagcttttttcctcctttctctgtatattgggctcagagagtacactgtgtctctatgtgaatatggacagttagcatttaccaacatgtatctgtctactttctcttgtttaaaaaaagaaaaaaaaacttaaaaaaatggggttatagaaggtcagcaaagggtgg

SEQ ID NO: 40955 - DNA, 631 bp, Homo Sapiens
agatagctcaatactctctgagtacattgtgcccttgatttttatctccaagtggcagtttttaaaattggccttttaccttggatataaattaattgtgcctgccaccaccatccaacagacctggtgctctaatgccaagttatacacgggacagttgctggcatgtcttcattggctatataaaatgtggccaagaagataggctctcagtaagaagtctgatggtgagcagtaactgtccctgctttctggtataaagctctcaaatgtgaccatgtgaatctgggtgggataatggactcagctctgtctgctcaatgccattgtgcagagaagcaccctaatgcataagctttttaatgctgtaaaatatagtcgctgaaattaaatgccactttttcagaggtgaattaatggacagtctggtgaacttcaaaagctttttgatgtataaaacttgataaatggaactattccatcaataggcaaaagtgtaacaacctatctagatggatagtatgtaatttctgcacaggtctctgtttagtaaatacatcactgtataccgatcaggaatcttgctccaataaaggaacataaagatttaaaaaaaaaaaaaaaaaatggc

SEQ ID NO: 40956 - DNA, 870 bp, Homo Sapiens
tgagcttgtttgtgtccctgtgggtggacgtggttggtgattggcaggatcctggtatccgctaacaggtcaaaatgcagatcttcgtgaaaacccttaccggcaagaccatcacccttgaggtggagcccagtgacaccatcgaaaatgtgaaggccaagatccaggataaggaaggcattccccccgaccagcagaggctcatctttgcaggcaagcagctggaagatggccgtactctttctgactacaacatccagaaggagtcgaccctgcacctggtcctgcgtctgagaggtggtatgcagatcttcgtgaagaccctgaccggcaagaccatcaccctggaagtggagcccagtgacaccatcgaaaatgtgaaggccaagatccaggataaagaaggcatccctcccgaccagcagaggctcatctttgcaggcaagcagctggaagatggccgcactctttctgactacaacatccagaaggagtcgaccctgcacctggtcctgcgtctgagaggtggtatgcagatcttcgtgaagaccctgaccggcaagaccatcactctggaggtggagcccagtgacaccatcgaaaatgtgaaggccaagatccaagataaagaaggcatcccccccgaccagcagaggctcatctttgcaggcaagcagctggaagatggccgcactctttctgactacaacatccagaaagagtcgaccctgcacctggtcctgcgcctgaggggtggctgttaattcttcagtcatggcattcgcagtgcccagtgatggcattactctgcactatagccatttgccccaacttaagtttagaaattacaagtttcagtaatagctgaac

SEQ ID NO: 40957 - DNA, 601 bp, Homo Sapiens
tccggtatgctgatggaaatctatattgccaggaaaagctattcattatgcgttgtgaagtcagaaagtaaaaaagggtagatagaagtattcgaagtatagttccattttttgagactaataaaacatatgtttaaaaggacactaaaaactggagttatagatatccagatagaaacagtagttatctttgggtagaagaataatgagtgatctttacttttttactttttattcatctttgtgtttttatttatctaaaatgggtattgatttttaggacggttttgaaaaagaaaagtgttgggaatgaagcaagtgattgattggaaaacatactgaatggaagaaatatttagattaaaaatgaggtaggttgaagtttcttctctgaaatgatagataaatggtgaagataaggcttattgtgaggattcagtgaggtaatatatgcaaagtacttacaatgttctggcacatagtaattaattaagaaaatcgagcacccttaattacctagaatgcagggttgttagttttttggttgacttttgttttgctggggcattctgccatgttttagtgtcatttaataaataat

SEQ ID NO: 40958 - DNA, 965 bp, Homo Sapiens
  misc_feature (675)..(675): n is a, c, g, or t
cacaaacccccaaaggatgttcctgccttgtgggcccctgagccccttgggagactgagaatcatgaccagattcatccagaactgctgcagtgttaagtgaaaatcctctgtagttgttctgcagaggaaccttccttccattagaaaatttctgctcaatacagaatggtccacatcacccaaagtgcactgttggagatgctgtgaaattaaaacctctttgtacctgagacatctagattcacctcaggaggcctgaaggaaatgtgtaacttgtgggaaagaactagacaaccatttaggaattctctagatatactcagcctaacccagtggcttaacacaaggagattggctttgatctttttttcttgtggcatcttccagcaagttagaagtctcatgggataagactgcagttcccctggttcaatagctggaacagtgattttaaatgtccctttttctggatcccttgtaaacatgaaatcattccatggatggctgccttataattttgtctctttccactttaattgtgaatggttaaaaaaatgctgttttctgatattaaatttttattagtgcataccttaaaaaaaccaaatttccctctctcgtgagatgggggatcctgtgcaggctgatgaggcacccatgagaaaagccgaanaagcatgcatcttagaaatacccccctcatttcaggagtcaacatgcccgagaatgaagctggagacaggtaagctcccgagggaggactttctggcatgagaatctccggaacgggcaagccccagcattcgcccttcagcccaagacagggttcccaccaggaagaatccaggcaaaagggcttggccttttccagggaagtcacccctctcctggagcccacctttcaagaaagtttctttgggaaaagtggaaccccacggggaaccaaagggggttgggaaagag

SEQ ID NO: 40959 - DNA, 483 bp, Homo Sapiens
atacattaagtggggtagactgagggattttagcctcttccctctgatttttcctttcgcgaatccgtatctgcagaatgggccactgtaggggttggggtttattttgttttgtttttttttttcttgagttcactttggatccttattttgtatgacttctgctgaaggacagaacattgccttcctcgtgcagagctggggctgccagcctgagcggaggctcggccgtgggccgggaggcagtgctgatccggctgctcctccagcccttcagacgagatcctgtttcagctaaatgcagggaaactcaatgtttttttaagttttgttttccctttaaagcctttttttaggccacattgacagtggtgggcggggagaagatagggaacactcatccctggtcgtctatcccagtgtgtgtttaacattcacagcccagaaccacagatgtgtttgggagagcctggcaaggcattc

SEQ ID NO: 40960 - DNA, 1170 bp, Homo Sapiens
  misc_feature (588)..(588): n is a, c, g, or t
actttcatcgggcaggtgcataagaccaaggagcagtttggacaggatgggcctatcacggtgcactgcagtgctggcgtgggccgcaccggggtgttcatcactctgagcatcgtcctggagcgcatgcgctatgagggcgtggtcgacatgtttcagaccgtgaagaccctgcgtacacagcgtcctgccatggtgcagacagaggaccagtatcagctgtgctaccgtgcggccctggagtacctcggcagctttgaccactatgcaacgtaactaccgctcccctctcctccgccacccccgccgtggggctccggaggggacccagctcctctgagccataccgaccatcgtccagccctcctacgcagatgctgtcactggcagagcacagcccacggggatcacagcgtttcaggaacgttgccacaccaatcagagagcctagaacatccctgggcaagtggatggcccagcaggcaggcactgtggcccttctgtccaccagacccacctggagcccgcttcaagctctctgttgcgctcccgcatttctcatgcttcttctcatggggtgggggttgngggcaaagcctcctttttaatacattaagtggggtagactgagggattttagcctcttccctctgatttttcctttcgcgaatccgtatctgcagaatgggccactgtaaggggttgggggtttatttttgttctgctctttctttctcctggagggcccctctgggcccccttttttgcgtcacggctttccgcttaaacgcaccaaagacttgtccctccttcgaggccaccctttggtactgcccatcctttgacccggaggcaccgcgccgcgtggcccctgcggaaccctgcctggatacccgggtggtcatcgcttggagtcttgtcgcaccgcccattcaatccacgcgttacaggatgggccaccgccataatatgtctgtgcaagacctgacctgaacacacttctgtacggcgtatggttgctggccaatagcgtcgccatctcccctgcgcatgcttctccctgatccacctccccctaagcggtgcggactcttgtaccgcgctcactctgcaccacactctcttatatactgagcagtggtgcagtgccctcatcatgtagcactctta

SEQ ID NO: 40961 - DNA, 855 bp, Homo Sapiens
gtacgcgtgggcggacgcgtggggtgtttattaaataactgaccatttgctgtagaaagatgagaaaacttaagctttgttttactacaacttgtacaaagttgtatgacagggcatattctttgcttccaagatttgggttgggggcactaggggttcagagcctggcagaattgtcagctttagtctgacataatctaagggtatggggcaaggatcacatctaatgcttgtgttccttatactctattatatagtgttattcatgattcagctgatcttaacaaaattcgtagcagtggaaccttgaaatgcatgtggctagatttatgctaaaatgattctcagttagcattttagtaacacttcaaaggtttttttttgtttgttttctagacttaataaaagcttaggattaattagaagaagcaatctagttaaatttcccatttgtattttattttcttgaatacttttttcatagttatttgtttaaaaagatttaaaaatcattgcactttggtcagaaaaataataaatatatcttataaatgtttgattcccttccttgctatttttattcagtagatttttgtttggcatcatgttgaagcaccgaaagataaatgatttttaaaaggttatagagtccaaaggaatattcttttacaccaattcttcctttaaaaatctctgaggaatttgttttcgccttacttttttttcttctgtcacaatgctaagtgggtatccgaggttctttaatatggagatttaaaatcttaaaatgtttcttaattttcagcacctttacatcatttggggaacacaaggggtccaaataagggccaaaat

SEQ ID NO: 40962 - DNA, 901 bp, Homo Sapiens
  misc_feature (721)..(721): n is a, c, g, or t
  misc_feature (882)..(882): n is a, c, g, or t
cccacgcgtccgcggacgcgtgggtgtgggtactttaaggtttggagcacttacaaggctgtggtagaatcataccccatggataccacatattaaaccatgtatatctgtggaatactcaatgtgtacacctttgactacagctgcagaagtgttcctttagacaaagttgtgacccattttactctggataagggcagaaacggttcacattccattatttgtaaagttacctgctgttagctttcattatttttgctacactcattttatttgtatttaaatgttttaggcaacctaagaacaaatgtaaaagtaaagatgcaggaaaaatgaattgcttggtattcattacttcatgtatatcaagcacagcagtaaaacaaaaacccatgtatttaacttttttttaggatttttgcttttgtgattttttttttttgatacttgcctaacatgcatgtgctgtaaaaatagttaacagggaaataacttgagatgatggctagctttgtttaatgtcttatgaaattttcatgaacaatccaagcataattgttaagaacacgtgtattaaattcatgtaagtggaataaaagttttatgaatggacttttcaactactttctctacagcttttcatgtaaattagtcttggttctgaaacttctctaaaggaaattgtacattttttgaaatttattccttattcccctctggncagctaatgggctcttaccaagtttaaacacaaaatttatcataacaaaaatactactaatataactactggttccatgtcccatgatcccctctcttcctcccaccctgaaaaaaaatgagtccctattttttctgggagaaggggggggattgatttanaaaaaaaatgtattggtgg

SEQ ID NO: 40963 - DNA, 400 bp, Homo Sapiens
cactattttttaatataaatatgtcagtgcttgcttgatggaaacttctcttgtgtctgttgagactttaagggagaaatgtcggaatttcagagtcgcctgacggcagagggtgagcccccgtggagtctgcagagaggccttggccaggagcggcgggctttcccgaggggccactgtccctgcagagtggatgcttctgcctagtgacaggttatcaccacgttatatattccctaccgaaggagacaccttttcccccctgacccagaacagcctttaaatcacaagcaaaataggaaagttaaccacggaggcaccgagttccaggtagtggttttgcctttcccaaaaatgaaaataaactgttaccgaaggaaaaaaaaaaaaagggccacat

SEQ ID NO: 40964 - DNA, 716 bp, Homo Sapiens
  misc_feature (4)..(4): n is a, c, g, or t
  misc_feature (677)..(677): n is a, c, g, or t
accnctgtggatcccccgggcttcaggttttgtgtttccaaatcactttttggtttttaagaatttcttgatactcgtatagcctgccttcaattttgatcctttattctttctatttgtcaggtgcacaagattaccttcctgttttagccttctgtcttgtcaccaaccattcttacttggtggccatgtacttggaaaaaggccgcatgatctttctggctccactcagtgtctaaggcaccctgcttcctttgcttgcatcccacagactatttccctcatcctatttactgcagcaaatctctccttagttgatgagactgtgtttatctccctttaaaaccctacctatcctgaatggtctgtcattgtctgcctttaaaatccttcctctttcttcctcctctattctctaaataatgatggggctaagttatacccaaagctcactttacaaaatatttcctcagtactttgcagaaaacaccaaacaaaaatgccattttaaggtgtattttttcttttagaatgtaagctcctcaagagcagggacaattgtttctgtatgttctattgtgcctagtacactgtaaatgctcaataaatattgatgatgggaggcagtgagtcttgatgataagggtgagaaactgaaatcccaaacactggtttgntgcttggtttattatgacctcagattattgggtttggcc

SEQ ID NO: 40965 - DNA, 477 bp, Homo Sapiens
taacttaggaagccacaatgttcttggcccatcatgacattgggtagcattaactgtaagttttgtgcttccaaatcactttttggtttttaagaatttcttgatactcttatagcctgccttcaattttgatcctttattctttctatttgtcaggtgcacaagattaccttcctgttttagccttctgtcttgtcaccaaccattcttacttggtggccatgtacttggaaaaaggccgcatgatctttctggctccactcagtgtctaaggcaccctgcttcctttgcttgcatcccacagactatttccctcatcctatttactgcagcaaatctctccttagttgatgagactgtgtttatctccctttaaaaccctacctatcctgaatggtctgtcattgtctgcctttaaaatccttcctctttcttcctcctctattctctaaataatgatgggggctaagttatacc

SEQ ID NO: 40966 - DNA, 788 bp, Homo Sapiens
ctagtggtgcagctctgagttctcccaaagagagtccctccagcaccacccctccaattgagatcagctcctctcgtctgaccaagttgacccgccgaaccaccgacaggaagagtgagttcctgaaaactctgaaggatgaccggaatggagacttctcagagaatagagactgtgacaagctggaagatttggaggacaacagcacacctgaaccaaaggaaaatggggaggaaggctgtcatcaaaatggtcttgccctccctgtagtggaagaaggggaggttctctcacactctctagaagcagagcacaggttattgaaagctatgggttggcaggaatatcctgaaaatgatgagaattgccttcccctcacagaggatgagctcaaggagttccacatgaagacagagcagctgagaagaaatggctttggaaagaatggcttcttgcagagccgcagttccagcctgttctccccttggagaagcacttgcaaagcagagtttgaggactcagacaccgaaaccagtagcagtgaaacatcagatgacgatgcctggaagtaggcatataaatgctcacagttaaatctgacccagtaaactctgtgtgtttagggagtatacaaaagaaatcgttcttttccttttcttatgttggtgaatacttcattcacaagggaaaataatcatatcccaaagagagagcaattgggcttgtttttgcttttgggtattggttccttccctggttatctgcctttatagaggagaaaagtttgt

SEQ ID NO: 40967 - DNA, 917 bp, Homo Sapiens
  misc_feature (842)..(849): n is a, c, g, or t
  misc_feature (854)..(857): n is a, c, g, or t
  misc_feature (874)..(874): n is a, c, g, or t
  misc_feature (887)..(887): n is a, c, g, or t
  misc_feature (889)..(889): n is a, c, g, or t
gaaagccttaggtatcaattccaaaacagtgattgaaatttcccaaaataattatggcttctgtcatctccagagataatctggcttggtttaccccataatctaatttcagaaaagaaagctttattttaacactcatctgaatcaacattaaagccttttctctcaaagcgtttattgagaaactcaaatgaatatactttttgaattactgtcatcaaaagtgtacggcttcctgtgctgcttgtgtcaaatggaacctgccctctaaagcactttctttcctttacttgcgtggtttcatgtaagctgtgctgtttagaaacaacatctcagactttacaaagaaatgacaaagaaggcaattgcactttttaagggatatcgacaagcagtttctgttttctaaaggacaaaatacagagtgtgtgtcatttttaattagattctttcccctgctgagttggaaattccagtgcagcactgattgaccacagttgccaatctaaaagcacaaagacagaagtaaagctttatgctaattttatttcaatatgatagaaaatttatcttggcatgtccttttttagataactccagcaggaaactgtaactgctatgtctttaggaaaatgtagaagaaagaacattattattctttaattcctacaaggtactcgaaaaccttaagtgaaaaagatttctatctttttatcttagcgcatttatggaaaaaatattaactatcctgaaatatttataattttgtaggaaaaatatgcatctattttttcctgacttcctttatatagaaataaaaagtatttttggaaagctccaannnnnnnncccgnnnncccgcgcgcggggtcgncccttccccctcncnaaggggggggccgctccagaaaatcccc

SEQ ID NO: 40968 - DNA, 595 bp, Homo Sapiens
ggtgaacttgagcagatggtttctgaggacgtcccgctggaccaccgcgttcacgcccgcatcattggtgcccgcggcaaagccattcgcaaaatcatggacgaattcaaggtggacattcgcttcccacagagcggagccccagaccccaactgcgtcactgtgacggggctcccagagaatgtggaggaagccatcgaccacatcctcaatctggaggaggaatacctagctgacgtggtggacagtgaggcgctgcaggtatacatgaaacccccagcacacgaagaggccaaggcaccttccagaggctttgtggtgcgggacgcaccctggaccgccagcagcagtgagaaggctcctgacatgagcagctctgaggaatttcccagctttggggctcaggtggctcccaagaccctcccttggggccccaaacgataatgatcaaaaagaacagaaccctctccagcctgctgacccgaacccaaccacacaatggtttgtctcaatctgacccagcggctggaccctccgtaaattgttgacgctcttcccccttcccgaggtcccgcagggagcctagcgcctggct

SEQ ID NO: 40969 - DNA, 734 bp, Homo Sapiens
agacactcatcactttcgtgaacaagcacctgaataaactgaacctggaggtcacagaactggaaacccagtttgcagatggggtgtacctggtgctgctcatggggctcctggagggctactttgtgcccctgcacagcttcttcctgaccccggacagctttgaacagaaggtcttgaatgtctcctttgcctttgagctcatgcaagatggagggttggaaaagccaaaaccgcggccagaagacatagtcaactgtgacctgaaatctacactacgagtgttgtacaacctcttcaccaagtaccgtaacgtggagtgaggggctgccctgggcccaccactgcccaagagttcttgctgttggcgtactggaccctcctccgaactgccttaccctgcttattcctgtctcttgcactgtgctctcccacaagtccagctgcaacccagagatagtggaaactgaaattaggaaggaaatcatcaataactcagtgggctgacccatccctcccaggcgctggggaccaacctagcaatgaaggttgggaaggttgttcccttcccggtgccaggtccagatttccctccatgatttgggaaccagcttaggcaaaagagtccccacaagatgaaaataaagatcctagttaccattcaaaggatgctaactgtgtgtcaggccccacactaagtgctctgctctgatatactcaaggccattaatctt

SEQ ID NO: 40970 - DNA, 876 bp, Homo Sapiens
agaaaattgtgtttgggattgagttcttgtctcagcccagaatcccaggtcctgggcctggttttctaatgctgtcatctcagttcgatattttactttagaacctggaatctcctacttaatatatgaccatgactttgaaaggcaaaagaggaatcaagaataaataaaacaaacttaatcttcatctttaaaaaaaagaaaaaagaaaccaaaatgagaatcaacacttcataggctcactgggttttcttttcttttctgttaatttaaactcagttatttttaatgcttaatacatacatggtgcaaaatttaaaaagcgcaaataggtatctagtggaaaacctaagcctccctctctcctccggcacccattacctctccctggaggcaactgtttgatccatttcttacacacactgccagagatactctaggcatgtaaagcacaaacatacatataaaatctgcgggcttcaaaaaatataagtaggatgtcatctatactgtcatacactttgttttttatcacttaatgttatatctgggatattgtattaccctgggtattaaaagactcctttcacattttaaaaaaaaaaaacgcaaaaagaacatcagacacaagacgaaccagacaggactaaagacgccgggcacgacagaagaaagacaacaacacagagggcgggggccataaacattccaggaagcgacacaagaccacagcacgttgtagtaaaaggcaccagacagaagtcaaaacaagcacgcgcgttaaatacggaagaaaaagcggtgtctaggagcccactgggggaaagagacaccaggacgaggataacgggtgggccagctcgcgagagcgatatc

SEQ ID NO: 40971 - DNA, 730 bp, Homo Sapiens
aaagtgtacgacccaaagaatgaggaggacgacatgcgggagatggaggaggagcgactgcgcatgcgggagcatgtgatgaagaatgtggacaccaaccaggaccgcctcgtgaccctggaggagttcctcgcatccactcagaggaaggagtttggggacaccggggagggctgggagacagtggagatgcaccctgcctacaccgaggaagagctgaggcgctttgaagaggagctggctgcccgggaggcagagctgaatgccaaggcccagcgcctcagccaggagacagaggctctagggcggtcccagggccgcctggaggcccagaagagagagctgcagcaggctgtgctgcacatggagcagcggaagcagcagcagcagcagcagcaaggccacaaggccccggctgcccaccctgaggggcagctcaagttccacccagacacagacgatgtacctgtcccagctccagccggtgaccagaaggaggtggacacttcagaaaagaaacttctcgagcggctccctgaggttgaggtgccccagcatctgtgatcctccgggaccccagccctcaggattcctgatgctccaaggcgactgatgggcgctggatgaagtggcacagtcagcttccctgggggccggtgtcatgttgggctcctggggcgggggcacggcctggcatttcacgcattgctggccccccagatccacctgt

SEQ ID NO: 40972 - DNA, 844 bp, Homo Sapiens
  misc_feature (693)..(693): n is a, c, g, or t
  misc_feature (707)..(708): n is a, c, g, or t
  misc_feature (714)..(715): n is a, c, g, or t
  misc_feature (835)..(835): n is a, c, g, or t
ctagatctgaagaagctaagacgatcttcttcactgaaggaaagaagccgcccattcactgtagcagcttcatttcaaagcacctctgtcaagagcccaaaaactgtgtccccacctatcaggaaaggctggagcatgtcagagcagagtgaagagtctgtgggtggaagagttgcagaaaggaaacaagtggaaaatgccaaggcttctaagaagaatgggaatgtgggaaaaacaacctggcaaaacaaagaatctaaaggagagacagggaagagaagtaaggaaggtcatagtttggagatggagaatgagaatcttgtagaaaatggtgcagactccgatgaagatgataacagcttcctcaaacaacaatctccacaagaacccaagtctctgaattggtcgagttttgtagacaacacctttgctgaagaattcactactcagaatcagaaatcccaggatgtggaactctgggagggagaagtggtcaaagagctctctgtggaagaacagataaagagaaatcggtattatgatgaggatgaggatgaagagtgacaaattgcaatgatgctgggccttaaattcatgttagtgttagcgagccactgccctttgtcaaaatgtgatgcacataagcaggtatcccagcatgaaatgtaatttacttggaaagtactttggaanagaattccttctannatcaannacaacaaaaacacaaaaaccttctaatctagagatacttactaatctcattacatgagaatgctatgctgtagtgtactgggatatcactgaataccaatcatgatccaagatatagaanatatatatt

SEQ ID NO: 40973 - DNA, 581 bp, Homo Sapiens
ctctgggtggcccgtttcatcttgcatcgtgtgtgtgaagactttggagtgatagcaacctttgatcctaagcccattcctgggaactggaatggtgcaggctgccataccaacttcagcaccaaggccatgcgggaggagaatggtctgaagtacatcgaggaggccattgagaaactaagcaagcggcaccagtaccacatccgtgcctatgatcccaagggaggcctggacaatgcccgacgtctaactggattccatgaaacctccaacatcaacgacttttctgctggtgtagccaatcgtagcgccagcatacgcattccccggactgttggccaggagaagaagggttactttgaagatcgtcgcccctctgccaactgcgaccccttttcggtgacagaagccctcatccgcacgtgtcttctcaatgaaaccggcgatgagcccttccagtacaaaaattaagtggactagacctccagctgttgagcccctcctagttcttcatcccactccaactcttccccctctcccagttgtcccgattgtaactcaaagggtggaatatcaaggtc

SEQ ID NO: 40974 - DNA, 592 bp, Homo Sapiens
cttcgtctcaaaaaaaaaaaaaaaaacatagaatttggatcctttggtcgggttctcccaaattcttttgaggtgtccatggtcaactgcttcagctttgttttggcaaccccctgcccgaagtcgcatataggctgttcttcaccttgtttccaaggctgaggaacagaaagtagcctctgttttgaggaggtggaagttaagtatacatttattttttactgtgacttgttcaggaccacattttacaaaatgccttgtttccttcattgtttctggaaaggaaagttctattaatattgttttactttgaatatagaatagtttttttaattagggcttattttgaaaaattctgagtttaattcaaatgtatgccaataccttccaaagtaaggtaatattcagagacagttgttgtgatcagatggcttagagaaatttctggaatattcacattcgaagattccttattaatgaatgtctttgacttaaatctaaccaaaaactgcaacattattctttgtacattttcattatatagtgttaacaagcttagttgcaaacaaataaaatacttaagctattaaaa

SEQ ID NO: 40975 - DNA, 869 bp, Homo Sapiens
  misc_feature (686)..(686): n is a, c, g, or t
aaggttggaatttctcaagagaacaagaaggaagtggaaaagaaactgactgtgaagcctatagaaaccaagaacaagttctcccaggcgaagctgttggcaggagctgtgaagcataagagctcagagagtggcaacagtgtgaaaagactgaaaccggaccctgagccagatgacaagaatcaagagccctcatcctgcaagtctctcggaaacacctccctgagtggcccctccatccactgcccctctgctgcagtatgtatcggcatcctcccaggcctgggtgcctactctgggagcagcgactccgagtccagctcagacagcgaaggcaccatcaatgccaccggaaagattgtctcctccatcttccgaaccaacaccttcctcgaggccccctagtttctccgtccctacacagggagctcctccccaagggtagatcggaccgttcatgctgcctataggcattatgtccctcaaaaaaaaactcctttgcctgcatcctgtgtacaacatgacatttttaaccaatccaatctaaaaatgtgccagaatccacctgtggcccgaatcgtgtttggttcctctttctactccactgcagatgaccaaacctgtcccgctgccactttcctcactgatattgggaggagggcaaggcccagccgaagttccactanaaatgccccaggagaataggcaccggctggcttgccaaagggtttgggttttattgctttctgttttttcttttcccgacagcacaaagaagtaagggcagtttattgggacagggtgtttatttaaaacattctattgtaaaatgaatggggggttggtttggggttctacctggcatttgg

SEQ ID NO: 40976 - DNA, 671 bp, Homo Sapiens
cacgaggccaagattctcttgtcattggatggaaatctggccaaacagcaggccttatcgcatattcttacagcattgcaaatcatgtatgccagagatgctgttgtcggggccctgatgccggccgccatgatcgccccggtggagtgcccctcgttctcctcggcggccccttccgacgcatctgcgatggctagtcccatgaatggagaagaatgcatgctggctgttgatatcgaagacagactgagtccaaatccatggcaagaaaagagagagattgtttcctctgaggacgcagtgaccccctctgcagtgactccgtcggccccctcagcctccgctcggccttttatcccagtgacggatgacctgggagccgcaagcatcattgcagaaaccatgaccaaaaccaaagaggatgttgaaagccaaaataaagcagcaggtccggagcctcaggccttggatgagttcaccagtctgctgattgcggatgacactcgtgtggtggtagacctgctcaagctgtcagtgtgcagccgggccggggacaggggcagggatgtgctctccgcggtgctttccggcatggggaccgcctacccacaggtggcagatatgctgttggagctctgtgtcaccgagttggaggatgtggccacagactc

SEQ ID NO: 40977 - DNA, 739 bp, Homo Sapiens
aaaggaataggtaggagactcttctatctaatccttaaagcataatgttgaacattcattcaacagctgatgccctataacccctgcctggatttcttcctattaggctataagaagtagcaagatctttacataattcagagtggtttcactgccttcctaccctctctaatggcccctccatttatttgactaaagcatcacacagtggcactagcattataccaagagtatgagaaatacagtgctttatggctctaacattactgccttcagtatcaaggctgcctggagaaaggatggcagcctcagggcttccttatgtcctccaccacaagagctccttgatgaaggtcatctttttcccctatcctgttcttcccctccccgctcctaatggtacgtgggtacccaggctggttcttgggctaggtagtggggaccaggttcattacctccctatcagttctagcatagtaaactacggtaccagtgttagtgggaagagctgggttttcctagtatacccactgcatcctactcctacctggtcaacccgctgcttccaggtatgggacctgctaagtgtggaattacctgataagggagagggaaatacaaggagggcctctggtgttcctggcctcagccaggcggccacaagccataaaccaataaaacaagaacaacacataaactatacactgacaacagctcagcatcaaaccaaaaaggggcg

SEQ ID NO: 40978 - DNA, 831 bp, Homo Sapiens
aacttggaactgtcatgaggtcactgggtcagaacccaacagaagctgaattgcaggatatgatcaatgaagtggatgctgatggtaatggcaccattgacttccccgaatttttgactatgatggctagaaaaatgaaagatacagatagtgaagaagaaatccgtgaggcattccgagtctttgacaaggatggcaatggttatatcagtgcagcagaactacgtcacgtcatgacaaacttaggagaaaaactaacagatgaagaagtagatgaaatgatcagagaagcagatattgatggagacggacaagtcaactatgaagaattcgtacagatgatgactgcaaaatgaagacctactttcaactcctttttcccccctctagaagaatcaaattgaatcttttacttacctcttgcaaaaaaaagaaaaaagaaaaaagttcatttattcattctgtttctatatagcaaaactgaatgtcaaaagtaccttctgtccacacacacaaaatctgcatgtattggttggtggtcctgtcccctaaagatcaagctacacatcagttttacaatataaatacttgtactaccttaatgataaggactccttaaagttccatttgctaatgattaatacactgtttgggctggccagtttttcatgcatgcagcttgacgattgagcacagtcaggcctttgtattaaaaatgaaaaatgaaaaaacaaattcaaaacctattcaaatgggttctagttcaatttgtttagtataaattgtcatagctggtttactgaaaacaaacacatttaaaattggtttacc

SEQ ID NO: 40979 - DNA, 622 bp, Homo Sapiens
cccacgcgtccggataaggactccttaaagttccatttgctaatgattaatacactgtttgggctggccagtttttcatgcatgcagcttgacgattgagcacagtcaggcctttgtattaaaaatgaaaaatgaaaaaacaaattcaaaacctattcaaatgggttctagttcaatttgtttagtataaattgtcatagctggtttactgaaaacaaacacatttaaaattggtttacctcaggatgacgtgcagaaaaatgggtgaaggataaaccgttgagacgtggccccactggtaggatggtcctcttgtacttcgtgtgctccgacccatggtgacgatgacacaccctggtggcatgcccgtgtatgttggtttagcgttgtctgcattgttctagagtgaaacaggtgtcaggctgtcactgttcacacaaatttttaataagaaacatttaccaagggagcatctttggactctctgtttttaaaaccttctgaaccatgacttggagccggcagagtaggctgtggctgtggacttcagcacaaccatcaacattgctgttcaaagaaattacagtttacgtccattccaagttgtaaatgctagtctttt

SEQ ID NO: 40980 - DNA, 580 bp, Homo Sapiens
gccttactgtagaagtggcttactgtagaagcagcttgctgagcccctccgagcggtccccagaattagctggttcacaacccccaccctcccccgcccccgcctgtgtcaggtgtggatgaggtcgtcacactcagaaggacaggcttgtctgccagctcacaaggggaggctgcagtgggtttgggagctgggtttaggcccctggtgtctgagggcccaggccttgccagcctctgctgctcctgctcctgggtttgaagatgcaggccgatcgccagctccgtggcagcggtcactaaggacagcctgactgtgccatcttggagcctcaggcggggctccggagatagaagacaggtcgccggaggctccccctcctctcctctcccctctgcagatgctccctgggcgctaccctgcagggtgccaggcaggagtggtctcagaacgtgcgcttctgattattttactggggtccattgtccagatttttctttgattgtaaaatatatttttactttttagtcttctaatttaataaatgatccatataaaaatagagaaataaactgcggcc

SEQ ID NO: 40981 - DNA, 721 bp, Homo Sapiens
  misc_feature (646)..(646): n is a, c, g, or t
  misc_feature (676)..(676): n is a, c, g, or t
  misc_feature (700)..(700): n is a, c, g, or t
gccgctgccctcctggagaaccttcttcaaccggaaatgtgaagaccctcgacatcttgaattgctggtagagtatgtgaggaaacagatacagtacctggactccatgaacggggaggatctgcttctgacaggggaggtgagctggcgccctctagtggagaagaatcctcagagcatcctgaagccccattctccgacttacaacgacgagggactttgatgggctgggccctccgcacggcccgccagctggcttcgaggaacctccaggagagaagtgcctgttggtccaggaccctgcagaaagtggcctgaactgacctctgaacagcatctgtcaaatacctggccccatttgtgttgagtttcctcttagtgtgcccaggagtctgatctgctggggtacagggctgggagaacccctagctctcccggggtgtcctctcccttaggggaagccccgagtgagagtcccccagcacacactccccaaccccctccagcaactacatgtgactgatagcttttcccaaaggccaaggaagggatggtgtaggttcaaaagggaaaccccccagggcctgctgtggcctaggagcagattgtaatgctgccgagtccggtcggtgaccacgcgttgtcnctcggctttcagccatggggttgagttggncattaaaagaaacagagacttcanaaaaaaaaaaaaaaaaaggac

SEQ ID NO: 40982 - DNA, 791 bp, Homo Sapiens
  misc_feature (727)..(729): n is a, c, g, or t
  misc_feature (731)..(733): n is a, c, g, or t
  misc_feature (735)..(738): n is a, c, g, or t
  misc_feature (740)..(740): n is a, c, g, or t
  misc_feature (744)..(744): n is a, c, g, or t
  misc_feature (746)..(752): n is a, c, g, or t
gggttgctggggtgtatacatttatgtctttgtgaaatacactggtggtgtccttcttacaaaacttttgaaataaaaaaaaaactcaaatcttcactgtctgtgaaatccccttcagtcttttcagattgcattgactgtcctcttgatttttcatattacatgtcaaattacttttgctatcataaataagctccaaagtcccccatttaattttttttaattttgtgtatgatgggtttcagatctggcttttgttaacattttggggcttttttaatcttttcaatctggcgtattgctgtttgaccttttgcaaggtacttaattgctcttttgttatagggtatggatcattgtcagaacttgattggaggggtttaaagagattgtgtctgtttaaaatcagtatgattcagagaaggaccaaattatatgaatgtcttacaatggaatttacttgttactgatttttttgttctattgtaccactattttttgaggattttgcacagtgtaaaatgacataatcatagattgctatggtttaggctgtatatacagtgaaaactatgggttttaaatgtttggggaaattcctatggaaaaaagagagacttgtagaagaacctctaacaaggttaatgtgcctgcccaaggtctttttgaaattttcagggtgtaaatttcccttttagctttatcccaaaataaaatttatttaaannncnnnannnnanaaanannnnnnnccttgtccggccggcctcggcccctccaagaacttttct

SEQ ID NO: 40983 - DNA, 694 bp, Homo Sapiens
attaacccaagtacgttttcttatttaaatgacaactttggtgctttaaaatgaggtaccactttttaaagctagctgtgtcgagttaaagaaaaaatcagcagttttttctcccagaaatgtaattgccaaacactattcatccccatcttaagttttacaaggtgatgtaatcagcttgttgtagtgatgctggccaaatggtgctcagcaggtgagaacaaaaaaaccccagatttcagtgaactaatacacagcttgagcgtttccatgtgctaatgttgcacacttactaaaaaactttggaaatggaaaataatgtattagtgcaacagttgatgtgcttctttgggcaaagatatagttttgttccacaatttgtacttaaaagcgaaagaacattgaaaacatagacttactggctgtagcaatgctggcctgttaactgataactagaacttaggttcacgtttatgtaaagtgtgtaaaacctagtagagcttgcatagtcggcactcagtaaatgtttggttccttttgccccttggtaagtttattttaccatcctcccacctgccattctgactttattaaatcaacatgtggaccagagtgttaatgagatgttattgcagaagagattgagaaaattggtatatcatgcagataacatacaaaatctttttgtaacgta

SEQ ID NO: 40984 - DNA, 965 bp, Homo Sapiens
tgtcactggaagcgtcggtggaatgttcttggtagctgtgtggtggcgatttggaatmctcwcgatctgcatgctctgtgttggactagtgctggggttcctcatctcgtcagtgactttctttactccactgggaaacctaaagattttwcatgatgatggtgtattctgggtcactttctcttgcatagctatcctcattccagtagttttcatgggctgcctaagaatactgaacatactgacttgtggagtcattggctcctattcggtggttttagccattgacagttactggtccacaagcctttcctacatcactttgaacgtactcaagagagcgctcaacaaggatttccacagagctttcacaaatgtgccttttcaaactaatgacttcattatcctggcagtatggggcatgctggctgtaagtggaattacgttacagattcgaagagagagaggacgaccgttcttccctccccacccatacaagttatggaagcaagagagagagcgccgagtgacaaacattctggaccctagctaccacattcctccattgagagagaggctctatggccgattaacccagattaaagggctcttccagaaggagcagccagctggagagagaacgcctttgcttctgtagatgcccaggggcttggtcagtgtgcctcagctttggagttcatgcctggagtggttcaacagtctctggtgcaagtctaataagagatcaggcatatatatctgttctttgcataatattatggtgcccttattgatatatggtaagggtgtactaggggrttaggrtgattgtaagagaatgagaaagatgaccaaaaggttggkggtagggaggctttttcttatttccaaatacttgagaaattacttttgggttacaatctatgwtmacttattccattaatagatacattaaaaaattaaaa

SEQ ID NO: 40985 - DNA, 938 bp, Homo Sapiens
tgtatatagagtaaaattattgcaaaatttaaaaatgatttttcttggcattctttttaaatactctgaaacatatatgcaaatgagaaacctttaatcatactaaagccagtaatgttaagaatttttcctttggattttataattaagagttgcttataaatacttatgacattgagctcttactgttttagttgtcttaaaagaatgggacatgtcatgaactggtttctttttttaaaaaattcttgatgtgaattccactgtwacctgaccatgtatattcagatgaatgtactctttcttgttccttgtaaccagattaatctgagagaatgtggattcatcctgtcatctttctcatactcaaatacttaaaatggttcttttgcccaaaagtctcagagtcttcattttggtacagtggagtcacaacttgtaaggtggttaggttttaaagaccgtgcctaaggacaaaattgagcatgctcagaatggtccttgaaaatctcctaaattaccaataaatttctctttgtagtcttaaagtttaaatccctgtggagtgatatgtaggtatgaatatattatgcttatattaagtacaaaaatacaaactgcatatcaagagattcttatagcattaataatttccatgcatgtrtctttttccagtaggtatggttgaatttatgtaaatttattgctaatcccatcccttacgatctagagtataagctgcgcaagggcagaagtttttatctggtttgttcatggatgtattctaagagctgagaacagggcctggacacaataagcattcaataaatatttactgaatgaatgaactcctacctatattcctatttataatttggcyccactttatcctactttagctcccattcaattyaataaaaaaamattttttggamaca

SEQ ID NO: 40986 - DNA, 659 bp, Homo Sapiens
gcgacgatatccagaagcgcgagaacgaggtcctggaagcctggaagtccctcctggacgcctgtgagagccgcagggtgcggctggtggacacaggggacaagttccgcttcttcagcatggtgcgcgacctcatgctctggatggaggatgtcatccggcagatcgaggcccaggagaagccaagggatgtatcatctgttgaactcttaatgaataatcatcaaggcatcaaagctgaaattgatgcacgtaatgacagtttcacaacctgcattgaacttgggaaatccctgttggcgagaaaacactatgcatctgaggagatcaaggaaaaattactgcagttgacggaaaagaggaaagaaatgatcgacaagtgggaagaccgatgggaatggttaagactgattctggaggtccatcagttctcaagagacgccagtgtggccgaggcctggctgcttggacaggagccgtacctatccagccgagagataggccagagcgtggacgaggtggagaagctcatcaagcgccacgaggcatttgaaaagtctgcagcaacctgggatgagaggttctctgccctggaaaggctgactacattggagttactggaagtgcgcagacagcaagaggaacgaggagaggaagag

SEQ ID NO: 40987 - DNA, 771 bp, Homo Sapiens
cccttccgtcctggcctccctgcctctccagcccctcctctgcccccaccccagtcttcccagtgagaatcctgccagctgggtggtggcctggcgcagagtgggagaggctgccactgacaggatggctatgacctgggacatggaaacagtgacctccgcgttctggtcccgagatcctcgcatcagcgtcatcgtgtgcaccggcttggggggctggagttccggttttctttgttttttctctttattcgtcctttctcaaagatgggatactgatcagaattgctctgtatatgcttgggactggatggaaagactttggagcagctgtggggggtggggggacaccgacaaccaaacagacgtgctggctccagtcctgtttttactttcaaaaaccaacaagcccgacagtggagcctgtcccctcccgggagggtgctcatggccccactcacctcatcaccccacggaaacctttgtgtcttgccctggaagacacccgaattctttgtacattgacatgcccttctccttcctccctcccctgtagctggtctttgttttactccctccctttctgatccatgtatatcatattatgtgagatatcatctgcctgaaaaaagactttgtgcggattattgggaacattgtagctgtttctgtgttttttcttaccttgtagtctggttctgaattaagagaggaaaaaaaagtaattatgatacattgtagtttgtgtacgatatatgttgataacgtttt

SEQ ID NO: 40988 - DNA, 746 bp, Homo Sapiens
cgcgtccgggcttatctaattaactgtgtttggaactgctataaatacatcaacaaccgaaacgtgccggagattgctgtgtaccctgcctttgaagcacctcctcagtacgttttgccaacctatgaaatggccgtgaaaatgcctgaaaaagaaccaccacctccttacttacctgcctgaagaaattctgcctttgacaataaatcctataccagctttttgtttgtttatgttacagaatgctgcaattcagggctcttcaaacttgtttgatataaaatatgttgtcttttgtttaagcatttattttcaaacactaaggagctttttgacatctgttaaacgtctttttgtttttttgttaagtcttttacattttaatagtttttgaagacaatctaggttaagcaagagcaaagtgccattgtttgcctttaattggggggtgggaagggaaagagggtacttgccacatagtttcctttttaactgcactttctttatataatcgtttgcattttgttacttgctaccctgagtactttcaggaagactgacttaaatattcggggtgagtaagtagttgggtataagatctgaacttttcatctgcagaggcaagaaaaatatttgacattgtgacttgactgtggaagatgatggttgcatgtttctagtttgtatatgtttccatctttgtgataagatgatttaataaatctctttaaatactaaaaaaaaaa

SEQ ID NO: 40989 - DNA, 577 bp, Homo Sapiens
gggcaccgggctggcgtttcccatctgtcttcattagcagaaaagtgatgatggattttatttcactcacactccagtttgtaataaaatgccaaattctgtcagctatccaaacaagccaccatttgttcttgttgcttctctggatccagaaatgttgccattcttggaaactgtcccattgcttcgtatttctgccaacgtagctctgcctgcctgtcaacccctcactgcactctgctcatcacgggaggatacctgtgtgccggcagcccctcagggactctcagccctggcactggcaccccagggttggccccgtcagcagaggcttggctttcgagccagtgggtgtctctcctttgggcctgggcggcttgctcctgccagccatgccttcagggtaggctctgagcaagctggcgaacagccctggctgctccaaaaccaaaaagctgggtcctctggaggaggggcgagctgtggagcagccacccactgctgccccaagctcactcaggaattcacacccgcctggtttcttgaagtgtgctgggtccttccctctgctccctac

SEQ ID NO: 40990 - DNA, 570 bp, Homo Sapiens
gaagtatgggtctcatcattcccatacacagaaacacaaaacactttgatcataaacttttttcttcagaagccaaactaacttgcagaataatagagccactggtttaatgtttcctcaagataggttttagtgtaagctagtattctgtgtgttcgtagaaatgattcaatacctgcagctggtgaattaggaattgtatttgttgccttttttatattagatgaggtgcaaaaattttaatgctagtcagtatgcaccaccacaggaaagttagatcccattagcacttgaaactacagctttggaaacttaggctaagttaatttggatttgttacttgattcacctactgaccttttcttttgtttgaagtgcttatcagcataatgagctaagtgtcatgcatatttgtgaagaaacaccctttttggtcccttttgggacagagaggtactccttgatctttatgaatgacaggttactgttttgccttattgcttaacttaatgtagtgaaataaagcagacaaagcttgaaaaaaaaaaaaaaaaaaaaatcgctaatcgg

SEQ ID NO: 40991 - DNA, 769 bp, Homo Sapiens
gcacaccagctgcccggtggggcagacctgctgcccgagcctgggtgggagctgggcctgctgccagttgccccatgctgtgtgctgcgaggatcgccagcactgctgcccggctggctacacctgcaacgtgaaggctcgatcctgcgagaaggaagtggtctctgcccagcctgccaccttcctggcccgtagccctcacgtgggtgtgaaggacgtggagtgtggggaaggacacttctgccatgataaccagacctgctgccgagacaaccgacagggctgggcctgctgtccctaccgccagggcgtctgttgtgctgatcggcgccactgctgtcctgctggcttccgctgcgcagccaggggtaccaagtgtttgcgcagggaggccccgcgctgggacgcccctttgagggacccagccttgagacagctgctgtgagggacagtactgaagactctgcagccctcgggaccccactcggagggtgccctctgctcaggcctccctagcacctccccctaaccaaattctccctggaccccattctgagctccccatcaccatgggaggtggggcctcaatctaaggccttccctgtcagaagggggttgtggcaaaagccacattacaagctgccatcccctccccgtttcagtggaccctgtggccaggtgcttttccctatccacaggggtgtttgtgtgtgtgcgcgtgtgcgtttcaataaagtttgtacactttcttaaaaaaaaaaaaaaaaaa

SEQ ID NO: 40992 - DNA, 579 bp, Homo Sapiens
gatttgggctatggcagaggctacaagtacgaccccatgtacagcgagcctgtggatcaggagtacctgcctgaagagttgaggggggtagatttcttcaagcagaggaggtgctgactcctcagggcacgacagcagaaggatgttgcttttttaagggagggccagaaagaaagttagtggattgcaaagttggttgcctggtggaagttagaacagaccaacatttgtgccataaatttaagagttccataggtggaggcgcagttctttcgaataaatgtgtaactttgaaattgtgttcatttgcactcggtgcagcggttatgcttatgaaaatacctggcagctttgtgcaatgaattaatgttataaggaattatctattttgtcatagtatttaagtcataatgtcatttcagaattcagttctgtaggattttcttttctttaaaaaatgtatattctgggtggttttaattggtaaaaaaatgtaattgtgatttaatactgcatagtgttttgggtattttttttatatgcaaaggtcttacgagccaataaaactatttcaaagta

SEQ ID NO: 40993 - DNA, 839 bp, Homo Sapiens
atcagccgaaccaggagaggcctgggctgcgactaaggagaaagaaatcgggggtttctgagagcagatggtgcctttgtgggtgcagggcttttgtggaaattgtcagcctctacgggcagagtccggcatcccctccccagactgcctgctgtcaaaccacggagcagctggagcctgccctgtccacggcccgtttccacccgggcatgttcgtctctcatgacttcggcagaggcccctggtggccttcagtttcagtttctcatccaggaaggtaaccttgggcattggcagtgggtttccctatggcttggatccagattagaattgatctttgttttcactttccatagttaataacatgcaaaataatgagaagaatttattttaaggtgacagctatactggtccaacatcgcctgcttattgtcagggtacagaagtttaatactttcttaatccagtttttcaaacttctccctgtagaccgtaaggatgaattccacaataggatcctttttaaaatcgattttaaattgttgcctagtcctgccaaggttattatgtgcatctgttatttttccaatacatgtaaacagttgcagcatgatgctttgtttaatgtcctgttcttaagctcgttagagccagttttgaaacgtttggtcttaccgtgaacggaggctggcttggcttagccacgctgatgagtaagtgagggatgtctccatcttgagatcaccaggcaagagagttgcctgcaccaggtaagaggccaaagcccctggggtaacagtccccaccgctacccgaggtaaaacaataaaagctatgtg

SEQ ID NO: 40994 - DNA, 602 bp, Homo Sapiens
tcatgtctcattaatcacaccaacaaaaagatcctgtggtacagattcacagtctgagaatgaggcttcaccagtaaaacggccacgactacttgagaatacggaacggtccgaggaaaccagtcgatctaaacagaagagtcgacgtcggtgcttccagtgccaaaccaaactggagctggtgcagcaggaattgggatcgtgtcgctgcggttatgtgttctgtatgttacatcgcctccccgagcagcacgactgcacattcgaccacatgggccgtggccgggaggaagccatcatgaaaatggtgaagctggaccggaaagtggggcgctcctgccagcgcatcggggaggggtgctcctgaaggccaggcatggccaccacgtgacgctgttcttagttcactaatgttagccttatttaggacaaagtcagccagacaccttgtactgggcacgcgtcagactgcagccagtccgtttcctttctttagccagccatcctggtactgtagtttaggggttgatggtggttgaaattgatttctggctggttactaaggtgcctgctagccattgtataaaattaaaacatgaaga

SEQ ID NO: 40995 - DNA, 884 bp, Homo Sapiens
gactgaccggaccgaaggagtagaaatttaaaaatcaacagccacacccctcctccagtccttctcctcagttcttgtgtgaaactccagctgatgttaccacagtaacatcagttaattgggcaagccctgatgtcagtgtgtgtaactgacctctggcctggcctgcacagagaagccctataatcacaggtctgtggtggccccgaaatggggggcctgctagtcaggaggatgctgtgcacactgtgtgtgatgaatctcgccagaaaggctcctgaggtcccaggttggcacttctccctgcagccattgtagaagatctgctggtccttgcaggcaaagctacagccagaatgtccgtttgaaactcctagctcatctgtcaccgagcttcatccgaatgtgccacggagcttgctctccacttcctccgtgcagtggccctgccacagccctccctcggcacactttgaccctttgtaggattggaattagcaggactcggctatttaaagcaccagtctggggtcgcctgggcccctgctgaccccctcctccagagcagccagcccagcccgggaacaagacggacttcctctcccttcggactcacagcctttgcagagtcaagctccacttgaagctcactcagtaatatcctttcaatgtgttttatattgttttgactgcctttttttgtagaaataaaaattgaccttagaatttatcgtcagataaacttgtaaagatttgaatattaatgtctttttcaaagcaaatggggattgtccccggcactagtagaagaatccatgtcgctcctgacacccccaaggaaacccaaccatcccaaaatgccgtggtgttcaccaaccctcggc

SEQ ID NO: 40996 - DNA, 522 bp, Homo Sapiens
cttgtacattttttaatactctgattctgtaacatttctgagttttgttttgttttacagaaaaaaaaaaaaagtgataaagcaatcagaagaccaagaggtttactattgatgcttagggtcgtctgaccttggctggccaatagacctacacggccaaattaatttacgagagtaataatttttcaaaagccaattttttttctgtattttctgtatgaaactgccaatatcatgaatagaaagggagaaccataaaggagaaagaacgtgatgttctgttatgttcatgtaaacctaaagaaacagtgtggaggcaggcgcgatcagccgaactctagggacttggtgttgcttggaaggcatccatacctgcattttgcattcttcgtatgtaatcatattgccaaagacaaactatttcatcatttattgtaaataacacttttccccagacctaccataaagtttctgtgatgtattgtcttccagttgcaataaaaattactgagttgcatcaat

SEQ ID NO: 40997 - DNA, 538 bp, Homo Sapiens
tgagtttgggacctgttggcagaagggaatgtcactccctggaaacaggttcagcatgtttgcacttgttattttgtagctttaatgatttttgttttctaatagggcaaatgtctctaagcttggtgtttagagctgcttcatattttaaactagttccattccacagttctagttcaaaccagtttttacagcctcctgggtgggtcgtcttgacccaaactcttgtgttgttacattttgagaggttttcataccagaatgtaccaaaaagtgcacaaggtaaaggtaatttacagccagaaacaaatatacatttgtttcatttcttgactttccctaagcagataagcagaaacttgtttaactcattactttgtttgatgtgtcttacatatttttgactaaaagttatagaatgttattcctctgggggaatcttttacaggtggaggaatggggatagcagtattgcctcagattcaaactggcatcaccataaaccctgtaggccagggtggaatgaagtcagctcctt

SEQ ID NO: 40998 - DNA, 581 bp, Homo Sapiens
cggtatagggttttgttttgttttttttaacctaaaaactgaaatgccatatagaaaaacagcattgtttttacagtttgtagtaagtaactttttaaagattttatcaaaaagaattttgtctatagtgagtaaaagaagttctaataatggtcctaatcactgcatttttaaaaaacaaagttcaacacaaatgacatttgttttaaactttagtagataaaaggtgaaccatgtgacatgggcatttttgtaagtcaaaaacaaatttcacatatggtaaacctaatattcacagtgtgttccctcacttgtaatctctgaatacaaatatactagcttttctaaagggaatcatttttttaaaagtagtgccactgacaagatgctacagtgaagattatccattcttaggatatttattttcagtgaacattttctgcacaaaggtagtgttgcactgggacacaagccttttaacagataaccagttgaaatcaaacactgcctccacaccgagttctgttgtgtatttgatagtaaattgatttaaaaataaaagtggtttttgtcctcgtgcc

SEQ ID NO: 40999 - DNA, 809 bp, Homo Sapiens
  misc_feature (778)..(778): n is a, c, g, or t
  misc_feature (782)..(782): n is a, c, g, or t
  misc_feature (803)..(803): n is a, c, g, or t
gaagtaataatttattccacatctacatcagtgaaagctatctacctatcctgagtctatcttaaaggaaaaaaagaaaaaaaccttatctcttgcccttattttgaattttccactctttcattaatttgttttaagctccgtgttggaaaaaaggggtagtgcattttaaattgaccttcatacgcttttaaaataagacaaatctacttgataatgtacctttatttgatctcaagttgtataaaaccaataaatttgtgttactgcagtagtaatcttatgcacacggtgatttcatgttatatatgcaaagtaggcaactgttttcttagttacagaagtttcaagcttcacttttgtgcagtagaaacaaaagtaggctacagtctgtgccatgttgatgtacagtttctgaaattgttttacaagactttgataataaaacccttaaacttatgttcatgttcctgtaaaaccgtatttgtatttatttacgctactgaatgtatgacatttacctcattcattttacaaattctttccctttctgtccacatatttcagtatagtaaaaagaggaagtctatcactgtagtgataattgccatcaaaattgtcaaaaatgatttaatttctatccaaaatagtccttttcttagcttagtatcattttattgcttattttttgtgtgggaatggggttggataaagcaatgaactttagtataaacaaatccccctattctagccaaatttatattttcggggaaatacngaanttggctttctggagtagtatngaactg

SEQ ID NO: 41000 - DNA, 484 bp, Homo Sapiens
gagctgtgattgcgccactacactccagcctggatgacaggacgaaacctgtctcaaaaacaccaaaaaacaaaaaccggtctcctggggtcatggtagcacaaacgcacatgactgagtgctcaggggttctgaggcttgtccgctgacctggggctctggctgggagatctgggggacctgctgtcctatatgtgatgctttgaaagaaaggggcatcattccaagccaagaggcccagagagggaccgtggggtgttcaggcttctgtgaggccccagtgagatcctgtggctgtgccccatcacctccacccactctgccctcccactagctgcccaacggatgaatcaacgccttggcagagttttccagcagggccttgcagagagtgtgtgtgacctgtgtggccactgccttggggacgggtgaggagttagcctggaacattccagcgtgggcattattgtcctgttgcaagttc

SEQ ID NO: 41001 - DNA, 769 bp, Homo Sapiens
gtttttttttcttgctggtaattttatggagcaggttaagaaggctgctctgtgttaggataaactgtataccaataatgttgacaacctgtaatgagtgttgcattttacttcttgtatcttttccttcctaccttgatgccagtaatctataagggatctttatagtttgaatgtatttgaataacttcagtatactttagttctacttttttatttgactcacaaccattcttaggtctcaagtattcccatgtgttttaaaagcctgaagtcagtgagatgaaattcaacatcaagaatttgaagtaacttgtaaggaaaaataatataaagataccattggggcagtggctcacacctgtaatctcagcactttgggaggctgaggtggaaggatcacttgaagccagagtttgagaccagcctgtgcaacacagcaagaccccgtctctacaaaaacttaaaaaattagctggctgtggtgttgctcacccatagttccagctactcgggaagctgaggcagtaagatcacttgagcccaggaggccgatgctgcagtgaactgtgattgttccactacagtccagcctgggtgacagagaaaagaaaaagaaaacattacataatttggctagagcataataatttgattttctggtttttgaaaatttgagttgcaataaaaggatatttcagtgtgcgatttcaaaaaaaaaaaaaaaaaaaaaaaaaaaaactcgtagacctcgtgccgaattcttggc

SEQ ID NO: 41002 - DNA, 590 bp, Homo Sapiens
catgtgatgaagagaatgtatttgctgcagttggaaggggtttatacgtgtatagccttcaaatgaagcgtgtgattgcctgccagaaaactgcacatgactccaatgtcctgcacgttgccagacttccaaacaggcagttaatctcatgctcagaagatggcagtgtacgcatttgggagttaagagaaaaacagcagcttgcagctgagcctgtaccaacaggtttttttaacatgtggggatttggaagagtcagcaaacaagccagccaacctgttaaaaagcagcaagaaaatgctacttcatgttcactggagcttattggagatttgattggacactcatcatctgtggagatgtttctatactttgaagatcatggactagtgacgtgctccgctgatcatctcattattttgtggaaaaatggagagcgagaatctggattgcgcagtttaagattatttcaaaaattagaggagaatggtgacttataccttgctgtctagtttaaggaattaaaaatacacatgcatgaaccttgaacatcaaatatcgggtactactctgaaaccattaatatattg

SEQ ID NO: 41003 - DNA, 480 bp, Homo Sapiens
gaaggagctgcgccacctgctgtcccagccactgtttacggagagccagaaaaccaagtatcccactcagtctggcaagccgcccctgcttgtgtctgccccaagtaagagcgagtctgctttgagctgtctctccaagcagaagaagaagaagacaaagaagccgaaggagccacagccggaacagccacagccaagtacaagtgcaaattaactggtcaagtgtgtcagtgactgcacattggtttctgttctctggctatttgcaaaacctctcccacccttgtgtttcactccaccaccaaccccaggtaaaaaagtctccctctcttccactcacacccatagcgggagagacctcatgcagatttgcattgttttggagtaagaattcaatgcagcagcttaatttttctgtattgcagtgtttataggcttcttgtgtgttaaacttgatttcataaattaaaaacaatggtc

SEQ ID NO: 41004 - DNA, 709 bp, Homo Sapiens
ctcatccgaggacttaagccagttttggatttgtaagccctgagtacaatacacttcctggaggcttcctcactgctgttgaagcaaaggatatgcatggggtggaaggacggcttcgaacctgggactcatatgccttgagaacaaatagattgttacagccttgggctgctgcgtaatcacagttcctcgaggctcttcctgagcacatgcccaagcatctgcctctggagagactgactccaaatgcaggtgcttccattggagctaggtcggaggctgctttatatgacgaactccagaaatggatgccagaatacggaggccaaacgttctgagtcctggtaaggacagtcgctctgggggtcctcattttactgcagttcctgcacgccagtgaaagagaggagatagaccctggaaggcagagctgcagatgctcatcatcaggtcaattctggagctacagttttgtttctgactggatagggatgcaccagtgactgtcacatcaagcagtccttttattctctctcctttagtatcgattttaaagggcattaggcactatggttccagagtttcttggggaaaacttgcagattcttattaattggttctgcaatacttaaataaattattttacaattataagttttcagattataacatttgtattaatttttactgattttccaagatacttctt

SEQ ID NO: 41005 - DNA, 619 bp, Homo Sapiens
gtccgcgattttaaagggcattaggcactatggttccagagtttcttggggaaaacttgcagattcttattaattggttctgcaatacttaaataaattattttacaattataagttttcagattataacatttgtattaatttttactgattttccgagatacttcttagatttactatttacgtagctttatgtacattctctgtaaaaatagacctctaaatatgaggctttacatgaaatttgtacacacatacacactaatgttagctccttaaattgctgcactaaggtgctggttagtagagatggacggagcctctcgcgttttgctctcagatgtgttaaaggcgcacgtgtacctgctctcagcggcagtgcggcctccccatctgctgggtgcccatggccctccctgcagcctcagtgatgacctcgtctgccagggacacaggttttcatcatttactggctcttatgtgctagttttgttggtagcacgttatttaatgcataaaggcagaattcttacaagtttttttttttttaatgtgaacatagatgcagcaccgactttttaaacttgaaaaaactggtataatgttaacttttaaaaaa

SEQ ID NO: 41006 - DNA, 501 bp, Homo Sapiens
gatgacgtcatgcttctggacacctgggaccaggtctttgtctgggttggaaaggattctcaagaagaagaaaagacagaagccttgacttctgctaagcggtacatcgagacggacccagccaatcgggatcggcggacgcccatcaccgtggtgaagcaaggctttgagcctccctcctttgtgggctggttccttggctgggatgatgattactggtctgtggaccccttggacagggccatggctgagctggctgcctgaggaggggcagggcccacccatgtcaccggtcagtgccttttggaactgtccttccctcaaagaggccttagagcgagcagagcagctctgctatgagtgtgtgtgtgtgtgtgttgtttcttttttttttttttacagtatccaaaaatagccctgcaaaaattcagagtccttgcaaaattgtctaaaatgtcagtgtttgggaaattaaatccaataaaaacattttgaagtgtg

SEQ ID NO: 41007 - DNA, 778 bp, Homo Sapiens
ccgcagctgccatcttaggggcgcctggcgctacgggtttctcgttggaggcggccttcgtggcagctgtagacgccgggaaaaggcataaagtccgttggccgacacctttctttcctccggcctcggtagaaccgccagcccgcgtccgaaggcggaggcgaggggaactggccgcgtgaggggcctgaggcgagcggttagagcgtctcccggaaggatgggccggtctcggagccggagctcgtcccgctccaagcacaccaagagcagcaagcacaacaagaagcgcagccggtcccggtcgcgatcccgggacaaggagcgcgtgcggaagcgttccaaatctcgggaaagtaaacggaaccggcggcgggagtcgcggtcccgttcgcgctccaccaacacggccgtgtcccggcgcgagcgggaccgggagcgcgcctcgtccccgcccgaccgcatcgacatcttcgggcgcacggtgagcaagcgcagcagcctggacgagaagcagaagcgagaggaggaggagaagaaagcggagttcgagcggcagcgaaaaattcgacagcaagaaatagaagaaaaactcatcgaggaagaaacagcacgaagagtagaagaattggtagcaaaaagggtggaggaagaactggagaaaaggaaggatgaaattgaacgagaagttctccgaagggtggaggaagccaaacgcatcatggaaaagcagttgctcgaagaactcgagcgacagagacaagctgagcttgccgca

SEQ ID NO: 41008 - DNA, 658 bp, Homo Sapiens
cggcagtggcggtgtgccaaacagtttgaaaacccaatcattaagtcttgtccagaatgccgtgtgatatcagagtttgtaattccaagtgtgtattgggtggaagatcagaataaaaagaacgagttgattgaagctttcaaacaggggatggggaaaaaagcctgtaaatactttgagcaaggcaaggggacctgcccatttggaagcaaatgtctttatcgccatgcttaccccgatgggcggctagcagagcctgagaaacctcggaaacagctcagttctcaaggcactgtgaggttctttaattcagtgcggctctgggatttcatcgagaaccgagaaagccggcatgtccccaacaatgaagatgtcgacatgacagagctcggggacctcttcatgcacctttctggagtggaatcatcagaaccctaaagagtagatggttgccctgcatcttgggctccatcggccgaaactttcccaagccagggtgtgcggagcttccctgtactgcagccaaggtgacgtgtgacttggatttgagtggagttgggcttagccttagtctcattcaatctccattattacagccatggggaagagtgaaagatataaagtaacctaattaaaaaaaaaaaaaaaaaaaaaaaaa

SEQ ID NO: 41009 - DNA, 916 bp, Homo Sapiens
  misc_feature (756)..(756): n is a, c, g, or t
gcgaaggtttccccgcccccgccgggcttaacgccgctgaaggtatccgggtgcgcgctgtcgcaacctgccctcatcctggcccgcgactgtaagaccggacccacatccagaccaatcttcctgtccgggctgctgcgacgcgggctccgcaggttgcaggcgggcggccggggcgcctgaaggttaccgagtgcatgagcgcctagcgcttcccgcgctgccccgcccgctggcccgccgacccgcccgccggctcgcccgccagcccctcggcgcccggcggcggcggcggcggtggcggcgacggtcgcaggaggtgccgtctgcctcccaggtgcgcgcttcgctcccggagccgcggaactcggcggccgccatggcgtccaacatggaccgggagatgatcctggcggattttcaggcatgtactggcattgaaaacattgacgaagctattacattgcttgaacaaaataattgggacttagtggcagctatcaatggtgtaataccacaggaaaatggcattctacaaagtgaatatggaggtgagaccataccaggacctgcatttaatccagcaagtcatccagcttcagctcctacttcctcttcttcttcagcgtttcgacctgtaatgccatccaggcagattgtagaaaggcaacctcggatgctggacttcagggttgaatacagagacagaaatgttgatgtggtacttgaagacacctgtactggtggagagattanacagattctagaaaatgaacttcagatacctggggccaaaatgctgttaaaaagctggaagacgggaagatgtggaacacaagtacgggcctaaaaatctcctacacttggcaaaaaacaacaggtctttatgggcccttacccccaaaatttgccccca

SEQ ID NO: 41010 - DNA, 814 bp, Homo Sapiens
  misc_feature (735)..(735): n is a, c, g, or t
  misc_feature (744)..(744): n is a, c, g, or t
  misc_feature (784)..(784): n is a, c, g, or t
tgcagctgaggtacagcggcggtttctgaggttcttcactcgcgactgacggagctgcggtggcgtctccacacgcaaccatgaagttgaaggacacaaaatcaaggccaaagcagtcaagctgtggcaaatttcagacaaagggaatcaaagttgtgggaaaatggaaggaagtgaagattgacccaaatatgtttgcagatggacagatggatgacttggtgtgctttgaggaattgacagattaccagttggtctcccctgccaagaatccctccagtctcttctcaaaggaagcacccaagagaaaggcacaagctgtttcagaagaagaggaggaggaggagggaaagtctagctcaccaaagaaaaagatcaagttgaagaaaagtaaaaatgtagcaactgaaggaaccagtacccagaaagaatttgaagtgaaagatcctgagctggaggcccagggagatgacatggtttgtgatgatccggaggctggggagatgacatcagaaaacctggtccaaactgctccaaaaaagaagaaaaataaagggaaaaaagggttggagccttctcagagcactgctgccaaggtgcccaaaaaagcgaagacatggattcctgaagttcatgatcagaaagcagatgtgtcagcttggaaagacctgtttgttcccaggccggttctccgagcactcagctttctaggcttctctgcaccacaccaatccnagcctgacntgggcactgcatcgtgacaactggactcttgggctgctanacagagtgggaaactctgcttgcatccatg

SEQ ID NO: 41011 - DNA, 873 bp, Homo Sapiens
  misc_feature (831)..(831): n is a, c, g, or t
tggaccggtccggaattcccgcggatagaattaccccaggaccattgtcccaaagtctagagtctttacaggtaggcaaaatttgttttcaatgcctgtgcctcagctgctgtcacaaatacccatcttaggatcccatcagcttcccatcccccaccagacagccacagtaccctcactttctccctattgttctttcaaatcctgttctcaggaaagaaactgccactaattcattcacactaaggtgtaaatgattgataataggaatgagttacctcttcccacagacatttgtttttaagtatgacagagcagggccttaatcccaagggaaaaggttatggaactggagggggtgagctttctgggtagaaggagacttcctgaatttccttaaaacccagtaagagtaagacctgttgttttggaaggtctgctccaccatctaagagcactgttttttttttgttgttgttgttgttgttttacggtctctgagggaatatagtaaaaatgcatatgcacgtgcaatttgcacggcagcatttcaccgattgtggactgtattggctaatgtgtttcctggtctttagatgcaaaccattaataacactatcttatctcatagttttttcaggggtgcttcttgattagtagggaattttgaacacctctttaaatacagctagaaaataaaaccaatttgtaaagccacatttgcatatgatgccagcctcacgcatttgtatatctccagaaattcaagtatgcctcaccaatttgcccgtctttaataaaatcttgtggttaaaatttgcatcacgtcgncctttcctatggtatgacgaaaaccagaaaacaagagatttt

SEQ ID NO: 41012 - DNA, 671 bp, Homo Sapiens
  misc_feature (631)..(631): n is a, c, g, or t
  misc_feature (658)..(658): n is a, c, g, or t
aagaacgaagttatatcttagtgcttgttcttcagtttccttcttgttatttatgctattctctttgtggctccattcttctttcaatcttctcagcttataaccgtctttcccttatgctaaggatagcccttacactcatcccatctatgctgtcaagggctgctggttggtgctggtacaaggagcccactcagcagttttcttacctttgcctgccctgcctttcatggaataagaaaggcaacgttttgcagcttccaaatttctgaagaaactaatctcagattggcagttaaagtcaaaatgttgccaaatatttattccttttgcctaagtttggctacccggttcaattgctttttatttttaatgtcttgactcttcagagttcgtacctcaaaagaacaatgagaacatttgctttgctttctgctgaatccctaatctcaacaatctatacctggactgtccagttctcctcctgtgctatcttctcttctatccaagtagaatgtatgccaggagctccttccctctagcaatttctactaaaatgtccaagtagaatgtttccttttacaatcaaattactgtatttattaatttgctagaatccagtaaatcattntggtagctctggctgtgctatcaatanaaagatgaaagca

SEQ ID NO: 41013 - DNA, 918 bp, Homo Sapiens
  misc_feature (30)..(30): n is a, c, g, or t
tcagtggctcttttttcctgcttccatggngcctttctggtggcagtctcaaactgagaagcccagttgccttatttttgaggctgttctgcccagagctcggctgaaccagcctttagtgcctaccattatcttatccgtctcttcccgtccctgatgacaaagatcttgccttacagactttacaggcttggctttgagattctgtaactgcagacttcattagcacacagattcactttaatttcttaattttttttttaaatacaaggagggggctattaacacccagtacagacatatccacaaggtcgtaaatgcatgctagaaaaatagggctggatcttatcactgccctgtctccccttgtttctctgtgccagatcttcagtgcccctttccatacagggatttttttctcatagagtaattatatgaacagtttttatgacctccttttggtctgaaatacttttgaacagaatttcttttttttaaaaaaaaacagagatggggtcttactatgttgcccaggctggtgtcgaactcctgggctcaagcgatccttctgccttggcctcccgaagtgctgggattgcaggcataagctaccatgctgggcctgaacataatttcaagaggaggatttataaaaccattttctgtaatcaaatgattggtgtcattttcccatttgccaatgtagtctcacttaaaaaaaaaaaaaagaaaagaaatggataatttcatctactgcctttacttgggggttaatgtgattcttaaacaccttcatcatggaactctcagagtgggggtccgtttttgttttcctggtgggggggtttttgaaagaataaggaaaagcacatttttgagccatgtctgggtaccatggtggcggaatgcttggggacc

SEQ ID NO: 41014 - DNA, 611 bp, Homo Sapiens
tcgggggctctcccaccagccttggcacctggggctcatggattggccccgaccacgacaagttcagtgccatgaagtatgagcaaggcacgggctgctggcagggccccaaccgctccaccaccgtgcgcctcctgtgcgggaaagagaccatggtgaccagcaccacagagcccagtcgctgcgagtacctcatggagctgatgacgccagccgcctgcccggagccaccgcctgaagcacccaccgaagacgaccatgacgagctctagctggatgggcgcagagaacctcaagaaggcatgaagccagcccctgcagtgccgtccacccgcccctctgggcctgcctgtggctctgttgccctcctctgtggcggcaggacctttgtggggcttcgtgccctgctctggggcccaggcggggctggtccacattcccaggccccaacagccttcaaagatgggtaaaggagctwrcmctmcctgrvgvccccaccttggtgactvgscccaccacccccagccctgtccctgccacccctcctagtggggactagtgaatgacttgacctgtgayctcaatacaataaatgtgatcccccaccaaaa

SEQ ID NO: 41015 - DNA, 503 bp, Homo Sapiens
taccccacccctccccttaaaccctctgcctttgaaagtagatcatgttcactgcaatgctggacactacaggtatctgtccctgggccagcagggacctctgaagccttctttgtggccttttttttttttcatcctgtggtttttctaatggactttcaggaattttgtaatctcataactttccaagctccaccacttcctaaatcttaagaactttaattgacagtttcaattgaaggtgctgtttgtagacttaacacccagtgaaagcccagccatcatgacaaatccttgaatgttctcttaagaaaatgatgctggtcatcgcagcttcagcatctcctgttttttgatgcttggctccctctgctgatctcagtttcctggcttttcctccctcagccccttctcacccctttgctgtcctgtgtagtgatttggtgagaaatcgttgctgcacccttcccccagcaccatttatgagtctcaagtttatattc

SEQ ID NO: 41016 - DNA, 676 bp, Homo Sapiens
tccctttgggaatgctggcctcctgctaggagaggcaggcaaacagctgaggcggcgggcagggctgggcagcggcctgagtctcagcggacttgtccacccggagttgagtcggagtggcgagctggcagtacgggctctggagcagtttgccactgtggtggaggccaagctgataaaacacaagaaggggattgtcaatgaacagtttctgctgcagcggctggcagacggggccatcgacctctatgccatggtggtggttctctcgagggcctcaagatccctgagtgagggccaccccacggcccagcatgagaaaatgctctgtgacacctggtgtatcgaggctgcagctcggatccgagagggcatggccgccctgcagtctgacccctggcagcaagagctctaccgcaacttcaaaagcatctccaaggccttggtggagcggggtggtgtggtcaccagcaacccacttggcttctgaatactcccggccagggcctgtcccagttatgtgccttccctcaagccaaagccgaagcccctttccttaaggccctggtttgtcccgaaggggcctagtgttcccagcactgtgcctgctctcaagagcacttactgcctcgcaaataataaaaatttctagccagtcaaaaaaaaaaaaaaaaaa

SEQ ID NO: 41017 - DNA, 1024 bp, Homo Sapiens
ttaattgtggttgtgtcacagttcactgcagcctgggtgacactccagcctgggtgacaaaggagaccccgtcaaaaaaaaaagtacttgtcccaaaagtttttgtttcctagcttagaatttataatcagattaggttttggagataaagtatatgtggtattttttttttttttttgagacagtcttgctctgtcatcaggctggagtgcagtggcgcaatttcggctcactgcaacctccacctcctgggttcaagcaattctcctgcctcagcctcccgagtagctgggactgcaggtgcgtgccacgacgcccagctgatttttgtgtttttagtagagacggggtttcaccatgttggccaagatggtctcaatctcttgaccttgtgatccacctgccttggccttccaaagtgctggaattacaggcgtgagccaccgcgcctggtccatatgtgatttcaaattaggtggccttataaatataagcacatggtttctgggcaaaatcaaaatgatttctgtctctaatttcttgagtaccaattgtaaaaactgaacactaagttgcagaaaagcggctttcaaaataataaaagatgcccccaatacaaaggctttttgggactatttttatatagcccccccgccacataaaataaataaggggtttcaataatctcccaacctcgcgcgagcacacaaatagggggtccccccccccccccaaaaagcaaaaccccccctccgaaagggggcccccacaggctttatccgccgaataacccacagccttttttcttttgggtaacaacacaaagggggcccccacctaaataaagtgtgaattcacgctaacaatttaaaaagacctatagaggaccacctctgggcgcgggggcaccttttcctttccacaaaaaacctccaatcacgagaaacgtgggggggaaataaaaaaattggtccctaaagacatctactggggagaaaaactcctcctctgtgttgtagaaaag

SEQ ID NO: 41018 - DNA, 800 bp, Homo Sapiens
  misc_feature (731)..(731): n is a, c, g, or t
  misc_feature (757)..(757): n is a, c, g, or t
  misc_feature (800)..(800): n is a, c, g, or t
agaggtaatccgtgaccctcagtgcagtctgtcccagcgtttatgtccttgcttcctctgagcagaggcctccatcttagtatcaacatatttaaagaaattgatggtgttcatcaagctggggcctgtggcagttgttgcctgagcaccaagtaacccaagccacctatgtgacaacttctgggcccaggagtaatttctcagcattgagggtaaaataggatggagtgctctgttgatcatttgggagatgtaggttacctgatttgtgccttaggatgcagcgtgaagcagaagtccatattgcaattatgattttagaaggaactaagcattttactcacacccacagcagcaagaatgacttcctgcagcagatattccacctgtaatagcactttggaactgtgggcaaaaccaaaaggctagtgtttccatttattccatgttggtgtatggggttgaactggaaaattccctgaggcaaaactcactggccaaattttgagagggtatagaaaatgactttagagatgagtggttttgtgtatgtgtctgatgatattcagtctgatgttccgcaattttaaaagttataataaaataccatttttttaatctggaaggacattgatatatgaattcttagaatttgccattaaaaagggtagcccccattccacaagctggttttgagggtgatcttgctctaaaaaactcattcatcatangctcagtctgacaggttctgtacggngctatcatctttctcctcctctgctaaatgcctcttttctccn

SEQ ID NO: 41019 - DNA, 874 bp, Homo Sapiens
cccagcccgccatggcgtcaggcgccgcggccccggggaggtggctcccactttaagaagtgaagttttgcgcccctccccctccctgcccacctcctgcagcctcctgcgccccgccgagctggcggatggagctgcgcagcgggagcgtgggcagccaggcggtggcgcggaggatggatggggacagccgagatggcggcggcggcaaggacgccaccgggtcggaggactacgagaacctgccgactagcgcctccgtgtccacccacatgacagcaggagcgatggccgggatcctggagcactcggtcatgtacccggtggactcggtgaagagacagggtcttgctttgtcgcctaggctggagtgcagtgttgagatcatagtttactgcagcctcgaactcctgggtacaaggaatcctccctcctcagcctcctgagtagctgggattacagacacgaatgcagagtttgagtccagatcccaaagcccagtacacaagtatctacggagccctcaagaaaatcatgcggaccgaaggcttctggaggcccttgcgaggcgtcaacgtcatgatcatgggtgcagggccggcccatgccatgtattttgcctgctatgaaaacatgaaaaggactttaaatgacgttttccaccaccaaggaaacagccacctagccaacgggatagctgggagtatggccaccctgctccacgatgcggtaatgaatccagcagaagtggtgaagcagcgcttgcagatgtacaactcgcagcaccggtcagcaatcagctgcatccggacggtgtgggagacccaaggggttgggggggctttctaccgggagctacacccacgcagctgac

SEQ ID NO: 41020 - DNA, 1051 bp, Homo Sapiens
  misc_feature (52)..(52): n is a, c, g, or t
  misc_feature (54)..(54): n is a, c, g, or t
cctcctgcagcctcctgcgccccgccgagctggcggatggagctgcgccggngnagcgttgggcagccaggcggtggcgcggaggatggatggggacagccgagatggcggcggcggcaaggacgccaccgggtcggaggactacgagaacctgccgactagcgcctccgtgtccacccacatgacagcaggagcgatggccgggatcctggagcactcggtcatgtacccggtggactcggtgaagacacgaatgcagagtttgagtccagatcccaaagcccagtacacaagtatctacggagccctcaagaaaatcatgcggaccgaagcttctggaggcccttgcgaggcgtcaacgtcatgatcatgggtgcagggccggcccatgccatgtattttgcctgctatgaaaacatgaaaaggactttaaatgacgttttccaccaccaaggaaacagccacctagccaacggtattttgaaagcgtttgtctggagttagaaagttctcttcttcaacacgtccctccccagggtgttcctccctgtgacccagccgcctcgacttcggcccgcttgctcacgaataaagaactcagagttgtgtgtgcaatgcacacccagacacacgcacgcacacacacgcgcgcgcacacacatgcttttttctgttcccctccgctttctgaagcctggggagaaatcagtgacagaggtgttttggttttattgttatgtgggttttcttttgtatttttttttgtttgttttgtttttaaacattcaaaagcaattaatgatcagacataggagaaaccctgaatagaaacaaaacttttgaatgctggattcaaaaaaaaaaaaagttatctggacagcttctttgagactatttaaaaactggtacaacaggtctctacaacgccaagatctaactaagctttaaaaggtcaagaaktttatggctgachaargactcscgcacgccgaaggcctttcccaccttaaccttccgggrtytgggattttaccccmttctctytkttttt

SEQ ID NO: 41021 - DNA, 745 bp, Homo Sapiens
cgggatccgcggcagcagcggctgcttgagatctgtttctggggcctctggcggtggcggcctggggcggcgcgacggctggtgcgcaggtacactgatgctgaagtactatgagccttcggaacttgtggagagactacaaagttctggttgttatggtccctttagttgggctcatacatttggggtggtacagaatcaaaagcagccctgttttccaaatacctaaaaacgacgacattcctgagcaagatagtctgggactttcaaatcttcagaagagccaaatccaggggaagtagcaggcttgcaatcttcaggtaaagaagcagctttgaatctgagcttcatatcgaaagaagagatgaaaaataccagttggattagaaagaactggcttcttgtagctgggatatctttcataggtgtccatcttggaacatactttttgcagaggtctgcaaagcagtctgtaaaatttcagtctcaaagcaaacaaaagagtattgaagagtgaagtaaaataaatatttggaattactaatttgtcattaaatcattctatgctgattagcttcataaacattgaactttttgattttatagccacaatgctgcatattcatactttaattcctaaagaataatttttaatgttaaaacgtgataatgcaataaatagaaaaatgtggtttacaaaataaaaacggtcttcactagttaccacctgaagtaagatgtctcg

SEQ ID NO: 41022 - DNA, 847 bp, Homo Sapiens
ggacgcgtgggttttaatgtggatgcatataacctgtgagtgaaaaatcactgaatgatttaattgtaaaagtagtcttatgtggtgtttgtagtctgatagagcttgaaaggacattttaaaagctaatgtctccaattttgttaaccttcgattttatgccagtataattcagaacatagaaaagtaatgattcacttgggctcattttagactggtcctgggtcaccctgccacacttgtttcctagtgtttctgtggcagacattgctaatcaattacagcccttttctgtactgagccttggataaagggtcaggctcctttttagttcagagattcaggcagccactcccagtgggttgtagataatgtgcaagataaaaactattttctcttccaaatctaagtactaagctcctagtataaggtgttgttacagaataccagagaccatgttagagacaactacatctcttcaaaaaacagccaacagagacaaaggaaaagtgtttaaatagtaagctgttcttcttaatcagaactatcctattgactaataaataatctgcataattctacttaaggggtgtaatctctgttctagagttagtttttaagtaagcttgttaatctgccactttgacattttgcttaggatgtcagtagcccatataagatgtgtagaataccttcagaagatgatcatagtgggtttggaaatcatttaatggctgcacccaaatttttaaagggaattttaaacctaaatactggctcttgcctgtggcctatttaggttaaaatttaatgaatggaatcctgggaaaaattccaaagggcactc

SEQ ID NO: 41023 - DNA, 756 bp, Homo Sapiens
  misc_feature (667)..(667): n is a, c, g, or t
caaaatcagtaccaggccagttataaccagagcttttctagtcagcctcaccaagtagaacaaacagagcttcagcaagaacagcttcaaacagtggttggcacttaccatggttccccagaccagtcccatcaagtgactggtaaccaccagcagcctcctcagcagaacactggatttccacgtagcaatcagccctattacaatagtcgtggtgtgtctcgtggaggctcccgtggtgctagaggcttgatgaatggataccggggccctgccaatggattcagaggaggatatgatggttaccgcccttcattctctaacactccaaacagtggttatacacagtctcagttcagtgctccccgggattactctggctatcaacgggatggatatcagcagaatttcaagcgaggctctgggcagagtggaccacggggagccccacgaggtcgtggagggcccccaagacccaacagagggatgccgcaaatgaacactcagcaagtgaattaatctgattcacaggattatgtttaatcgccaaaaacacactggccagtgtaccataatatgttaccagaagagttattatctatttgttctccctttcaggaaacttattgtaaagggactgttttcatcccataaagacaggactacnattgtcagctttctattacctggatatggaaggaaactatttttactctgcatgttctgtcctaagcgtcatcttgagccttgcacatg

SEQ ID NO: 41024 - DNA, 678 bp, Homo Sapiens
  misc_feature (642)..(656): n is a, c, g, or t
  misc_feature (658)..(669): n is a, c, g, or t
gggggtagcttggtgccattatcctgtggaatctgatatgtctggtagcatgtcattgatgggacatgaagacatctttggaaatgatgagattatttcctgtgttaaaaaaaaaaaaatcttaaattcctacaatgtgaaactgaaactaataatttgatcctgatgtatgggacagcgtatctgtaccagtgctctaaataacaaaagctagggtgacaagtacatgttccttttggaaagaagcaaggcaatgtatattaattattctaaaagggctttgttcctttccattttctttaacttctctgagatactgatttgtaaattttgaaaattagttaaaatatgcagttttttgagcccacgaatagttgtcatttcctttatgtgcctgttagtaaaaagtagtattgtgtatttgctcagtatctgaactataagcccatttatactgttccatacaaaagctatttttcaaaaattaatttgaaccaaaactactactatagggaaaagatgccaaaacatgtcccctcacccaggctaaacttgatactgtattattttgttcaatgtaaattgaagaaaatctgtaagtaagtaaaccttaagtgtgaaactaaacatgttctttgtccnnnnnnnnnnnnnnnannnnnnnnnnnncttgtcggc

SEQ ID NO: 41025 - DNA, 795 bp, Homo Sapiens
agcttttccgttaaattggagcactgaacgttcagatgcataccaaattatgcatgggtcctaatcacacatataaggctggctaccagctttgacacagcactgttcatctggccaaacaactgtggttaaaaacacatgtaaaatgctttttaacagctgatactgtataagacaaagccaagatgcaaaattaggctttgattggcactttttgaaaaatatgcaacaaatatgggatgtaatccggatggccgcttctgtacttaatgtgaaatatttagatacctttttgaacacttaacagtttctttgagacaatgacttttgtaaggattggtactatctatcattccttatgacatgtacattgtctgtcactaatccttggattttgctgtattgtcacctaaattggtacaggtactgatgaaaatctctagtggataatcataacactctcggtcacatgtttttccttcagcttgaaagcttttttttaaaaggaaaagataccaaatgcctgctgctaccacccttttcaattgctatcttttgaaaggcaccagtatgtgttttagattgatttccctgtttcagggaaatcacggacagtagtttcagttctgatggtataagcaaaacaaataaaacgtttataaaagttgtatcttgaaacactggtgttcaacagctagcagcttatgtgattcaccccatgccacgttagtgtcacaaattttatggtttatctccagcaacatttctctagtacttgcacttattatcttttgt

SEQ ID NO: 41026 - DNA, 584 bp, Homo Sapiens
cttggtgtttctggagcctccagggatctaggggagcctgggctgcgtgcatgtcgataagcagagctgttcttggggagaaggagggaggtctcgggagtgtagcaccatgccaaccagccctgcgcgaagacagagtgagccacgcccggatggcagggcatgtttctgttttggtgtctcactttcctcccagcgtgacttatttggggattcctcagggcctactggaatgtgactgcccactgcccagctgcctcgggtacaagtcctggccctatgtcccagctgtcaggggctcagggaatcctacccagccacctgtcctgggatggagtgtcagcatccaccccttggttgtcatcgaggccgccctcccagtcctgggtgaagatatttgggccaccagggctcccttggccccttcacgtaggaaatagacacgtgctttttaatgcaggacactttgagtgttacaaaatctgtagacctggcagtagggtcatgatgttgggaagggtgtagtgccctaggttggtgacagaagggacagacacttgtgcacaggtgtctttggtgatggg

SEQ ID NO: 41027 - DNA, 855 bp, Homo Sapiens
  misc_feature (743)..(743): n is a, c, g, or t
gctttttacacaattcaggcagctgacattgataccagatctgaattctacaaacacattgtgctttctggagggtctactatgtatcctggcctgccatcacggttggaacgagaacttaaacagctttacttagaacgagttttgaagggtgatgtggaaaaactttctaaatttaagatccgcattgaagacccaccccgcagaaagcacatggtattcctgggtggtgcagttctagcggatatcatgaaagacaaagacaacttttggatgacccgacaagagtaccaagaaaagggtgtccgtgtgctagagaaacttggtgtgactgttcgataaactccaaagcttgttcccatcatacccgtaatgctttcttttttcctttattgccaatctttgaactcattcaactccaggacatggaagaggcctctctctgccctttgactggaaaggtcaagttttattctggtgtcttggggaagctttgttaaatttttgttaatgtgggtaaatctgagtttaattcaactgcttccctacatagactagagggctaaggattctgtctgctgctttgtttcttctaagtaggcatttagatcattcctgtaggcttcctattttcactttactgctctaatgctgctagtcgtagtctttagcacactaggtggtatgcctttattagcataaaacaaaaaaaactttaacaggagcttttacatattactggnatgggggggtggttccgggaatggtgggcagctgctgaacccctttagggcatttcctctgtaatgtggcgctttcaactgtactgctggcggcttttagtaccttaaagcc

SEQ ID NO: 41028 - DNA, 640 bp, Homo Sapiens
taaaggctgcccatgggtttctgcctagtggtaaagctgattgttaccctcctttgaaatcccttctagttctgagatgctttgagggtaactggattcgattttgggatatcttttctcacattcagacttacacttaatggtgttagaaatcaacaaaactcctttttaaaaagaaaagatattaagcctgcctacttctacaatgcattctgttacctatttgaacagtatgtttgtaactatggcaatgaagtcagtagataggaaaccagttattccttctacctttaaaaattttgagaacttgccaaccagggactaaagctattatcttgaacagagtccctaaagctagtctagtttttgccacatctgcaatgattattgtttaatttcaaaagaatcctcaggctctacaatctaggggtggtaaatgtgtttccactatacttgggaaaaggtcagtaggatgtgcatcctagggaagacaaaatcgtatatggtaaaggcatttgagttaatttggcattatatctaggaaccatattatttaacaatttgaatcctattaatgctgagagatcctaagagctagtatgttgtaaaacctgacacctgaataacatgacaacacaca

SEQ ID NO: 41029 - DNA, 942 bp, Homo Sapiens
gaagaggccgttgctgtccaggaagaggcgcttgcgcttctggtgcaggacgagggccagcatggcgaagaaggtgaagatgaagaggatgaagatctggccctcggtgaccaggtaccagtagtacaggccactgggtgccaccaggagcagggcaggccctggaatcaagctctcagctttagaggcagtaaagcagccgctgaagtacatgaagaggatgaggaagaaggggatgtaccacatgcagtgacccaggtactcatcataatagtagagcagctcaaaggagtcgatcagcgtctccggcttgagattcttgatgatggggttctcacggacagacaggtggtgctggtagccactgaagagcaggcggtggttgacagagtcacccaccaggtggatgctggcacccatgatgaagatgatgatgctcacgtacgtgatggagcgtggcagggtgcggggggaccgctcgatgagcttgagcaagagaaagggcgtgatgacgttgtaggccatgtggaagtagtccccaacactgggcttgttgagtggaaaccactcgagagggaataccagcatggcaaatgggacgcccaaagtccagaacccagttctgcagtgtgaagtagaaacagaggtcgaggtggaagggagccgtgcgggcagcctcatcagcgctcacagagccatgcctggcctgcaggaaaggagcgcccagctgcgcgcctgggccgcccgtcgctcccagtgctgccgccctcgcgttgcctccatggctgccccgcaggcccctcggccctgccttttccgaggaaaaacggttcagctcggtggccccggggggaaggcgcccccaacgtaccccggcgcaaaaaagggattttaaatatccattaaaaaggaaccttgaccccttagggaaccttccaaccc

SEQ ID NO: 41030 - DNA, 857 bp, Homo Sapiens
cagagatcagaaagctgataaaaaaagaggggaaggagaagatgaggtggaagaagagtcaacagctttgcaaaaaactgacaaaaaggaaattttgaaaaaatcagagaaagatacaaattctaaagtaagcaaggtaaaacccaaaggcaaagttcgatggactggttctcggacacgtggcagatggaaatattccagcaatgatgaaagtgaagggtctggcagtgaaaaatcatctgcagcttcagaagaggaggaagaaaaggaaagtgaagaagccatcctagcagatgatgatgaaccatgcaaaaaatgtggccttccaaaccatcctgagctaattcttctgtgtgactcttgcgatagtggataccatactgcctgccttcgccctcctctgatgatcatcccagatggagaatggttctgcccaccttgccaacataaactgctctgtgaaaaattagaggaacagttgcaggatttggatgttgccttaaagaagaaagagcgtgccgaacgaagaaaagaacgcttggtgtatgttggtatcagtattgaaaacatcattcctccacaagagccagacttttctgaagatcaagaagaaaagaaaaaagattcaaaaaaatccaaagcaaacttgcttgaaaggaggtcaacaagaacaaggaaatgtataagctacagatttgatgagtttgatgaagcaattgatgaagctattgaagatgacatcaaagaagccgatggaggaggagttggccgaggaaaagatatctccaccatcacaggtcatcgtgggaaagacatctctactattttggatgaagaaagaaaagaaaataaacgac

SEQ ID NO: 41031 - DNA, 580 bp, Homo Sapiens
taactaactaaatacctaacatgtaattgacactaaaatatgaactttgtcttatttagtttctgttatagctgtaaaatttcaggcagagccataacattgtacagagtgtagcacttgtgattaaacctagcctgttaaatcctgaaaccttcaaccattacttctgtgaatactttagccctgggatttgggtttttctgttccggtgttgtgtctgttgccggcaatggacacaccatatctgctgctggcccaaggaacgtcattaatttttctttccaaattaagtattatgtgctagtcagtgtatagtaaagcacttctcttttttattactaaaaagctggcattagatttgcattataaatacctctctaggaactttatactccttttccttcttcaacaggtattgcccttaaatcttatcttttggccttgaaagtttatagctattgtttttcagttgttcgttgttttgttttgtttcactttagttctgtagtacctgcccattaatatttttgctttgattctagcaatgtgtatgtatctgtataaaaaataaaataatgaa

SEQ ID NO: 41032 - DNA, 844 bp, Homo Sapiens
ttaagtttcctttaatgatccacaataatccctttgatcacgttaatctaaatctagatgtctttgtctaattttttttgaatagcagttataaatgtaaaggactcaaagtttaagtaaaaagtgatactccaccttgtgtttcaaagaatttagttccacctcttcataccagtttaacacttaatatatttcattggattttagacagggcaaaaggaagaacaggggcctctggaggcccttggttatttaaatcttggattatttgtgatagtaatcacaaatttttggctaatttttaacctgaggttttgttttttttttaaaggaaatgcagcctagtcttgagaacataattttatataatcaattactaaatgttaaactattaccacacagcccataaaacagcatttgcgtttattgagagagaggatgtgccatcatgattaatgaaaactatcttttgagtttgaaaagaaattaatttgcagtgtttggattgtatatatggtgctaaaaataaattaatttactttataaaccttatctgtacattatacgatgtgatgaaatttgctttttatccaaatattttgtatcttgtaaatatggctaattataggaatgcctataatacatcttagattccttatatctaataagagttcaaagagttatgagttgaagtcttgaatgcaggaaactatctgatagtgttctaaaatttggttacttgggttttggatacccttagtgggatgatgtaaatagagactagctacctaggcttgtctatagcaaccataatggtggatgtaagtaatgcggtttactgaat

SEQ ID NO: 41033 - DNA, 717 bp, Homo Sapiens
cgcgtccgcaaccataatgttgatgtaagtaatgcggttactgaatcataagaaaatgccatctctttttagttgaaggaaaactctggaagtaggtgccattggtcattctgcagtgcactgcaaccattgtttcccctagtgccctcttttccctagggcattgctctcctattcccacgccttaacacagctctatacctagaagcagccagcccaggcatgcagtcacatttaatcacatcccccttctagagtgcttcaaaatgatgtagtccctcaacttggctaaagaatctcaatctcttgaaatttatttttttaatgtcatattcatctggtaaatatctactgtttgccaggcatttaagaatatggcaaagaacataaaagatggtgtcaccagattttggtcaccaatgagtacccgacccgttgccatgattaagagagaatgctttctattggagtttcaggaaatataatttgagaatactttaaagggaagtggaagtataagtgaatgatatttttcttttacatgtaaacaatgaagttatttcaaagttaagttttaaacaaaatacatgaagtagtgtctgccatacatgttaatattctacattcttgcttccttaaattaatatgtttgtgtgtatatatgtgcctcacacctgaattgaaaattaaagactggtttaaaagtgaaaaaaaaaa

SEQ ID NO: 41034 - DNA, 607 bp, Homo Sapiens
  misc_feature (573)..(573): n is a, c, g, or t
  misc_feature (586)..(586): n is a, c, g, or t
  misc_feature (601)..(602): n is a, c, g, or t
atggatttctctttctctttcatgcaagggatcatgggaaacacaattcagcaaccacctcaactcattgactccgccaacatccgtcaggaggatgcctttgataacaacagtgacattgctgaagatggtggccagacaccatatgaagctactttgcagcaaggctttcagtacccagctacaacagaagatcttcctccactcacaaatgggtatccatcatcaatcagtgtgtatgaaactcaaaccaaataccagtcatataatcagtatcctaatgggtcagccaatggctttggtgcagttagaaactttagccccactgactattatcattcagaaattccaaacacaagaccacatgaaattctggaaaaaccttcccctccacagccaccacctcctccttcggtaccacaaactgtgattccaaagaagactggctcacctgaaattaaactaaaaataaccaaaactatccagaatggcagggaattgtttgagtcttccctttgtggagaccttttaaatgaagtacaggcaagtgagcacacgaaatcaaagcatganagcagaaaagaanagaggaaaaaaagcnnacagc

SEQ ID NO: 41035 - DNA, 434 bp, Homo Sapiens
atgctgtactccttgtctttgcaaacaaacaggatctgcctaatgctatgaacgctgctgagatcacagacaagctgggcctgcattcccttcgtcaccgtaactggtacattcaggccacctgtgccaccagcggggacgggctgtacgaaggcctggactggctggccaatcagctcaaaaacaagaagtgaaagccagacagccctaacaaagcaccccacccacccctgacatacctactgtcaccctgccccagtcctaccccttcctctccatgcaagtgtggccagggccctgggtatcatgtccacatgcccagcaagagccttgcctcccctgcctcccctcctttttcctgtccacctatatgaccaatccctaattgctgtcctgatgatgagtcattccaatttactggatttaaaacaaaa

SEQ ID NO: 41036 - DNA, 583 bp, Homo Sapiens
cctacctcattgttcttaatgcattgagaggtgatttagtttatatgtttttggaagaaaccattaatgtttaatttaatcttaataccaaaacgaccagattgaagtttgacttttattgtcacaaatcagcaggcacaagaactgtccatgaagatgggaaatagccttaaggctgatgcagtttacttacaagtttagaaaccagaatgctttgtttttaccagattcaccattagaggttgatggggcaactgcagcccatgacacaagatctcattgttctcgatgtagaggggttggtagcagacaggtggttacattagaatagtcacacaaactgttcagtgttgcaggaaccttttcttgggggtgggggagcttcccttttctaaaaatgcaatgcactaaaactattttaagaatgtagttaattctgcttattcataaagtgggcatcttctgtgttttaggtgtaatatcgaagtcctggcttttctcgttttctcacttgctctcttgttctctgtttttttaaaccaattttactttatgaatatattcatgacatttgtaataaatg

SEQ ID NO: 41037 - DNA, 624 bp, Homo Sapiens
tttttttttttttttttgcctacctcattgttcttaatgcattgagaggtgatttagtttatatgtttttggaagaaaccattaatgtttaatttaatcttaataccaaaacgaccagattgaagtttgacttttattgtcacaaatcagcaggcacaagaactgtccatgaagatgggaaatagccttaaggctgatgcagtttacttacaagtttagaaaccagaatgctttgtttttaccagattcaccattagaggttgatggggcaactgcagcccatgacacaagatctcattgttctcgatgtagaggggttggtagcagacaggtggttacattagaatagtcacacaaactgttcagtgttgcaggaaccttttcttgggggtgggggagtttcccttttctaaaaatgcaatgcactaaaactattttaagaatgtagttaattctgcttattcataaagtgggcatcttctgtgttttaggtgtaatatcgaagtcctggcttttctcgttttctcacttgctctcttgttctctgtttttttaaaccaattttactttatgaatatattcatgacatttgtaataaatgtcttgagaaagaaacctcgtgcc

SEQ ID NO: 41038 - DNA, 845 bp, Homo Sapiens
ggggatccagtgagatagaatacatgtaagtgtggttttgtaatttaaaaagtgctatactaagggaaagaattgaggaattaactgcatacgttttggtgttgcttttcaaatgtttgaaaataaaaaaaatgttaagaaatgggtttcttgccttaaccagtctctcaagtgatgagacagtgaagtaaaattgagtgcactaaacgaataagattctgaggaagtcttatcttctgcagtgagtatggcccaatgctttctgtggctaaacagatgtaatgggaagaaataaaagcctacgtgttggtaaatccaacagcaagggagatttttgaatcataataactcataaggtgctatctgttcagtgatgccctcagagctcttgctgttagctggcagctgacgctgctaggatagttagtttggaaatggtacttcataataaactacacaaggaaagtcagccaccgtgtcttatgaggaattggacctaataaattttagtgtgccttccaaacctgagaatatatgcttttggaagttaaaatttaaatggcttttgccacatacatagatcttcatgatgtgtgagtgtaattccatgtggatatcagttaccaaacattacaaaaaaattttatggcccaaaatgaccaacgaaattgttacaatagaatttatccaattttgatctttttatattcttctaccacacctgggaaacagaccaatagacattttgggggttttataatgggaatttgtataaagcattactctttttccataaaatggttttttaatttaaaaaaaaaaaaaaaaaaaaaagggcggcccgc

SEQ ID NO: 41039 - DNA, 796 bp, Homo Sapiens
ggagagcggcggggccgagagcgtgactcgcccgctccgcgctgcttcccccgcgccgcctccccgcgccgctcgcgcagccatgtccgaggagaagcccaaggagggtgtgaagacagagaatgaccacatcaacctgaaggtggccgggcaggacggctccgtggtgcagttcaagatcaagaggcacacgccgctgagcaagctgatgaaggcctactgcgagaggcagggcttgtcaatgaggcagatcagattcaggttcgacgggcagccaatcaatgaaactgacactccagcacagctggagatggaggacgaggacaccatcgacgtgttccagcagcagacgggaggtgtgccggagagcagcctggcagggcacagtttctagagggcccgtccccagcccgggccgtccatcctcgcattgctgttgaatggtgagcacgtgaccatgccgaccacaaaggtgtctgcggaaactcgaggacattcaccacgatgattttcctctctttgatgtacttcaagtgcaactcaaaactatatctgcagggatgaatctgtaacttaaattgggccaatcagaattgttatctttgttcaggtaaaatgagttgcaagatattgtgggtacttttgtgtgctcatttgtgttttcccccctcctacacatttttttaccccaaattatagcctgatgtcgctttagtctggcaggatcgactctgagttggtgctctcctgctcctcagtcactaagattgtgttccgcatgggatcactgttgaag

SEQ ID NO: 41040 - DNA, 626 bp, Homo Sapiens
gcggccgcggctgtaggcttttttgaatttattatgaaaatgctgcgttgtgttgaatgaaaaagacccaaattactgcttatgaagaaataaagccagcattgatcacttaatcctgtttctcatgtccagccagaaaaaagaacttcagtgaaggtaagataaataaatacatacacatatgtttttttggtagataagtgctaattacatatatgtaatgctttattaaatttctgaaatatttggtaactaaaattttctttttggaaattaataaatccagatacatattaatgttgatatgagtaaaaacaaataggaagaaattgaaatttcttttcatcaacatgtagagctgctattttactatttggagaatatgatgtgaaaattggacctcaaagggtttccttgtgttttcattgtaaaataccatcatcagtgagagtcttgagttcactaacattgtcaccttctggagagagagttaatggggggcattgaggatgatatttttttacatgtgtttggtttctgattcaagtgacacgcacaaactgaaaaaaaaaaaaaaaaaaagcctacagccgcggccgctccaacatcagaatggtcctcgtgcc

SEQ ID NO: 41041 - DNA, 651 bp, Homo Sapiens
gggacatctgtatttaactcctttgtagacatgaatttctatcaaaatgttcttgcactgtaacagagattccttttttcaataatcttaattcaaaagcattattagacttgaaagggtttgataatctcccagtccttagtaaagattgagagaggctggagcagttttcagttttaaatgagtctgcagttaatatcaaatgtgagtttgggactgcctggcaacatttatatttcttattcagaacccttgatgagactatttttaaacatactagtctgctgatagaaagcactatacatcctattgtttctttctttccaaaatcagccttctgtctgtaacaaaaatgtactttatagagatggaggaaaaggtctaatactacatagccttaagtgtttctgtcattgttcaagtgtattttctgtaacagaaacatatttggaatgtttttcttttccccttataaattgtaattcctgaaatactgctgctttaaaaagtcccactgtcagattatattatctaacaattgaatattgtaaatatacttgtcttacctctcaataaaagggtacttttctattaaaaaaaaaaaaaaaaaaaaaaagaaaaaaaaaggggggggggggaaaaaaatatcgg

SEQ ID NO: 41042 - DNA, 864 bp, Homo Sapiens
tgaagctggcagttcagtcccttattctgccctgttggaagccctgctgaaccctcaactattgactgctgcagacagcttatctccctaaccctgaaatgctgtgagcttgacttgactcccaaccctaccatgctccatcatactcaggtctccctactcctgccttagattcctcaataagatgctgtaactagcattttttgaatgcctctccctccgcatctcatctttctcttttcaatcaggcttttccaaagggttgtatacagactctgtgcactatttcacttgatattcattccccaattcactgcaaggagacctctactgtcaccgtttactctttcctaccctgacatccagaaacaatggcctccagtgcatacttctcaatctttgctttatggcctttccatcatagttgcccactccctctccttacttagcttccaggtcttaacttctctgactactcttgtcttcctctctcatcaatttctgcttcttcatggaatgctgaccttcattgctccatttgtagatttttgctcttctcagtttactcattgtcccctggaacaaatcactgacatctacaaccattaccatctcactaaataagactttctatccaataatgattgatacctcaaatgtaagatgcgtgatactcaacatttcatcgtccaccttcccaaccccaaacaattccatctcgtttcttcttggtaaatgatgctatgctttttccaaccaagccagaaacctgtgtcatcttttcaccccaccttcaatcaacaagtcctcaatcaacaagtcctactgactgcacatcttaaatatatctttatcagtcaaaaa

SEQ ID NO: 41043 - DNA, 906 bp, Homo Sapiens
  misc_feature (589)..(589): n is a, c, g, or t
  misc_feature (604)..(604): n is a, c, g, or t
  misc_feature (611)..(613): n is a, c, g, or t
  misc_feature (615)..(615): n is a, c, g, or t
  misc_feature (627)..(627): n is a, c, g, or t
  misc_feature (629)..(632): n is a, c, g, or t
  misc_feature (638)..(641): n is a, c, g, or t
  misc_feature (646)..(646): n is a, c, g, or t
  misc_feature (654)..(654): n is a, c, g, or t
  misc_feature (677)..(683): n is a, c, g, or t
  misc_feature (685)..(688): n is a, c, g, or t
  misc_feature (690)..(694): n is a, c, g, or t
tcagttgattttaaagcttcatgttatgcaaaaaagaatcctgctgttatacatgtgacagtgactttgtgctgaaatttcagctattccagataaacattgtatatcttgtaaattaatgtttaaaggtagttttgttcttacagaaagtgttgattgccaggttgcttatagcactttaagttattctaaaaatgaaattataagccaaatatttggcttaagtagatttagttgtatagcacttacatatttagttcttttgaaagtttagataattatttaaagaaagcataatgctaatggaaaagaaaatctgatgttctattataatatgctattgctgaatatgaatagaaatacagggcatcatttccttgtctcattataagttagtaacaatatatagattaaatgtttacaatatagggaattgtaaataaatatatcagtttttttccccttcggtcttccacagcagtattattgtctttgtggagttgactaatgataatttaaaaatcctgtaatggatttctactaaaataaggtcatagtggcatataccaaataaaatcaaataccgaanaaaaaaaaaaaaaanaaaaaannnanaaaaaaaaaaanannnnaaaaannnnaaaanaaaaaaanaaaaaaaaaaaaaaaaaaaaaannnnnnnannnnannnnnaaaaaggggcgcccggctaaaaaatcccccggggggggcccaatttttacgccacccccttttttttgggaaaaagggggcccccctaggggggcgctttttataaatatgggggcggggccccctgttttttaaacccgtcgggggcggggaaaaatggctctttgggggaacctttttggagagggacctttctctctttgggggggggg

SEQ ID NO: 41044 - DNA, 610 bp, Homo Sapiens
cctccctccccaaaccccaaggaactctcactcttgctcaagctgttccgtccccttaccacccctgatacaactgccaggttaatttccagaattcttgcaagactcagttcagaagtcaccttctttcgtgaatgttttgattccctgaggctactttattttggtatggctgaaaaatcctagattttctaaacaaaacctgtttgaatcttggttctgatatggactaggagagagactgggtcaagtaagcttatctccctgaggctgtttcctcgtctgttaagtgtgaatatcaatacctgcctttcataatcaccagggaataaagtggaataatgttgataacagtgcttggcacctggaagtaggtggcagatgttaacgcccttcctcccttgcattgcgccccctgtgcctacctctagcattgtaacgaccacatagtattgaaatggccagtttacttgtctgccttcctttccaagaccgttggtgcctagaggactagaatcgtgtcctatttaactttgtgttcccaggtcctagctcaggagttggcaaataagaattaaatgtctgctacaccgaaaaaaaaaaaaaaaaa

SEQ ID NO: 41045 - DNA, 1322 bp, Homo Sapiens
tcgaccaatgttgaagcaatcctggaggactttgctgtgctgggtgaaggcctggtgcagactgtggaggcccgaagtgagaggtggactgtgtgatcccagctctggagcaagctgtagacggacagcaggacattggacctctagagcaagatgtcagtaggatgacctccaccctccttggacatgaatcctccatggagggcctgctggctgaacatgctgaatcatctccaacaaaacccagccccaactttctctctgatgctccagcattggggcaggggcatggtggcccatgtagtctcctgggcctcaccatcccagaagaggagtgggagccagctcagagaaggaactgaacccaggagatccatccacctattagccctgggcctggacctccctgcgatttcccactcctttcttagtcttcttccagaaacagagaaggggatgtgtgcctgggagaggctctgtctccttcctgctgccaggacctgtgcctagacttagcatgcccttcactgcagtgtcaggcctttagatgggacccagcgaaaatgtggcccttctgagtcacatcaccgacactgagcagtggaaaggggctatatgtgtatgaatagaccacattgaaggagcacaatgccctcctgtgttgatgccacttcccagggtggagacagtggaaaagaaccgaggacaggaaaggattgggtaggtgaaggggtcaggggactggtagtcacccaatcttggagaggtgcaaaaagcactgggggctacccgttagctgcatctgccctggctgtttgcccgttcatgtcacaaactgccactactatgtacctgcagtggggttgcagagatgggagagactcaagtcttactccccaggagctcccagggcccaaggaggagaatgcttgcctcctttcagtctggtctacacccactttctggtagcctctctgcttcctgtaattctggctgtttttccagactcagctcaaatagtgcccctccttaagcccatccctcgcccccagcctgaggtgatctttccctcctctgaactattagagcagttactgtctgttcagttcgtttggcaggcacacacagtggcataaattctattgttttgaactctgatttaaaattaaattgcagctgggcgtagtggctcatgcttgtaatcccaacacttagggagtcaggagaatcacttgagctcaggagttctagaccaatctgggcaacagagagaccccatctcttttaaataaaaagttaaattgcttaaaaaaaaaaaaaaa

SEQ ID NO: 41046 - DNA, 990 bp, Homo Sapiens
cggctggaccggtccggaattctccggatcctgcccacaccctctgggctgagttccttctttcccttggacgcccagtgctggccttggaggacggtcagctggaggatggcggtgggggaggctgtctttgtaccactgcagcatcccccacttctccacggaagccccatcccaaagctgctgcctggccccttgctgtaaagtgtgaagggggcggctgagttctcttaggacccagagccagggccctcaacttccatcctgcgggaggccttggccgggcactgccagtgtcttccagagccacacccagggaccacgggaggatcctgacccctgcagggctcaggggtcatcagggacccactgccccatctccctctccccaccaagacagccccagaaggagcagccagctgggatgggaacccaaggctgtccacatctggcttttgtgggactcagaaagggaagcagaactgagggctgggatattcctcatggtggcagcgctcatagcgaaagcctactgtaatatgcacccatctcatccacgtagtaaagtgaacttaaaaattcaatcaaatgaacaattaaataaacacctgtgtgttttagaaaaaaaattacacacattgcttaaataaaagggcggccccctcctagagtaatcccctcgaggggtcgccaagcttaacgcgtaccccagcttttccttggtacaaaagtggtccccctatagtggagttcgtatttataaagctaggccactgggcccgtcgttttttacaaccctcctgacctggggaaaaactggcttagcctttgggaattctttgttgaaaggaaacctttaaccttccgggtggggggtgaacataaatttgggacaaaacctacccttacacaagaattttaaaggctccttaaggttaaaatataaaaaattttttaaaggggaaaaaaaggggggttaaacctaaacct

SEQ ID NO: 41047 - DNA, 697 bp, Homo Sapiens
gcaaagcactaaagggccagtaccagtgagtggccccacctgtgtccccgatgctgacctcacctggtcctccgcctactgtccctctcagtgccttctctcagctcccaggccaacagtagccaaacccctagagacagtgatgcctgcccgcaccctggcctggtccctggtccttcactggcgccttctcggagctggcccagggggcctggagcatggacagtgtgggcgctctccctaccttgcctccttttttcttaaagcaaagtcacttctccatcacaaccagatttgaggctggttttgatggctgggtccttgggcctggccagtcttcctcttagcctctggatctagaagggaccataagaggagtaggccctggttcctgctgtcctggtggctgggcccagcaggggccctcactcttgaagtccaggactgggtctgacctggtgggagcacctgccagaggatgctctttcccaggacggatgggccctatgtctcaggagtggggttgggggacagccttcagcagcagctcacaccctaccttccccagacttgcactggggtgggatttggagtgatgggaaggttcccaagggccggggatggatcttttctaaatgtcattacttgtacataaacgtctatttttctcccgtgacaacccacccacacacaaaac

SEQ ID NO: 41048 - DNA, 617 bp, Homo Sapiens
aaactatgtactcctgggaagatttgaaatcttttagaagtttgttgaaatattttcaccatttcagacagacttctgacttagatactgattttaatgccagtatctgctctaaatatttatgataaaaatgcattatttttttaaagagcttgatgagatttgtgataagtgatagtactcaaaaacctgaatcccacccctcgaccaatcctccacaaacttcagttgttggttaacgtattaactgaacacagacaatacagtctgatttagaagtcatcttttcagccgtgtgataattaacatggtaagccttagcagcaaacattcttcctaaaaggaagacttcattttctcaagaaatgggattagttgggggtattataataccaaattgtaaatcatgagcgttttctccactgtgcacctgaggcagatcatgcatctttgagtgcagtttggtctgacccctcaagagaaaagcatggtgccgtagggctgctatggtttgaatggatgccatcactcttttctccacatacagtgcagagagctgtctggagtcacaatctgaacagattctcgggcgctccttctctccttccatcactaca

SEQ ID NO: 41049 - DNA, 582 bp, Homo Sapiens
aacgtattatctgaacacagacaatacagtctgatttagaagtcatcttttcagccgtgtgataattaacatggtaagccttagcagcaaacattcttcctaaaaggaagacttcattttctcaagaaatgggattagttgggggtattataataccaaattgtaaatcatgagcgttttctccactgtgcacctgaggcagatcatgcatctttgagtgcagtttggtctgacccctcaagagaaaagcatggtgccgtagggctgctatggtttgaatggatgccatcactcttttctccacatacagtgcagagagctgtctggagtcacaatctgaacagattctcgggcgctccttctctccttccatcactacagtaagtaaaaggaccatagaggggaaccaggaatctgagaatcagctgtgctcaatagccaacctccctgtccagatgcagctattttggtatctcctatcacatgcactctgaatcagggtttttctataagaaacctttcagaatcagcaaaagtggggatgacccaggcatcttgatttgcaaaatcacaaaactaagt

SEQ ID NO: 41050 - DNA, 677 bp, Homo Sapiens
tagaggtcctgcctccccatttctcaagggaagccagtaggcaacacagccagcacggtgctctccagggcagcccctctcagacgaggaggcagcgggtgcagccaggtgtctgcagagcagccacaaaggtggcctaggatgcgggtgtctccccaggtgagtccatccacacacgtttgaaaaacactattagtctttctaacacactgagggaaagattaaaatctgtggaataaaggaggagattttatttacagatttttttaaaagccacctgggttgacaccttcctacttatccactagatgtcatcagaggtgctgttccgtggttctgcattaacccctgcctcatgtctgtaacatgtgacagtaattccagctcggtccctccaggcaaaggagaaacgggacttacttcacaggacagaggattgacagaagtcagtttaagataagtgtttgaatcagatttcagaacatctcattcatttcttagatttgtgttcacaattgtgttctctaaaatgtgtctaaattttaaaaatatgtacatgcataatgtcattttaaaatctgaaggaaagaatttgaagtccacaaaaagtgtttgaggttctttggttttgttagtaaaagccagttctgtggtgatgacctaaaaaaaaaaaaaaa

SEQ ID NO: 41051 - DNA, 729 bp, Homo Sapiens
ggttgcagctgaccatgtttgcatgaggcaggactcggtcccccttgccgtgctcccctccctcctcgtctgccaagcctcgcctcctaccacaccacaccaggccaccccagctgcaagtgccttccttggagcagagaggcagcctcgtcctcctgtcccctctcctcccagccaccatcgttcatctgctccgggcagaactgtgtggcccctgcctgtgccagccatgggctcgggatggactccctgggccccacccattgccaagccaggaaggcagctttcgcttgttcctgcctcgggacagccccgggtttccccagcatcctgatgtgtcccctctccccacttcagaggccacccactcagcaccaccggcctggccttgcctgcagactataaactataaccactagctcgacacagtctgcagtccaggcgtgtggagccgcctcccggctcggggaggccccggggctgggaacgcctgtgccttcctgcgccgaagccaacgccccctctgtccttccctggccctgctgccgaccaggagctgcccagcctgtgggcggtcggccttccctccttcgctccttttttatattagtgattttaaaggggactcttcagggacttgtgtactggttatgggggtgccagaggcactaggcttggggtggggaggtcccgtgttccatatagaggaaccccaaataataaaaggcc

SEQ ID NO: 41052 - DNA, 827 bp, Homo Sapiens
aagaaaaaaaatatatgctccacaatttatatttagagagagaacacttagtcttgcctgtcaaaaagtccaacatttcataggtagtaggggccacatattacattcagttgctataggtccagcaactgaacctgccattacctgggcaaggaaagatccctttgctctaggaaagcttggcccaaattgattttcttctttttccccctgtaggactgactgttggctaattttgtcaagcacagctgtggtgggaagagttagggccagtgtcttgaaaatcaatcaagtagtgaatgtgatctctttgcagagctatagatagaaacagctggaaaactaaaggaaaaatacaagtgttttcggggcatacattttttttctgggtgtgcatctgttgaaatgctcaagacttaattatttgccttttgaaatcactgtaaatgcccccatccggttcctcttcttcccaggtgtgccaaggaattaatcttggtttcactacaattaaaattcactcctttccaatcatgtcattgaaagtgcctttaacgaaagaaatggtcactgaatgggaattctcttaagaaaccctgagattaaaaaaagactatttggataacttataggaaagcctagaacctcccagtagagtggggatttttttcttcttccctttctcttttggacaatagttaaattagcagtattagttatgagtttggttgcagtgttcttatcttgtgggctgatttccaaaaccacatgctgctgaatttaccagggatcctcatacctcacaatgcaaaccacttactaccagg

SEQ ID NO: 41053 - DNA, 589 bp, Homo Sapiens
ccgcggacgcgtgggtttaattttatcatggcctcctctttggaggccaaccttcccatgggtctcaaagcagtgacatttggtagtaaatcactgcctctcaggagtcggtatgcacaagcactcagcagccactgttgatgccttctagggaaacctaatttccgttggtaaaggtaggggcctcggaactgttccggatctgctgtagaacttcaccgtgtggaatggtgacagccacacaccgttgaccagtttagaagaggttgcattcaataaaactcttagcttgagcttatgcaatgattggttaagattttggcattgtaagaattaggagatgatcatagaaatatatgtaaagtattcaattttcaatcattttcaaattactgttataaattgtttttgctgagttgtaatacttttgagatacaatgtattccttgtactgaaagaatgaaaaaggactttttcagcatttgaggtaagttctttaacgtttcattaaaaacattttttacaaatattttgtacatgcacttgcagtattgaggttaatcattttaataaattcggaaattaaaaa

SEQ ID NO: 41054 - DNA, 695 bp, Homo Sapiens
ggatttacgaggatgtagagcgacagtggaaggggcatgacctcaatgaggacggcctcgtttcctgggaggagtataaaaatgccacctacggctacgttttagatgatccagatcctgatgatggatttaactataaacagatgatggttagagatgagcggaggtttaaaatggcagacaaggatggagacctcattgccaccaaggaggagttcacagctttcctgcaccctgaggagtatgactacatgaaagatatagtagtacaggaaacaatggaagatatagataagaatgctgatggtttcattgatctagaagagtatattggtgacatgtacagccatgatgggaatactgatgagccagaatgggtaaagacagagcgagagcagtttgttgagtttcgggataagaaccgtgatgggaagatggacaaggaagagaccaaagactggatccttccctcagactatgatcatgcagaggcagaagccaggcacctggtctatgaatcagaccaaaacaaggatggcaagcttaccaaggaggagatcgttgacaagtatgacttatttgttggcagccaggccacagattttggggaggccttagtacggcatgatgagttctgagctgcggaggaaccctcattttcctcaaaagtaatttatttttacagcttctggttt

SEQ ID NO: 41055 - DNA, 705 bp, Homo Sapiens
ggctgaaaccctgttgattcatgataaacactgtccttttgggtccctttcttacagatggacctcttgagaagaattatcgtattccacgtttttagccctcaggttaccaagataaatatatgtatatataacctttattattgctatatctttgtggataatacattcaggtggtgctgggtgatttattataatctgaacctaggtatatcctttggtcttccacagtcatgttgaggtgggctccctggtatggtaaaaagccaggtataatgtaacttcaccccagcctttgtactaagctcttgatagtggatatactcttttaagtttagccccaatatagggtaatggaaatttcctgccctctgggttccccatttttactattaagaagaccagtgataatttaataatgccaccaactctggcttagttaagtgagagtgtgaactgtgtggcaagagagcctcacacctcactaggtgcagagagcccaggccttatgttaaaatcatgcacttgaaaagcaaaccttaatctgcaaagacagcagcaagcattatacggtcatcttgaatgatccctttgaaattttttttttgtttgtttgtttaaatcaagcctgaggctggtgaacagtagctacacacccatattgtgtgttctgtgaatgctagctctcttgaatttggatattgg

SEQ ID NO: 41056 - DNA, 1049 bp, Homo Sapiens
  misc_feature (767)..(768): n is a, c, g, or t
  misc_feature (776)..(776): n is a, c, g, or t
  misc_feature (781)..(794): n is a, c, g, or t
  misc_feature (796)..(802): n is a, c, g, or t
  misc_feature (804)..(822): n is a, c, g, or t
  misc_feature (824)..(858): n is a, c, g, or t
  misc_feature (861)..(866): n is a, c, g, or t
  misc_feature (869)..(872): n is a, c, g, or t
  misc_feature (879)..(881): n is a, c, g, or t
  misc_feature (885)..(888): n is a, c, g, or t
  misc_feature (890)..(891): n is a, c, g, or t
  misc_feature (896)..(896): n is a, c, g, or t
  misc_feature (900)..(910): n is a, c, g, or t
  misc_feature (912)..(917): n is a, c, g, or t
  misc_feature (919)..(920): n is a, c, g, or t
  misc_feature (922)..(922): n is a, c, g, or t
  misc_feature (924)..(929): n is a, c, g, or t
  misc_feature (931)..(933): n is a, c, g, or t
  misc_feature (935)..(935): n is a, c, g, or t
  misc_feature (938)..(939): n is a, c, g, or t
  misc_feature (943)..(946): n is a, c, g, or t
  misc_feature (952)..(958): n is a, c, g, or t
  misc_feature (963)..(963): n is a, c, g, or t
  misc_feature (966)..(972): n is a, c, g, or t
  misc_feature (977)..(980): n is a, c, g, or t
  misc_feature (984)..(985): n is a, c, g, or t
  misc_feature (987)..(1000): n is a, c, g, or t
  misc_feature (1003)..(1005): n is a, c, g, or t
  misc_feature (1010)..(1014): n is a, c, g, or t
  misc_feature (1017)..(1017): n is a, c, g, or t
  misc_feature (1021)..(1025): n is a, c, g, or t
  misc_feature (1030)..(1035): n is a, c, g, or t
  misc_feature (1038)..(1038): n is a, c, g, or t
cggacgcgtgggcgtggctttctgtcctattttccttttatgtgagccctgcaggttgcctttggcgcccacaccagttctgtcttcatgtcgctgcatcgtgaagccccatttgcctttagtccctgctttgtgtgtcttcacttccacagccagtgttgcccctcagggcatactttgctggtgaacgggctgtagagtcttgagtatgttattggcctaagtgggcatgaggccccagcatccgactccatctgccaggctgcagggcacagcagcactggcatagacaggcacgctctgtcttccaacgtgcaccagccttttcttacatattttgcctgtttttaaaaaatacgaggagagggtgcagatggatactgtgccctcaccctcctaagccaggtaatatattgatgtgcagacttttaagaaatcttagtcttatcacaaatatcaagtaatttattttttccattttcaaatgcaaaagttagcctaggaagcctcccagtcatcctgaaggaccttttgactttgcttttataattctgttaaaaattgaggaggggattaatgagtacaatgaaaacaaaacaaaacaaaaaattaagaagaggaaagctcaaaagaggataagagactgaaaaggcacctcagaatggctgctgtgggcagagtctgtgacatgactttccccgccctgcccctctgttcagagcagctgggaaagatgggatcagtaagataaaaactttgtttttcgnncccccagnggttnnnnnnnnnnnnnntnnnnnnncnnnnnnnnnnnnnnnnnnntnnnnnnnnnnnnnnnnnnnnnnnnnnnnnnnnnnnttnnnnnnttnnnnttttttnnntttnnnntnnttttntttnnnnnnnnnnntnnnnnntnntntnnnnnntnnntnttnntttnnnntttttnnnnnnnttttnttnnnnnnnttttnnnntttnntnnnnnnnnnnnnnnttnnnttttnnnnnttntttnnnnnttttnnnnnnttntttcctcctcc

SEQ ID NO: 41057 - DNA, 761 bp, Homo Sapiens
tgttgtggctcaccctctattcccagctactcgggaggcagagacaggagaatcgcctgaacccaggaggcagaggttgcagtgagctgagatcgtgccactgcactccagcctgggtgacagagcgagactccatctcagaaaacaaacaaacaaaaagaaacttttgttcaagctgcatcttcacattgaatgaaagcattcagacgggtgactgctgctgtccacaactgtgggcggaagtgtgccttttcccagtttctcgtccaggaggttgcatagcaaatactcaagtcactgggatatatgctttccaaatgctggcccccatagcacctttccccatgtctttctaccaagcctcttatgtttaatctgtgcagggaagacaagagtagaccatattctctgtgtgctgtgcatgtcctggtgtcactcattgcctcttatctgtcgccattctaatataagtcagcttaatagttgactctgaataatgcaaaacccagcttgcttccagaatggcctaggaccctcctcctcctgccagttttttttttttttttggttcatgtggcataatcatctttcaaaattaaccaaatgccccagaaaatgatgttaccactaaaatattttctccaagaaggcatactgtaacagaaaagataggtaagatatttttttcccaagaagtaagaattgattgtgctgaatgttcaaactctggaaactgttcacagtatgttgttcttagctgt

SEQ ID NO: 41058 - DNA, 794 bp, Homo Sapiens
atatttatttctaaatgttttgactgggcatttttcttttaatgaaatatgtggactgctctagcaaaccctattttcagctactatttgaatattcttgaacaccaccactgaagagtttcatatacaccaaataatgtctcatctctatagtacagggaatataaaattggtttcctgtggtcatgatcaagatagtagtattattacacaagaaacttggtctgcagtctggaagcttgtctgctctatagaaatgaaaatgcagcatgaagttgacattgtggaaatgaaagtaattgggtattagaaatctgaaagtactgtcatctaaaagcaattgtgattttattgtaattggttgtcactgttgtacggtgtctagaattaaagaatacatgtaaactttcatggtatttagcctttcttaaatttttttaaaatttaaactttctaacctatgtattcaacttctgtatttatatttaatcagtggttcatgttatataatacacccttaactagttaaactggcacactgttggtatggtacagagtaccatattgctaagaaaactgtcttataccacgatgtatatgtgtgaagacatgaaagtttactgtacagaactggttggacgaaatgccctatggtgcacttaacagcttcatatctgctttccgaaacaccaccaccaccacacccaccaccccctcctccccgcctccccccccaaaaaccttcttcaccaccctcctacccccgcgcccccacacccaactaacacctgtct

SEQ ID NO: 41059 - DNA, 719 bp, Homo Sapiens
ggcttgcaagcaggacctgctggcctacctgcaacgcatcgccctctactgccaccagctgaacatctgcagcaaggtcaaggccgaggtgcagaatctcggcggggagcttgttgtctctggggtggacagcgccatgtccctgatccaggcagccaagaacttgatgaatgctgtggtgcagacagtgaaggcatcctacgtcgcctctaccaaataccaaaagtcacagggtatggcttccctcaaccttcctgctgtgtcatggaagatgaaggcaccagagaaaaagccattggtgaagagagagaaacaggatgagacacagaccaagattaaacgggcatctcagaagaagcacgtgaacccggtgcaggccctcagcgagttcaaagctatggacagcatctaagtctgcccaggccggccgcccccacccctcggggctcctgaatatcagtcactgttcgtcactcaaatgaatttgctaaatacaacactgatactagattccacagggaaatgggcagactgaaccagtccaggtggtgaattttccaagaacatagtttaagttgattaaaaatgcttttagaatgcaggagcctacttctagctgtattttttgtatgcttaaataaaaataaaaattcataaccaaagagaatcccacattagcttgttagtaatgctctgaccaagccgagatgcccattctc

SEQ ID NO: 41060 - DNA, 774 bp, Homo Sapiens
  misc_feature (654)..(654): n is a, c, g, or t
ggtgggcagactgaaccagtccaggtggtgaattttccaagaacataggttaagttgattaaaaatgcttttagaatgcaggagcctacttctagctgtattttttgtatgcttaaataaaaataaaaattcataaccaaagagaatcccacattagcttgttagtaatgctctgaccaagccgagatgcccattctcttagtgatggcggcgttagggtttgagagaagggaatttggctcaacttcagttgagagggtgcagtccagacagcttgactgcttttaaatgaccaaagatgacctgtggtaagcaacctgggcatcttaggaagcagtccctggagaaggcatgttcccagaaaggtctctggagggacaaactcactcagtaaaacataatgtatcatgaagaaaactgattctctatgacatgaaatgaaaattttaatgcattgttataattactaatgtacgctgctgcaggacattaataaagttgcttttttaggctacagtgtctcgatgccataatcagaacacactttttttcctctttctcccagcttcaaatgcaaattcatcattgggctcacttctaataactgcagtgtttcccgccttgggcttgcagcagaaaaaccgaccaacatantgttttgctaaagcagtaatttagacttttaccttatttggggattactgggatggattgaatggattggattactattaaactaacaggttattatttactatcacccttattttaaat

SEQ ID NO: 41061 - DNA, 584 bp, Homo Sapiens
  misc_feature (534)..(534): n is a, c, g, or t
tgtcctgggcgccctggaagccggcggcccgagcccgacttgctgttttgttctgtggttttcccctccctgggttcagaaatgctgcctgcctgtctgtctctccatctgtttggtgggggtagagctgatccagagcacagatctgtttcgtgcattggaagaccccacccaagcttggcagccgagctcgtgtatcctggggctcccttcatctccagggagtcccctccccggccctaccagcgcccgctgggctgagcccctaccccacaccaggccgtcctcccgggccctcccttggaaacctgccctgcctgagggcccctctgcccagcttgggcccagctgggctctgccaccctacctgttcagtgtcccgggcccgttgaggatgaggccgctagaggcctgaggatgagctggaaggagtgagaggggacaaaacccaccttgttggagcctgcagggtggtgctgggactgagccagtcccaggggcatgtattggcctggaggtggggttggattgggngggctttggggccagcctttctctgcagctgaccctctgtgtcctcccct

SEQ ID NO: 41062 - DNA, 1038 bp, Homo Sapiens
gtacccccggcactttgggcctgtcccaccctctcagggcaggggcagaggctttgcaggcgtctgtggctttggaggcccctatggggaaacggtagcaacaggcccttaccgtgccttccgtgtggcggcagcatcgggacactgcggagccttctcaggcagtgacagcagcaggactagcaagtcccagggcggagtccaacctataccttctcagggaggcaaactagaaatagctggcactgtggttggccattgggctgggagcaggcggggccgtgggggccgggggcctttccccctgcaggtggtttctgtcggaggaccagctagagggcgtccaagaggagttatttccaccccagtgattagaacatttggaagaggtggaaggtactatggcagaggttacaaaaaccaggcagcaattcagggcagacctccttatgctgcttcagcagaagaagtggccaaagaacttaagtcaaaatctggggaatcgaagtcctctgctatgtcttcagacgggtccctggctgaaaacggagtgatggccgaggagaagccggctccccagatgaacgggagcacgggtgacgccagggcccccagccactctgaaagtgccttgaataatgactctaaaacgtgcaatacaaatcctcatttaaatgcactaagtacagacagcgcttgccgcagagaagctgctctgggaggagctgtctttaataagaagagtaaacttattttttattaaagggtgaaggatgcttggaagggtaagggattaggaaatatccggaaaaaaaaaaaagcttggcattatggaaccttttgggcctttccgtaagaaaaaaaaggagggcttttggaaattccgaatcccccccttggaaatccgagaatcttaacgcccccctctttttatgtttttacccagctgggaatcaacaaaggtcccctttaacacgtcaactagacaagcgatcagggataagactgttgattgcccgcgcccttatcactggagct

SEQ ID NO: 41063 - DNA, 805 bp, Homo Sapiens
  misc_feature (781)..(781): n is a, c, g, or t
tgaaatgcagtttcagggcatatacagcttataattcctggagaatctgcttgttttgcgtgtgctccaccacttgtagttgctgcaaatattgatgaaaagactctgaaacgagaaggtgtttgtgcagccagtcttcctaccactatgggtgtggttgctgggatcttagtacaaaacgtgttaaagtttctgttaaattttggtactgttagtttttaccttggatacaatgcaatgcaggatttttttcctactatgtccatgaagccaaatcctcagtgtgatgacagaaattgcaggaagcagcaggaggaatataagaaaaaggtagcagcactgcctaaacaagaggttatacaagaagaggaagagataatccatgaagataatgaatggggtattgagctggtatctgaggtttcagaagaggaactgaaaaatttttcaggtccagttccagacttacctgaaggaattacagtggcatacacaattccaaaaaagcaagaagattctgtcactgagttaacagtggaagattctggtgaaagcttggaagacctcatggccaaaatgaagaatatgtagataatggactgggatatattgtatttctcatgttaaagcctcttcccttgaaattaaaaaaaaattttaactgataaaacttagggcaacattaattaatgtatattcttacctgaattgttatactttttgaaaatcctgtgacttgcctgtttctccccgctccaacgaaatcattaactctcctaanatgtgtttcattctagtaagaaaa

SEQ ID NO: 41064 - DNA, 813 bp, Homo Sapiens
agaggtaatccaaaagaaatatgtacatagttctggaaattatttgtggtaaggaaatattctttactccagttgcatttctcagacaataaagtggtgcatccatgctacctcctactttgtcaacaaagatgctatttaccctttacatttttgtatcataatagattttaaaaatctaatgttctttattgcaagacattcttttgttaacaggtttgtttctttttaatgttttacctaaaatttgacatgcttacaggacaggtttgcctcttactttatttaacattgtagaaatgtaattaataaacaatgctcactacacagtttagaatagacgttctcatttatattatcttccaaatttgatcagttagcaaaacttaatacaccaattaaaatatttctacatatgagaatgtttacaatttaaattttagaacttgttttggatgtgattatatgtacgaaaatcgtgtaacactatgctcatgctaagaaccgacataacagaattactgaaataaatgtgctgtgaggaatggaaaatatggtgcaggtgtcttggtcatgataaattgtgattctttttaaaaattttttccaaaaacaattaggtattttaatctgaaatcagtttcctttacaaacacaagtttttgtatgcaagcaccattttatttcatgtagtatggctaatactatagttgaaaccaagatatgcattgatttcttgcttcgtatgtaataaagttaaaacagttaaataagagtatttggtaagtaatactactcatgcagtgattgctt

SEQ ID NO: 41065 - DNA, 785 bp, Homo Sapiens
accatattcaataaagtaatatctcttatggttggcattaaatttagcatttcattatctaacaaaattaatataaattccaggacatggtaaaatgtgttttaataacccccagacccaaatgaaaatttcaaagtcaataccagcagattcatgaaagtaaatttagtcctataattttcagcttaattataaacaaaggaacaaataagtggaagggcagctattaccattcgcttagtcaaaacattcggttactgccctttaatacactcctatcatcagcacttccaccatgtattacaagtcttgacccatccctgtcgtaactccagtaaaagttactgttactagaaaatttttatcaattaactgacaaatagtttctttttaaagtagtttcttccatctttattctgactagcttccaaaatgtgttccctttttgaatcgaggtttttttgttttgttttgttttctgaaaaaatcatacaactttgtgcttctattgcttttttgtgttttgttaagcatgtcccttggcccaaatggaagaggaaatgtttaattaatgctttttagtttaaataaattgaatcatttataataatcagtgttaacaatttagtgacccttggtaggttaaaggttgcattatttatacttgagatttttttcccctaactattctggtttttgtactttaaaactatgggggaaatatcactggtctggcaagaaacagcagtaattattactgagttaaattgaaaagtccagtggac

SEQ ID NO: 41066 - DNA, 581 bp, Homo Sapiens
gatatactcctgagctttcactctgctgcttctcccaggcctcttctactatggcaggagatgtggtgtgctgttgcaaagttttcacgtcatcgtttcctggctagttcatttcattaagtggctacatcctaacatatgcatttggtcaaggttgcagaagaggactgaagattgactgccaagctagtttgggtgaagttcactccagcaagtctcaggccacaatggggtggtttggtttggtttccttttaactttctttttgttatttgcttttctcctccacctgtgtggtatattttttaagcagaattttattttttaaaataaaaggttctttacaagatgataccttaattacactcccgcaacacagccattattttattgtctagctccagttatctgtattttatgtaatgtaattgacaggatggctgctgcagaatgctggttgacacagggattattatactgctatttttccctgaatttttttcctttgaattccaactgtggaccttttatatgtgccttcactttagctgtttgccttaatctctacagccttgctctcc

SEQ ID NO: 41067 - DNA, 580 bp, Homo Sapiens
tgtaatttgaatataaataattactttaaaattgtaatgacacttttacacgtaagtgttttgttctgggctaccgtgtcaacgaggctgctttacaacagctttatttatttttactttcatgcaatttttttacacatcttttggtggagtaaacttcaccacatccatgaataaactctcagttattttgaaatggcaaatttctcattatttaagtttggatctggaaaggacatgacttctgaaatagccgctgctgggttttaaaagctgaggtctctcaaagtgtggaggagacgttgccgtcaggcgggagccaagtgccgggaagatgtctattttttttcttgtgtattgaaatgtaaaatcatgatgtttgttatgactgctgatgcgattgtttttgtaaattttattgtggcatatacagtattgtcatacagttgaagagaaacaatgtttcctaatgtaagtgctctgaaaatgttgacactgtatatatatatatgaggatagtttgttttttttttgttttgggttttttttttttcagattgaaaaattaaaatagatccta

SEQ ID NO: 41068 - DNA, 494 bp, Homo Sapiens
gcacgagcagaccaaaaaaaagtagagaaaggagctgaactccactctcgatgctacttacagaggacatctgtaaagtcttcataaaagaccttgaatgatgcctaggatggcagagcccctgggtcctactccatcctccagcctttgtccttgtcctggcctcctgctctccagatctgtaaactgggctcaaggactgtacaagcagagtacaactacccgcctccccggtgccagggcgcctgttgggtttggtcctgtgtagatgattcccagagtctcattcatccagctcctcttcagacagaaggtccccatggtcagacagctggtctgcattgctggtactggttgcatcatcctcatcctcagagctggcttcacaggcaggtgtggaagagctgcatgagttctcgaaaatggtgggaaacctaagaaaggaggagggctgtattcactgatccttagtaacatgttaacatttatgaagc

SEQ ID NO: 41069 - DNA, 747 bp, Homo Sapiens
gcaagttaaatggagataaagttgaaatcatagaagatgcaaatgacctttcaaaatcaacacaatgtgttctgaaactttcgtgactaataccatgcatctgtgatcaatgaactatgtggttttgaatcggatgtagaccattagtactactacttgagctaaacttctgcatggttcataatttttaaagtgtgtagttaatatgcatgttatcgtcctttcttccattcttaacagtatgtgcccatttgcaaaacaaaaatgctaataatcagtaatagtcctataaaagatgttaactctgtttagtcattgactgatcttgctctaaccttaaaattttgtgattattgacctctgttgcatttattctaaagccccccaaaaattatctagccgtttcgaatatcaacattaccctggtgtattcactgctgtatgcattattgttctttgttgctgttttatgccttcatattagcaaatatgaaattctgtgaaaaaaaaccctttgatcttaaaaaaaaaaaaaccaccccccccttctgtagcaggaaacaaattgcttgttcttgagaactttcccatcaagaatttagtagaagcaggtatacttctatcattttgatgtttttgttaatgtttccaaacaatgtactttgaaatcagaatcacttcttatcgttttcatatacttctgatgctcttcatcacattagtgatcagaaatgaggtgtaattccc

SEQ ID NO: 41070 - DNA, 889 bp, Homo Sapiens
tggcaaaggtggtcagcggattaaacaaatccgtcatgagtcgggagcttcgatcaaaattgatgagcctttagaaggatccgaagatcggatcattaccattacaggaacacaggaccagatacagaatgcacagtatttgctgcagaacagtgtgaagcagtatgcagatgttgaaggattctaatgcaagatattttttcttttttatagtgtgaagcagtattctggaaagtttttctaagactagtgaagaactgaaggagtcctgcatctttttttttttatctgcttctgtttaaaaagccaacattcctctgcttcataggtgttctgcatttgaggtgtagtgaaatctttgctgttcaccagatgtaatgttttagttccttacaaacagggttgggggggggaagggcgtgcaaaaactaacattgaaattttgaaacagcagcagagtgagtggattttatttttcgttattgttggtggtttaaaaaattccccccatgtaattattgtgaacaccttgctttgtggtcactgtaacatttggggggtgggacagggaggaaaagtaacaatagtccacatgtccctggcatctgttcagagcagtgtgcagaatgtaatgctcttttgtaagaaacgttttatgatttttaaaataaatttagtgaacctatttttggtgggtcattttttttttaagacagtcattttaaaatggtggctgaaatttcccaacccaccccccaaactaacactaagtttaatttttcagcctcctctgttgggacatattaagtgccattctcttggtgggacatagggcaaaattaacttgggcaaactttaatttcgggtgaattttctttgaatgggtttg

SEQ ID NO: 41071 - DNA, 826 bp, Homo Sapiens
  misc_feature (704)..(704): n is a, c, g, or t
  misc_feature (712)..(712): n is a, c, g, or t
  misc_feature (804)..(804): n is a, c, g, or t
  misc_feature (807)..(807): n is a, c, g, or t
  misc_feature (822)..(822): n is a, c, g, or t
ttaaagagggagatggctgggtttatcataaaccactttggaaaataattccaacaacacaaccagcagagtgacacatactatctaaaactcgaccaaatgaggttcttctctgtttaccctaaatcctcccagaatggagtcattgcactgagtgacctgcttcctgattgcgcagactgaaactagctaaacctgaatgtacctactagggcaccataatactgcagcaagaccaaagtggtaaagaaacacagtggaccttttaccaacctgttcatgtgatgtgagcaataccatcttaaaacttgttacctgaatcagtagatgaatcttttatccagttcttgctcctaaagttaagtttgaatcccctatttttgcacaggggcagcagatacacacaacaatgagaactcagtgactttgatttctttgtagtgaaaagtgaagtctccgtttcagagtttgtgtctttctttctgtccataactgaagtattcactactcttgtaaaccaaccaagaggaggagaaagatgacccagaagtggattcagccattgtgcctgaaatcagtgtttaaaaaaaaaaatcaaccaggttgtggtaacaaggcattctatttcttcaaaaagactgtatgcctgtgtctgaggaacttacctattatccacctctggtggaactctcttttaaaaagtncatttatngattgatcagaattataaccctggagaatttttcttctgacattttaatatccttgaaacaaccttgacttggaaaatttcagacatttttnatncctagtttattaaanatac

SEQ ID NO: 41072 - DNA, 542 bp, Homo Sapiens
tgcttttttataaagctgaagtcctgagcgaggagcccattttgaagtggtataaagatgcacatgttgcaaaggggaagagtgttttccttgagcaaatgaaaaagtttgtagaatggctcaaaaatgctgaagaagaatctgaatctgaagctgaagaaggtgactgaattttgaaactacaccctcagtaaagcaaacaggagttgtagataaaatgtcatgtctcatgtgtcctggttcttacatcttcctacctccctgtatcaagcatgatataagggctttcatggcaaattttattttaactgtttctatggttgctggaaatgttgggtttagtttctaaaaccatgttttaagtagctacaggagctatagatttgaatctaatgttgcattagtcttttcagttatcttctacctcctgtattttctactgtaataatgtaatttaaggccttccacaatgaacagttcactttattccctgggttttctataaacagttttaaggatatgatttggttaaaaaataattt

SEQ ID NO: 41073 - DNA, 894 bp, Homo Sapiens
aaaggagtcttccaactaagagaaaaattgtccactgacatttgggatttacttttctccaatacctgccaatacagaaaactattatcagttgttattgttatcccttgaaagcgagggtgacaaaaacaacaaaacaccgttataaacacatcaaaggttcattctgactgaggtaagactttccaagcccttgttagattaggccttataaaacttgtgtgcattataacctaagctgtgcaacctgtgaagccaagagtgaactgatgtttcatttatattttcatccaaatgacattatctgcacgtttttaaaatttaaaaacaaaggactatttaaaaatacagtttattaacaaacgtgaactactttctgttacattaggtgttccctagtgtttcttaatttctttttagaaagtgtatttttattagtatttttccggtgaacagaagatttgtttggatttaaacatttactaagacagtacctattaggaaaaccaaatattgcaaatggtcaattcgattttaatttctcaaaagatactctgttatccagaagattaaaatgcctacattgagtgcttaaaaaaaaaaaaacaactgtgatgatgtgagcagaatggcaagtaagttaagcatttttgatcctgtaatcatggtatcattacaatgaaaggaattcacaaactactggccagaaggaagtttgtttttttaatttaagaggggaaatataacctataaattttggtttcttcccaagcttaccttcttaaattttgggagacttcaaagttaaaacattcttcaaacagaatttttattttataatttttgaaattggccaatttggaatttttggcctacgggaactgggggatccaa

SEQ ID NO: 41074 - DNA, 595 bp, Homo Sapiens
tttaggttttccctgaaactaagttgaattatttccaaaatgaaacaggcttctcagggacatatccacttcttcccagtctgcctttggattaaagcaccaagcagagaccacattaattccctttgctatactgtgatccttagtatgttaattcttaagaaaccaacatatcactgaaagaaggctggcagaacgcaagtgcattttttcactgtgggaagaaagatcaagtgacgtattattttttcctggttgtcacttaatgggctgagtaaaaagcttgaaaactcagactttcggtcttggttctgccactcattggttatgaggaggcccagagcaggtaagttcaccttcctggccttactttcctgatgtgtaatacggaattacttcacagtagcatgacagtataagacaccagcagtagatacaactatgatgacattccatgagttggtatttttagttctaactgctaaatttgttctctttacgggacagatttctaataaagtgcttggtcttaaaatacatggttggacagaggtgccctatcccttaactatgagcaggtgctaccttttgggat

SEQ ID NO: 41075 - DNA, 983 bp, Homo Sapiens
  misc_feature (759)..(759): n is a, c, g, or t
  misc_feature (877)..(877): n is a, c, g, or t
gcctgggtggcgattccggcacgaggcataaacagccatctcttcctgtactctataccctgtctagccaggctacacatgaagctgttcatctcctttgcaggatgttggtctttgatccatccaaaagaatatccgctaaggatgccttagcccacccctacctagatgaagggcgactacgatatcacacatgtatgtgtaaatgttgcttttccacctccactggaagagtttataccagtgactttgagcctgtcaccaatcccaaatttgatgacactttcgagaagaacctcagttctgtccgacaggttaaagaaattattcatcagttcattttggaacagcagaaaggaaacagagtgcctctctgcatcaaccctcagtctgctgcttttaagagctttattagttccactgttgctcagccatctgagatgcccccatctcctctggtgtgggagtgatggtggaagataatgtactactgaagatgtaatgtagctttccactggagtctgggatttgcaattctggaggttaatcatgcttgtactgtaattttactaatgaagttttaaattaacaaccactacttgtatgatatgaataatatttagaaatgttactagacttttaatcttgtaaagtggttgtgcttttagaagaaaaatattttacccagagttgcacatgttttatgaatttagtgcagctgttatggctcacctcagaacaaaagagaattgaaccaanatttggcgagcgttggggcttttatgtattgcccctgcggcgccgaccaggcagcgaggaatgccgtactaactccacgcactgttcacaccgcccccgccgtaaccccctggcatcntcttcacgcctactccgctatgcaccgccttcgccccgcacgtcccgtcagacccaccacgcaatcgtcgccacccgcccccacctcggtcacgctacgatcccgg

SEQ ID NO: 41076 - DNA, 916 bp, Homo Sapiens
gaataatgaaggagaggtctgcatcaagggtacaaacgtgttcaaaggatacctgaaggaccctgagaagacacaggaagccctggacagtgatggctggcttcacacaggagacattggtcgctggctcccgaatggaactctgaagatcatcgaccgtaaaaagaacattttcaagctggcccaagggagaatacattgcaccagagaagatagaaaatatctacaacaggagtcaaccagtgttacaaatttttgtacacggggagagcttacggtcatccttagtaggagtggtggttcctgacacagatgtacttccctcatttgcagccaagcttggggtgaagggctcctttgaggaactgtgccaaaaccaagttgtaagggaagccattttagaagacttgcagaaaattgggaaagaaagtggccttaaaacttttgaacaggtcaaagccatttttcttcatccagagccattttccattgaaaatgggctcttgacaccaacattgaaagcaaagcgaggagagctttccaaatactttcggacccaaattgacagcctgtatgagcacatccaggattaggataaggtacttagtacctgccggccactgtgcactgctgtgagaaaatggattaaaaactattcttacatgttgtttggcctttcctcctattttttttttaaccctggttaaactctaaaagccatagctttgtgtcatattgagactacatgggtacaactccggttccccaataaatcaatcgtgtctttccatcttcgatgtgccaaataagggttaaagctatttatcaactgcgtgctcagaaccacttagtcgggcatccaggattcacttaaacaatggaaccacgtcagggcaggacccggccattggtggaa

SEQ ID NO: 41077 - DNA, 674 bp, Homo Sapiens
ggctagaaggggaggtggaggatctcctttcctcttctcagacccgggagcgtccgggacgcggagcccggagctggggcgacgaggcgattgcgggggcctgggctagctgctggctaccaatattctactttctgtctctatgaatgtgactaccctggttacctcatataatctccctggaaaaggagacatgaatgtctgcaatgatacttcctgacaagaagttgatacaagaaaaggaaaggagattaacagctagtgagcagaatttcgaacagcaggatttcgtattttttgcttccaactgcacacttccgttgcccacttttaaatcagagatacctacactcaaaacccagacaaggcaaaaggatacttttcttgtatattttttgagatcgaagaaacgacaatgtccaggaaacagaaccagaaggattcatcaggattcatttttgatttgcagtccaataccgtactggcccagggaggagcttttgagaacatgaaagagaagataaatgcggtacgtgcaatagttcctaataagagcaacaatgaaattatcctggttttgcagcactttgataactgtgtggacaaaacagtacaagcattcatggaaggtagtgccagtgaagtactcaaagaatggacagtaacaggcaaga

SEQ ID NO: 41078 - DNA, 784 bp, Homo Sapiens
ggactgtataggtagatccagatccagactgtaagatgttgttttaggggctaaaggggagaaactgaaagtgttttactctttttctaaagtgttggtctttctaatgtagctatttttcttgttgcatcttttctacttcagtacacttggtgtactgggttaatggctagtactgtattggctctgtgaaaacatatttgtgaaaagagtatgtagtggcttcttttgaactgttagatgctgaatatctgttcacttttcaatcccaattctgtcccaatcttaccagatgctactggacttgaatggttaataaaactgcacagtgctgttggtggcagtgacttcttttgagttaggttaataaatcaagccatagagcccctcctggttgatacttgttccagatggggcctttggggctggtagaaatacccaacgcacaaatgaccgcacgttctctgccccgtttcttgccccagtgtggtttgcattgtctccttccacaatgactgctttgtttggatgcctcagcccaggtcagctgttactttctttcagatgtttatttgcaaacaaccattttttgttctgtgtcccttttaaaaggcagattaaaagcacaagcgtgtttctagagaacagttgagagagaatctcaagattctacttggtggtttgcttgctctacgttacaggtggggcatgtcctcatcctttcctgccataaaagctatgacacgagaatcagaatattaataaaactttatgtactgctgta

SEQ ID NO: 41079 - DNA, 693 bp, Homo Sapiens
agggaagggtgatgcctgagtgccagtgcccaccccacatgacagggccccggtgtgaggagcacgtcttcagccagcagcagccaggacatatagcctccatcctaatccctctgctgttgctgctgctgctggttctggtggccggagtggtattctggtataagcggcgagtccaaggggctaagggcttccagcaccaacggatgaccaacggggccatgaacgtggagattggaaaccccacctacaagatgtacgaaggcggagagcctgatgatgtgggaggcctactggacgctgactttgccctggaccctgacaagcccaccaacttcaccaaccccgtgtatgccacactctacatggggggccatggcagtcgccactccctggccagcacggacgagaagcgagaactcctgggccggggccctgaggacgagataggggaccccttggcatagggccctgccccgtcggactgcccccagaaagcctcctgccccctgccggtgaagtccttcagtgagcccctccccagccagcccttccctggccccgccggatgtataaatgtaaaaatgaaggaattacattttatatgtgagcgagcaagccggcaagcgagcacagtattatttctccatcccctccctgcctgctccttggcacccccatgctgccttcaag

SEQ ID NO: 41080 - DNA, 941 bp, Homo Sapiens
ccagakaagcccagtcttccgaaatgcggtgctcaggcaggtattaaaatctcttctgtgcacaagagaccagctccagaaaaaaaagagaccacagtgaagaaggcagtggtggtccctgcgcggagtgaagcactcgggaaggaagcagcttgtgagagcatgcacgccgtcgtgggcgagcgatcacaattacaatgcagtaaagccagaaaagactgctgctccctcgccgtcactgttgtataaatgtatgtatcacctaggggttggcctcctggacccctcccgttctttctggatagccatcccctgggcctgtccaggactgggagttgcagctttgtgttaagctgatcacagacaccggctgcaccatcagcgggaagcagagcccatgtccaggatgcctcctgctgccctgtgtccatccctagtctgtcaggacttcctgtcactgttttccaaagctgtaaacctcactggtgaacgttcaccttaatgattgattctttaatctctgttttcactctcaggctctggtaagtattcgtattctcttcatcccagtctgattgcatagccacactgcccggcacgccacatccacccctgtctgcacatgagttgttctgacaacagcgctgtatacgcttcagtttttccacattgtccacggccagcacatgaaagcatcacttcttttttatgttgtgggaatctttgcaagtkagtgttgcatctgattttcaggtgtacatttatttttgactgggcagataggggatttttttttttccatgtccgattcacacgctacacacccacatgaacacattcgaacttcgaaggccacacactcctgcttcatagggcccacggtaagtgagttcacacctagaacactgtyctgaccgcagavcgcgtgccttggacttggt

SEQ ID NO: 41081 - DNA, 519 bp, Homo Sapiens
  misc_feature (418)..(418): n is a, c, g, or t
tcgagcaccccactgggagagctggtggtgcagccttcccctccctgtataagacactttgccaaggctctcccctctcgccccatccctgcttgcccgctcccacagcttcctgagggctaattctgggaagggagagttctttgctgcccctgtctggaagacgtggctctgggtgaggtaggcgggaaaggatggagtgttttagttcttgggggaggccaccccaaaccccagccccaactccaggggcacctatgagatggccatgctcaacccccctcccagacaggccctccctgtctccagggcccccaccgaggttcccagggctggagacttcctctggtaaacattcctccaggcctcccctcccctggggacgccaaggaggtgggccacacccaggaagggaaangcgggcagccccgttttggggacgtgaacgttttaataatttttgctgaattcctttacaactaaataacacagatattgttataaataaaattgtaaaaa

SEQ ID NO: 41082 - DNA, 918 bp, Homo Sapiens
tctagcgaggtgacagcgtagaaccagataagccagcggccgggggcttgggaaccagagcgtgcaaccctagaagggaaaaggacgggaagagattgagccgcggctgggagacagcgagccagagtctgggtgtttgtgcgagagccacggcgggggctggggcgagtggccggcatggctgaaggctgcgctctgcaaccttgaagagccgctgcattgagaggccagggacagggagaccggtgcgatggcagagcgcggcccccgccgctgcgccgggccggcccggctggcctgagccgccggaggagcggggctgcctctgcgcgtccatggagcagcgggaagggcgaaactccggagcgccgcgtccctgcgccgctgcggcggactgctgaaggggccgagcccgcgcggaccgccgaggaagagacccccgctccagcccgcaggccggctgcccgggggcggcgggggacatcggagggcagcggagcgagcagcgccgcgggagaggccggcgcgggaggcggccgcaacaatgcggggcccgctagggctgctctgcttgctcgccctggggctgctcggctcggccgggcccagcggcgcggcgccccctttttggatcggggccctgccactgctacggctaccctcgggtggaatgcctccgggaaaggggtgtacaggcccgtgcccctaaggggcttataccccccttccgccggagcggctgggtggttcggcgttggaacaagcgtgcccgcccggttggcccgtagatatgacacatttttaacaccgcgtttgcgagcctttgacacgaaagcacatccgccattctgggcgtagtgttgaagctgacaccatatctcgacttcttatctccacaccctacggtgaatagcaaac

SEQ ID NO: 41083 - DNA, 724 bp, Homo Sapiens
  misc_feature (678)..(678): n is a, c, g, or t
tttatttatgttggtacatccaacaaaatagttggagccacaaggcccttgtctttttaaaaaaacaaaatattttgaagatggtgaaagtgactgattttaataatgagataggtcacttaaaataacagttcctttgaccttaaaacatggcactggcccatgtgacctttgccatttcccagtacttccctttacagtctgcagcctataaacagtggtgtctcaaagcaaaggaaacctccacaagtgctgcaacagtgcattagtttttatgtagcaatttgtttataaaaattcccatcccataatgcatgaccttcctaaaaatacccacagcctccataggcaaggtgagcctttctgtgctacccactggttagattccagccacctcagggattctgatccatgtcattaacgaccatcccagggtgtgagggcctgattaaagcttatcgaactagacatttgtttattagatgagctcggcattattattttctcaataactggtagaagggaaattttaaacataacactcaacccaaacaaaactacttcgtgaggctttcagcaaaaaggctgcttaaaagcatgaacccgggatgcagagcagcttttgtgcacggttccacttactgtaattggtttctggttctttcctctaacaccttncatgtatgtcaactttttatcacccgtcaggcatagactcgtggag

SEQ ID NO: 41084 - DNA, 740 bp, Homo Sapiens
aaggcaaagagaccactcaacccccacctggaaggggcaaagaaaagccagagttccatgtttgtactcctgtgctggactgtttcctgagtaccagcaggtccctttttgtctctcatgggcctagcataggtatgagccagggatcctttcctggtccctaagatcaaaccccatggagcagccagcgttagatgcccccacccacctgtactctggagagactgtgctgggaacatgtaccactgagcctgagatggggatgagggcagagagaggggagccccctcttccactcagttgttcctactcagactgttgcactctaaacctagggaggttgaagaatgagacccttaggttttaacacgaatcctgacaccaccatctatagggtcccaacttggttattgtaggcaaccttccctctctccttggtgaagaacatcccaagccagaaagaagttaactacagtgttttcctttgcaccgatccccaccccaattcaatcccggaagggacttacttaggaaacccttctttactagatatcctggccccctgggcttgtgaacacctcctagccacatcactacagtacagtgagtgaccccagcctcctgcctaccccaagatgcccctccccaccctgaccgtgctaactgtgtgtacatatatattctacatatatgtatattaaaactgcactgccatgtctgcccttttttgtggtgtctag

SEQ ID NO: 41085 - DNA, 825 bp, Homo Sapiens
  misc_feature (48)..(48): n is a, c, g, or t
  misc_feature (642)..(642): n is a, c, g, or t
  misc_feature (673)..(673): n is a, c, g, or t
  misc_feature (729)..(729): n is a, c, g, or t
  misc_feature (763)..(763): n is a, c, g, or t
  misc_feature (804)..(804): n is a, c, g, or t
attttttttcccccttcccctcttggtcagaatcaatcctttggtganagtaagaaccgcaggagttgagttttggtttggtcctgctcagttttggtttttagttgtccatcctcacagtcctacacactcgcctcctcctgctagggctgggggtatctgtgtcctttaaaatggatgaggacctggtcctcgacatgtgggtgagccatggaccttgccttcccttctcgtccttgagggtttagaacacacaccaacacctccagcgtccccgccccagcttccggtggggtgatgcggtcaccctgcaaaagacttgcactttcctcagaaccaacatgacgcagctcaataagggtgagggtcactccctcccagaagccccgtctggacgagccttgcctgacctcttcggtgctgaccttcccaaagtgatgccttactggttttgtactaactgtgttcattttacataagtgtcgtgcctgcctggggtttgttttttttgtcattgttttccccattgaaacaaacagggctaaaaagtcatctgttcattaggagaactcaagttgctgtgacttttctcatccaaaagactcatttgtgtggatgcgtgaccatgggaaaaagaaaaanaaaaagatccattttttaggttcttttcggnctccagctggcaacccaactggacaatgatctgtctggtgcaggagaaggcaaaanttctacaagtctacatgaccttgctgatacttgntctaatagaaacccagctgctgtgtcttcaacatacttggnattttcattacaaagtatggg

SEQ ID NO: 41086 - DNA, 998 bp, Homo Sapiens
  misc_feature (753)..(753): n is a, c, g, or t
  misc_feature (783)..(783): n is a, c, g, or t
  misc_feature (874)..(874): n is a, c, g, or t
  misc_feature (903)..(903): n is a, c, g, or t
agaagatttcaccctcttggatttcataaatgcagtcaaagagaagtatggaattgagccaacaatggtggtacagggagtcaaaatgctttatgttcctgtaatgcctggtcatgcaaaaagattgaagttaacaatgcataaacttgtaaaacctactactgaaaagaaatatgtggatcttactgtgtcatttgctccagacattgatggagatgaagatttgccgggacctccagtaagatactacttcagtcatgacactgattaatacaagttgtcttaacgttactccaggaccacttgattttggaaagagtgcacttaattcagaagctaaagaaaatcagttcataatactatggatttctctttcattaagccttaattttaagggaaacatcagtaagaaactgcactgaagaattataaaacattttggggcatagcatacacttgtctaacggttcacacgtggctatgatcacaagcaactttgaactggaatgctatttacaaaagttttgtgtattaatctgtgtattaatctctctggataaaaagaaggaaaaaatatgtatgaccagaacagatatggatgaagaaattgaaagcaacgaatgcaactattcaaaaagtttaattttatgaatttcttttttgtttagtcttgaagactgattttctatgcaaatagtgtttggcatcctgcacctctgatatgatttggctttgagaatttaataccactgngaagaagtatggtagtggtggatcgaaggntggatattttaaattgtgcagttacagtttactgtcctattacctctgctcgtttaaaccagttgttatatcactgtgtcccccaaatcangatttttgttgatagcatcagtggtgtanggagcaatatggtccgattgagacttattacctagaactaaaccgtgaaacaagtattaatatgggactcttcacaaacgcttcttaaaaaaaaa

SEQ ID NO: 41087 - DNA, 989 bp, Homo Sapiens
ggacccaacactgtaaactcagtgaaaatagtaaatgattcttttattactaagactgtcatgcattctgaagcagttggcttttttttaaccataggaagtaatttccctctagctcctttccttctactctcctgctcagaccattagtaggtactttgttaaataaaaaactagattaacatcaatattactccaatttggtatcttttacactatgtattatacctactttctttttatttcatttacaaatagtttaaattactttatcaaccagctgtattgtttccctcttgtaaaagtaccatcaagtggggaaaatgtatgtggaagtggagagtgaatttgtatgactaaaggataatctgtacatggggaagtgggcaaaagtggataggatgaatttaaagaaaatgactacctttggaaaaaagaaattaaattttgttcacatatcctaccctttcccattgtgcatatcccaagtgtcatatttaaaactaaggttacttaaaacagaatccaggaatatcaaggctctgtggcttggaattttaaaggataggactaataaaaggactttttgcaaagaaggcttttttttccaccttccactttggttttgtggttcctttgaaagtaacctgatactttttcggggtaatttaattccccccagtcccataaaatatggatcccagaaactttgccttataatttttatatgaaagtcctcgaacaagctccttccggaaaagtaaaatttttagaacaccatggccttggccggttctcctattttaattagaaatttacgtgggtttttagcgccgaaataaaaaccacaaattctcccccaacaattttgagcctttcacttttttgggagaattaaaacccttgcccaacaccaatttttttccccctataccctttttttttcccaaacagccataaaatgggtgctattttggcccccttgaatt

SEQ ID NO: 41088 - DNA, 714 bp, Homo Sapiens
gccaataaactgctttaatgaataacaaactatgtagtgtgtccctattataaatgcattggagaagtatttttatgagactctttactcaggtgcatggttacagcccacagggaggcatggagtgccatggaaggattcgccactacccagaccttgttttttgttgtattttggaagacaggttttttaaagaaacattttcctcagattaaaagatgatgctattacaactagcattgcctcaaaaactgggaccaaccaaagtgtgtcaaccctgtttccttaaaagaggctatgaatcccaaaggccacatccaagacaggcaataatgagcagagtttacagctcctttaataaaatgtgtcagtaattttaaggtttatagttccctcaacacaattgctaatgcagaatagtgtaaaatgcgcttcaagaatgttgatgatgatgatatagaattgtggctttagtagcacagaggatgccccaacaaactcatggcgttgaaaccacacagttctcattactgttatttattagctgtagcattctctgtctcctctctctcctcctttgaccttctcctcgaccagccatcatgacatttaccatgaatttacttcctcccaagagtttggactgcccatcagattgttgctgcacatagttgcctttgtatctctgtatgaaataaaaggtcatttgttcaa

SEQ ID NO: 41089 - DNA, 945 bp, Homo Sapiens
gatggcaaggacctggaggacctgcagatcctcatcaaggtcaaagggaagtgtaccactgaccacatctcagctgctggcccctggctcaagttccgtgggcacttggataacatctccaacaacctgctcattggtgccatcaacattgaaaacggcaaggccaactccgtgcgcaatgccgtcactcaggagtttggccccgtccctgacactgcccgctactacaagaaacatggcatcaggtgggtggtgatcggagacgagaactacggcgagggctcgagccgggagcatgcagctctggagcctcgccaccttgggggccgggccatcatcaccaagagctttgccaggatccacgagaccaacctgaagaaacagggcctgctgcctctgaccttcgctgacccggctgactacaacaagattcaccctgtggacaagctgaccattcagggcctgaaggacttcacccctggcaagcccctgaagtgcatcatcaagcaccccaacgggacccaggagaccatcctcctgaaccacaccttcaacgagacgcagattgagtggttccgcgctggcagtgccctcaacagaatgaaggaactgcaacagtgagggcagtgcctccccgccccgccgctggcgtcaagttcagctccacgtgtgccatcagtggatccgatccgtccagccatggcttcctattccaagatggggtgaccagacatggctcctgcttccccgcttaacccacggagtgactgtggttggtggcgggggcgcctccctaccagagccttttgacccgcctgttctccaccacggaggtggggagcccacacctcaacacaccagcgaggatctgggcctaccgttcccacccgtacgagattcctcaccaagaatggtgtttcatctggcactgcatacaatccaatc

SEQ ID NO: 41090 - DNA, 804 bp, Homo Sapiens
  misc_feature (698)..(698): n is a, c, g, or t
  misc_feature (735)..(736): n is a, c, g, or t
  misc_feature (740)..(740): n is a, c, g, or t
agaggtaatccagaaatgacaatttcagaattacctaacaaacagtgtatttatttttaatatgtgataatgatcttgtggtatatatgcaaaattattcctacaaaaatttgtatattggtctgtcattttcctttcacattctatagtgaattgttcccaatgttgaaatggacgtgtaagcctttgagctagcttggagtcgaatacactatttttcactcacaccatttattcatctttgtatttaatactatagctctgtcaatatcacatgaggcagtttttcaaatacgtataaacagaggttgcttattattaaaggaaagacaaagtgggactctttatgatgtcatgaccatgataactaagcacctaagaaaattatttaaaatagttatgtggtaggcagaaagacaaataatttagttttttacttttcaccagcatgtatcttagctacctaaactgaaacatgggaggctgggcttaattcaaaatatattgctccaaggcaaataaaaaaatgctttatctatatttgtggctttctgatgaaaaaatagagaagagcttgttcaataacaggacatggtttccatttcaagatcacaagtaatataagactgggcaagtagtacgtatggaataaaggacatactgctgattgataaagtaaaaaaactttttttttgttngttactcatctccactatttatatatgtttctgattnnagtnacagtacttttagatgatatacgtagctaatacacttttaggaaaatatgctgtatatggccag

SEQ ID NO: 41091 - DNA, 854 bp, Homo Sapiens
  misc_feature (763)..(763): n is a, c, g, or t
  misc_feature (814)..(814): n is a, c, g, or t
aggctcattttagtaaatacagctttatcccaaaagctttaactgtattggaaaaacttaaaaaatagcatcctcaaattttctgattcttatttgccatgaaatagaacttagtaaattaaatgttatttgaaaatgttataagagctttgtaaatatttcagaaaatatgggataaatgcctgaatttggttcttctacaggtgctataataaagtccatctctcaatacttatactttctaaattcatctcagaatattagcagccatattccacagttcctataatttttactgggggggatttgtgataggaaagtccttgggaaacatttccaatctttcaaaatattattgtgtatcttaagaagtataggaacttgtatgttgaaatgttgtatggtagttcttgtatagttaaataataatctttttaagagttaatgataagcatatgttatgtgcattattaataaaatagtggccacttaggtaatacccacttttatcttgtgtgctgggtactctggttactgagataaataaggcactggacatcctcacgtggagttcacaggctcatcagtgaattctgtaccacatttcaaccttgtttattttagtttaatggaatatacattcttagtattgcctgattatttaaatttgttgagggggattgcatgttgctttattggcctgtaaaaatagctagtttggtaagatttggtctcgcaccttccatctttgctaccacattanagatgagctttgttaaaaagaaagcatatttctctgattgccccttatggnagaataaagataaattccaagaaaccaaaaaaaaaaaaag

SEQ ID NO: 41092 - DNA, 588 bp, Homo Sapiens
actgccttctcacttccgcttccttccagtaaggagtcggggtcttccccagttttctcagccaggcggcggcggcgactggcaatgtttggcctcaaaagaaacgcggtaatcggactcaacctctactgtgggggggccggcttgggggccggcagcggcggcgccacccgcccgggagggcgacttttggctacggagaaggaggcctcggcccggcgagagatagggggaggggaggccggcgcggtgattggcggaagcgccggcgcaagccccccgtccaccctcacgccagactcccggagggtcgcgcggccgccgcccattggcgccgaggtccccgacgtcaccgcgacccccgcgaggctgcttttcttcgcgcccacccgccgcgcggcgccgcttgaggagatggaagccccggccgctgacgccatcatgtcgcccgaagaggagctggacgggtacgagccggagcctctcgggaagcggccggctgtcctgccgctgctggagttggtcggggaatctggtaataacaccagtacggacgggtcactaccctcgacgccgccgccagcagaa

SEQ ID NO: 41093 - DNA, 636 bp, Homo Sapiens
  misc_feature (554)..(554): n is a, c, g, or t
ctgaaaaaaatgtctaaggcctttacagaaacatttttagtaatgaggatgagaactttttcaaatagcaaatatatattggcttaaagcatgaggctgtcttcagaaaagtgatgtggacataggaggcaatgtgtgagacttgggggttcaatattttatatagaagagttaataagcacatggtttacatttactcagctactatatatgcagtgtggtgcacattttcacagaattctggcttcattaagatcattatttttgctgcgtagcttacagacttagcatattagttttttctactcctacaagtgtaaattgaaaaatctttatattaaaaaagtaaactgttatgaagctgctatgtactaataatactttgcttgccaaagtgtttgggttttgttgttgtttgtttgtttgtttgtttttggttcatgaacaacagtgtctagaaacccattttgaaagtggaaaattattaagtcacctatcacctttaaacgcctttttttaaaattataaaatattgtaaagcagggtctcaactnttaaatacactttgaacttcttctctgaattattaaagttctttatgacctcatttataaacactaaattctgtcacctcct

SEQ ID NO: 41094 - DNA, 884 bp, Homo Sapiens
tcgaatttacattagtttttttcatacccttttgaactttgcaacttccgtaattaggaacctgtttcttacagcttttctatgctaaactttgttctgttcagttctagagtgtatacagaacgaattgatgtgtaactgtatgcagactggttgtagtggaacaaatctgataactatgcaggtttaaattttcttatctgattttggtaagtattccttagataggtttttctttgaaaacctgggattgagaggttgatgaatggaaattctttcacttcattatatgcaagttttcaataattaggtctaagtggagttttaaggttactgatgacttacaaataatgggctctgattgggcaatactcatttgagttccttccatttgacctaatttaactggtgaaatttaaagtgaattcatgggctcatctttaaagcttttactaaaagattttcagctgaatggaactcattagctgtgtgcatataaaaagatcacatcaggtggatggagagacatttgatcccttgtttgcttaataaattataaaatgatggcttggaaaagcaggctagtctaaccatggtgctattattaggcttgcttgttacacacacaggtctaagcctagtatgtcaataaagcaaatacttactgttttgtttctattaatgattcccaaaccttgttgcaagtttttgcattggcatcttttggatttcagtcttggatgtttgttctatcagacttaaccttttatttcctgtccttccttgaaaattgctgatttggttctgctccctctacagataatttatatcaatttccctacagcctttccccctgcccatcccctgaaacttcttttctagcc

SEQ ID NO: 41095 - DNA, 500 bp, Homo Sapiens
tcagcgaggccgacaagaagaaggtgctggacaagtgtcaagaggtcatctcgtggctggacgccaacaccttggccgagaaggacgagtttgagcacaagaggaaggagctggagcaggtgtgtaaccccatcatcagcggactgtaccagggtgccggtggtcccgggcctgggggcttcggggctcagggtcccaagggagggtctgggtcaggccccaccattgaggaggtagattaggggcctttccaagattgctgtttttgttttggagcttcaagactttgcatttcctagtatttctgtttgtcagttctcaatttcctgtgtttgcaatgttgaaattttttggtgaagtactgaacttgctttttttccggtttctacatgcagagatgaatttatactgccatcttacgactatttcttctttttaatacacttaactcaggccattttttaagttggttacttcaaagtaaataaactttaaaattc

SEQ ID NO: 41096 - DNA, 815 bp, Homo Sapiens
  misc_feature (394)..(394): n is a, c, g, or t
  misc_feature (732)..(732): n is a, c, g, or t
  misc_feature (746)..(746): n is a, c, g, or t
tttttatttgtaaattaaatcaagatgttacccactccttggtgtggtggtcttgctggttcgtgttgggaagtagtatggcagcaatgcacaaattcagaatagccaagaaatccctccttttcaacgctctgtgcctgggaaccattagaggagttttaaaaaccatccctcatagcccacaattttgggtcaactctcaaaattgggaataagaaaactggcactgttgggagaaaaatcgttcttactgaaacatgaactggctcaggcaagcaaatagcgggagtcggcacaggaaggagtgtgtgctgcggggatgcgtggtggcgtcaccttcaaaactaaagtggtgccaggcggacagatgagtccttgatcttgtttcctgatnctgtttccatttgactgaattctgaaacctcattgtcttcacagtcttgccacttgcctagtgaggctttttcgaacctggaaggagacgtctagaaatccccactttgctgggtaaggaccattagctgcaagtcagtggaagtccaatagaaagcagggggggatttccaaaggggccctggacttcttaccaagggatttgggaaaaaactctaaaacttccgaactttaaagcttttaaaagcagtggtaacctggcctggaaaatttttaaacacttttccaaaactttctttttaaaaaggaaaaacaaaaaccgaaccctgcgacacagcncgcgacacaacaangaaaacaagggacgaagagcaagacaaccacccgacgcacaccagctgacaccaaaaccacaccccatg

SEQ ID NO: 41097 - DNA, 990 bp, Homo Sapiens
atggtggagcacacgcccgacgaggagagcatcgactggaccaagatcgagcccagcgtcaacttcctcaagtcgcccaaagacaacgtggacgaccccacggggaacttccgcagcgggcccctgacggggtggcgggtgttcctgctgctgctgtgcgctctcctgggcatcgttgtctgcgccgtggtgggggccgtggtgttccagaagcggcaggagcggaacaagcgcttctactgagtggcgcctccggcggggcctgtccctgggcccaggagccaatgtgaacttttttttttaccgggattataaaagaacaacaagatgaccttatttcttaactgtttcaaataaatgattaaagtattttcatacatttggcttcttgcccagcagggacaggtggcagagccgaggcttagggtctggcaccccccacagctggagacggaggctctcctggggctggtgtctcaggagcaggggtctgtgtctacagatgggctgtggcccctgcaggcagctgttgaacactggagggtcccccggaccacactggggtgggctcctgaggacgtggggaagtgattggtcggtggtgtgtggcacgtgtggcgacggataaggcctgaactgggaaacccaggccttcctgttcaccctgagctgcttcctgagacagatgctcaagtgaggctgcaggcgcgggttggtggggccgattgtgaccgtttgctaacttaagtgaagataacccaaagcttcaaaaaaaaagcagacgaagaaaaagaaacgaaaaaacaaagatgcacaaaaaaaaaaaatatgggggagataaattaagggggggggggaaacaaagagatgtaataaaaggagaagggagataaaaggttagtggtgaacacatttttgttaaagaggagagataaagcggggaccccataaggggcgggtatatatgtagagggtgtagtaagaaatagt

SEQ ID NO: 41098 - DNA, 618 bp, Homo Sapiens
acggagctggctgcccagcccaaaggcccatgaggggatgcagttatgggctctgtcgccgtggattgttattttgtgtcagtaagtaatccataaagtgccaacatgggaaagaaacggacaaagggaaaaactgttccaatcgatgattcctctgaaactttagaacctgtgtgcagacacattagaaaaggattggaacaaggtaatttgaaaaaggctttagtgaatgtggaatggaatatctgccaagactgtaagactgacaataaagtgaaagataaagctgaagaagaaacagaagaaaagccttcagtttggctgtgtcttaaatgtggccatcagggctgtggcagaaattctcaggagcagcatgccttgaagcactatctgacgccaagatctgaacctcactgtctggttcttagtttggacaactggagtgtatggtgttacgtatgtgataatgaggtccagtattgtagttcaaaccagttgggtcaagtggttgattatgtcagaaaacaagccagcattacaactccaaagccagcagagaaagataatggaaatattgaacttgaaaataaaaaattagaaaaagagagtaagaatgaa

SEQ ID NO: 41099 - DNA, 582 bp, Homo Sapiens
  misc_feature (480)..(480): n is a, c, g, or t
tagtgaaccgtcctcaaatgaaacccagtggaaagagcttactcagtattttggagtcaatgatagatttgacccgcctgttaaaaggaaaaaagttgagaagtcaggccttgaaaagaggatagaccaggctgtggaggagtggaatattgagaaggctgaggaactcagcaaccagctagctactcgagagcttggtgtaaaaattgccaaagcagttgcctgccacaactttgtaaaagccaaaaaggaggttgaaaattcacaggctgcccgaaaaaagaagaaacttgcatgggggtttgaagcaaagaagagatgggaaaccaaaagcaacatgggatacatgtaacttgccagagtgcttcaagacatttgtagactcaaatgctcaatttactgagaatgttttcctgcctatgttaatatgtcagaaaattgatagcactaaaacaaaaataagcataaaatttgggattntgattatcagctcttttcagtctttctttaaagactttgtcctattgaagtgaataaaatgaagcattctgttatttgtataagaaatggtagaaaaaaaat

SEQ ID NO: 41100 - DNA, 708 bp, Homo Sapiens
  misc_feature (588)..(588): n is a, c, g, or t
  misc_feature (625)..(625): n is a, c, g, or t
  misc_feature (670)..(683): n is a, c, g, or t
  misc_feature (685)..(686): n is a, c, g, or t
  misc_feature (688)..(688): n is a, c, g, or t
  misc_feature (690)..(690): n is a, c, g, or t
ggggatcgaaaacatttcaaattgctctatctgggctgatagacatttcgtcatttaagtaagggatcgaagacatttcaaattgctatctccatctgggctgatccaaaattctgagattgttggctacctatattttgttgcagcttttaaatgtactctgaacttccaaaccacattcattccagcctggtagaacaaatattcttggatctttgatcaaagcctggaatgatagctttaataaaagaaggaaaaaaaaaaagcaccctctcttgatctcaactgtaacaaggctgtaattccatcaagcgattctactgacatctagtacagtgttgaagcccaagtggttggctggttccagtattagaactcaagttgaaattatatgattaactgaaatttggggcatgcattatttattatacatggcctacaacggttctgtctgcgctgttacgtattacctacacttctgggtttttttgttcttgttctcagcctctctttaagagttcttgggccttccttttccctctttctattttaacagttttaattttagaaccatttacattccagtangtaattcactatgcgctttatatgccttagggcatcncaataaaaaaacatagggtaaacatccccaaaacccacctttaannnnnnnnnnnnnnannananaaaaaacatgtcgggccg

SEQ ID NO: 41101 - DNA, 729 bp, Homo Sapiens
acggtctaggtacgagcctgggtggcgaattctccacgagggccggcgcccccgcgcccaaggcctacgtgctgggcagcccagccctggccgcggagctggaggccgtgggcgtcgccagcgtgggcgtggggcccgagccactgcagggcgagggtcccggcgactggctgcacgcgccgctggagcccgacgtgcgcgcggtggtggtgggctttgacccgcacttcagctacatgaagctcaccaaggccctgcgctacctgcagcagcccggctgcctgctcgtgggcaccaacatggacaaccggcttccgcttgagaacggccgcttcatcgcgggtaccgggtgtctggtccgagccgtggagatggccgcccagcgccaggccgacatcatcgggaagcccagccgcttcattttcgactgcgtgtcccaggaatacggcatcaaccccgagcgcaccgtcatggtgggagaccgcctggacacagacatcctcctaggcgccacctgtggcctgaagaccatcctgaccctcaccggagtctccactctaggggatgtgaagaataatcaggaaagtgactgcgtgtctaagaagaaaatggtccctgacttctatgttgacagcatagccgaccttttgcctgcccttcaggttaaagattgagtgtctttaatctgcagaataaaaaaaaaagaaattgaaaaaaaaaaaaaaaaaa

SEQ ID NO: 41102 - DNA, 759 bp, Homo Sapiens
aagatgtgctataacagtttcggtccggattccgggatgaacataaaggagaatggtaccgatgcaggaggaagcaagcgtgtcttcccctgcagcacacagcgacttgcgttgacaaaggaggaggaaacgattactctgtaaacaaagttatccttacttgggagattgccacagcctgctgctgagttgagttaccagacatcctccatgtgagaagcagcgaacattgaatctcagggatggcccacaactgggtccacatgtaatgagccctgtttaataacgaaggggtgggggagagcagtccgtctacaacctggaatcagatttgcaaaatttcctgcactgctgtctgacactgtcctgttgatgccctttctgactgtgttctctgttttctctgtctgctgtctaaccctgtgccttgcctgggataaggacaatgatgaggttactggtttggattgtaagtagaggacttttattaattggtttagaggttcactgctgctttgtcactttctcaatcaaattggccacttaagaaataaagagctggtagaattgcatcctcagatgattattgactgtgtgtgtgtgtgaaaacagacattccagtgccacccaaatatatatctgtaacgtgcccaagaaatcctagctgcgctcttgagagtgcatgccatggagactggtttagacaccgcgtggagcctagttgcctgttgtcacggcatcttgcactttaggagacta

SEQ ID NO: 41103 - DNA, 663 bp, Homo Sapiens
actacatttatgaggcaacttgattattctctttaacttacagaatgttagtttaaaataataaattcatcctttttttggagatgattaaatggatgattgtaaacacaacttatgaaatctgcctttaacaagtaacttttttaaattataaaattttattggcattgctccattttctgtatataaatatatctttaatgtggtattttcaattgcgtgatagtttgtagtttcaaccactcttggtgactgtcatcctgtttcttccatattctctgatttcatgaattgaaaagaaacaaatgtattgaagaagtgagctacagttttccttccttaaccatgggtgctagtaactttttaaaactcaagacaagattagttttttatgtgtgaagtcattaaattattacacgaccagaactaaaatgcaatatacagttaagtccacggatactcccattaatgagaaataacactaggaagccactattacaggaagaaaagatttggttttcatggcagtctgtttttttaaaaaaaaatttttgagccactatctattgttgaatattttaagatgggatgagggaggaactaataagggcttacacaataaaaaataactatatcataactcattaaaaaaaaaaaaaaaaa

SEQ ID NO: 41104 - DNA, 581 bp, Homo Sapiens
  misc_feature (564)..(564): n is a, c, g, or t
atcagagagctggagcgagcaaatgacgacctggaaagagccaagcgcgccacgatcatgtctctcgaagactttgagcagcgcttgaatcaggccatcgaaagaaatgccttcctggaaagtgaacttgatgaaaaagagaatctcctggaatctgttcagagactgaaggatgaagccagagatttgcggcaggaactggccgtgcagcagaagcaggagaaacccaggacccccatgcccagctcagtggaagctgagaggacagacacagctgtgcaggccacgggctccgtgccgtccacgcccattgctcaccgaggacccagctcaagtttaaacacacctgggagcttcagacgtggcctggacgactccaccggggggacccccctcacacctgcggcccggatatcagccctcaacattgtgggagacctactgcggaaagtcggggcactggagtccaaactcgcttcctgccggaacctcgtgtacgatcagtccccaaaccgaacaggtggcccagcctctgggcggagcagcaagaacagagatggcggngagagacggccaagcag

SEQ ID NO: 41105 - DNA, 581 bp, Homo Sapiens
gggtatggtacggccaaatcaagatggcactctgatagccagctgttccaatgaccagactgtgcgtgtatgggtcgtagcaacaaaggaatgcaaggctgagctccgagagcatgagcatgtggtagaatgcatttcctgggctccagaaagctcatattcctccatctctgaagcaacaggatctgagactaaaaaaagtggtaaacctgggccattcttgctgtctggatccagagacaagactattaagatgtgggatgtcagtactggcatgtgccttatgaccctcgtgggtcatgataactgggtacgtggagttctgttccattctggggggaagtttattttgagttgtgctgatgacaagaccctacgcgtatgggattacaagaacaagcgatgcatgaagaccctcaatgcgcatgaacactttgttacctccttggatttccacaagacggcaccctatgtcgtcactggcagcgtagatcaaacagtaaaagtgtgggagtgccgttgattgtgtctccttcggcccctcctccctcttttcctctggatgcactctgatgatacca

SEQ ID NO: 41106 - DNA, 999 bp, Homo Sapiens
cctcccaataaaagcagtatgaggatagtagtggactcagaatcaaggaaaagaaccattggttctggagagcctggagttcctacaaagaagacttggtttgataaaccaaattttaatagaacaaacagcccaggctttcagaagaaggttcaatttggaaatgaaaataccaagcttgaacttagaaaagttcctccagaattaaataatatcagcaaacttaatgaacattttagtcgatttggaaccttggttaacttacaggttgcttataatggtgatcctgaaggtgccctaatccaatttgcaacatacgaagaagcaaagaaagcaatatcaagtacggaagcagtattaaacaatcgctttattaaggtttattggcacagagaaggaagcacccaacagttacaaactacttctccaaaggtaatgcagcctttagtccagcagcccattttgcctgttgtgaagcagtcagtcaaagagcggctgggtccagtaccttcaagtactattgaacctgcagaagcccagagtgcctcttcagaccttcctcaggtgttgtctacatctactggcctaacaaaaacagtgtataatccagctgctttgaaggctgcacagaaaaccttacttgtttccacctctgcagttgataataatgaagcacagaaaaaaaaacaggaggcattgaaacttcagcaggatgtaagggaaaggaaaacagaaattttagaaaagcacattgaaacacagaagatggtaatttcaaaactggagaaaaacaaaacaatgaagtctgaagataaagcagaaataatgaaaaacttttaaaggtttttgacaaaaaatattaccaagttgaaaagattgaggtcaaaagctggcttctccctggacgcctggtcttccaaaaaagttataaaaacccaagactccgaatggcagaaggggaattaactttgaccccgaaaaccggaattttattataag

SEQ ID NO: 41107 - DNA, 662 bp, Homo Sapiens
  misc_feature (638)..(638): n is a, c, g, or t
cgtatgtcaactggggtaaagccttccagagctctctaaatacctgaaagacttaagcctttttttaagtaattaatacttaaaaaaaaaaagatcctggcatctatttatgcaactaaatacttttcagaaatggtatataaaaggctacagtttaatatctgtatttttataaaagtatgatgaagggtttggggtgtttttatttgtagcagaggtaagaatatgtattcatataatctgcctacttttgagttctcatattaacatttagataacatatgaagtatggcccccttggatccttgtttttaagttactttcgatgtgtatacgaacaaagaccagggagaaacagaacttttaaaactataggctgctgtgttggggccagaaataaggtgacaagtaaagacttttataatacctaccttcaaaattagaatcagcagcactgtacaaataaagtgcctgtgcttcacctcacaccaagaatcttgcctaaccctgtcagagtgcctaatatcctgtggtgattatgtataatgaaacagtcttattttgtgctctttggtttcttaaaaggaaagcttgttttctttcctttatcattacagaggtatgtctttggttcttanactatctgtctaaaataaagctgt

SEQ ID NO: 41108 - DNA, 897 bp, Homo Sapiens
  misc_feature (19)..(19): n is a, c, g, or t
  misc_feature (756)..(756): n is a, c, g, or t
  misc_feature (873)..(873): n is a, c, g, or t
ggaccggtccggaattccncgggatgaaatccaccgaagaggagcacaaagaaggttggtggtcatcaatgtggttcttttttaggtgctgcttatgtccttggaaagacggcagttggttttaaaattgacacagctttatgtgattttaaaaatttatattcttcattatgatgaatcagtaataaagtttttttatttgtaatggacagaggattaaaggccctgcccgatgatctgaagaggctattttatatattttctttttgtagtatttcgggctgctgtggatctggaaatatcatctgcttctagaacttgcactttcttgccaccttttcctgcacatctgccgaccagtcctgatactaacaaggctgagtcttcagggaaatggaatggtctacatactcctgtcagtgtgcagtcgagacttaacctgagtatagaggtcccgtcaccttcccagctggatcagtctgttttagaagcacttccacctgatctccgggaacaagtagagcaagtctgtgctgtccagcaagcagagtcacatggcgacaaaaagaaagaaccagtaaatggctgtaatacaggaattttgccacaaccagttgggacagtcttgttgcaaataccagaacctcaagaatcgaacagtgacgcaggaataaatttaatagcccttccagcattttcacaggtggaccctgaggtatttgctgcccttcctgctgaacttcagagggagctganagcagcgtatgatcaaagaacaaggcagggcgaagacagcactcaccagcagtcagccagcgcatctgtgccaaagaatccttttacttcatctaaaaggcagcagtggaaaggaanagaaaagaaaacgaggaggaaaac

SEQ ID NO: 41109 - DNA, 706 bp, Homo Sapiens
attctcatgtaagagaataatagaaatatctcattgagatcaatgcacattgctacataagaatattacagcaggaagaattaagtttagtttgcttcaccatgttaatacatgatcacaaaatgtgcatgagtgttattgacttatcttgtacagtactaggattcctgtaaccactcttttttttcttcgctgtattgaaactggttcagtgttaaccaggcaagcatagttattcacaggttatttactttatgtttactaattctgcttagttattgttgaatatgttctgttccagattatttttattgttttgatgtttaaaacattttgcatactgtttatcataaaacttcatgaagtaaataattttgcatataattgcaataagcactgacttttgaactgaaaagaaggaaagtgtttttttgtgcagtgcttctgaggttcatataatagtcttgtactataatgtgctttactacacgataaatgacaaaaacaagccctgtttcatgtttcatttagtgcaaaaagtcagatttccccagtgtttgttgtctgttgtacctgctgaaactacagtagttgaatattgcggtagcatttcagttctctttttttattaaagtgctccaaaaatggttttttaaatgtttccaaaaacaattaaaaaccattttcattttcacaacaacaccaa

SEQ ID NO: 41110 - DNA, 581 bp, Homo Sapiens
gttaaattaggatgcaaaacagatctgccattcctttttcccttatatcttccttttggtcttcatggacgagatgaatgaggattctgctgccctgagggagttcattggaaacctgcgttctcctacctcttccaaccctccattagctcaattttgagataatggaaaattgactggaaattcaaaactcaaactactatctttagatataaacactagtaattaaaatgtgccttttgaagatgttttctaagagaaaggaaatacgttgcagtgatgtgggtactgctttcataaaacagttttttcagtattttgagaattgccatattaatttttataatggaaaacttaataaattgctactgttttatatcataaaattaaaataccatggtaatatttgcaaaaggtctggccataccagaaaagtacagttgagatagttaagatataaccacaagtcagagtacattggttgtattttgtaaactttcatgaactgaattcttatttaaatagtatgggttttttttcaataagtatatttatagtgacaaatgtggtagactaaaggt

SEQ ID NO: 41111 - DNA, 525 bp, Homo Sapiens
ataatgtgtataagaatgtaggccttaactatttcacatgagtcaaaacaaagcagctttaaaaaaataattggaagcacaagtgcatggcactgactgaatgctgttaatatttctaaaagtttctacattcagattatatgcctgattcatagtaaaatacctctaataaacactgttttatagaaaacctgacttcagtgaatatttttgtattttacatgggccagtttatatactgctatttacactattatttcctatagctacatgttctttgtaccttttgtagttttatttgtattactagattcataccttgatggtaacgctctatctggttttgggtgtttttcatgttttagcatttgtataaagaaactggtccatgtaaatactttccatgttttttcttcaaatgtttaaaccactagttgatgtatggtatctttagatatttgcctgtctgtttgctcaaaattgcttctaaaacaataaagattcttttatttcttaaggcaaaaa

SEQ ID NO: 41112 - DNA, 780 bp, Homo Sapiens
tttatatgtgtgactaataaggcttgtcatgattaacataatccaggtatgtcatttctgaagagaatagtcatcaaatttatatctcgaagattttaattaaggaattgcttattgttgagcttagcaaattaataacactatttctgtcactaattattttgaggccttttagtactaaaattttaacctgtgttctaagtagaaactgatttaacccaagtaatgcagctttgattgatttcagcattcgttgctttgctatttttacaaaacagcattgattgaagcaagtcttggttttactaaggtagggtagcatttgctattggtaaagagaataaatacacttaatttcacaatacattgttatatgtaccccagttgttgttagtggggactatgatactgtaataatatttttaaaaatttacatcaagagaggcagtcattcacgatggttttgtgccagctctttttagggtttggatcacattagagatatttagaacatattaccctgtgacttacgtaggaaacctaatatgctgagtatctggcacttgaattcctgcttttattgctggaggtccacatctgtggttgacctctgttattgtttaaacaaaaataaataaaattaaaaaatctgtgcaataattttaaaatgtgctcccaggaatagacacaaatgttttgagtatcttttaagctgcattttcctttagtgatgcattttgtcaattgcctgaatttaaatctgaaagtcagaggtgatat

SEQ ID NO: 41113 - DNA, 878 bp, Homo Sapiens
tcttgtagtacagatatgtgcattcatgtctgtaaattaggacaagacagacctattaaaacattccaaggacatacgaatgaagtaaatgctatcaaatgggacccaactggcaatctcttggcctcctgttctgacgacatgactttaaagatatggagtatgaaacaagacaattgtgtccatgatttgcaagcacataataaagaaatttatactatcaaatggagtccaacaggaccaggactaataatccaaatgccaaccttatgttagcaagtgcatcctttgattctactgttaggttatgggatgtagaccgagggatatgcatccataccttgacaaaacaccaagagcctgtgtacagtgtagctttcagtcctgatggcaggtatctggcaagtggttcttttgacaaatgtgtacacatctggaacacgcagacaggtgctctagttcacagctataggggaacaggtggaatatttgaagtttgctggaatgcagcaggagacaaagttggagccagtgcatcagatggttcagtatgtgtattagaccttcggaaatagcgctactagttggaagccatggaccgactatgaatgtgtacatagccaaaatgacctgtccctgaccatgttctgctatagtcccacttgaaccatggccagtccacttacagccaaaatcttacaaaggaaatatatacctaccagggtattattacaccgaacattggcacccctggaagattcacggagttctgtcacagcttggtgaattctggttcacaagtgccggaaatctaatcctggtgttgcccttaaatgcctttgaagtctcggatcttgcaacacgcagaacagaaactt

SEQ ID NO: 41114 - DNA, 852 bp, Homo Sapiens
gggatggggaaacattttccgttaaggaaggttgttgccagtggatttgactccaagggactagagtgtcgtggtgggggtggggaggggctgcagggtgatcattggctactgagcctccacaaagagcatgtggtgccctgcctttgggagggtattttgctctcgttagttttgtgggcagcctcagattccctgttgagttgctgttaagaaatggagatttctggctctcattgggtaaggttttctgagttttatatcttattagatcacatccctttacccagaacaaatgcttcactgtcttctgattggcagtactcctgtggctttgtgccttgactcattttgttgtcttcagccttgaaggccccttcccacatggactgacatccactcatgtgcctgatccctgaagcctcccagcacccattcagttgcatccccagggcacaggactttgatctcttctgttgccctcgctaggttctccctggtgggttagtgctttgtatctgtctctctgcccctcactaattctacacccatgagaattagacattattctccttaaatatataaggaccatataatctgtatctttttggtgtgtgtatatggtatctggcacatggatctctgattaccagcctgacatcaacaaatcccctcagttacaacgtataggttaaacaaagcttttaaaagctcatgtggtatgacctcaaggttgctaacctggtcactcatggtaattagaaactctgattggcagctttgtatttcttgactaaaaacctaaataaactgattaggttttaggcgttctttcaaagaggttcttgagaa

SEQ ID NO: 41115 - DNA, 762 bp, Homo Sapiens
  misc_feature (748)..(748): n is a, c, g, or t
ataggacatgacagtttcggtccggattcccgggacgacctaaacatggagacagcgggcgctgcaactgggcagccggcctctgggctggaggctccggggtccacgaatgaccggcttttcctggttaaaggtggaattttccttggtaccgttgctgcagcgggaatgctagctggatttattacaacattatcattggctaaaaagaaaagccctgaatggttcaataagggaagtatggccacggctgcattaccggaaagcgggtcttcccttgccttgcgagctctgggctggggctccctgtatgcatggtgtggggttggtgtgattagcttcgcagtctggaaagctttaggagttcacagtatgaacgactttcgaagtaaaatgcaatcaatatttccaacaattcccaagaactccgaatcggctgttgagtgggaggaaacattgaaatccaaatgagatgagcatggatgaatttcaaaatgcttgttacagaaaggggtggctctggagacaccatgacagcaaaaggactgggactgatttctcccaggaacatgggcagattgctgactgaaccagtgcactggatagcattcagcctcatcacaggagagtatgtgtgtgcgtgctgggggagggtaaagttttcccacagttaagaagactatttaaaaatagtaattacaggaataacttccttatgtggaggggaccccataggaaatgattctgnttgtaacagttgaa

SEQ ID NO: 41116 - DNA, 884 bp, Homo Sapiens
agtaacaaaaaatagtaacaataccttgcagaggaaaggtgggagagaggaaaaaaggaaattctatagaaatctatatattgggttgttttttttttgttttttgtttttttttttgggtttttttttttactatatatcttttttttgttgtctctagcctgatcagataggagcacaagcaggggacggaaagagagagacactcaggcggcagcattccctcccagccactgagctgtcgtgccagcaccattcctggtcacgcaaaacagaacccagttagcagcagggagacgagaacaccacacaagacatttttctacagtatttcaggtgcctaccacacaggaaaccttgaagaaaatcagtttctagaagccgctgttacctcttgtttacagtttatatatatatgatagatatgagatatatatataaaaggtactgttaactactgtacaacccgacttcataatggtgctttcaaacagcgagatgagtaaaaacatcagcttccacgttgccttctgcgcaaagggtttcaccaaggatggagaaagggagacagcttgcagatggcgcgttctcacggtgggctcttccccttggtttgtaacgaagtgaaggaggagaacttgggagccaggttctccctgccaaaaagggggctagatgaggtggtcgggcccgtggacagctgagagtgggattcatccagactcatgcaataaccctttgattgttttcttaaaggagactccctcggcaagatggcaaagggtacggagtcttcaggcccagtttctcactttagccaattcgagggctcccttgtggtgggatcagaactaatcccagagtgtggggaagtggacagtcca

SEQ ID NO: 41117 - DNA, 631 bp, Homo Sapiens
  misc_feature (614)..(614): n is a, c, g, or t
atgccaaggacccaaacaacctcttcatggtgcgcttggcacagggcctgacacatttagggaagggcacccttaccctctgcccctaccacagcgaccggcagcttatgagccaggtggccgtggctggactgctcactgtgcttgtctctttcctggatgttcgaaacattattctaggcaaatcacactatgtattgtatgggctggtggctgccatgcagccccgaatgctggttacgtttgatgaggagctgcggccattgccagtgtctgtccgtgtgggccaggcagtggatgtggtgggccaggctggcaagccgaagactatcacagggttccagacgcatacaaccccagtgttgttggcccacggggaacgggcagaattggccactgaggagtttcttcctgttacccccattctggaaggttttgttatccttcggaagaaccccaattatgatctctaagtgaccaccaggggctctgaactgtagctgatgttatcagcaggccatgcatcctgctgccaagggtggacacggctgcagacttctgggggaattgtcgcctcctgctcttttgttactgagtgagataaggttgttcantaaagacttttatcccc

SEQ ID NO: 41118 - DNA, 616 bp, Homo Sapiens
ttctctccactgactgcctgtcagctagtctctccaccttggccatttccagccagctcccacccatcttttcttgaatctcttcctgtttcccttaggacgactgaggtgtgggctgacggaatgccctagttgaggtagtataggtgctcaggcccctaatccagacctctacctgttgctaccccccttcccctccctccaggactaagaagcaagatttcccaggtgctctgaaagctaattacttactcatcgaaggatctcaaatcaaagctgacccagtcttcatatccttcaagttcctttccattcctcaaggctttgttttgtgtctatattgatcccacagccactgcacttgcccttgccacacttgatctcaagggcatcttggaagtatttgaccatttcttgagatatggggggaaaaagtctttgtattggcatcttggttccagactcccctttccaaacctagaaaaatacagtgacctttgagcatacccaagatccctttctcactggtgcctgtcccctaactcacctccccacagcccctatcctttccccctcaacaaaacaaaatctaccttacttgaggaataggtaggta

SEQ ID NO: 41119 - DNA, 837 bp, Homo Sapiens
  misc_feature (778)..(778): n is a, c, g, or t
actgcttctcttttgaaagtagagctagctgccactttcacgtggcctccgcagtgtctccacctacacccctgtgctcccctgccacactgatggctcaagacaaggctggcaaaccctcccagaaacatctctggcccagaaagcctctctctccctccctctctcatgaggcacagccaagccaagcgctcatgttgagccagtgggccagccacagagcaaaagagggtttattttcagtcccctctctctgggtcagaaccagagggcatgctgaatgccccctgcttacttggtgagggtgccccgcctgagtcagtgctctcagctggcagtgcaatgcttgtagaagtaggaggaaacagttctcactgggaagaagcaagggcaagaacccaagtgcctcacctcgaaaggaggccctgttccctggagtcagggtgaactgcaaagctttggctgagacctgggatttgagataccacaaaccctgctgaacacagtgtctgttcagcaaactaaccagcattccctacagcctagggcagacaatagtatagaagtctggaaaaaacaaaaacagaatttgagaaccttggaccactcctgtccctgtagctcagtctcaaagcagaatctggctttgctctattaaatggaatgtacactacaacactcgtccctgtgagcccagtgctggaggagaggctttctctggttatgctaagctacaggtagctgacaaagatcttgcttgacttcctcataaaagtcnagagatccgatatcgtgacggcaccctgagcgcgatcatcagctcagcctgaataataa

SEQ ID NO: 41120 - DNA, 590 bp, Homo Sapiens
gaaaggttaaaaaagcgaggtggccatgttatgctggtggttaaggccagggcctctccaaccactgtgccactgacttgctgtgtgaccctgggcaagtcacttaactataaggtgcctcagttttccttctgttaaaatggggataataatactgacctacctcaaagggcagttttgaggcatgactaatgctttttagaaagcattttgggatccttcagcacaggaattctcaagacctgagtattttttataataggaatgtccaccatgaacttgatacgtccgtgtgtcccagatgctgtcattagtctatatggttctccaagaaactgaatgaatccattggagaagcggtggataactagccagacaaaatttgagaatacataaacaacgcattgccacggaaacatacagaggatgccttttctgtgattgggtgggattttttccctttttatgtgggatatagtagttacttgtgacaagaataattttggaataatttctattaatatcaactctgaagctaattgtactaatctgagattgtgtttgttcataataaaagtgaagtgaatctg

SEQ ID NO: 41121 - DNA, 476 bp, Homo Sapiens
ggctttacgtggatcagacactgcgagagcgggaggctggcaccgccatgcaccgggccttccagacagacctatacctgctgcgcctacgtgctgcccgcgcctacctgcaggccctcgagtccagcctgagccccctgtccacgacagcccgagagccactcaagctgcacgccgtggttcagggccttggccccacctttaagctcacacttcacctgcagaacacctcaacaacccgtcctgtcctggggctgctggtctgcttcctgtacaacgaggcgctctattccctgccccgggccttcttcaaggtacccttgctggtgccagggctcaactaccccctggagacctttgtggagagtctcagtaacaagggcatctcagacatcatcaaggtgctggtgcttcgagaaggccaaagtgcacccctgctgagtgcccacgtcaacatgcctgggagcgaggggctg

SEQ ID NO: 41122 - DNA, 849 bp, Homo Sapiens
  misc_feature (692)..(692): n is a, c, g, or t
  misc_feature (704)..(704): n is a, c, g, or t
  misc_feature (828)..(828): n is a, c, g, or t
agacgatggctatgtgagtgacaccgagacctcagtcgtatggaacaatgagcacgtcaagaccgactgggaccgcgccaagtcccagaagatgcgggagcagcaggcactgagccgtgaggccaagaactcggacgtgctccagtccccactggacagtgctgcccgggatgaactctgaggggtagcagccagaaagccaaagcagccatcggtggcccaggctccacgtgcttactgaggacatcagggccacctctggaccccttggcaggccacagagggctctcgtgtggggtggtgtccagccagctcttgctaagcaatcacgtgcacacaggcagcattaatggagtgcctactgcatgccagcaacagggcttggccctggggaattgggaggaaccaagccctcttcatctgttcatgtgcccagcatttattaagcacctgctgtatgcaaggttcccatgttacggcagtgaatgaggcataattgttccctccatcagcgattgattcagtcatcaagcagttactgatcagattaagaatcaggcactagtgatacacattcatttttaaaattcattcaaggatttattgagtgcctactgtgtgttgggtgccattccaggctctgggattttttttttttttttttaagagtagagtctgtctctgtcacccangctggagtgcantggtgtgacggctcactgcagcctgcgcctcccagcgtccagcaattcttgtttctcgggctcccaagtagctgggactataggtgcgtgccatcacatctggctaggtttttggatttttagnagagacggggggttccccatg

SEQ ID NO: 41123 - DNA, 1054 bp, Homo Sapiens
cccatctccctgctttggtcttgccccatcactgcgccactgctccgtggaggaggttgggagggggttggggtggttgaggctaagttgggatctaggagaggagaaccagattctatcctcatctttttttggttctttggtccaaacccaaaagaaactgacatgccctcccttctccctggatctacctggagggaagagtggaggtggattccgagtggtgacaggacgctgaccgtggagcttaagccactgcctctccctctggtcccacaaatgggcgcccccccctccccatgcaggtggtgtcgggcccttcttgctgccctgccccaagttgggggtcagtgctgcctgtccccatgcttaacatacccgcctagctgctgtcacatttttcttgttttgtccttttatttttttctaataacctaaaaactggcaaaatagttctgcaggttgaagccatgtctacatgaaagtcctcagtaagtgttagagggaacagggcggagatatccttatgccacccccgctggaggatgtgggcagcttagggccctggaggcggtgcggcagggaagaggggtgcagaggctgtggctggtgagccggtcaggcacacaaggggcccttggagcgtggactggttggttttgccattttgttgtgtgtatgctgcttttcttttctaaccaagaggctggttttggcatctctgtcccattccctgggatctggtggtcagccctaggataaaaagccagggctggagaacaagaaagggccaggagatggaattccttcaggccggcacccacaccctaggacatgtaagccctcatgtccaagggagcctcatgcagatagtaggaaatcaggtctggaaatttaaaaatwaaaggcatgagactaaggctatctgcttcccttatgccctgactggggaggggggggggrgrgsaaggccacagaggcatccagctagscttkggatgstgcrttagrraaatccgggaatgtwtdamaaagatyttattgmctgtwtttt

SEQ ID NO: 41124 - DNA, 649 bp, Homo Sapiens
  misc_feature (618)..(624): n is a, c, g, or t
  misc_feature (626)..(629): n is a, c, g, or t
  misc_feature (631)..(631): n is a, c, g, or t
  misc_feature (642)..(642): n is a, c, g, or t
ggggttcaaaggacgagctggccagcactaagcaaaaactagagaaagctgaaaaccaggttctggccatgcggaagcagtctgagggcctcaccaaggagtacgaccgcttgctggaggagcacgcaaagctgcaggctgcagtagatggtcccatggacaagaaggaagagtaagggcctccttcctcccctgcctgcagctggcttccacctggcacgtgcctgctgcttcctgagagcccggcctctccctccagtacttctgtttgtgcccttctgcttcccccattcccttccacagctcatagctcgtcatctcggcccttgtccacactctccaagcacattacaggggacctgattgctacacgttcagaatgcgtttgctgtcatcctgcttggcctggccaggcctggcacagccttggcttccacgcctgagcgtggagagcacgagttagttgtagtccggcttgcggtggggctgacttcctgttggtttgagcccctttttgttttgccctctgggtgttttctttggtcccgcaggagggtgggtggagcaggtggactggagtttctcttgagggcaataaaagttgtcatggtgtacaannnnnnnannnnanaaaaaaaaaanaccttgt

SEQ ID NO: 41125 - DNA, 700 bp, Homo Sapiens
cgcgtccgaaaatatatgaagtatgctttgttgattatagtgagaacccatgacatagttaaccaaagaatatgtttggttcaaataaaaatagaagcttaatactgggcattcatactttttaaagagaatgaatgaagaaatcggtttcctgctgtagttctctatgggtaagtcttagtaaagacgagaatgctgaagtcggccgtggcgattccctcctaggaactgggaggtgtggcttgcccattacccgcttgaagctcacatctttaccctcctctcccactgtggtttgatcttcacctattcccaggccctcccagcaattggagaggtgtctttttttttggttttggttttttttctccccgtctgcattcttaggcctcttagctattaggaactgtcagatacatactagtagctaattttcctagcctgaaattatatactgcatctgcactatgtacctactagggatctgacctcaagtgttttctgagcccaggcttcctggtgtggtgtcttttaccacataaaattattacaaattgcaaatgttggtattgtgatttgattatctgtacaaagaaagaagctctatgcagtgagtttgtggtttaatggtcacaaaaatgttagcactgctaccactcagcacgtgtaaaattttttaaatttataaatattaaaattt

SEQ ID NO: 41126 - DNA, 970 bp, Homo Sapiens
  misc_feature (960)..(960): n is a, c, g, or t
gacgggggcggcggcggggccccggactccgtcggcgcacatccccgtcccagcgcagagagccaccccaggaaaagcccggctggacgaggtcatggctgccgctgcccttacaagcctgtccaccagccctctccttctgggggccccggttgcagccttcagcccagagcctggcctggagccctggaaggaggccctggtgcggcccccaggcagctacagcagcagcagcaacagtggagactggggatgggacctggccagtgaccagtcctctccgtccaccccgtcacccccactgccccccgaggcagcccactttctgtttggggagcccaccctgagaaaaaggaagagcccggcccaggtcatgttccagtgtctgtggaagagctgcgggaaggtgctgagcacggcgtcggcgatgcagagacacatccgcctggtgcacctggggaggcaggcagagcctgagcagagtgatggtgaggaggacttctactacacagagctggatgttggtgtggacacgctgaccgacgggctgtccagcctgactccagtgtcccccacggcctccatgccgcctgccttcccccgcctggagctgccagagctgctggagcccccagccctgcctaatccccctgcgtgcggcctgccccgaccacctgcccccgaccccctgttcctgaagcaacggttgcttaaccccccaatccctgacacaagtggacccggtggtttacccaaggtttgtcctgaacgccccgcccccgccttgggaaaccgcacaacccaaccggaaggatcttggaaaaccatggcccccaaccccgcacccttggcctcccctccccagggagattccgggaacgaccccacaccactctcacaacaggaaaagacgcccctcgcgccccttgagcgggaacacgtgaacgccgacaaaaaacntaaagcggga

SEQ ID NO: 41127 - DNA, 770 bp, Homo Sapiens
  misc_feature (761)..(765): n is a, c, g, or t
  misc_feature (767)..(769): n is a, c, g, or t
ttttttacacactcacctctgtattcattctgttgtttgggatagaaaaacataaagagccaacccatctcagaacgttgtggattgagagagacactacatgactccaagtatatgagaaaaggacagagctctaattgataactctgtagttcaaaaggaaaagagtatgcccaattctctctacatgacatattgagattttttttaatcaacttttaagatagtgatgttctgttctaaactgttctgttttagtgaaggtagattttttaaaacaagcatggggattcttttctaaggtaatattaatgagaagggaaaaaagtatctttaacagctctttgttgaagcctgtggtagcacattatgtttataattgcacatgtgcacataatctattatgatccaatgcaaatacagctccaaaaatattaaatgtatatatattttaaaatgcctgaggaaatacatttttcttaataaactgaagagtctcagtatggctattaaaataattattagcctcctgttgtgtggctgcaaaacatcacaaagtgaccggtcttgagacctgtgaactgctgccctgtttagtaaataaaattaatgcatttctagagggggaatatctgccatccagtggtggaaatgtggagtaaagaagctggtggtctgcttctgtgctgtatgccagccttttgccttaagttgagaggaggtcaactttagctactgtctttggtttgagagccatggcnnnnnannna

SEQ ID NO: 41128 - DNA, 868 bp, Homo Sapiens
cgtagttctggcacgagccaggcgtactgacaggtggaccagcggactggtggagatggcgacgctctctctgaccgtgaattcaggagaccctccgctaggagctttgctggcagtagaacacgtgaaagacgatgtcagcatttccgttgaagaagggaaagagaatattcttcatgtttctgaaaatgtgatattcacagatgtgaattctatacttcgctacttggctagagttgcaactacagctgggttatatggctctaatctgatggaacatactgagattgatcactggttggagttcagtgctacaaaattatcttcatgtgattcctttacttctacaattaatgaactcaatcattgcctgtctctgagaacatacttagttggaaactccttgagtttagcagatttatgtgtttgggccaccctaaaaggaaatgctgcctggcaagaacagttgaaacagaagaaagctccagttcatgtaaaacgttggtttggctttcttgaagcccagcaggccttccagtcagtaggtaccaagtgggatgtttcaacaaccaaagctcgagtggcacctgagaaaaagcaagatgttgggaaatttgttgagcttccaggtgcggagatgggaaaggttaccgtcagatttcctccagaggccagtggttacttacacattgggcatgcaaaagctgctcttctgaaccagcactaccaggttaactttaaaggggaaactggatcatgaggatttgaatgacacaaaatcctggaaaaagaaaaagggaagatttttgaagaaagggttatccttgggaaagaatggttgccaatgtttggccattatcaaaaccct

SEQ ID NO: 41129 - DNA, 957 bp, Homo Sapiens
  misc_feature (717)..(717): n is a, c, g, or t
  misc_feature (792)..(793): n is a, c, g, or t
  misc_feature (799)..(800): n is a, c, g, or t
  misc_feature (917)..(917): n is a, c, g, or t
  misc_feature (941)..(941): n is a, c, g, or t
gcctcgaaccatgccccagatgccactgccacagcgggcgctcgctcctccctaggctgttttagtatttggatttgcattccatcccttgggagggagtcctcagggccactagtgatgagccaagaggagtgggggttgggggcgctcctttctgtttccgttaggccacagactcttcacctggctctgaagagccactcttacctcggtcccctcccagtggtcccaccttctccaccctgccctgccaagtcccctgcatgcccaccgctctccatcctccctcctctccctcttcctcccgtggagacagtatttctttctgtctgtccctttggcccagacccagcctgaccaacgatgagcatttcttaggctcagctcttgatacggaaacgagtgtcttcactccagccagcatcatggtcttcggtgcttcccgggcccggggtctgtcgggagggaagagaactgggcctgacctacctgaactgactggccctccgaggtgggtctgggacatcctagaggccctacatttgtccttggataggggaccggggggggcttggaatgttgcaaaaaaaaagttacccaagggatgtcagttttttatccctctgcatgggttggattttccaaaatcataatttgcagaaggaaggccagcatttacgatgcaatatgtaattatatatagggtggccacactanggcggggtccttcccccctcacagctttggcccctttcagagattagaaactgggttagaggattgcagaaaacnnaatggnnggagggcagggaagatgcctgtcgggtttttagcacagttcatttcacggggattttgaaggcatttctgtcttgacacaaaagccctgttctagtcctggcgggaacacacctggnggggtggggggcccgggggaaaanaagcccggtaaatgaa

SEQ ID NO: 41130 - DNA, 575 bp, Homo Sapiens
ctttgaaagctgaatataaggatattactggccaggaatataaacctggaaaccctcctgctgaaataggacagaatatttcttctaattcctcagcaagtattctggaaagtaaatctctgtatgatgaagttgctgcacaaggggaggtggttcgtaagctaaaagctgaaaaatcccctaaggctaaaataaatgaagctgtagaatgcttactgtccctgaaggctcagtataaagaaaaaactgggaaggagtacatacctggtcagcccccattatctcaaagttcggattcaagcccaaccagaaattctgaacctgctggtttagaaacaccagaagcgaaagtactttttgacaaagtagcttctcaaggggaagtagttcggaaacttaaaactgaaaaagcccctaaggatcaagtagatatagctgttcaagaactccttcagctaaaggcacagtacaagtctttgataggagtagagtataagcctgtgtcggccactggagctgaggacaaagataagaagaagaaagaaaaagaaaataaatctgaaaagcagaataag

SEQ ID NO: 41131 - DNA, 535 bp, Homo Sapiens
  misc_feature (35)..(35): n is a, c, g, or t
tgctgaaatgaggcagagactaaacttcaagctanttttggaagacatccaggtcacccttttcacaagggcttctgaagaccttaagactcatatggttgtggctaatacaatggaagactttcagaagatactagattctggaaagattgttcagattccattctgtggggaaattgactgtgaggactggatcaaaaagaccactgccagggatcaagatcttgaacctggtgctccatccatgggagctaaaagcctttgcatccccttcaaaccactctgtgaactgcagcctggagccaaatgtgtctgtggcaagaaccctgccaagtactacaccttatttggtcgcagctactgagggatgaacgaaagccccctcttcaactcctctcactttttaaagcattgatattagtatcttctcagatacagaccgttttatgattttttaaaaagtaaaagttctaaaatgaagtcacacaggacaattattcttatgcctaagttaacagtggataaaagacttttc

SEQ ID NO: 41132 - DNA, 809 bp, Homo Sapiens
  misc_feature (663)..(663): n is a, c, g, or t
  misc_feature (703)..(703): n is a, c, g, or t
agaggtaatccattcattaatatgcaacaaatgttgtatttatgttactgaatatttctatggattaaaatagaaaaagtttaattgattttttcttttaaattttaataacaggttcaccagctggtagaaaatagagacacatgatgatttgcattgtaataatttctgtgtgtatgtgtgtgtgttgttttgtttttataaagaaaagtgtgtttgtacccatgagttcagcatttctgccatcttgctattttcattttccctgtggaagatgcatggttgcatccttttccttctgaccaacacttagtctttaactttgtaaggttcggtttaaggtttcagggttagcactatagttttggttcattttctcattaacgataaaatatgctgtaaggcactataagaatataaatgattctattacaattgaaagttacttgacattacatgaattgaactgcctttcattatcttcagacactttgttttagtatttttttttaatttgctaggtttgtatatagaagatcctttcattatcaagaatgagtatggttgcttttgccatggttgcttttactattaataaatgtatctagcctacccaaactctgtagtaacttttgagattctcttaatttcccctcagattanaatagagaaggttgaaggtactttttgatgaatttttttnagtctggtagaaaaaaagtgtgactatcttgtgtacgtactgacctgcttggacgcttcatggagttgttcctcaggatcgaactcgtaccctgcgtttaggtcgg

SEQ ID NO: 41133 - DNA, 856 bp, Homo Sapiens
agcggctttttcacctcgcggccgtaggctaacgtggaagtcggaccagccggccggcggaagaacctagagcgcgctgcctggcgagtcaggcgcgcggggcggcgttggtggtcttcgcggcgcaactcggcctttcctgggagggagtgatggggcgcaccggggccggggagcgggcgccagtgtagcccgcgcggcgcctggccctgagcgcggcggctgcggcggcggcggcggcgggcgctggaggcctgtgagagccgcagcccggagcgcccggcttcccacgccatggcccccatgggcatccgcctttccccactgggggtggcagtgttttgcctgctggggctcggcgtgttctaccacctctactcgggcttcttggccggccgcttcagcctcttcggcctgggcggcgagcctggcggcggcgcggcggggcccgcggccgcggccgatgggggcaccgtggacttgcgcgagatgctggctgtgtcagtgctggccgcagtccgcggcggcgacgaggtgaggcgcgtccgcgagagcaacgtcctccacgagaagtccaaggggaagacgcgcgagggagccgaggacaagatgaccagcgggcgacgtgctgtccaaccgcaagatgttctacctgtctcaagactgccttccccagcgtcagattaatactggaggaacacgtggatgcagctgatccagggaggtaatctagtggggatcactaagaatccctgacggatattcctaaagggaagtaacttactctaaagagggtaccagcgaaaggtgtaccgcctggattgagcccacttgactcgctaccccggactcatcc

SEQ ID NO: 41134 - DNA, 955 bp, Homo Sapiens
  misc_feature (571)..(571): n is a, c, g, or t
  misc_feature (664)..(664): n is a, c, g, or t
  misc_feature (666)..(666): n is a, c, g, or t
  misc_feature (671)..(671): n is a, c, g, or t
  misc_feature (673)..(674): n is a, c, g, or t
  misc_feature (838)..(838): n is a, c, g, or t
  misc_feature (863)..(863): n is a, c, g, or t
ttttttttctttggtcaagtagggattaatgccataggtttagagagaaggattgttttcagtttttaagagaattttttaaaaatacattttatggttctcttaaggaattaatattcacttctgaaggacttacttgtaatatataatttatcattttagccagcagggaaataaatcatttttaatccccagaagaaagtgctggaaatagcttctatatagtcagcagttcacctggagaaagatcttaattccttgttgttttgactaggaatatcaatatttggtataaaataactagaatagtttattaccttttccctcatgaaattttaaatatatgcaaatatatatatcattagattcctgtggtggataataatttcttcagattctaaaacaggtgtctagtgactgcttaattgtttccaagttgcatcaaagatgaattggtaaataatggaaatgagtagtgatatgaaaatggttatgtaactacatattacttgtttctggtaatcaagtcttattttttaaaagcctattgtttttcagaattgagatattntaaacttgttataacttcttcctaaaatagaagagaagaggaggtactgtgtgttacaaaaatttttttacataaagaattcagtgtcactcncnccccncnnccccccccccacccccacccccccaaaaaagggcgggcccctctaaaaatatcccctcaaaggggccccaagctttaccccttaccccacgctttccttgggacacagaggggtccccctaaaagggggaggtccgaaattaataaatctaggggcaccttggncccgtccccttttttaaacaacccnccgtggaacatgggaaaaaaaacctcgccttagctcttgggagaaatccttctttggttgaaaaggagaaacccttttatcctctttcttgc

SEQ ID NO: 41135 - DNA, 725 bp, Homo Sapiens
  misc_feature (685)..(719): n is a, c, g, or t
taaagtgagggatccaacattactttaaaagtcaccccaactgtttatatttggattctatgcactgtgatcctaaggttaacagcatgaattaacatgcgtctttaaaggactgtaatgaaagatcattgcatatttattgaattgtttatatctactgtcaagttgttttgacatggaagattttcaagtaacattggcagagaggtacagtatgttatccctatggtgaaaataaattaatttgttgtatatagttcctcaatctctgaagtaaaggtatgagtaatatagggtatgaatggtttaatcaaggctttattttggaagtaagaaaaatggcagtgatgattaaattgctgcagtccataatttgggcttgttatttgtacattaaagattttttccaagtaagttacactctgttaacttcctgctagccatcagcatgagccctactgcctaaacactatttcatttatttatgtttggaaaccccgtaaacatttttgtttgcaatcttgtttcttttgttataagtcaagtttgaatgttacaatacttttattgaaacttttgttaagttttttcttgtaaattttctttacttgtgagtatcatcttgtcctttaatcctgtaccctaaaataagaaatacatttttgacagaggcttaatgttttannnnnnnnnnnnnnnnnnnnnnnnnnnnnnnnnnnaagggc

SEQ ID NO: 41136 - DNA, 709 bp, Homo Sapiens
caacctaaaatatttaaagggaggtaggtgtgggcaggaggaggaatgataaattgggccagggcaagaaaaatctagcttcatataatttgtctgggactatacaccctatataatgttagttttacagaagtaatatgacttttgattgctacataccacaaagagtttatgaactgagatcataaagggcaactgatgtgtgaagaaagtagtcagtacatcctggctcatgctctgaaagaatatcagagagacagacattaaaaacaaaaatagaagaaaggaaagctttcaccctgcagcttcttagcagggaacaattgtcttgccaaaacttttttcccttttctctcccattttcttttacccaatcccttcttactccttgccagtgtgaccatgctttcttctctgtagatgttaacagttaaggcctattttcctcgggcacttaaccaaccaatcagaacaccacatctgttaggggaggtaacctggccaacagtgtatccatcacgttagccctgctggagggaagggacccacattcacctgccctctgacctgccccttgatcccatatctattaccgtgtccataggaataataggtaagggctctgtctctgtcaagccatgttacaaaggacactgttaaaaaaaaaaaattttgtattgaatgatttttaatgaatgccatattaatc

SEQ ID NO: 41137 - DNA, 757 bp, Homo Sapiens
ggggtgtcctttggagtaccttatcctccatttatgcctcggaggcttacaggacgtagtagataccgatcccagcagccaataccacctcccccttatcatcccagcttactgccatatgtgttatcaatgcttccagtgccacctgcagtgggcccaactttcagctttgaattagatgtagaagatggagaagtagaaaattacgaggccctgttaaacctggcagagcgactgggagaggcaaagcctcgtggactgactaaagcagatattgaacaacttccttcttatcggttcaatcctaacaaccaccagtcagaacagactttgtgtgtagtatgcatgtgtgattttgagtcaaggcagctacttagagtcttaccctgtaaccacgagttccatgccaagtgtgttgacaaatggcttaaggcaaatcgtacttgcccaatttgccgagctgatgcttcagaagtgcatcgggattcagaatgaccaacctaagaagcacaaatttagtttgggtgttcctcatcacatgtatatacggactatccattgaacttaatctgtgtggcttccagccctccctttaccaaaagggtcaatggacctttctttgcactgtgtgacttaatcaactataaaagcttacaattagtcttcacagttatggggattgttatactaaccgtgtgattggaactccaaagactttttctttagcttaatttttgggtgtgcactaacattccct

SEQ ID NO: 41138 - DNA, 500 bp, Homo Sapiens
gccacctgcatagtctgacacatacgtatgtacagttagacttgcaggctgcaggagtgccctgcattgttttcttttaattagaaataaaaagtattagtctaaatgtggttctggtgctggtgccctgtatatatgtaacaatataggacccctccaaataggttttgcttctggtgaatcttggtcattgggttagtatatgactgtctataatattttccatttgtattattatattggggaaaacattttttatcattttctattaagaaaatggaaaacttaaatatggtgttaaaaatggaaatatatgtgatatttgcattattaaacccctttgcagatctaaagtctcagggttccactattagtggttaaagtactgaataatgtctgggtctatttccatctgtaaaataagaatatttgtctcacgtgtctgtcatgaatagcaaatgagaaaatgtatataaaagcactttgtaaattgtaaaagt

SEQ ID NO: 41139 - DNA, 629 bp, Homo Sapiens
  misc_feature (583)..(583): n is a, c, g, or t
ggagctcctcatgtactcccatgacaacatcatctgtggcatcacctctgttgccttctcgcgcagcggacggctgctgctcgctggctacgacgacttcaactgcaacatctgggatgccatgaagggcgaccgtgcaggagtcctcgctggccacgacaaccgcgtgagctgcctcggggtcaccgacgatggcatggctgtggccacgggctcctgggactccttcctcaagatctggaactaatggccccacccccactgggcccaggccaggaggggccctgcccatgcccacactacaggccagggctgcggggctggcgcaatcccagcccccttccccgggccacggggccttgggtccctgccctcccacccaggtttggttcctcccggggcccccactgtggagataagaaggggatggaatgggggaagaggaggagcaggaggccctcatccttctgctgccctggggttggggcctcacccctctggagggccggaggcaggaggtggaaaccccaggggctggcttttttaaaactggttttattttaatttttattatattttcagnttttccataaaggagccaattccaactcaaaaaaaaaaaaaaaaaa

SEQ ID NO: 41140 - DNA, 934 bp, Homo Sapiens
ggggcggaacggattcctcctctcgatccttcagttcccatcgaggaataacccgcagcagtggtggaggaaggtctgtggctgggtcctgagcttggtgttatttattgcatttgggtgcctgtcccctcagggcagcacagattctgaattctgattcacagtccctagccagatgggaactgggaaagagacagaaggcgtctgggtgcttttgaaccctgtctcaaatgtttgggattttctctctcactattctttggttggggatgatgtcctctttagacccccacgtaatggtatgagaaggtggcaggcagtggctcagccagccagggggcaccaagtcatgcagccagcgtgagacctgcagttcacctaagcacagaacgagatctcagtatgcctccatgtaaacagattcacataggcctccaatttcaatgagaccttttgcattttttctcaaagcccttatgttctaacccatgagaaccattttacctgccctctaagggccaccagcttcgacctgcctcaggggacagcagcacagaccagtggctccctgtccaaggccgcagagcagacgccatcccactgtacaatcgaatttgctggacaaacttgataggtttctctgcttagcaacgagcctatagttagttggcacatctgcgttttggcatctgaggctcccatctgagtggaggagaaagtgttgtgtttattagcagggaagtcttgtgaaaacagctcgctgctgtgtatgtttatggatttttctgatataacagcccgccatggttaccgagtggtagagattctccgacattcctcaactctctttttggggaaaagattggggtaaaaataaaatttattaataaagaaaggggaaaaaaggagtacctctacctgaataaagggtact

SEQ ID NO: 41141 - DNA, 651 bp, Homo Sapiens
  misc_feature (623)..(623): n is a, c, g, or t
gaacagttgctgttcttacatctgtaaagaaaaccataatgtctttaaatcactcttctgtaaatagatgacctttttgcagtgtatatccccttgctgtagtatctggtgtacttatgttcaaatcagcgcatcaactttgggggtggtttttaaaaatctttttgtctatctatctttttaaccctagccttctaaacaacctcatacagcccagttacataatgttggctgtcacgggcattgtacttttatctgatattgtttcctctaaattcagctttccagtgatgtttaaaatcttgtgaaaatgtttagatttttaacacagaccctgtcataaaatctgtacattagggtcaaaaggtaaaagtaacaaattctgccatattgtaaatttccagtgcaggctttaatttttttttttcattagtagcacctgaaaaaatattactgcatgggtatgtcctagttcagtttataaagttttaaaggcttatttgaggcatacctcactgttacgcacactggtaatttaaccatgcccctaagtattccttttctcctgcatttgatgcagcccaacaaagcttttgttttgaaatacaatttgactaccctgncaaaaaaataaaaaccaaaaaaaacctg

SEQ ID NO: 41142 - DNA, 667 bp, Homo Sapiens
  misc_feature (637)..(637): n is a, c, g, or t
ggaatacctgcatacacacaataagatatcttggagatgggacccaagtttaaacacaaattcacttgtttcatatataccttatgcacatagcttgaaggtaactttatataacattatttttaataattttgtgcattgagaccaagtttgcataccttgaaccatcagaaagcaaaggtgtcattatctcagccactcatgtgggtaatttgtggttggttgatgtcaccatcattcctgactgaatgtatatgctaccaataagcagttattttcttatacttattcatgcataagtacttaacagtaaaaaatatgacataactcgcacaggaacaaggatggcaaaaaaaaaaatatgacacaccactgatacagtgaaaaaataatgtggtcagggtagctaggcaacagtagcatcaccagaaacctgtatcagctgttaaacggcaacaacaatggcaggctttcagtttcccacttaatgatgctgtattttaaaaggttattgtatactgtaattttatttttgtaggtgaagagaaacagaagcagctgaagggccaggaagtgggtctttctagggatgtggcattctgctggatggctttttaaaatgggttttttcctttanggagaccgaataactgtgttgtgcacctgc

SEQ ID NO: 41143 - DNA, 634 bp, Homo Sapiens
  misc_feature (610)..(610): n is a, c, g, or t
ggatggaccagcatttactctcactttgctcccttgggacaagagtttactgttaaatgttttcatttcacagagtctcaaggtgcaaataatttaaaagactgaattctaaactaattatggtactagagggccagttttatctttcattaagaattgcttgctgaattttaaagtttttttcatacaatttatcatagcatttaagtatctttctataacatagatactaacagttttgggagaatgccactggtaactggaaaggggagaaacagatctctcaggatgataaaaattagcactttacagactttcaagtagacctaaacttttaaacaaaagtactcaaggcttttaaggaagcagctctgtgattagctactgaccaagaccctcctatcactggtgtctaatccctatgttacagatgaagacacaggtttagtactttgcccatatagttaaattagtgacagagataggccataagcccacatttgtcttcagtcaaagctttcactcctgtccctgttccactcctgtatacctgaggtccccaacataaactttagatcaggcttagtggtcagcattcctagtacttggnaaagtggtattttttacacaaata

SEQ ID NO: 41144 - DNA, 436 bp, Homo Sapiens
atatatgtaaacatataaaaatttcaaaatgaatgaaaaacagtgactaaatgttccacttcacagttttctgctgaatttttttttttcaggtactggtaatattttagagtttgttaataatttatattgccaacctaccataaaagagattatgatggtatttttctatgaccctgagggtcttaagctattctgagtcagaatacagttgacccttgaacaacacgggtttgaactgtgtgggtccacttatacatggattttcttccacctctgccacccaagatagcaagaccaaccccttctcatcctcagcctattcaacatgaagatgacaaggatgaagaccttcatgatgatccacttccacttaatgaatagtaaatatattttctcttccttataatcttaacaaacattttctcttctctag

SEQ ID NO: 41145 - DNA, 1057 bp, Homo Sapiens
cataggcagacgccagggtgggcctgggaagacaggccctcttcaacaggctcaactcagtttccttataaccctctgactatgcggatgctcagcagtactccaccaacaccgattgcatgtgctccctctgcggtgaaccaagcagctcctcaccaacagaacaggatctgggagcgagagcctgccccactgctctcagcacagtacgagaccctgtcggatagtgatgactgaactgcacaaagtgaggggaacagggtgcaggagagggatctctagtttttgtggtttaatttttagtagcaggtcaaaaacctgccctcctgtgacttattccctgagacttttcaggagagccagcccacagatgatgaagaaatgatggaagttcatttggagagtcaaatgggaaaaaaacaaacaaaaaactgcctttgatacaggcaattcagtggactataataatagtggagggttgagatgtagagtttttaaaaagtgaacagttgctgttcttacatctgtaaagaaaaccataatgtctttaaatcactcttctgtaaatagatgacctttttgcagtgtatatccccttgctgtagtatctggtgtacttatgttcaaatcagcgcatcaactttgggggtgatttttaaaaatctttttgcctatctatctttttacccctagccttctaacaacctcatacagcccagttacataatgttggctgccacgggcattgaacttttatctggaattgtttcctctaaattcagcctttcagtgaaggttaaaatcttgtgaaaatgttaaaattttaaacccgaaccctgtcataaaatctgtacattaaggggcaaaaggtaaaaggaaaaaatttctgccatattggaaaatttcccagggcaggctttaaaattttttttttcccttaagaagcccttgtaaaaaaattacctgccagggggttaagtttctcaatctccagtttaataaaaggttttaaaaggctcttttttttggggggtttacccccccccgtgtttacacc

SEQ ID NO: 41146 - DNA, 600 bp, Homo Sapiens
tgtgctaaaaataaaatttattaataaagaaggggaaaaaggagtaactctacctgactaaatgttactctaatttatttatttctttactaattaagtaaaaccaggaagtatgattttacatcaaccagagaatttctgaatttatagggaaacactatgtccccataatgatgctataattctaatatatctagtccccataaacagtaagtacaaattatcattcctttaaagcatttttacacttcctggaatgagtatattatcagcaatcttttgtcaaatgccagccgtataaatgttacttctgctctttgtaaacctcaaaactcattattcttgattataagcaactggacagaaccatgccaaagcttccccgtttcccaccaaacccctgccagtgagtgcagagaactcgcaaagccacagcaggcggtctcagccaccgtcccgctcacaggggcccaatgccaggtcacaacactaagaatatctttcaaaaaatgtagcttttttttttttaaagctactgcttgactgttccttagaataaataaaggatattttataaattaaaaaaaaaaaaaaaaaaaa

SEQ ID NO: 41147 - DNA, 724 bp, Homo Sapiens
ctaccacattgggggcagccccttcaaggccaaagtcacaggcccccgtctcgtcagcaaccacagcctccacgagacatcatcagtgtttgtagactctctgaccaaggccacctgtgccccccagcatggggccccgggtcctgggcctgctgacgccagcaaggtggtggccaagggcctggggctgagcaaggcctacgtaggccagaagagcagcttcacagtagactgcagcaaagcaggcaacaacatgctgctggtgggggttcatggcccaaggaccccctgcgaggagatcctggtgaagcacgtgggcagccggctctacagcgtgtcctacctgctcaaggacaagggggagtacacactggtggtcaaatggggggacgagcacatcccaggcagcccctaccgcgttgtggtgccctgagtctggggcccgtgccagccggcagcccccaagcctgccccgctacccaagcagccccgccctcttcccctcaaccccggcccaggccgccctggccgcccgcctgtcactgcagccgcccctgccctgtgccgtgctgcgctcacctgcctccccagccagccgctgacctctcggctttcacttgggcagagggagccatttggtggcgctgcttgtcttctttggttctgggaggggtgaaggatgggggtcctgtacacaaccacccactagttctcttctccagcc

SEQ ID NO: 41148 - DNA, 1053 bp, Homo Sapiens
ccgggattgggcacccgcgacgacgagtacgactacctctttaaagttgtccttattggagattctggtgttggaaagagtaatctcctgtctcgatttactcgaaatgagtttaatctggaaagcaagagcaccattggagtagagtttgcaacaagaagcatccaggttgatggaaaaacaataaaggcacagatatgggacacagcagggcaagagcgatatcgagctataacatcagcatattatcgtggagctgtaggtgccttattggtttatgacattgctaaacatctcacatatgaaaatgtagagcgatggctgaaagaactgagagatcatgctgatagtaacattgttatcatgcttgtgggcaataagagtgatctacgtcatctcagggcagttcctacagatgaagcaagagcttttgcagaaaagaatggtttgtcattcattgaaacttcggccctagactctacaaatgtagaagctgcttttcagacaattttaacagagatttaccgcattgtttctcagaagcaaatgtcagacagacgcgaaaatgacatgtctccaagcaacaatgtggttcctattcatgttccaccaaccactgaaaacaagccaaaggtgcagtgctgtcagaacatctaaggcatttctcttctcccctagaaggctgtgtatagtccatttcccaggtctgagatttaaatatatttgtaattcttgtgtcacttttgtgttttattacttcatacttatgaatttttccatgtcctaagtcttttgattttagctttataaaatcatccacttgtcccgaatgactgcagttttttttcatgctatggcttcactagccttagtttaataaactgaatgtttggattcctcagttattgtttacttttcatcatggagcctgtcactgtatgtaggacatatagaactgatcacttgaagctcagacyataggtcttgatcaatcaamywagaagacytagaatargyaccatttgccmagagcgcttataggtatamaccctc

SEQ ID NO: 41149 - DNA, 600 bp, Homo Sapiens
ccccgcgtccggggctcagaccggtaccagaaccgggcccacagcaggaggtgagcagcaggctgagagggtggttggcccagtgcacagtgcctggcactaacaacctgatcgtgggccaggtgtctgcctcgaaactgcctgaaggcaggcagggtaggacaatgtctggaggctcacggttttatagactaggggtccccaacccctgggctacagaccggtaccagaaccgggccacacagcaggaggtgagcagcaggcgagcaagggaagcttcatctgtatttacagccacccccccattgatcccacagcagcctgagctccgcctcctgtcagatcagtggcggctggagattgtcataggagctggaaccctatggtgaactgcgcatgtgaggaggttgcgcgcttcttttgaaaacctaatgcctgatctgtcgttgttgcccatcacctccagataggactgtctagttgcaggaaaacaagctcagggctcccacggatcctacattactgtgagttgtatatttcactatatgttacaatgtaataataatagaaataaaatgtacataaatgtgaaaaaaaaaa

SEQ ID NO: 41150 - DNA, 583 bp, Homo Sapiens
gagaggttaatttctgctcaagtggtaccacttaaaggcatgtattcttttagtatgtaaaatgaaatagtaccttgagtttaaatagaatgcatttaggcattgtagagatctgaaatagttttcttccactacattgttgaaatcaatgaagcaattagtttctcattcagaaatgtgcacactaatatttagttttgctttctcgtggataatattaagcacttactctgcagtttcctggaagttgtgtcaactgcagtgatactattcaggatggtgggaaatccccaaaaatatgtatgtgtgggcttgcttagattactatatttcatagttaatcttttgtctcttgcggtgctcatgatgtgtggggcacacggaaggcattgctgtagtcagtcattttggttttcttctatagccattttattattttagtgtattagttatgaagataatattatctatttgtaaattgctactttgtattttatgcatgctctgtaatttgatttttttttagttattgatttggattatattcacattctaataaacagttatagggggaaaaacgaaa

SEQ ID NO: 41151 - DNA, 815 bp, Homo Sapiens
  misc_feature (18)..(18): n is a, c, g, or t
  misc_feature (59)..(59): n is a, c, g, or t
  misc_feature (370)..(370): n is a, c, g, or t
  misc_feature (802)..(804): n is a, c, g, or t
  misc_feature (813)..(815): n is a, c, g, or t
gtctaagagcgagcctgngtggcgattccgacgaggctgaggtcaggagtctctactanaaatacaaaaattagacaggtgtggtggtgggcgccactcaggaggctgaggcaggagaatcacttgaacccgggaggcagaggttgcagtgagccagatcatgctgctgcactccagcccggccgctcaccgtgtgtgttgctgggtgctggggctgtgacttatcccctctcctttagccttgccataagtgtagtatcctatgaggctgagattgggaaaggttacatgcaggtaagccagtggacgtggccgatgcttcaggctccttccagccaggtccagcagtgttaccatctgcttctcctgngaggacaaaccaggcacccccaccatgaaggggctgcaggcaccatgaactatgttaacaaccccagtctgtactacagaaagggctgcagccacatgagaattcagtccacacaagccccatggccgtgttccccacttcagccacagggctcagggagccccatctggcgctaaggggaactgctggggtgtgggtgacacctggcctttggcgttctgccttggggaggtttctggttttgttacggggtggaagataggacctgggggtctcggatgcaacctgcagaccccgtggctcacccaaccccaggttctgcctcccagaccagaacgggcatggcctggtccttggcaccgaggtgcctgctctgtaaatatcaagggattacaactttaatattaaagcagaaccttgaaaaccaaaaannnaaaaaaaannn

SEQ ID NO: 41152 - DNA, 615 bp, Homo Sapiens
acgccatgtgtggaactaggaggaggaatattccatcttggcagaaaccacagcattggtttttttctacttgtgtgtctgggggaatgaacgcacagatctgtttgactttgttataaaaatagggctcccccacctcccccatttctgtgtcctttattgtagcattgctgtctgcaagggagcccctagcccctggcagacatagctgcttcagtgccccttttctctctgctagatggatgttgatgcactggaggtcttttagcctgcccttgcatggcgcctgctggaggaggagagagctctgctggcatgagccacagtttcttgactggaggccatcaaccctcttggttgaggccttgttctgagccctgacatgtgcttgggcactggtgggcctgggcttctgaggtggcctcctgccctgatcagggaccctccccgctttcctgggcctctcagttgaacaaagcagcaaaacaaaggcagttttatatgaaagattagaagcctggaataatcaggctttttaaatgatgtaattcccactgtaatagcatagggattttggaagcagctgctggtggcttgggacatcagtggggccaa

SEQ ID NO: 41153 - DNA, 581 bp, Homo Sapiens
gatgcagagagaagctataggaaacccagtaccacccctggtctgttctgacgagacatcgttcataaggcacagcacatcgcaagatgaacagttgttaataaaagctgttgctggaaacttgctttaggaacagctcaagaaccttggagttcatatttcacaaatattaataaatataagtccaagagctgtcagcctaatctgtaggagcagaacctctgattgaccaaaaggcatatgggtttaggttggttttttgatgtcatatgtctctgatggggctgcaagtgctacctcgcgcttgtacactgctgctgtggggctccgcgcctgccggtgaagagctgcagatgccgagaagccagcaaacacagggcccactggaaaaaaatagttttttcattagtatttctcgggaggacccaaaagttaaggtcagcttgttcactgtaatttctggaagaagttcactcagaccttcctgaattcagatcatctcagaagtctggagggaaatctggcgaaaccttcgtttgagggactgatgtgagtgtatgtccacctcactggtggcaccg

SEQ ID NO: 41154 - DNA, 870 bp, Homo Sapiens
  misc_feature (664)..(664): n is a, c, g, or t
aaaattggaatagatggcatacagcagttctgtgatgacctggcactcgatccagccagcattagtgtgttgattattgcatggaagttcagagcagcaacacagtgcgagttctccaaacaggagttcatggatggcatgacagaattaggatgtgacagcatagaaaaactaaaggcccagatacccaagatggaacaagaattgaaagaaccaggacgatttaaggatttttaccagtttacttttaattttgcaaagaatccaggacaaaaaggattagatctagaaatggccattgcctactggaacttagtgcttaatggaagatttaaattcttagacttatggaataaatttttgttggaacatcataaacgatcaataccaaaagacacttggaatcttcttttagacttcagtacgatgattgcagatgacatgtctaattatgatgaagaaggagcatggcctgttcttattgatgactttgtggaatttgcacgccctcaaattgctgggacaaaaagtacaacagtgtagcactaaaggaaccttctagaatgtacatagtctgtacaataaatacaacagaaaattgcacagtcaatttctgctggctggactgaactgaagatcaatcctcacaattcagactgagggntgagacaaaactttaaggatacatcttggaccatatcgtatttcattcttctaagggtggttttgggcttgtcttctagtctgggccgctctaaacatttataattcccacattgtgggatttcatcttatatctgggggaccatccctagattttattcctcccataaggtccttagaaagcttttatggggggattaatttttg

SEQ ID NO: 41155 - DNA, 982 bp, Homo Sapiens
acccacgcgtcggctatcttgtatgtatttttttcattacaagccccatgagctgcttttatgctgaaaatggtcatttccctgttcacttactgacatgtgaagaagggtttcttgctttcttaaacatttccgtaaggcaggctagaaatgtaatacttcaaatgtttgatgattatggtcttttgataggaatagattctgcttgggatatatatccaggcactctctaaggtctagggttgatattaacaaaggaatgtacttagaatagcagtacattttatgcaaatatggaaattattttaagaaacaatgacatatcaaaactgctttttacatgattttgaaatagactagaaagctttccctatagacatattaatattccaatcataactttaattcaagaatgcagttttaccaaaagaaaaatttgaaaatttctattcaggctactggaattggttattaaaagaaaaaggaaaaagaagaatcttgctgctttcagtatttcctgattttttgtaaatataaagaggaacttcaattatgaaaaatttttaaaagatatatatatctatatatctatatatatgtactgtttgtttcctgtcttggaagattttgagttatgggttatttggtgtccagaattgattaatttcacaatatgctgtgttttggaaactgagatcccatttagcttgattgtgtaatatggattgacaatataaggggtttctctcaaaggcaatatgggtacgcggggccaaaggcctggattaaagaattttcttttaatgcaaacccttttacaaaattgtttggccagggtgggtaaattaatacgggttatttaaaaaaattagttgatttagaaaagaaaaaaaaaaagggggtagatacgggacaggacacttataaggatagatataaacgataaagggaagagttaaaagttagaaaagaaatattgtta

SEQ ID NO: 41156 - DNA, 883 bp, Homo Sapiens
gaaagctgtggaacgctacctcttcctttgagaccttgtggagaagggtctgaaatggtaggcaaagagaatagttccccagagaataaaaactggttgttggccatggcagccaaacggaaggctgagaatccatctccacgaagtccgtcatcccagacacccaattccaggagacagagcggaaagacattgccaagcccggtcaccatcacgcccagctccatgaggaaaatctgcacatacttccatagaaagtcccaggaggacttctgtggtcctgaacactcaacagaattatagattctaatctgagtgagttactgagctttggtccactaaaacaagctgagctttggtccactaaaacaagatgaaaaatacaagagtgactctataactctggtctttaagaaagctgccttttcatttttagacaaaatcttttcaacgcggaaatgtacctaatctggttctactaccataatgtatatgcagcttcccgaggatgaatgctgtgtttaaatttcataaagtaaatttgtcactctagcattttgaatgaatagtcttcactttttaaattattcatcttctctataataatgacatcccagttcatggaggcaaaaaacaagtttcttgttatcctgaaactttctatgctcagtggaaagtatctgccagccacagcatgaggcctgtgaaggctgactgagaaatcctctgctgaagacccctggttctgttctgcctccaacatgtataattttatttgaaatacataatcttttcactatgcttttgtggggttttttttttaagtatgtggaaaaaatgtgatggctcagataagtacatttatatcagcttcagtgttaaa

SEQ ID NO: 41157 - DNA, 628 bp, Homo Sapiens
agcatagggattttggaagcagctgctggtggcttgggacatcagtggggccaagggttctctgtccctggttcaactgtgatttggctttcccgtgtctttcctggtgatgccttgtttggggttctgtgggtttgggtgggaagagggccatctgcctgaatgtaacctgctagctctccgaaggccctgcgggcctggcttgtgtgagcgtgtggacagtggtggccgcgctgtgcctgctcgtgttgcctacatgtccctggctgttgaggcgctgcttcagcctgcacccctcccttgtctcatagatgctccttttgaccttttcaaataaatatggatggcgagctcctaggcctctggcttcctggtagagggcggcatgccgaagggtctgctgggtgtggattggatgctggggtgtgggggttggaagctgtctgtggcccacttgggcacccacgcttctgtccacttctggttgccaggagacagcaagcaaagccagcaggacatgaagttgctattaaatggacttcgtgatttttgttttgcactaaagtttctgtgatttaacaataaaattctgttagccagaaaaaaaaaaaaaaaaaaaaaaaaggac

SEQ ID NO: 41158 - DNA, 843 bp, Homo Sapiens
agatctctctcattgagaacaagattgaatcacacagacatgagctgcagggccagaaacctttgttagaacattgaagaatggagatgttttgacctgggacttgtgacggccaaggaatgccaccttattctggctactcctgcagaaatgaaggagtggggttattttagtatataaaaattcaggcaggagagatggtttaaagaggaagattgttgccttcagtgtttgattgaagtattcaggttctcacagtattctttccagttgttgtaattcataaattatttgaaaagaaacttttgtagaaagtccaagaataataactctagataaagattagtgggacactcaggcaaaaatgttggtctttctttgacatgttgcaaaatgttatcaattttgtcatggatataatttgcagcccatggatataactggttgataagccagagaaaaataatttagtgttctaaaattcatggcatgtgtggtttattaatgccatgtactttctcctttctggaataaaatctatggctttaagaaaactgagcatatgtaaactctgtgatgattaccctttatcacatgaattcttggaaatagaaagtttcatctgcttttttaaattcttagtagatatttggcattgaggagaaacttgtagactattatagccatgtgaattaactgtagcaaagtgccctttttcttcaaattgctccccctccccaggatgacacacttcatgtcatagctgaaccctactctactggattcaaggccagttaatgcaattttagagaagcagtttttatgttttgcaagatattctgt

SEQ ID NO: 41159 - DNA, 566 bp, Homo Sapiens
aaagtggaaacatggctacttttggggagtgatattttaaaaataagttgtctatgggcacaaagttttcttcatttgtgtagcaaacttcttgtgaatgtggattacaaaatggtataattgtgctactctcccctgggtggtttgcagccctaatgaaattatgtctaggatgattcagtctatttcccatttactagcagagtaacttgttaagatcagctggctttcttgttaaagttatttaagttttgaatgctctactacttcaagtctttaaatttcttgagactagaataattttaaataatatgaccctttgtcttctaatgaaataaagattgaagaggttgagtcaggactgagctggtgaagaaatcttgtgggtattctggaaatttgatacggagagaacttggtgagctatgaattactctcagtctcctttttacagggttgttgtgatccctcttttccagaaaattctgtggaatgtttctgtaggactttgttctccacaagcttgaattaaagcaggattcagtttgcaaaaaaaaaaaaaaaaa

SEQ ID NO: 41160 - DNA, 581 bp, Homo Sapiens
  misc_feature (581)..(581): n is a, c, g, or t
aacaccaccgttggcagcaaacaattgacattcacgttaaagaggtctgaacagcagaagaagcaacaggaggctgagaaactgcatcgacaagaaaggaaaagactccgtcgttcggccggacacctgaagtcaagacacaaaagaggacggtcgtttcattgatttgggaagtggtcctacctgtgattagggaggggtacgtctcccccaaactgatcatcgttagggtgttaaacacagacgaggaaacacacgtttttaaagttcatgtacgttcttgtacacagaggtaaagatttgaaaacctgtgccttgtgggttggactttgaagctggccccgccgacggccaccgcacagccccaggggtgtgcttgcgagtcgttgctccctggaaacattgtcctttccccacggctttaatcatgaaaaccaggctggggtttttttaatattgtgaaatgtacaccatgaaatgaaaggtttatcctgtgccagaaaccaaggtttatcatgctctaggaacttttttcttacactgcctaccgccattcatgattaaaccatccagaaataccn

SEQ ID NO: 41161 - DNA, 581 bp, Homo Sapiens
ttagatatacttctgcataaagagtatatatacagtgtaggataaaggcatatcgtacatggcaatgctgttaaacatggtaagactgaggttctgcaggattaaagtcagattaagggtacagaaagcaaaccttgatactgaggccatttagagcaatttgtttaatgagtggttcagccatcaccaccagtggccacctgttcaataaaattgcctagcaccacagtggagagtcatctacaccccaaggtgagctgtaagactggccaattctttgaagacctttttttctgttgggagaatggaaagcagaaagggaagccaggctctttaatgttccaagtcagctgtgcctcacacaaggctctctttttagctactaagtaacatactcaagactttgtatctgtgcagcattttatggaaatcactggtgacctataggatattactaaattatttcaatagctttatttttttcctacttggattctaggtggacattacagagttgaattcctcactatcccctcccgctgtcatttgttttattggaaaacttcatgttaactagagtg

SEQ ID NO: 41162 - DNA, 620 bp, Homo Sapiens
  misc_feature (511)..(511): n is a, c, g, or t
  misc_feature (529)..(529): n is a, c, g, or t
  misc_feature (562)..(562): n is a, c, g, or t
gttcaataaaattgcctagcaccacagtggagagtcatctacaccccaaggtgagctgtaagactggccaattctttgaagacctttttgcggtggggagaatggaaagcagaaagggaagccaggctctttaatgttccaagtcagctgcgcctcacacaaggctctctttttagctactaagtaacatactcaagactttgtatctgtgcagcattttatggaaatcactggtgacctataggatattactaaattatttcaatagctttatttttttcctacttggattctaggtggacattacagagttgaattcctcactaccccctcccgctgtcatttgttttattggaaaacttcatgttaactagagtgtacaaaaagtctgtttcctgctgagccaatagtgatttgtttgcatatcacctaatgtgaaaagtgctcatctgtgaactctatagcaaattatattttagaaaatactttgtgaggccgggcatggtggcanagcgagactccgtctcanaaaaaagaaaagaaaagaaaatttaggatgtanagaagcatttacttgacatctgatatccttctgtgtctcattttactcttgaaactga

SEQ ID NO: 41163 - DNA, 947 bp, Homo Sapiens
tatttctagatcgcgatctagaactagtcttcaagacaaggtctgcaaagggttttggggctcgaggcccagacgtgctgagtccggccatggtagccctctccaacaagctgaagctgaagcgacagctggagtatgaagagcaagccttccaggacctgagcgggggggacccacctggtggcagcacctcacatttgatgtggaaacggatgaagaacctcaggggtgggagctgccctttgatgccggacaagccactgagcgcaaatgtacccaatgataagttcacccaaaaccccatgaggggcctgggccatcccctgagacatctgccgctgccacagcctccatctgccatcagtcccggggagaacagcaagagcaggttccccccacagtgctacgccacccagtaccaggactacagcctgtcgtcagcccacaaggtgtcaggcatggcaagccggctgctcgggccctcatttgagtcctacctgctgcccgaactgaccagatatgactgtgaggtgaacgtgccccgtgctggggaaagctccacgctcctgcaaggagggggacctcctcaaagccctggacaaggccacctgagccagggcttctacctgggcagcaccttctgccgaccccgtcccaccagctttcactctcctccgtctggttttggcactaggtatttctaacgcccgcgacactaatttacaaaatgggaatttacctggcgaaaacttgcccacggctcacccaagcaaggggcctttttttctggagatggctccctttaattatccccaattttttaaagggaccccacttggtttaagcctggtttctaaaaaggtgccttaaaatttgtggagggatttttttttcccccccacccctccaaagggctctccagcagttcaaattagcccggcgggggc

SEQ ID NO: 41164 - DNA, 504 bp, Homo Sapiens
caatatggcctcaaggggtgctggtgcggcacagcagatgtttatatagagccatggggccttacaacgtggcagtgccttcagatgtatctcatgcccgcttttatttcttatttcatcgaccattaaggctgttaaatctgctcatccttattgagggcagtgtcgtcttctatcagctctattccttgctgcggtcggagaagtggaaccacacactttccatggctctcatcctcttctgcaactactatgttttatttaaacttctccgggacagaatagtattaggcagggcatactcctacccactcaacagttatgaactcaaggcaaactaagctgcctctcaacaatgagggagaactcagataaaaatattttcatacgttctatttttttcttgtgatttttataaatatttaagatattttatattttgtatactattatgttttgaaagtcgggaagagtaagggatattaaatgtatccgtaaacaaaa

SEQ ID NO: 41165 - DNA, 654 bp, Homo Sapiens
cgcgtccgaatcaagtaaccagaatgcacctataaattatggagcattgtagattttaccacatcaattcatagcagtaactttaagagggcattgtgcaatagttagttgttttcttgttcagctattttaaaggctgctttaacttgtttgttgtctttgtatataactacttctaatctaatcactagagttattatattctgttatgtttgaccagaattatatgacaagaactggtgacagtttagtgcctctgcccattgtccatgatttacactaattgtgagcagtcttcttatgtgtcagctcattatttttgaaacatttgcctttaggctgttctttgaggtatcaatgaagtgattgaatttcaataccttaattcagtgcacataatactaatgtaacagcagatgaaaattgataaaacccaaaagagagtcatctaaatttgtagttcctatttctgtgggtttgcctggccatggttggagagggaatggtgtttgatggtaaacacagggtgtttggggatcaaggagcctagattctctccctggatctgtcactaacttgctgcgtgacctgaacacgtcactttacctctctgtgcctcagttttcccatgcatgaaaaataaaataaaataaa

SEQ ID NO: 41166 - DNA, 698 bp, Homo Sapiens
ccggggaattcggccttatggccgggcgtgtgtgtacttacagggctaggatttcagtgttgtcagagtattaccacacagcaacagcaacatacagaagatatgttcactcagataagactgccctaaacaaccattttgtcactcagttatttaactgtgtttagctcatttaaatcaaaatgtgtactttaatctaaaatgttttaataatctgtatttcttataattttaacactatgagctgcctgtataagaaatcaagtaaccagaatgcacctataaattatggagcattgtagattttaccacatcaattcatagcagtaactttaagagggcattgtgcaatagttagttgttttcttgttcagctattttaaaggctgctttaacttgtttgtttgtctttgtatataactacttctaatctaatcactagagttattatattctgttatgtttgaccagaattatatgacaagaactggtgacagtttagtgcctctgcccattgtccatgatttacactaattgtgagcagtcttcttatgtgtcagctcattatttttgaaacatttgcctttaggctgttctttgaggtatcaatgaagtgattgaatttcaataccttaattcagtgcacataatactaatgtaacagcagatgaaaattgataaaacccaaaagagagtca

SEQ ID NO: 41167 - DNA, 750 bp, Homo Sapiens
  misc_feature (531)..(531): n is a, c, g, or t
ggagattttgaatgtgaagaatgtcatggtggtagtatcacgctggtatggagggattctgctaggaccagatcgctttaaacatatcaacaactgtgccagaaacatactagtggaaaagaactacacaaattcacctgaggagtcatctaaggctttgggaaagaacaaaaaagtaagaaaagacaagaagaggaatgaacattaatacctgaaactataggaaaggttaatttgcctataattatatatacattccatagtcatcaaggaatatattgtgcagagagagtatccttgactgcttaagtcagccagttcagcatggataccaacattagcttttcttcttggttatatcatctgccaaaaatagagaacttatgatctattcatgtgtgtttcaggcttatttgggagaactaatttgaacttaatcaccacttcatctaattttagcaaggtaacagttgcccagggcagtacctgaattaactgtccatttcagtacatgtcaagtgcctttgttangtggagaagaaatgtctctagaggaatataaatacctgatttcttgtcatcgagattcttgtactgttaaatgaatattgcccttttactgctctttatggcttattggaataggagctcatttaagattgatctttggagagtttctttctgtggattttaggtccataaagtatggtcaccttttcaattttataaggggttcatccatttgagtaa

SEQ ID NO: 41168 - DNA, 639 bp, Homo Sapiens
cgcgtccggtaagattctgagctctctctctgttttgttctagccatgaatttgcctgagaaacttgtaacctatgtgcctcaatatattccatagaaagtaggtccccctgccttctcccactcctcacactcttctacagggataggcttttgcaaatatatcagataaattttttgtttcttgtttatttttaggttattttcttggaaggttgggaaaagatgtttgttttaacaggtcatgtactacgttgttgttttcatttctgttataagtaaaactaaaagcacagaatggtgggaaaggggctataatgtggttcattaataatgttagcagcttttttctaaccatcctgtctaatggttaagacaccagtaacaaaaacacatgatttggaaatactttggctttttcatatacctagtggtgccttatcataatagcactgttacatgaaataagcccctaccttcttactttctggtttgttgaaaaaatacactggtgctctttgaagtgataaaatgagtgtttatgaatgggtgtaattaggaaatacttctcatctgacagctacaaataactaagtttggaggtattttcactctatatgaataaatatttttccataaa

SEQ ID NO: 41169 - DNA, 291 bp, Homo Sapiens
cgtaatgaatggaattcaattccacacatggtttgttcaagcacacttaataagtagcctattttttaaatgtctttttaaaatgtaaatatttggatgaagtttttctttgttttgatatattcatttgctacaccaactatgttttcagaattcatcttttgaacaacttggtttcagaatatgtaaaatgactttaaggatcttgtgtatcaaacctatccccggatgtgtgagaataatgtgttcataaagcatggatctcgctttggttgtaaaaaaaaaaaaaaa

SEQ ID NO: 41170 - DNA, 659 bp, Homo Sapiens
cgtaggatcagagttgatttctctataacaaaaagaccacatacgccaacaccaggaatttacatggggagacctacctatggcagctctcgccgtcgggattactatgacagaggatatgatcggggctatgatgatcgggactactatagcagatcatacagaggaggaggtggaggaggaggaggatggagagctgcccaagacagggatcagatttatagaaggcggtcaccttctccttactatagtcgtggaggatacagatcacgttccagatctcgatcatactcacctcgtcgctattaaagcatgaagactttctgaaacctgccctagagctgggatattgtttgtgggcaatattttttattgtctcttgtttaaaaagtgaacagtgcctagtgaagttaggtgacttttacaccttttacgatgactacttttggtggagttgaaatgctgttttcattctgcatttgtgtagtttggtgctttgttccaagttaagtgttttcagaaaagtatgttttgcatgtatttttttacagtctaaattttgactgctgagaagtttctattgtacaaaacttcatttaaaaggtttttctactgaatccagggtattctgaagatcgaagcctgtgtaaaatgctacc

SEQ ID NO: 41171 - DNA, 905 bp, Homo Sapiens
gggcattcggattcctgatcatgcttttatgcaagacttggctcagatgtttgagggtccgcttgctctcactagtgccaacctcagctcccaggccagttctctgaatgtcgaggagttccaggatctctggcctcagttgtccttggttattgatgggggacaaattggggatggccagagccccgagtgtcgccttggctcaactgtggttgatttgtctgtgcccggaaagtttggcatcattcgtccaggctgtgccctggaaagtactacagccatcctccaacagaagtacggactgctcccctcacatgcgtcctacctgtgaaactctgggaagcaggaaggcccaagacctggtgctggatactatgtgtctgtccactgacgactgtcaaggcctcatttgcagaggccaccggagctagggcactagcctgacttttaaggcagtgtgtctttctgagcactgtagaccaagcccttggagctgctggtttagccttgcacctggggaaaggatgtatttatttgtattttcatatatcagccaaaagctgaatggaaaagttaagaacattcctaggtggccttattctaataagtttcttctgtctgtttgttctttcaattgaaaagtaattaaataacagatttagaaatctagtgagagcctcctctctggtgggtggtggcatttaaggttcaaaccagccagaagtgctggtgctgtttaaaaagtctcaggtggctgcgtgtggtggctcatgcctgtatcccaacattctgggaggccaggcgggagaactgcttgagccaggaagttcagaatcagcctgggcaacataagcaatactccgtctcttaacattatctataaagtctcaggtgaccaaggtcta

SEQ ID NO: 41172 - DNA, 794 bp, Homo Sapiens
  misc_feature (794)..(794): n is a, c, g, or t
gcgcgccgattcggcacagggggaagcggggttcttttgctgtgagtggccagggacaacagacaagattcctgggggctcccgatgagcaggaacgtggagcctgctgcccaaggcctgctccttccggctgctccagcccctgggggcagagtccacaaagagtccccatcaagacttcttccctgagtcaagtacagcgtagcatagtcctccacccacccaacctctctgcctggccagggtcctggccctgccactgtgtggcgaggtgtccttctagaccacatcagccccaaggctgggagcagtcgctccagggccgcagcagttcactcccacacatagaacccaggtcactgctggggcgattgaacaggttgcctggcttttctctgctgtcagtttggtgtggaggcctatgttctgccccatacaccccacaggccctgcttatgggaaggaacacaggcctccagcccagaggactgtgccgccctgttcttggccgtccacgtttcctctccctctagcaccagcaatacatttccctggcatggacagaaaagacagagaggacttgtacaaaggctttgtaaaaccagaggctagcttctatctttgtctactgttatttcagctcagggcgggtaattaacatcattggaactagctattaggaaagaaaaaaacttggttttttttacacaattttttccctggtttgcgtttctgcatttggattgagacccagggcgggattcttggccagtcagtctgggtcccttctggcn

SEQ ID NO: 41173 - DNA, 577 bp, Homo Sapiens
gtcaggtaaagtttgaagactgccaaggagcagattttctccctggaaatgtgaaaactgaacctataactctgataaggacttgagatgtgtagaaacgttgggttatggaagactagtttcttccataaccctgaattggagaccttaatgctaagtgtagattattgaggtttgttagtgaggaaaagaataagagttcagaagcctttgttatcagatagcgaaatcagggcctagtgaggagcacaggtcgactacataatggagtccattggcgaaccctattgcaatttggtccaactatatcttctggtgaaggaaattaatgatgtaagaaaatgcaagaggctcaacttctcttccaaaaatcttctggcttctgaactcttcctctgcctctctttaaataaataacacagaatttcaagtggtaggagacttattaagccagtcaccaagcttggtctgtcagcctgtcttctaacacctcaaagatcttgtgccctgtgctgtccctcccttgtaattatgaaaagttctttggtttctggggtgaattctacccatgtataat

SEQ ID NO: 41174 - DNA, 893 bp, Homo Sapiens
gctgggtaccggtccgggaattccctgggatcacccatttaaaaaaatggataccttccccaaactaatccatctccttttttttcttcccacagcgattgctgccaattgatggggcaaatgatctcttttttcagccacctccactgactcctacctccaaagtttatactatcagaccttattttcctaaggatgagaaaataatgttgagtttccatgaagaacaggaagtactgccagaaactttccttgctaatttcccttctctgataaagatggacattcacaaaaaagtaactgacccaagtgtggccaaaagcatgatggcttgcctcctgtcttcactgaaggctaatggctcccggggagctttctgtgaagtgagaccagatgataaaagaattctggaattttacagcaagttaggatgttttgaaattgcaaaaatggaaggatttccaaaggatgtggttatacttggtcggagcctgtgacatttgttgacactgtgaactgtccaaaagtctcttaactgcaccttgtgaatggtagttgaggtcttcatacagttcagcctctagaatggtaacaaatcagccaattggattcgaaacaaagaagactatgtaaaactcacccatcacactttgagactactcactggttggaagaatatagtattgcagcaaatcctgtatgaaagagagatgtgggcttcctttttgagtcttgtgttaggtgctgagaccttttacatgggcttatacagggagagagtcttcaataaatgtagtcagcactattttctgcatccagtgtggtttgcgtttctcaccctgagagtaatcaagaataacatctggtcatccttccttgggttttattggagt

SEQ ID NO: 41175 - DNA, 934 bp, Homo Sapiens
tagcgaggcctgggtggcgccggaccggcgggcgggcggggactcggcgcgggcgccctcccggccagcggcggcagcccctcctccccggcgccctcaggaccccccagagacccccggcggcggcagcctgccttgctctgccaggaaccatgagtgaggcccgcagggacagcacgagcagcctgcagcgcaagaagccaccctggctaaagctggacattccctctgcggtgcccctgacggcagaagagcccagcttcctgcagcccctgaggcgacaggctttcctgaggagtgtgagtatgccagccgagacagcccacatctcttcaccccaccatgagctccggcggccggtgctgcaacgccagacgtccatcacacagaccatccgcagggggaccgccgactggtttggagtgagcaaggacagtgacagcacccagaaatggcagcgcaagagcatccgtcactgcagccagcgctacgggaagctgaagccccaggtcctccgggagctggacctgcccagccaggacaacgtgtcgctgaccagcaccgagacgccacccccactctacgtggggccatgccagctgggcatgcagaagatcatagaccccctggcccgtggccgtgccttccgtgtggcagatgacactgcggaaggcctgagtgccccacacactcccgtcacgccgggtgctgcctccctctgctccttctccagctcccgctcaggtttccaccgggctcccgcgggcggcgcaaagcgagagtcgggtggccaagatggagcttccgggcgggccgcaagcgctgatgaaaaggccgcttccggttaagggaatggccaccctttcccccggggcacaagcgtcgaaagcttcacctcccaacctaaccttttcctgggagggaaggaccccaa

SEQ ID NO: 41176 - DNA, 774 bp, Homo Sapiens
  misc_feature (750)..(750): n is a, c, g, or t
cctattcctattctctagcctattccttaccacctgtaatcttgaccatataccttggagttgaatattgttttcatactgctgtggtttgaatgttccctccaacactcatgttgagacttaatccctaatgtggcaatactgaaaggtggggcctttgagatgtgattggatcgtaaggctgtgccttcattcatgggttaatggattaatgggttatcacaggaatgggactggtggctttataagaagaggaaaagagaactgagctagcatgcccagcccacagagagcctccactagagtgatgctaagtggaaatgtgaggtgcagctgccacagagggcccccaccagggaaatgtctagtgtctagtggatccaggccacaggagagagtgccttgtggagcgctgggagcaggacctgaccaccaccaggaccccagaactgtggagtcagtggcagcatgcagcgcccccttgggaaagctttaggcaccagcctgcaacccattcgagcagccacgtaggctgcacccagcaaagccacaggcacggggctacctgaggccttgggggcccaatccctgctccagtgtgtccgtgaggcagcacacgaagtcaaaagagattattctcttcccacagataccttttctctcccatgaccctttaacagcatctgcttcattcccctcaccttcccaggctgatctgaggtaaactttgaagtaaaataaaagctgtgnttgagcatcaaaaaaaaaaaaaaa

SEQ ID NO: 41177 - DNA, 625 bp, Homo Sapiens
agcgacagtgcccaggggtctgagtctcacagcttgtaaagcctgagacagctgccttgtgtgcgactgagatgcacagctgccttgtgtgcgactgagatgcaggatttcctcacgcctcccctatgtgtcttaggggactctggcttctctttttgcaagggcctctgaatctgtctgtgtccctgttagcacaatgtgaggaggtagagaaacagtccacctctgtgtctaccatgacccccttcctcacactgacctgtgttccttccctgttctcttttctattaaaaataagaacctgggcagagtgcggcagctcatgcctgtaatcccagcacttagggaggccgaggagggcagatcacgaggtcaggagatcgaaaccatcctggctaacacggtgaaaccccgtctctactaaaaaatacaaaaaattagctgggcgcagaggcacgggcctgtagtcccagctactcaggaggcggaggcaggagaatggcgtcaacccgggaggcggaggttgcagtgagccaggattgtgcgactgcactccagcctgggtgacagggtgaaacgccatctcaaaaaataaaaattaaaaaataaaaaaaaaaaaaaaaaa

SEQ ID NO: 41178 - DNA, 1080 bp, Homo Sapiens
atttccattagaatggtgctcttaaaaatagaaactgaaccggggcggtggtcaggctaaggccaagtgtttaagaagtagagtgtagctgccagcgtagaaacccatgaaaaggaggccacaggagattcctgggagcactgggtgtagcaaaacaaagccactctctgcttcagtcgcaccatttgctaattgaaaatcatatcctgaatcatactgagactgatcaactttggtagcttttttgttcagatcttatgacacactactcttctcaccgtgagattttctcagccagtgatagtacattctgaaatgctggcaccaggagacggccacagacacacactgctaaatgtgaagatggaactaaactggaaattaaattatactgacaatattatggcatttttaagatcatggcattttaatttacattagagtggagttgcatcatactcaggggttagcttccaaggtcagtacataggtaaaatgggctattaggatgatccttgaaagccctttagaagggtgccatgttggaaacctgtacatccacaacaagtagcttttcctcctatgttggaaaaaaagactgtttctttgtttgaagaccaagtgaagttgttggtgtttgtttaggggccattttgttaaaaaaaaaaaaaaaaaaarcacmhmhyytttttaaaaaaaaaaarmcmgaaarawgcttgccccgcyagkggcagaggggaacygacaaggggggagggcccacccagcggrkggacagcacccaccgggggtwacmcaagggggkgcatacaattwaggtgggamcscamaggaattcawgttawtttccttacggcbtccktttcactgaccycawtwtattgagtwaatgtaartaaaagtgtttatgatawaacyccactgtammtcatccttkargwggtaaggataaamgcwwtwwacamctatatgtatgggtggtatgggggcmttcattggatcaataasagcagctatttwgggtattcgtttakaagtcgtgggggcaggmwtaaaawcraamtaaaacamacrtgkttt

SEQ ID NO: 41179 - DNA, 732 bp, Homo Sapiens
cgtccgggtttggaaggagtagggaggagaatgaaggaaaatgcaaccagcatgattatagtgtgttcatttagataaaagtagaaggcacaggagaggtagcaaaggccaggcttttctttggttttcttcaaacataggtgaaaaaaacactgccattcacaagtcaaggaacccagggccagctggaagtgtggagcacacatgctgtggagcacacatgctgtggagattgcagtgtgtctgaggtttgtgtagtagtggaagattttaggtatgtagagcaagttgaaaatggattgagactgcatggtggcataaatgagaaattgcctgtagcatctagtctacttgaaggaagtggagacataaggagagacaaaaacaggtttgtgccataaagtattttttcaaagacaccaagatgtggtaaatgaaaattattagttcacttccctgctgccatgaaactttgccttaagaaggtgctggattccaaggtttgtaaaggcatctcggtaaagactgctttttgaatgcatatgattttgcatcagctagactgagttgattctgaccagacttgatggttttaagtcggaaccgataaattttaaaaaggagaaaaaataatttgacctagtagtataaaacatgaggcttttaatggtactttgctatgaaaagaaaacactgtattccttatgccaaaacacatgtatctttcattat

SEQ ID NO: 41180 - DNA, 969 bp, Homo Sapiens
atagtggtggatctgaaccttctaacagaggaggtaagattatacagctgcacacctcgtaacttctcagcgtccataagggaagaactaaagagaaccgataccattttctggccaggttgtctcctggttaaacgctgtggtgggaactgtgcctgttgtctccacaattgcaatgaatgtcaatgtgtcccaagcaaagttactaaaaaataccacgaggtccttcagttgagaccaaagaccggtgtcaggggattgcacaaatcactcaccgacgtggccctggagcaccatgaggagtgtgactgtgtgtgcagagggagcacaggaggatagccgcatcaccaccagcagctcttgcccagagctgtgcagtgcagtggctgattctattagagaacgtatgcgttatctccatccttaatctcagttgtttgcttcaaggacctttcatcttcaggatttacagtgcattctgaaagaggagacatcaaacagaattaggagttgtgcaacagctcttttgagaggaggcctaaaggacaggagaaaaggtcttcaatcgtggaaagaaaattacccactgttgtattacatagatcaccagctagtttcagagttaccatgtacgtattccactagctgggttctgtatttcagttctttcgatacggcttacggtaatgtcagtacaggaaaaaaactgtgcaagtgagcacctgattccgttgccttgcttaactcttaaagctccatgtcctgggcctaaaatcgtataagatctggatttcactacggttctggggccactattcccttttttaacacagaactttcttgttctacaacctggttttccacacgggcactatgtgcgctttgaattacccttgtgccgggccataggacccacgggatttctcactattcctttgtaaaatttctgccttttgacagcacactcct

SEQ ID NO: 41181 - DNA, 649 bp, Homo Sapiens
ggcacgaggataagctggatctaaagaattacccagtgagcagtgaggagaaacaaggagctagaaaacattggaaagttaagagagttcgagggaagaattataaagactaggagtcctagaaagagaaaatttagagaataaaggagaggcagtacttgaaagataacacaattttacaaatttgttggaaaaacatgaattcataaattcaggaagcacaatatataccaaacatatatttaaataaaatccaggcctagactcaaggtattgtaaatgacaagataccaaatacaagattttaaaagcaaccatggggagaaaaagatcagtgaaagcaagacagtcaaatacttagtaggcttcctaacagcaacaatgtacccaaaagagggtagaattctgagaaaaactattagcttagaatttgcaacaagcgaaactgaaacaaacagatgctcagatgaaaaacagatgttatcctcagcacaacttcagtaaagagactacaaaaggatgatcttcaagaagggaaatgattctaaaaggattatctgaaattgaaaaactagtaagcaaataaatgataaacataagtaaatttaaactgttgtttgtataaaacaattataatgaagtgtttata

SEQ ID NO: 41182 - DNA, 548 bp, Homo Sapiens
  misc_feature (539)..(539): n is a, c, g, or t
tcatttcctggtcacatcattaactgctaattctgtatttataaagaattttcagatggacatgtacaaatttgaactcaaaccatccccagtccagatacagggcagcgtgtaggtgaccacaccagagcctcagcctcggtccttctcagccgtcgggataggatccaggcatttcttttaaatctcagaggtagcagtaaacttttcagtattgctgttagcaagtgtgtgtttgccaatagatacccattatactaatgtgccaagtaaatgttcattgcacatctgcttccactgtgttcccacgggtgccatgaagtgtgtgaggagcccctcatctggagggatgagtgctgcgttgactactgctatcaggattgtgttgtgtggaatattcatctacataaattttatatgcacagtaatttccctttttatatgtcaagtaactatttgtaaaagttatactcacaaattattataatgattactaatatattttttccatgtttcattgcctgaataaaaaacccttngggggtttt

SEQ ID NO: 41183 - DNA, 834 bp, Homo Sapiens
cttctataagagaaacaagaacctgccacctgaggaacagatgatttcagcccttcctgacatcaaggtgctgactctcactgacgaccatgaattcatggtcattgcctgtgatggcatctggaatgtgatgagcagccaggaagttgtagatttcattcaatcaaagatcagccagcgtgatgaaaatggggagcttcggttattgtcatccattgtggaagagctgctggatcagtgcctggcaccagacacttctggggatggtacagggtgtgacaacatgacctgcatcatcatttgcttcaagccccgaaacacagcagagctccagccagagagtggcaagcgaaaactagaggaggtgctctctactgagggggctgaagaaaatggcaacagcgacaagaagaagaaggccaagcgagactagcagtcatccagacccctgcccacctagactgttttctgagccctccggacctgagactgagttttgtctttttcctttagccttagcagtgggtatgaggtgtgcagggggagctgggtggcttcactccgcccattccaaagagggctctccctccacactgcagccgggagcctctgctgtcctccccagccgcctctgctcctcgggctcatcaccggttctgtgcctgtgctctgttgtgttggagggaaggactggcggttctggtttttactctgtgaactttatttaaggacattcttttttattggcggctccatggccctcggccgctttgcacccgctctctgttgtacactttcaatcaacactttttcagactaaaggccaaaacctaa

SEQ ID NO: 41184 - DNA, 741 bp, Homo Sapiens
gggtccaaaaaatgtcataaactgaactaaaatgatgaactattttatgtagacattaggagtggatcggaatacttctgctttctgggtaaaacttaaaagtttactatttcttatttggtaaatagattttaagccaattctagtaagaaattaataaaactaccttattttgtatttcacttaaggtggaggaccttaactaaaggaccatatttattcattattttaatattataagggaagtaaaaaaaagtgaggtatagtctaaatggtgcatataggaaatactgacagtgtttagcaacatgcagccctttgagatttctgtcgtaatgctaaacttgaataagatggaatggctgaacatgtggttagtcttttattttaagaagaattgagaattgatagatttggagatgagctttgcaaaggctgtttgcttttcatgtctataggtctgtcattgtcctttttcaaagcatttctgaagttattcctacttggatatagttaatggaattggcttaatttgatgacataataaatcacttataaaattttaaatatcaagtgaaaatttagaaaggccattactattctataaaccttataaacttgctctgggagaatgcattctaaattatatatagtggttcagctccccattggtggtgttcatagtccttctaggaaaacagataaaacttaagtattcaaatttcactccttgggcatttt

SEQ ID NO: 41185 - DNA, 833 bp, Homo Sapiens
ttcctttctcccattctttctccagcctggttaactcttccgttgtcagcttctcccccttcagcctgtttctgcagcagccagggttctcccccctacaccctctgcaggtggagagagagaagctgggcccagccgggccgtgcctgctggcacagacgccttaacgctgtgtgtatgactgtgtgactgtgtgggagcctggactgacagataggccaagggctactctctggcatctccaggtgttttgtagcaaacagccacttagtgctttgtcctggactccactcagcctcaggatggggaatagccaagaatggcagcctcagcgcagaggcaaggtcagaaagagacggcgcttcagagtttcctttccagacacccctccccgcactgtgaagttcccctgaccgccctcctggttcacaaagagcattaagaaagctgcggtggtctgagcaacatagcccagagggctgagcctcctggcctgcctgcccgcccaccctgggagtcccagtggtgaggctcagagaacttctaaggggaaagaacagctggagtttctgttgatgtgaagaaggcagctcttggcctcccactcccacacttctttgcctataaatcttcctagcagcaatttgagctacctgaggaggaggcagggcagaaagggcaagggcctgcctctgacctgccgtgtcctttgcaggaaggaggtaggcacctttctgagcttattctattccccacccacacccccaggcagggttggaaatgagggacttttttaacttttgtttgttttttaaaataaatctgtaaatctg

SEQ ID NO: 41186 - DNA, 620 bp, Homo Sapiens
ccggggtggctgctccgccgtcggggccgcgccgccgagccccagccgccccgggccgcccccgcacgccgcccccatgcatcccttctacacccgggccgccaccatgataggcgagatcgccgccgccgtgtccttcatctccaagtttctccgcaccaaggggctcacgagcgagcgacagctgcagaccttcagccagagcctgcaggagctgctggcagaacattataaacatcactggttcccagaaaagccatgcaagggatcgggttaccgttgtattcgcatcaaccataaaatggatcctctgattggacaggcagcacagcggattggactgagcagtcaggagctgttcaggcttctcccaagtgaactcacactctgggttgacccctatgaagtgtcctacagaattggagaggatggctccatctgtgtgctgtatgaagcctcaccagcaggaggtagcactcaaaacagcaccaacgtgcaaatggtagacagccgaatcagctgtaaggaggaacttctcttgggcagaacgagcccttccaaaaactacaatatgatgactgtatcaggttaagatatagtctgtggatggatcatctgat

SEQ ID NO: 41187 - DNA, 674 bp, Homo Sapiens
ggagagtgggtatcaacgcagagtggccatacggccgggatgtcaatacacattagaatcagatttgaaaaagttaaaacaatttcattgttgtaattgttccctttctgttttcatatagtgaataacctttaaagggttgttttgttttgttttgaattataggagttataatctttggagatgattgcatatctcattagatatgcaatataaatttatctgagtgaacaaagtgctaaataaatagatctacattttgtacatatttatataaaatttacctttaagtatttactttaaaaaatttaatggcttaactcgaacttgaagacacatacttcaactgtccttattgtccattaaactgataattttgatttttcttgcttttatagattttactatataggaatcaagatttaagaaattttgcattaaaaatagtgtaccaatgcttcatatacgttagttatttgctattatgtagggaagaggattgttatttcaaagatatattaaagaacagttgcatctgaatataatcatgatgcattcaatgaagttcatatccatgaattcactcctaatataccctaataaagtggttgaaactgcaaaaaaaaaaaaaaaaaaaaaaaaaaaacatgccggccgcctcggccttcagaagt

SEQ ID NO: 41188 - DNA, 620 bp, Homo Sapiens
ctggtccctggtctacctccccaccatccagagctgctggaactacggcttctcctgctcctcggacgagctccctgtcctgggcctcaccaagtctggcggctcagatcgcaccattgcctacgaaaacaaagccctgatgctctgcgaagggctcttcgtggcagacgtcaccgatttcgagggctggaaggctgcgattcccagtgccctggacaccaacagctcgaagagcacctcctccttcccctgcccggcagggcacttcaacggcttccgcacggtcatccgccccttctacctgaccaactcctcaggtgtggactagacggcgtggcccaagggtggtgagaaccggagaaccccaggacgccctcactgcaggctcccctcctcggcttccttcctctctgcaatgaccttcaacaaccggccaccagatgtcgccctactcacctgagcgctcagcttcaagaaattactggaaggcttccactagggtccaccaggagttctcccaccacctcaccagtttccaggtggtaagcaccaggacgccctcgaggttgctctgggatccccccacagcccctggtcagtctgacgtggatgagtgctca

SEQ ID NO: 41189 - DNA, 567 bp, Homo Sapiens
  misc_feature (523)..(523): n is a, c, g, or t
  misc_feature (530)..(530): n is a, c, g, or t
gcacgagggttctgccagtctacaatagcagtgaagactgacaaatcagatattcccaatgactgacagcttctcatcttgcctctacctcagttaagtaatgtcaccctgaaacctagcttttctgcacttccatttctgacacctgaaaatgaaaatgataatcctaacttatacaccaagacctgttagcaagatcgattttgtaacagaaattgcttataagttttttatcagtaaggaccatgatcaccatttgtacatacataactaggttgttgagcaaagcatttttgctcatgtttcttaaggaagtagagtagtccttgtgtcagaacacatgttaatccacaaaacgccgcatcccagattccaaattaaaacatcgtttttaggattcttggagctagcctggatcatgggtaaaggaaacattttgccttttgtatcttatactggaatgggatgtctgtaagtcctagaacctctttgagcatatttcttacaagcctctgttttttcncctttanaggaaactttgaaaggattgtgaatactggaaaatga

SEQ ID NO: 41190 - DNA, 579 bp, Homo Sapiens
gctaaccaagaagaaacagagaaaccagaacttcatatggcagtccatttagatgaagaatgatgatataaaatctggttccttcttagcaaaataaaaaacaaacaagaaaagatactaaatgatgttaattttcttactttatgatttagaagtccagttataatattaaaactctgtgacatagtttcttttaccaaaaccatgaacctactccccgtatcaggtattttcgatggtttagaagtactcaagtcacatcacattcaagttagaagtttttttttggtggtggttattttaaatttttaacaaatataaacaccagcagatactattacttgcttaaaaaattggggagggggcacttttcatagtctgggaatgctaagaagttttatttttaatattggtgacagaaagctttaagtatttaagagctctgtattatattggatactcttacagttaaaaacttttcaaaattaatacattgttaattattggaccagttttgaagttggggtttaactgtagttgaaatggaaggactcttgttttacacttgtattaaagata

SEQ ID NO: 41191 - DNA, 880 bp, Homo Sapiens
gcagtgttggggacattatgctggaaagagctcctagcatcagaggattaacactagcagattctgttccatctttgcactgttgcttacctgctgattttcttaactgttcttgtgcaatcgacaatgtgctaacctgcttttctctttttgtaaacgtttttgcattacaggctgcattcttgccttactgtatagaaaaagaaaaaaggctgggtttactattgcacattttaagcttttatacctttatcttcttggaatggtcagattctgaactggacagtcagaaccacaggtctgctgttaagggattttaaattgtgcatttttaaccctacagtgaaataacttaagatatccctgtgttcacagtgtgaggggctgttttatgtcatgttggcataaattgttttgtaaaagggaaagtgtttctaaaggtgtttcagcgcttgtgctgatacaaagtaagttattactttgcaccaggtggtttggccactgaattaatactgtatagcaagagaaacaatcttatttttttggacaacatgttttattaagttcttcatttctgttgattttttttattgcatttatgattcagtggctgggaattgagaatttatttgaaatagaataggtaacacctcagcgtactatagaaaatgcactcagctcaactgctgtgtttaaaatacacattttaaatccctctttacagacactaacattaaagtacatctttctggggttgtaaacatgtgggtagtaccagagtattgtatagtccatgttaaataaaagccaaaactggaatgtgacaacacaaaaaaaaaaaaaagaaaaaaaaaaaaaagggggcggctaaagaaaccag

SEQ ID NO: 41192 - DNA, 912 bp, Homo Sapiens
  misc_feature (13)..(14): n is a, c, g, or t
  misc_feature (868)..(868): n is a, c, g, or t
agggctggtaccnnggtccggaattcccgcggatcaaagtttagctaaatctctgtagcatgcaaatcaaataaattaaaattttttgctattgctttatctatattgtcttaaatatcaaaagctcaggactgaacttaatatttaatcaggttaaattctgaacatgtttctgttttaatttgtcttgtttgtaaacgtatgcaaatacatcacatagattaactggtttctgcactttccatgtgtttgtgggtggaaaaaaattcagtggtttttttttaaaaaaaaaagcaaaaacaaagctacatattgcctaatactctatttcagtgtcgtttattgttcagtttatttccctgattggcacaaacacaagagtttccttgaaccatgtaccaagcaaatacaaaatatttcatgaagaaatccccaggctggcagtttgtgatgaatagttcttgttggaactatatgtattgctgataaaaaaggacgaagtattttcattgagcaaataaaatgaagggctccagaatatgtgctctgtggtcgctgcgcctgggctggcagtgtgctccacagagaggcagccgtcccaggaggttatctacccacacaccccagtcctgccctgccgtgccccccacaggctgctcagtgcctgggaagccagaaacgctgcccgtgaaatacagaacacaggatgcagaagcacgtttgtgtggcagagtctacttgaatcatccaaaacccaagatcgcccctcctgccctctgaacagtataaaaagggcgtgaactgaaatgtggctgccctttttgaaaaaaggttcccataaaagactggagggtccttctgatttcanaaagggagattgaatgtggttctacacccttttccaccctcttg

SEQ ID NO: 41193 - DNA, 632 bp, Homo Sapiens
atttgcagactagaattctagtgctgctgaagatgaatcaatgggaaatactactcctgtaattcctacctccctgcaaccaactacaaccaagctctctgcatctactcccaagtatggggttcaagagagtaatgggtttcatatttcttatcaccacagtaagttcctactaggcaaaatgagagggcagtgtttcctttttggtacttattactgctaagtatttcccagcacatgaaaccttattttttcccaaagccagaaccagatgagtaaaggagtaagaaccttgcctgaacatccttccttcccacccatcgctgtgtgttagttcccaacatcgaatgtgtacaacttaagttggtcctttacactcaggctttcactatttcctttaaaatgaggatgattattttcaaggccctcagcatatttgtatagttgcttgcctgatataaatgcaatattaatgcctttaaagtatgaatctatgccaaagatcacttgttgttttactaaagaaagattacttagaggaaataagaaaaatcatgtttgctctcccggttcttccagtggtttgagacactggtttacactttatgccggatgtgcttttctccaatatc

SEQ ID NO: 41194 - DNA, 858 bp, Homo Sapiens
  misc_feature (701)..(701): n is a, c, g, or t
  misc_feature (742)..(742): n is a, c, g, or t
ccggctaagccgcggcggacaactatgctgaaagccaagatcctcttcgtggggccttgcgagagtggaaaaactgttttggccaactttctgacagaatcttctgacatcactgaatacagcccaacccaaggagtgaggtttgagtcctgctggccggccctgatgaaggatgctcatggagtggtgatcgtcttcaatgctgacatcccaagccaccggaaggaaatggagatgtggtattcctgctttgtccaacagccgtccttacaggacacacagtgtatgctaattgcacaccacaaaccaggctctggagatgataaaggaagcctgtctttgtcgccacccttgaacaagctgaagctggtgcactcaaacctggaagatgaccctgaggagatccggatggaattcataaagtatttaaaaagcataatcaactccatgtctgagagcagagacagggaggagatgtcaattatgacctagccagccttcacctgggactgccacatccccagtgaaatcagcatgtttctcggtgcagatctgaaatcacatccagctcctgatgttttcttctccctctgactgcagaggaagtgttcctacctgcaggaaggcacctgtcacgcagggcgttcactcagaccatctgtgctctgccctgagttcagttgagaaaatcctattatcanatttggatttcctggccccagaacttcccaaagacctgtanaatggagggatttaccacctcacatatgtccagttaaacagtttgtggacttgtaaccgtcgcagcccaatgataccacagtagttttatcacgtgaaaaaaaaaaaaaaaaactc

SEQ ID NO: 41195 - DNA, 689 bp, Homo Sapiens
cacaaagcaaggtgcaccagctatatgaaactatacagcgctggagccccattgcctccaccctccctgagctggtgcagagacttgtcaccatcaagcagctgcacgagcaagccatgcagtttggtcagctcctgacacacttggataccacccagcagatgattgctaattccttgaaggacaataccaccctcttgacccaggtgcagacaaccatgcgtgaaaacctggccacagttgaggggaactttgccagcattgatgaacggatgaagaagctgggaaagtgagcacatttgggagctggagaacaggggttatccctacccctgtgaactctgttaacagcttacatagggtttcccctttactataactctagcatccccatcccatttgacactgggggcaagggttcttcttgcatgtggggtttatacccctcccctgatgaatacagagtggtagctaggggttggttatcatcagaaggtggtctcccctcaggcctgggggataaggacgtgggcccagccacatgccaactcatgtccaatactgctttgcctggtgtggggaaggattgggtcttgtcccccaacacagcttctgtggctgactgtaatactgtacaactgtttctgaccattaaatgctgttgtactctgaaaaaaaaaaaaaaaaaa

SEQ ID NO: 41196 - DNA, 607 bp, Homo Sapiens
  misc_feature (576)..(576): n is a, c, g, or t
aaaggcaaggcggcttctggctcttccgcaggctcagttatgggttcctgtgtgcttagtcatcgggtccgacacaggctggactgatctggggagccgcgaagggcctgccttcacaaagggacgtaacgcaagtactgcgggcagtgtttgaatatggccctgaacaatgtgtccctgtcctccggtgatcagaggagcagggtggcctaccgctcttcccatggcgacctcagaccgcgggcgtcagcgttggcgatggtctccggagacggcttcctcgtttccaggcctgaagcgattcatctaggacctcggcaggcggtgcgaccaagcgttcgggccgagagccgtcgagtggatggtggcggccggagcccaagggaaccagatggccggggccggagccgccaagccagattctcaccttacccaatccctgccgttgaacccgatctcctaagaagtgtgctgcaacagcgtttgattgcattaggaggtgttatcgcagctcgaatttcagtttaaacgaacacctttcctctggccctcacttagcttgtgaacaggcctttntaaaatcctttcttggtgtagcagcaatcgt

SEQ ID NO: 41197 - DNA, 781 bp, Homo Sapiens
  misc_feature (654)..(654): n is a, c, g, or t
  misc_feature (777)..(780): n is a, c, g, or t
ctctagtaaagtactacttaaaagcaatttgaagaatatgttatagttggtttaaactggcttcaagcagtcattaaaaggtggtggtcagaactatcatccaaaacagaaattataaatgatggaaatattcaaattttaaaacaacaattaagtggattatgggaacaggaaaaccatcttactttggttccaggatatactggtaatatagctaaggatgtagatgcttatttattacagttacattgagagatttcatctactaaagagcatttggtttttcaaaacatccctgaactgtataatttacaaaaaaaaaaagtctcgtctgagaactgtgaactgtggaagaaatcaaaactattttttcttttaaaaagccacgtaatgaaaccactaatgaaatcccagcaatctgcttcacattgaagtggaaaaatatccaaaaggagcagcttcaatttcattgaggtgaaagtgcactatgaagattgttcacctttgctgcatttgggagttatatggttatttggtaacattaagaactactggattttaatgcaatcctgcataaaaatataatttatactatgtgaaaaaataagacaggacttaccactaggaaccaccaagaccaatcatcattaactnttttaagattgtgttttattaaaaaaaaaaaacacttaaatgtgtgcagctattttcttatgttgaaagactgaaagttaaaacatgaaaaaaatcatattaaacattttttgttcacactgnnnna

SEQ ID NO: 41198 - DNA, 592 bp, Homo Sapiens
ccctggctgccacctccttccagaatgggctccatgcctggatggtgaatgtccagaacagttgtgcctataaggtgggcgtggcttcaggccacctgccccgcaagggttctggcagtgactgccgtctgggccacaatgccttctcctgggtcttctctcgctatgatcaggagtttcgtttctcacacaatgggcagcacgagcccctggggctgctgcggggcccagcccagctgggtgtagtgctggacttgcaggttcaggagctgctcttctatgagccagcctccggcatagtgctctgtgcccatcatgtgtccttcccggggcccctcttcccagtctttgctgtggccgatcagaccatttctatcgtccgctgacctctggccacaggaagccaggtccaccgcccaccaccctttcaggccatgtttctactcagtgtgcttttcccaaatgatgtgtgtggtgtttctaagagaaacagggcccataaccagtgggcagctttaggagggatggggatctgtttcagatctaggcataacctgtaaatcacaggtgtccaaacttttggcttccctgg

SEQ ID NO: 41199 - DNA, 992 bp, Homo Sapiens
  misc_feature (858)..(859): n is a, c, g, or t
tgagaataattccccgagcaaccttccaaggtcggcttgggtttggaagaataccagcgagctgagctggaggaggacccgatcctcagccgcactccgagtccagtgcatccctcagatttctctgagcataattgtcagccgtattatgcatctgatggtgcaacgtatggttcttcttcagggctctgccttggcaaccctcgggctgacagcatccacaacacttactcaactgaccatgcttctgcagcaccaccttcagttacaaggtcaccagttgaaaatgacggttacatagaggaaggaagcatcactaagcacccttcaacctggtcggtggaagcagtggtcctatttctaaaacaaacagatcctcttgcattatgccctcttgtcgacctcttcagaagccatgaaattgacgggaaggctctgctcctactcacgagtgacgtgttgctgaagcacttgggggtgaagctgggaacggctgtgaagctatgctactacattgaccgacttaaacaaggaaaatgctttgaaaattgaaaaaatccttgtgcaaatttagattgggccaacttctagaggcaccaatgccttcttagtgtggaatcatttttctgccctttagtcgtttttgttttgtagaaagtatctctcaaaatatattatagctagaattgtagaactatgttatagtccagtctacttctttaaaaaccattttaaactgctagatagtattaaaataggccccatagaaaaatcatttctttatagggtctttaaaaaatcaccctttattatatggggtaacaaaatataatttcatggccaggaaaccggaacccnntaaataacccctttgaattccgggttcctcctcggattcgggaaaaacccaaaacaggcctagaaaaagggaatttatcgggggtggaacaaactcccaatgaaatgggaatccatggggaaaattattcccc

SEQ ID NO: 41200 - DNA, 814 bp, Homo Sapiens
  misc_feature (803)..(803): n is a, c, g, or t
ctcttctgacttaagtaaaatggctgctatatacctggtagatgtggaccaaactgcagtttatacacagtattttgacatcagttatattccatctactgtctttttcttcaatgggcagcatatgaaagtggattatggatctccagatcacactaagtttgtgggaagcttcaaaaccaaacaagacttcatagatttgattgaagtaatctatcgaggagcaatgagggggaagcttattgtccaaagtcctattgatcccaagaatattcccaaatatgaccttctctatcaagacatttagtacattaattgctgtcaaagatgaagaagaaggcacatcttgacacagtacctgaatccagctgtgctgtgtttctggagtcctttggaaacatgtgtcccagaggagaagaggtttgacttgcgtgtagaaaacccggcccctgaggaaaagaccccactggttctctgatgacctgggatgcctaactgtctactccctgcaagcctcagagcagccaagtcattggtgttcattttccccacagtgatttttgtaacttctctttctaatgtttttctttatccctttaatacagaaccctcccaaacattggctagtacaacttgatttcatcatgttcatttgatacacaagtgaactggaaagtcacttcccatagaagcaaaagtacttattttctaccctagctggggggcatgtggtgtgcacacacacacacacacacacccccacaccccttttgccgggttcctcgactcatacattccctcgntgctttcccat

SEQ ID NO: 41201 - DNA, 559 bp, Homo Sapiens
cccacgcgtccggagacagtgaagaagtcggccaagaaggtgaaggaggaagcctcttcccctcttaagagtaacaaacgccagcgggagaaggtggcctctgatacggaggaggctgacaggaccagctccaagaagacaaaaacgcaggagatcagcaggcccaactcgccatctgaaggtgagggagagagttcagacagtcgcagcgtcaacgatgagggtagcagtgaccccaaagacatcgaccaggacaatcgcagcacgtccccgagcatccccagcccccaggacaatgagagtgactcggactcgtcagcccagcagcagatgctgcaggcccagcccccagccttgcaggctcccactggggtcaccccagctccctcctcagctcctccagggacccctcagctgcccacgccagggcccacgccctctgccactgcagttcccccacagggctcccccacggcctcccaggcccctaaccagccacaggctcccacagcgcctgttccccacacccacatccaacaggcaccggccttgcaccccc

SEQ ID NO: 41202 - DNA, 690 bp, Homo Sapiens
  misc_feature (68)..(68): n is a, c, g, or t
  misc_feature (673)..(673): n is a, c, g, or t
  misc_feature (676)..(676): n is a, c, g, or t
tattatgtccttgttggcctaactgtgctgagcccagtgccaatggatggcaggaatgcctacataancagggaaaaatctattgatgcaagcacggtggttccatattcttgggatgatgatgttcatctggtcatctgcccatcagtataagtgccatgttattctcggcaatctcaggaaaaataaagcaggagtggtcattcactgtaaccacaggatcccatttggagactggtttgaatatgtttcttcccctaactacttagcagagctgatgatctacgtttccatggccgtcacctttgggttccacaacttaacttggtggctagtggtgacaaatgtcttctttaatcaggccctgtctgcctttctcagccaccaattctacaaaagcaaatttgtctcttacccgaagcataggaaagctttcctaccatttttgttttaagttaacctcagtcatgaagaatgcaaaccaggtgatggtttcaatgcctaaggacagtgaagtctggagcccaaagtacagtttcagcaaagctgtttgaaactctccattccatttctataccccacaagttttcactgaatgagcatggcagtgccactcaagaaaatgaatctccaaagtatcttcaaagaataaatactaatggcagatctgccnatncccaataactttct

SEQ ID NO: 41203 - DNA, 437 bp, Homo Sapiens
ggctgcaggaattcggcacgagaaaaaaaaaaaaagagctgcttcacatataaatgtctatagctagtagcctggccctttaatgtttaatttgaatagatatatctgttttccgtgaattatcttgaaagttttaaacagaatgacctcatagtttttaataaagaatattatttacctaaaatgtgctagtagcatcttgcccagccataaagcaataaacttctcaataatcttaattttgatatttgaataaataatggaaactttctgtattaagggcatgtatcccatcaattggaatcagtaccttaacagaaaaaggcagctcttcaatggaattaaccgtgatataaaatgtttgatataggcagtacttttataaaaaaagataagctgggaaattgctccgtgtaattttttaaataaaaagtcaa

SEQ ID NO: 41204 - DNA, 752 bp, Homo Sapiens
  misc_feature (577)..(577): n is a, c, g, or t
  misc_feature (696)..(696): n is a, c, g, or t
agagataccttaaaagaagaggtcaggcaacgagccacataagctgaagtcacctcgcgttgtttagagaactgtccacatcaatgggagctgtcatcacttccactttgtaaacggagctatcaacaatcctgtactcacttgaagaaatggggccttgctgggaggaacagcatgtaaaactggaacttctaaccccgtcccaaaagaggcggtgtagagcctaatagaagagactaatggataaacctacaagttatttaaatatttaaattattaataaactttttaaagagctggccaatgacttttgaatagggtttgtagaagatgcctttcttcctgtttggttcattgtattgtattaggttaagctctactagggtaatgaaggctctacttttcactttttaaaagtggacaaaagagtgtgattttctttttccaaaaattcctgagtatcaagacgtgcaggtcatgctttggagcctatgcactgtacacaaaggcaaaaccctatgactttggcatcatctgccattgatgtccagcctctgacatgctctttgatttgttnaatgttaaatgagactttaaggctactagaaactagtaattaagtttcttaatggactgagtagcacctacttgtccggctagaatgtttgttgatgtatgagtttagattacactcanaagcactaggacagatgtacatagaaggtgcctactcattgtattttgatgatttc

SEQ ID NO: 41205 - DNA, 545 bp, Homo Sapiens
tgaaactcgaaactactcagaaggattgaccatgcatacccacatagttagcaccagcaacttcagtgagacctctgctttcatgccagttctcaaagttgttctcacccaggccaataagctgggtgtctaaaaggacagcttctcttccactcaatattgccatttttccaaagaaacatgttaaaaaaaaaaattataagacatggactagtcctcattagcatgtttgcatagcaaccagtcaagagcatttacactatttctgctgatatactcaccttagaactgctcagaaccctggtgctttatttttgttttaatcttttgttgccagtgatgattttcctattctgcaaatagtgtatttcctggattacacatagtatggtttcctgaagtattctgataaatgtgttttttaaaacctcaatatactttttagaaaaggagcatctggttatgcataaagcagagctaaaactaaatttctttcatgtcctccctacttcctcagtgtcaatcagattaaagtgtgtaatcct

SEQ ID NO: 41206 - DNA, 685 bp, Homo Sapiens
  misc_feature (648)..(648): n is a, c, g, or t
tttttttttttttttgttcttccagtttctaccagggggccccgtgggcttccagatcacggtgatgaacctctggcctcaggattggccccacatcaccacgccaacaggaccacagcgcactggctccaccccatctctgccatctccactcccctccttttcatgctgtctcccagaaaagctgccagggctctggccttggaattggacttgagatggggagcagacaggggaggatggggaatgtgggacacggtgtggtgggcatgagggcttggaggggtggggatgagggctcaagacacgagagaagatgtccacggtcccaggtggttaacaaagttctggcagctaaaagatgaccgcgttgaaggccacctccttctggctgggaggggcagaactgtggacagattctcaatgcctttttgaagttctgacccaccaaagaccttctgccttcaccctcctccccacctgatgtccctctgtgtctgatagtgatgttggtgaaagttcgtagaccccaggagtagagaaaagcaactggactgactttcttaccagcagttacctagactgaggcaagctgtgtggactcacccaagtatatttcagtactgtcaggctgtgacatcttagcanaaaaaaaaaaaaaaaaaaaacggcatggcctcgtgcc

SEQ ID NO: 41207 - DNA, 578 bp, Homo Sapiens
cccacgcgtccgagaaggggctgcatgtgacagccgcccgcccagcccagcccacactctggactgccaagctggaccgcttcaagggctccaggcaccacaccaccctcatcacctgccaccgtgctgggctcacagagccagattccagcagtccccttgaactgtctgagttcctatgggtggactttgtggtggagaatagcactggtgggggcgtagcggtcactcgccccgtcacgtggcagctggagtacccaggccaggcccctgaagcagagaaggacaaaatggtgtgggaaatcctggtgtctgagcgggacatcagagcccttatcccactggccaaggctgaggagctggtgaatacagcaccactgactggagtgccccagcatgtccccgtgcgccttgtcactgtggacggcgggggggccttggtggaggtgacagagcatgtcggctgcgagtctgccaacacacaggtcctgcaggtgtctgaggcctgtgatgccgtgttcgtggctggcaaggagagccggggcgcccggggggtgcgagtggacttctggtggcgc

SEQ ID NO: 41208 - DNA, 933 bp, Homo Sapiens
  misc_feature (666)..(666): n is a, c, g, or t
  misc_feature (933)..(933): n is a, c, g, or t
acctctgagattccagtggtgtgtgggggcaagatctgatggaaactgaaaaagagaacgaagactaaacaaagagaaaggaaagagaagaaaccctaaatgggcaaaggaaagcacatcctgtttgcggagctttgaaatattggaaccatttctaattgctcctgtttttctgggtaacaccagttttctgtagttgccactaaagcagtagactcttgagtctcacttgtctctgagagagacagaagttagaaagttttgacttggcgattccgaaagtatgcctttgttggcacttaaatgtccagtgagacttcttggcaccttagagccctctgagatactgattattttaggttcttctccctactttcagatgttttcagcccaacactgggtgctctcttccactacagagaatcctgaagaaaagggaaggtgtttcccatgatggtgaatgtcactgccatgaattcctgaatctacctgctgctgggagtcagagtccaagcataacccgtgtagcataaaagcagcgctgtagccctattccagtctttttcgttaatgtccagagtgaacaacaagagttagtcaatcattaactgttgactgttgattctcataataaatgcagcataacgaccacacaaaccaccacanatattgtcccccccttgcgccccccccccttcctcccctttcatccccggtccttatccacaaccccccccgggggaacatgctcttccaataatcccctcccctccttacccacgggggcctaacaaggtaaggtggcaaaataacctcccccgccgccccccttttatttaaacacccctgtcccggccgaaaactctgccatgcgtgccaccccccctgtaaaccaccccctctctcccggggaggcacccaactccgtcaacn

SEQ ID NO: 41209 - DNA, 500 bp, Homo Sapiens
tcccgcccctaacacccagtggctacagtgcgcctgtcggggcacctggagcgctcacctggttgaattcaaagtcccagaaggccccgctggcgtgaagccggccccttacattttgcgaagtgcattatagtccttgtttttctctccctcgtgggggcaacgacccctcccctggcagtaggggtggggtaggtgactctcgctagatccctccaaagcagaccggtggcgatgtcagcggatgtcacgagctcgttagctgcgttcggggaaggttggggcgtcagggagctctcggatcacagcagcccccgccctctcctaggcctggcccggcagagcccccagagtggaccccccagcgactggggtcttctccccactcctccctccttctggtctgatgcggcagcgcgggggctgcggggcctgtttgggacgaacagagctctcccttggtaagacttattttgttaataaatggaatacttggctat

SEQ ID NO: 41210 - DNA, 561 bp, Homo Sapiens
aatgcccaagtcactcagaggacaactacccatattccagactctgagctgtttcctttttaaaaatcatatagacaattagctgtttgaagtgagtattaaatatttcagaagtgtgaatttcatgtatttgagctcctctagttgctgtcggtttttcttctgctgccaacctgtgactcacaaatgactaggatctcttgttctttaattttagggtcttgttccaggactcaaatcagtaacttggtgattacaaggtgctgaatgtgttggtaaccatatcgcaatacacctcaaggaaaaggttcagatttttatttttaaaatattttcatttttttcttgaattttatatccgtttgttcactcgtacatgcctagcctacagaaggggatatatattatgaaatggtcatttttctgaagagaatattttgcttgaaatgcaaaggactgaaagagatttgtaggttgttgattttgttacttcatactggaacttttaaaaagatttcatcaaataaagttttgttttctacttttaaaaaaaaaaaaaaa

SEQ ID NO: 41211 - DNA, 774 bp, Homo Sapiens
tgggaactggtggtgctggggaagttgaagtggaacctggcagctgtcactcctcatgacttcattgagcacatcttgcgcaagctgccccagcagcgggagaagctgtctctgatccgcaagcatgctcagaccttcattgctctgtgtgccaccgactttaagtttgccatgtacccaccgtcgatgatcgcaactggaagtgtgggagcagccatctgtgggctccagcaggatgaggaagtgagctcgctcacttgtgatgccctgactgagctgctggctaagatcaccaacacagacgtggattgtctcaaagcttgccaggagcagattgaggcggtgctcctcaatagcctgcagcagtaccgtcaggaccaacgtgacggatccaagtcggaggatgaactggaccaagccagcacccctacagacgtgcgggatatcgacctgtgaggatgccagttgggccgaaagagagagacgcgtccataatctggtctcttcttctttctggttgtctttgtcactttgtgttttagggtgaaacttaaaaaaaaaattctgcccccacctagatcatatttaaagatcttttagaagtgagagacaaaaggtcctacgaaaacggaataataaaaaagcattggtgcctatttgaaagtacaggccattaagggaatccctgtatatggcgaacaggttgtcgtttgattatgtacacagttaatagtacaatggcttcgcgaaaacaacaccacataacaaaagaga

SEQ ID NO: 41212 - DNA, 570 bp, Homo Sapiens
gacgcttggtcactggagcttctagtggggagtttaccctgtggaatggactcactttcaattttgaaacaatattacaggctcacgacagcccagtgagggccatgacgtggtcacataatgacatgtggatgttgacagcagaccacggaggatatgtgaaatattggcagtcgaacatgaacaacgtcaagatgttccaggcacataaggaggcgattagagaggccaggtttatacacaatataccattttctgtagtccctattgtcatggttaaattattctctaagtgtattctgggtgcagagatgcatgggctctgtcagtttctgggaaactttctgcaccctataaacacaatatttttctttgttttcacacattcaccattttgctggcacctttctgaagtagtgttgtcccggtatcagcctttgcaatatgttagagatgtactgtctgccgcattttgcactggttttctcttttcatttatgattaataatgtgtatacgttattcctttttattatctactgtgtaagacaagaatatttcattccaaata

SEQ ID NO: 41213 - DNA, 750 bp, Homo Sapiens
  misc_feature (718)..(718): n is a, c, g, or t
  misc_feature (750)..(750): n is a, c, g, or t
gaggtaatcctgcttttaaacttggctgggctatcagaccctattctcggctcaggttttgagaagccatcagcaaatgtgtacgtgcatgctgtagctgcagcctgcatcccttcgcctgcagcctactttggggaaataaagtgccttactgactgtagccattacagtatccaatgtcttttgacaggtgcctgtccttgaaaaacaaagtttctatttttatttttaattggtttagttcttaactgctggccaactcttacatccccaacaaatcatcgggccattggattttttccattatgttcatcacccttatatcatgtacctcagatctctctctctctcctctctctcagttatatagtttcttgtcttggacttttttttttcttttctttttcttttttttttgctttaaaacaagtgtgatgccatatcaagtccatgttattctctcacagtgtactctataagaggtgtgggtgtctgtttggtcaggatgttagaaagtgctgataagtagcatgatcagtgtatgcgaaaaggtttttaggaagtatggcaaaaatgttgtgttggctatgatggtgacatgatatagtcagctgccttttaagaggtcttatctgttcagtgttaagtgatttaaaaaaataataacctgttttctgactagtttaaagatggatttgaaatggttttgatgcaatangttatgctatttggacataactcacttgactn

SEQ ID NO: 41214 - DNA, 593 bp, Homo Sapiens
agaatcctttaaggaaaatgttcttcatgtatgagagactaaagtgatttttctaagaaagttcagcccttctctgacttacctggacatttctagatacttccaaaggaccctctgggaatccatagcttcctaatctggagatgggaggtcataagggagacgctgtggggttccttgaagtttcttgggttcacagaggagccccctcacttggtgttctcccgtgagccagcctccacctgccaaagacactctggtcctcgtatagtgagtaatggggctcagggcctctccaacaacagagaggagctgatgctgtagggctgaccccgtgacttcctgagtcctcaccctgtccagtgctttgagattcttcccacctccccatcctcaccagccggatcggtcgctgtgcagtgtggtcagcatggtgaagaaagtcatttcctcgttgggcagtattcctctttatctctcattacactggaaatgttatttctgctgtatcatccgtgctcaacgttttagtctgtcaggctcaccttctctctggaaagaatttgcttaacttgacattccatgtgccgcta

SEQ ID NO: 41215 - DNA, 652 bp, Homo Sapiens
  misc_feature (614)..(614): n is a, c, g, or t
  misc_feature (629)..(629): n is a, c, g, or t
gcagccggctttgccatcggcatcgtgggggacgctggcgtgcggggcaccgcccagcagccccgactattcgtgggcatgatcctgattctcatcttcgccgaggtgctcggcctctacggtctcatcgtcgccctcatcctctccacaaagtagaccctctccgagcccaccagccacagaatattatgtaaagaccacccctcctcattccagaacgaacagcctgacacatacgcacggggccgccgcccccagtagttggtcttgtacatgcgcagtgtcctagtgcccatcgtctgtttccccggccttgcccccgcccgccccgtgccgtggacatctgggcccactcatcgcccctccaggcccccggcgccccaccccctagagtgctctgtgtatgcggatgatttagaattgtcatttctctttactggatgtttatttataaagatctggcctgttcctgcgtctgcggagcggcccttgtctcccagctatctataaccttagctagagtgtcgccttgtgggttcctgttgctgagacttcctggatggagccgccctcaccgccgggcccgtggccctgcgcggagctgtgtccaatanagttcttggatgtanaaaaaaaaaaaaaaaaaaaaaaa

SEQ ID NO: 41216 - DNA, 557 bp, Homo Sapiens
gtcaaataactggatgttacttatttttgaactgaatacatcttttcctaaaatgtacaaaaatagtaggagggaatatttattgggaacaaagctatctttcaagaacatgaataaaatctttttctggacatagtaaaatttttctccataaataattgtacttaattgtggatgactgacaaatttttattgtatattcctacagatcagtcataattaaattacctgcattatagggtttataaaatttttatattttacaatgttcagttctaactagtggaaagttactctagctttttaaaaggctgtttacaattctgtgtaaaaatagagcagtatctactcaagtttgtgtaaatgttagggataatttgaaaaatatatatatttaatacattaatttctctggaagcaggaggcatgtttaaataactattaaaataatttatttttctagccataaaggatggaagtcaagaactttttgttgtttagtcatgttaagtatagtttatgaaattaacttgtaaataaaagtgtaaaatattttc

SEQ ID NO: 41217 - DNA, 626 bp, Homo Sapiens
ccgggatcgcaactgaagccgcccccagagctctgccctgaggatataaacacatttaaattactgtcatatgcttcctattgcattgagcatggtgatctggagctagcagcaaagtttgtcaatcagctgaagggggaatccagacgagtggcacaggactggctgaaggaagcccgaatgaccctagaaacgaaacagatagtggaaatcctgacagcatatgccagcgccgtaggaataggaaccactcaggtgcagccagagtgaggtttaggaagattttcataaagtcatatttcatgtcaaaggaaatcagcagtgatagatgaagggttcgcagcgagagtcccggacttgtctagaaatgagcaggtttacaagtactgttctaaatgttaacacctgttgcatttatattctttccatttgctatcatgtcagtgaacgccaggagtgctttctttgcaacttgtgtaacattttctgttttttcaggttttactgatgaggcttgtgaggccaatcaaaataatgtttgtgatctctactactgttgattttgccctcggagcaaactgaataaagcaacaagatgaaaaaaaaaaaaaaaaaaaaaaaaaaaa

SEQ ID NO: 41218 - DNA, 832 bp, Homo Sapiens
gggaaactgtttgattttgtcaacgcgaaaaagctcaacatcaaaaaccgaggattgaaagagggcatgaacccaagctacgatgaatatgctgactctgatgaggaccagcatgatgcctacttggagaggatgaaggaggaaggcaagatccgggaggagaatgccaatgacagcagcgatgactcaggagaagaaaccgatgagtcattcaacccaggtgaagaggaggaagatgtggcagaggagtttgacagcaacgcctctgccagctcctccagtaatgagggtgacagtgaccgggatgagaagaagcggaaacagctcaaaaaggccaagatggccaaggaccgcaagagccgcaagaagcctgtggaggtgaagaagggcaaagaccccaatgcccccaagaggcccatgtctgcatacatgctgtggctcaatgccagccgagagaagatcaagtcagaccatcctggcatcagcatcacggatctttccaagaaggcaggcgagatctggaagggaatgtccaaagagaagaaagaggagtgggatcgcaaggctgaggatgccaggagggactatgaaaaagccatgaaagaatatgaagggggccgaggcgagtcttctaagagggacagtcaaagaagaagaagaagtaaggtaaagatggaagaatcacgcctctagggctcatctccagtcgtctcaggcactagcgagagctcagagcagagttgttctgtgtgaactctcggaagacagacaaagagagagagacggaccgagagaactacgtctcccactcagacactcgtcatatgacgaa

SEQ ID NO: 41219 - DNA, 599 bp, Homo Sapiens
ctcatctcagagcgtgcagcatgagaacacctaccgggaccccatagcaaagtattgctatggagaaagcccgcccgagctcttccccgcttgacgggtgcagcggacttgctccagcctgggtgaggaggccccgctgaagaactcgcctcctgggacccagcttcagccatcgggccaggctgcaggaagaagacaaaggcagcgtgaggaaaccttggctttgaccccttctcatgttgtcatctttggcttcgctcaccacccgggcttaccagatggaactcttctgtaaagcagcttggcccctccagccagtcccattcgggaaagatgaaaccggaggccgggctcacggtggtggtggagttcttggatgactcagccctgggacctgcacagggacctgtgacttgtgttcatcgggggccggtgtcacttccagttttgatccaggctctttcactgtaaaattatttattggattcctttggagtaatgggaacattctaatgttttatgtaggaaaatgccttgccattctagttgaatatgttcaaggaaattaaaaaaaaaaaaaaaaaaaaaaatgcggcgtt

SEQ ID NO: 41220 - DNA, 655 bp, Homo Sapiens
cgcgtccgagctaaagcagctattgactggtttgatggtaaagaattctccggaaatcctatcaaggtctcatttgctactcgccgggcagactttaatcggggtggtggcaatggtcgtggaggccgagggcgaggaggacccatgggccgtggaggctatggaggtggtggcagtggtggtggtggccgaggaggatttcccagtggaggtggtggcggtggaggacagcagcgagctggtgactggaagtgtcctaatcccacctgtgagaatatgaacttctcttggaggaatgaatgcaaccagtgtaaggcccctaaaccagatggcccaggagggggaccaggtggctctcacatggggggtaactacggggatgatcgtcgtggtggcagaggaggctatgatcgaggcggctaccggggccgcggcggggaccgtggaggcttccgagggggccggggtggtggggacagaggtggctttggccctggcaagatggattccaggggtgagcacagacaggatcgcagggagaggccgtattaattagcctggctccccaggttctggaacagctttttgtcctgtacccagtgttaccctcgttattttgtaaccttccaattcctgatcacccaagggttttttt

SEQ ID NO: 41221 - DNA, 633 bp, Homo Sapiens
ccggtaatattgtatgcttacaaaagctgtaaaaatgaacttttaaaactcccaccagcttttaacagtataatgttaaaaatatactgtaatttttgttaatctcaagtttgggtttttaaagacagcaagtctggtcattcagtttaaatgaatggttatactgtttttaatgaaataagccattttcttgttgttttcagtactacatagttggatttgtttgttctagtttctccagtttttgtcaacttattgtatggtaaaacatagattttttccccccaaacttctgttttataatatgtaatttttcatgaaaagaaagggctcagaaaaattaggatgtgattttggttggttttaaattactgtaagttttagattctaaggttcaagatttttaaaatttgatttaaatgaagaaatggatttttctctctgcccctccctgccattcatattttctgcataacactattaataatatcaacctccacagccccttattttattatttccaataattccaagttcatatagaactgataatgtagcaagccccaagtatgataataggcagactattcccaactttctgtctagtttccagccattgaagtgaactgctaa

SEQ ID NO: 41222 - DNA, 910 bp, Homo Sapiens
cttctgttaaatttgatgtcaggtcaacatttttcagaaatgtatttattctcagaaacagaaccagagagaagttaaacaaaaggttatgtaactgttcctttaatgttgtaattgaaaacttggtttagcgtcttttttttctttctctttttttttcttaaaatgccaactaaaataattagaaagtagcttatttattgcatgcttatacattgatattggaattggaattggttgttaatttctgttactggctttgctagaattcatatgtgcataaataacactaatatttatcatcttgggggctgttctgtgatctattacatgattttgctctctttttatttttctagtatcaaatgtgttctggctgagtgaatttggatagatataatatgcaagctaattggactttttcatttttctcattaaaaaaaggaagaagtagtccactttttgctagcatactattctgagacttacattaatttgggaaaagtcaagggtcaacaaattttgtgtctgtgaggggccagatagtaattatataggctttgcaggctgtgtgatttctgttgcagttattcagctttgccatgtagtgtgaacacatcatagatatatgtaaaccttactaataaaaacgaagtgggttatgtgggcacacaggcagtagtttgttcatctctgctgtaagttattgggttaactttgtgggagaattaccgatattcggcttgggcaagttttcggtacggcggtgtggttttgggcacagcgagtgattagctatcttcagggtgacacccaaaaattattgcctccttcatattgttggcgtgaagcaaaaacattaggccgtttaaaaacgttggttggcttaagaaaaaggcggcaaatcaca

SEQ ID NO: 41223 - DNA, 727 bp, Homo Sapiens
cgcgtccggtacctgttaccactttcaaaatttctgtgctaaacagtgttacagtcgccaagagcccataaagggagccctcctggaagtggatgaggccttgggtctcggctcttcattgcttcctgagctgcagcagatgcctttacaaccaagctcaccgaggacgtctgtctcccatattaccctggcagagggccaggcctgttctacacggccggggtttcaacaaggtactgatgtcttctgcccttgcctcttcgacaggcaagtaataagacttaagtgaagagaattctttaggcacacaaattcacatttgatgtaatctcattatacttcctgatctgtgattgaaaactttcatttcgtaactagtatgtctgtcccacctttaaaaagtttttcattatgaaagtaagtatttgttagaattaagtctatttaaatgaaaaaaacttagatatgagtctgcatggcctcaggaaaatgatgttttaaaatagagattttaggttgtctgcactctagcttttttgtcgttttcttaaggcttttttaactgcatcaaaaattcagatacgaaacatacactaaaaaataatacatcatatcttaatttccactgaacttgatttaaattcagagttacacagtatgaatatcacaatcagatatgtttcaaaaaggtctgaacaattgattttctgaaaccatgaaggactac

SEQ ID NO: 41224 - DNA, 508 bp, Homo Sapiens
ggatgggccagaatcagtttttcgagtacacgtcccagaaagaaatacgctataacacccaccagcctgagggctgcattgctgtggaagcaggaatggatacccttatcatgcatctctgcgaagaaactgccccagagaatcagaagttcatcttgcaggaggatggatctttatttcacgaacagtccaagaaatgtgtccaggctgcgaggaaggagtcgagtgacagtttcgttccactcttacgagactgcaccaactcggatcatcagaaatggttcttcaaagagcgcatgttatgaagcctcgtgtatcaaggagcccatcgaaggagactgtggagccaggactctgcccaacaaagacttagctaagcagtgaccagaacccaccaaaaactaggctgcattgctttgaagaggcaatcattttgccatttgtgaaagttgtgttggatttagtaaaaatgtgaataagctttgtacttattttgagaactttttaa

SEQ ID NO: 41225 - DNA, 627 bp, Homo Sapiens
ggagattcctcgaaactagtgtgtgtttattaaaaggagaaaggataacaatagaatgttctaaaaccagaagtccaagtgcgtgtctacttatgggaccaataaagaacagacatttgatttgaggtgaggtaaaagcctgaaacatggaatggcattctgttttgatggattttcatttcttcgcacttctgagacggcaaagccaaccacttagaagccttccacatctttgtcacctgcctggctcctgctctctgatgtacctctgggtagtgagatggaaatggtgcctgcagaagttggggagaaggatacttttgcacagcctccatgatgtctttattgcaaatatggatgacaagggtctctgttacaggggcctcagagcaccttcgtttctcctctagaccagggacaggtgtagagataaggactggcaaccagagcctcagcatccaaagatggactgaagtgggatggctgacaggcacataacttacgggaaagggaatttcatacatacgatttttgttttgtgggtaggagggcttatcatcaacactgattttataatctgacaataaatgtctttcattaaagagtttaaaaaaaaaaaaaaaaaaa

SEQ ID NO: 41226 - DNA, 627 bp, Homo Sapiens
ttttcacttaagttgaaatttttgctttaaagagcttttaatgagtttttctgttatcataattttggtccggttattcacttgagttgttgcttatactgttgtcaggtacagtagagagaacatggagcctgctgagatcttctctgttattcctgatcctaagtcatgtatatcgaaggctttgatttagagtaatgcatgaggccagtgtagcggggtcgaggcctgcccatgagtcaggggagctcagtctccctggcctaggcagttgtcctgaccttgagaagacatagatgaagcattttatcatcattagacttaaattttaattcttcagaatgtcagaagttgataggttgttaaatacatttatataatacattaaatatgtgaaattaatacaccttcctacattttgaaggtgatgcatagatcccatagtgtgcatcatgttccttatatgaaaacgtttaaattactgggtcttttccattaaactacttttgtatggcttagataaatcttccattagtgttcatttttatagaattatgctgttaaaactactttaggtgaacaaataaacttgtctattatatattaacgcgactgaactacagtaaa

SEQ ID NO: 41227 - DNA, 607 bp, Homo Sapiens
aaactaacagcacacgttaggaggagtcctcatcagctgttctcattgccagtgagatatattcagtattgtagatactacactaatttccaacataagaggcaggaagagttttgattctatccttttttactaaacagttttattatgacactagatacagtaaatttttagaaaaaaataccatttacagtattattgtgaaccatttaacccttttgatccaaggccccggaccaaggggatactgtaatcaggttatgtacaccaacctctgcatcagttgcttctatagagcatcagccctcatgtttcattgtcttaatgtcggggagcagcctggtgtcctgccccaggtgtccgcatttttgcatggtaaggaaaaggcttacttgcccttcagctcataaaagcagaaggtgtgctattcacagtaccatgcgagtagcccacagttaattcccggcagattctttggctgtgttttatctttaatgaacgtttctgactaatattttgttgtaaaccattaagtaatgtaacgcatgtaagatgcttagggtgcctggccaggactccgtggtttcctgttgtgacagtaataatg

SEQ ID NO: 41228 - DNA, 780 bp, Homo Sapiens
ggcaggttttgggttttctagtactgttgaaaactgcaagtattggctatttgtatacttagccataacttggtgaaaaaaaacctgagcagtgtctatgtattaatgcgttggaaagaaagctgcttgtgtttgctttgttaattgcctcaggatatttcttttaamataagctgttttaagaggaacagaagggaaatctgctacctagtctatacacagcgtgaacctcacagggggcttctgataccctcaaacatggagaacagtaagggagcagagtggttaaggactttcaggaacttaactattctggaataaggaatgaatcaactgaccttgggccagcaggtttttaactaaattgttacttgcctttctcacccagttaatcagtctctgtacttgtttccctttttgaaacaagtgtcttggttaactaattctgttttatggttgtgctaaattcatagcaggtgccttattctttgcttttagtcaaaccattccatatcagaattttccttggtttactatagatatttggctttaagttgttgtttgtgttttttaatgtacaatgttctgataaatttgactgttaaattgctatagctagcaatcattttacatatgtaaaattgcattccctttgtatttcatgtgtaattcaccaattaagtgcagtttatattcaggttggattatgcatgtttaggtaaacgaaagctgtgtcttacttgatttattctttaaaaataaagttccctgaatatttga

SEQ ID NO: 41229 - DNA, 683 bp, Homo Sapiens
  misc_feature (657)..(657): n is a, c, g, or t
  misc_feature (659)..(659): n is a, c, g, or t
  misc_feature (661)..(661): n is a, c, g, or t
tcccggggggcggtggcgacgacggggcggggcgcgcaggacccccgcggggagactggggggtcgcatcgcgccagcacaatgaagaattttggcagtataataccttccagtactggaggaatcctttgcctcctattgatctggcagacattgaagatttaagtgaagacaccctgacagaagcaacacttcagggcaggaatgaaggggctgaggttgacatggagtcctgatgtaaggagccgaagcagtgggattggctgatttgaggagatgtctctaagtgaattctcgtattcttaagggaaaagttattttccatacttgaagttatatttccaaacctgagaaatgaagaaagattgttctgacattaaatacctacagttactactgaacctcttaataaggatttgtcaaggatagagtacagttgtaggggaagtattttatgtatgcattcttagagcaaaaagttttgtttaaattctagaattgaaggtactgatcttataaaaagaaattctagcagttttagaaataggtgggaaaaactcaaatattcctcctatctgcaccaaaaagtttatttgtggtatataaaatgaatattgttttataataacttgttaataaagtactttctaatacatnananaaaaaaaaaaaaaaaaaaaaaa

SEQ ID NO: 41230 - DNA, 743 bp, Homo Sapiens
  misc_feature (270)..(270): n is a, c, g, or t
tcgggaagtggacactgtccagcgcggctcagacccaccagctgcggcgactgcggggcccagccaagtgccgcgagtgcgaactcttcatggtcagcgggacggagtgtgaggagtgctttctgacctgccacaagcgctgcctggagactctcctgatcctctgtggacacaggcggctcccagcccggacacccctttttggggttgacttcctgcagctacccagggacttcccggaggaggtaccctttgtggtcacgaagkcancggctgagatagaacaccgtgccctggatgtgcagggcatttaccgggtcagcgggtcccgggtccgtgtggagcggctgtgccaggctttcgagaatggccgagcgttggtggagctgtcggggaactcgcctcatgacgtctcgagtgtcctcaagcgatttcttcaggagctcaccgagcccgtgatccccttccacctctacgacgccttcatctctctggctaagaccttgcatgcagaccctggggacgaccctgggacccccagccccagccctgaggttatccgctcgctgaagaccctcttggtacagctgcctgactctaactacaacaccctgcggcacctggtggcccatctgttcagggtggctgcacgatttatgggaaaaacaaagattgtcttgccaaacaaaccctgggggcaatttgttgttttggggcccgaacacatgcctggcgggcccgcc

SEQ ID NO: 41231 - DNA, 616 bp, Homo Sapiens
ggcagagcagcaagtggcccttagcgccccttcccataagcagctgtggtggcagtgagggaggttgggtagccctggactggtcccctcctcagatcacccttgcaaatctggcctcatcttgtattccaacccgacatccctaaaagtacctccacccgttccgggtctggaaggcgttggcaccacaagcactgtccctgtgggaggagcacaaccttctcgggacaggatctgatggggtcttgggctaaaggaggtccctgctgtcctggagaaagtcctagaggttatctcaggaatgactggtggccctgccccaacgtggaaaggtgggaaggaagccttctcccattagccccaatgagagaactcaacgtgccggagctgagtgggccttgcacgagacactggccccactttcaggcctggaggaagcatgcacacatggagacggcgcctgcctgtagatgtttggatcttcgagatctccccaggcatcttgtctcccacaggatcgtgtgtgtaggtggtgttgtgtggttttcctttgtgaaggagagagggaaactatttgtagcttgttttataaaaaataaaaaatgggtaaatcttg

SEQ ID NO: 41232 - DNA, 667 bp, Homo Sapiens
  misc_feature (644)..(647): n is a, c, g, or t
  misc_feature (649)..(652): n is a, c, g, or t
  misc_feature (654)..(655): n is a, c, g, or t
  misc_feature (657)..(657): n is a, c, g, or t
  misc_feature (661)..(665): n is a, c, g, or t
ggacgcgtgggtgaaaagtgaggcagctagttcttcctattccattctcgaccaacctgccctttcttaatatgactagtggtcttgatgctagagtcaacttactctgttgctggctttagcagagaataggaggaaccatatgaaaaagatcaggctttctgacttccatccccaaaacacatttaccagcatactccaaactgtttctgatgtgttccatgagaaaaggattgtttgctcaaaaagcttggaaaatactacacactccctttctccttctggagatcaacccacattagagtgtctaaggactcctgagaattcctgttacagtaaacaaaactaacgtaatctaccatttcctacactatttgagcatggaaatcatagtccccactctgtgaaaacttaacgctttttggaagacatttctgtagcatgtcagtttggagaaatgatgagctacgccttgatgaaagaaccgtgttggtgctgctaagtttagccattatggtttttcctttctctctcttaagccttattcttcaactaaaagatgaggattaagagcaagaagttgggggggatgtgaaaataattttatgaggttgtctaaaataaagagtagtttcttaaaaaannnnannnnannanaaannnnnag

SEQ ID NO: 41233 - DNA, 460 bp, Homo Sapiens
ggtatttaatacgaaatgtggaagggaatgctggagtaaaatatcccctctcccctccgcccgcccacccgcccgcccgctcgcccgctcgcccgctcctgtggtttttctgagcgtgcggcccgggaggggatgctgaggctgatggagctgcctccagggctagggccactcaccggagagggcggggcctgcacttgaagtcaggccgcacctgtctgtttttggaagggtagccgacaaatccttccagagggaaagttctttgtttaagtgttgtacttgaaaaggtcaatcttcagggcttcctgtttgaagtcaagtcagaggtaaaccggtcagttacagaagcaggatttctaggatttctaactccagctgttcccatactgtctagtttaaattatggctgttaaggccgggcgggtgactcaggcaggtaatcccagaactttgggag

SEQ ID NO: 41234 - DNA, 606 bp, Homo Sapiens
  misc_feature (12)..(12): n is a, c, g, or t
attggccctcgnggccagaatcgacacgaggcttgcctataattctataaagagaaatgacattccacaaatgtcaagcatatcttttttacacagattatgcaaagttaagagttgtatcttatcccgttagtacagtatgtaatagtgggtctgctgctactttctgttttaaggtgtgaggtaacaattcaatctcttcttcaaatcaaaatgagaattctctggaataacagattcttgtttggtaaattattcacttcccttaattttatcttgccttgtctcttgccatatttgctgtttttatggataaataagatttatggtttagtacttgtgtctttatggcacaggttcaatttctacagtgaaaatggcataggttgcaggaaagaatttctgcatctggtacatgggcaagtaagttatttagttctaaccacaaataacaagtagtttccaaggaaatttcagtggctctctggtttcttaacaaaagagaaagcacagcactttctgatccaaactgtcttttttttgtatctgttatttaaagcccagtggatatttcaattaaaaaaaaaatctaaaaaaaaaaaaaaa

SEQ ID NO: 41235 - DNA, 390 bp, Homo Sapiens
ggtgaatacctgggtttatttactattactctgtgttgctattttctaagaaagaatacagcactagacttcatcctagagtttcaggtaggctaatgcttagtgcctgagtatttaaattttcttttcaaacaggcacagttcacattgctagtatggtcctaactttctgttattttagaatgttaacatgattcacattatactttctcttagttaataatacagtaggccttttgtttattaatggaagagtactccccacacctaagaccagattcttatatctccctggttacagtgcaatttggagatttttttttttttcctggatggtaagatttgaaatatttacattaacataggcaaaaaaaaaaaaaaaaaacgcgg

SEQ ID NO: 41236 - DNA, 608 bp, Homo Sapiens
  misc_feature (482)..(482): n is a, c, g, or t
ggtaaaagagataatgttgacatgatactctattgttctgcttcctggcatcctcacatttgtggggataattttgcttcctaaactgatcacaactattaaacttagagaataataatagtctttctgatgaggctgccatattttgagcatcaatcttatgataaactattcttgtcacttggcatcaacctcttcatgataaatatctactactgagacacttcaattcacagttttaactggtgaatacctgggtttatttactattactctgtgttgctattttctaagaaagaatacagcactagacttcatcctagagtttcaggtaggctaatgcttagtgcctgagtatttaaattttcttttcaaacaggcacagttcacattgctagtatggtcctaactttctgttattttagaatgttaacatgattcacattatactttctcttagttaataatacagtaggcctttngtttattaatggaagagtactccccacacctaagaccagattcttatatctccctggttacagtgcaatttggagatttttaattattccgtggatggtaacgatggaacatatttacattaacat

SEQ ID NO: 41237 - DNA, 591 bp, Homo Sapiens
ttggtgtaggagttgagacctacttcacagtagttctgtggacaatcacaatgggaatccaaggagggtctgtcctgttcgggctgctgctcgtcctggctgtcttctgccattcaggtcatagcctgcagtgctacaactgtcctaacccaactgctgactgcaaaacagccgtcaattgttcatctgattttgatgcgtgtctcattaccaaagctgggttacaagtgtataacaagtgttggaagtttgagcattgcaatttcaacgacgtcacaacccgcttgagggaaaatgagctaacgtactactgctgcaagaaggacctgtgtaactttaacgaacagcttgaaaatggtgggacatccttatcagagaaaacagttcttctgctggtgactccatttctggcagcagcctggagccttcatccctaagtcaacaccaggagagcttctcccaaactccccgttcctgcgtagtccgctttctcttgctgccacattctaaaggcttgatattttccaaatggatcctgttgggaaagaataaaattagcttgagcaacctggctaagatagaggggctctg

SEQ ID NO: 41238 - DNA, 870 bp, Homo Sapiens
ggtacaaaaaaaattagctgggcatggtggtgcacacctatagtctcagctactcgggaggctgaggcaggaggatctcttgagcccaggattttgaatccatcgtggacaacatagcaagattccatctctaaaaaaaatgaaaataaacataagccacaaggaatgggtgaaagattattgtaatgtgctttaactaaataggtaaatatactaaacaaatgctaaaactcagttttaggatgaaaccattgttgatatccacatcagtccctgtttagaaaacatttaaaatgacttttagttatgtacagtacgttggcaatgaatacattaagcttcaaaatttggtagtgctctcgaatatgtatatttgtatttttcaagcgaagttctcttattcacatataaattaaaggtgggttggtactgatatcaaaaaatgtttatgtttttagaacagacatttcagtcacttgcattcttaggtattcccaacccaatatgactgacatcaatagattgcattttaaaaatattggttcgatttttctatttttcaaaaataaaattctggttttctaactaaaaaaaaattccccgtagataaaacacccccccccttgcgtcctttttctatcccccgttacagcgttcttgccctcgccctccttcgatccgaacaataattgaaacatttgccctttgtgttgccgccgccttggtgctcgaaaaaaaatttttaaaaaaaattctcgtggtggggcgcgcgggcgcctaatgagggtaaggggaaccggggcgcacaaacttttttcccaagagagaaacccgcgggcaccaaaaaaaggcggtcggaatccctcccac

SEQ ID NO: 41239 - DNA, 683 bp, Homo Sapiens
gtcctgtttgcagggaagccccacttgaaggaagaagtctaagagtgaagtaggtgtgacttgaactagattgcatgcttcctcctttgctcttgggaagaccagctttgcagtgacagcttgagtgggttctctgcagccctcagattatttttcctctggctccttggatgtagtcagttagcatcattagtacatctttggagggtggggcaggagtatatgagcatcctctctcacatggaacgctttcataaacttcagggatcccgtgttgccatggaggcatgccaaatgttccatatgtgggtgtcagtcagggacaacaagatccttaatgcagagctagaggacttctggcagggaagtggggaagtgttccagatagcagggcatgaaaacttagagaggtacaagtggctgaaaatcgagtttttcctctgtctttaaattttatatgggctttgttatcttccactggaaaagtgtaatagcatacatcaatggtgtgttaaagctatttccttgccttttttttattggaatggtaggatatcttggctttgccacacacagttacagagtgaacactctactacatgtgactggcagtattaagtgtgcttattttacatgttactggtagaaaggcagttcaggtatgtgtgtatatagtatgaatg

SEQ ID NO: 41240 - DNA, 587 bp, Homo Sapiens
taatagcatacatcaatggtgtgttaaagctatttccttgccttttttttattggaatggtaggatatcttggctttgccacacacagttacagagtgaacactctactacatgtgactggcagtattaagtgtgcttattttaaatgttactggtagaaaggcagttcaggtatgtgtgtatatagtatgaatgcagtggggacaccctttgtggttacagtttgagacttccaaaggtcatccttaataacaacagatctgcaggggtatgttttaccatctgcatccagcctcctgctaactcctagctgactcagcatagattgtataaaatacctttgtaacggctcttagcacactcacagatgtttgaggctttcagaagctcttctaaaaaatgatacacacctttcacaagggcaaactttttccttttccctgtgtattctagtgaatgaatctcaagattcagtagacctaatgacatttgtattttatgatcttggctgtatttaatggcataggctgacttttgcagatggaggaatttcttgattaatgttgaaaaaaaacccttgattatac

SEQ ID NO: 41241 - DNA, 634 bp, Homo Sapiens
ctaacaccatcttcagataggcacaccatgcataactcttgggaagttgagctttgctaaataaaagatatttctgctgatcaaagatgatcaagctttctgtgtattggaacagaaagtaacaaagaggaatgagccaggagaacaaactaattcctttaaataaataaataaaaaaaatgcaaatgtccttcaccagtaaagcaagcaaatttttaaaatctctgtttttgaaatctactcgtcaaagagttttcagaggcaatgaaaggggaacagatttttcattgtaatagtggaagttgtgtgatagttaggagatatcaacatgcatttttaatcttttccttagatgaaagagatggcttttggcagtgtgttctaaccagaaagaaaggatttgtattactctccaaatctactgtactgtcagcttcactgcacctgagatacaagaataatggtgtcttgagtcctcatattaacagtctgtcacagaatgcagctcacgtattgatggcatatggtatagagcaccatagcctaactacagactgtgaataaaggcatttgactatacattaatttctgatactctaagagagtcttttactgttttgtactcctatatgta

SEQ ID NO: 41242 - DNA, 488 bp, Homo Sapiens
taaaaaaagagaatactcttgtggtcccctgatgtctctttctaggatgtgtgtcactttgcttcagtgacagccctcccacccagcctggctctgctggccccgaactgaacctctccaggctctcctgttgctttgccatggagccaggtcagctctctgtctgttctgctgggtaacaaggtttggcagttcctgtttctctgggcttaagtcaaggccacagaattctttttcttccctgaaagctggcagcttttgttacagaagattctcaggatgaaggcaggggctgaggcctctgctactggctgcccctttccatccagtggctgctgtttcccaagacgggctaagcgtttcttatctgaaatgcttgggacaggagtgttacagattttggattttttcagactttggaatatttgcatatatacataatgaggtatcttggtaggtctcatgtctaaacatgaaattcattcatg

SEQ ID NO: 41243 - DNA, 543 bp, Homo Sapiens
cgtccgatttaaatgggtaaagccatttacataatatagaaagatatgcatatatctagaaggtatgtggcatttatttggataaaattctcaattcagagaaatcatctgatgtttctatagtcactttgccagctcaaaagaaaacaataccctatgtagttgtggaagtttatgctaatattgtgtaactgatattaaacctaaatgttctgcctaccctgttggtataaagatattttgagcagactgtaaacaagaaaaaaaaaatcatgcattcttagcaaaattgcctagtatgttaatttgctcaaaatacaatgtttgattttatgcactttgtcgctattaacatcctttttttcatgtagatttcaataattgagtaattttagaagcattattttaggaatatatagttgtcacagtaaatatcttgttttttctatgtacattgtacaaatttttcattccttttgctctttgtggttggatctaacactaactgtattgttttgttacatcaaataaacatcttctgtg

SEQ ID NO: 41244 - DNA, 826 bp, Homo Sapiens
cgggaaccctggatgacagtgccaccatttgccgtgtctgccagaagccaggcgatctggttatgtgcaaccagtgtgagttttgtttccacctggactgtcacctgccggccctgcaggatgtaccaggggaggagtggagctgctcactctgccatgtgctccctgacctgaaggaggaggatggcagcctcagcctggatggtgcagacagcactggcgtggtggccaagctctcaccagccaaccagcggaaatgtgagcgtgtactgctggccctattctgtcacgaaccctgccgccccctgcatcagctggctaccgactccaccttctccctggaccagcccggtggcaccctggatctgaccctgatccgtgcccgcctccaggagaagttgtcacctccctacagctccccacaggagtttgcccaggatgtgggccgcatgttcaagcaattcaacaagttaactgaggacaaggcagacgtgcagtccatcatcggcctgcagcgcttcttcgagacgcgcatgaacgaggccttcggtgacaccaagttctctgctgtgctggtggagcccccgccgatgagcctgcctggtgctggcctgagttcccaggagctgtctggtggccctggtgatggcccctgaggctggagcccccatggccagcccagcctggctctgttctctgtcctgtcaccccatccccactcccctggtggcctgactcccactccctggtggccccatcccccagttcctcacgatatggtttttacttctgtggatttataaaaacttcaccagttaaaaaaaaa

SEQ ID NO: 41245 - DNA, 636 bp, Homo Sapiens
catgcaagtaaagaaaaaaaaaagaaagacttttgtttaaatttgtaaaatgcaaaactgaatgaaactgttactaccataaatcaggatatgtttcatgaatatgagtctacctcacctatattgcactctggcagaagtatttcccacatttaattattgcctccccaaactcttcccacccctgctgccccttcctccatcccccatactaaatcctagcctcgtagaagtctggtctaatgtgtcagcagtagatataatattttcatggtaatctactagctctgatccataagaaaaaaaagatcattaaatcaggagattccctgtccttgatttttggagacacaatggtatagggttgtttatgaaatatattgaaaagtaagtgtttgttacgctttaaagcagtaaaattattttcctttatataaccggctaatgaaagaggttggattgaattttgatgtacttatttttttatagatatttatattcaaacaatttattccttatatttaccatgttaaatatctgtttgggcaggccatattggtctatgtatttttaaaatatgtatttctaaatgaaattgagaacatgctttgttttgcctgtcaaggtaatgacttt

SEQ ID NO: 41246 - DNA, 709 bp, Homo Sapiens
ttgaagaaagtaagatcctgactctgaagcttcaaagtgacactgtggaaatctgaaacgaggggatgtcatgaaggcagcttttctttttctgaggaaaaaataggcatgggctacaggactatttaaaatgtctcatttacagtataaaactcaaaggtagatgtaatttttacacctatgagtatttgtccaatttctgtctcttcctcaccattgggtatctattctttatatgtaaataagataaggtcatctgatagccttattcagtcttcatcattttcatcattgttcctatgtagattattggacatttattgtagcactacataactgattataaaaatctgtaaatgaattagcactttcatattgaaacaagcctgctagcctatgtataaaatagcaaaatgtttgctgtttataaaaagatgtaatggggtggggggcaggggtaatttcaagttattaatttaaaaatgaactagcaattttgtacctggtgactttgtggtgcactcacctctgatagtgacttgaattcggtatgtaaaaaggggttagtggtatttcattgctgctaaaaatgacaactccctctgtgtcctgtttttcttaaagctgtcagtgtacaagtgggtatttgaataccagaccttactgtaaaaaataaaaaaggtggtatctagagcatgtaaattggata

SEQ ID NO: 41247 - DNA, 693 bp, Homo Sapiens
acgagcttgctcggggctctgattggagcttccggtatgtgatgacggtatgtcatgtatgcatggatgtactcaactgtgtttaatactctgaattttaattagaaaaaaatacaatagcagcaaggccctggtttctaagctgtatccttttattcatgtgggacatgagcaaatggcagaattaggggcgagtgctttcaatgctcgaaactaagcaagtataaatttttcctcttatttgcatgaaaggacaagacactgttatgccctgtcctaaatgtgaagacagaggttgaattttttaaaaaatatctttaaaagactgatcacaaaatccaaggtgctacaggaaacaagcacactcaagaaagtttttttctgaataacagttttttccaatttctccgttttataagacatttcctaatttatggggattttaattgaaaataaacttgagtcccaatagagctgtttttttctcacttcctacaaaatgcaaatgcaaaataaataactaagcagcttttgtttggttctgaaccgtatgtggcgtattgttattaggttctagcttcctttaaactagataaagaataagaaaacttgttatgttttaaaacaaacaagacactagaaagacacaaaccatcaacactcgacgcccacccaccaccatgcaaacaaggg

SEQ ID NO: 41248 - DNA, 693 bp, Homo Sapiens
gggtgggtatttgaataccagaccttactgtaaaaaataaaaaaggtggtatctagagcatgtaaattggatataaagttctgctcttaaagagttgatctaagagtatggctaaacatctatatatgcaatctattaaaagaacttaattcggctattatgtcttgatttgattgcagttttttcctaattataacaaatttttcctcattggcctgtttttaatcctgtgcctagaaggagtacaaaatgcacactttacaaaattgatatttaacacttacccactcccctttccccatctcttctaccgctcttgttgatcgtggtatctgatcttgactagataggctgaaggcacatggttccctccaaaaaccactattgataccactacaaaaacaagccagcaaaaagatactgtagagaggttggcttgcttccctctcttcctaactgcatgttgaaaaataagccgttattgatcttaaacatcggtcagatgagtcatacattgggttattttttatatacatgtatacacaaaatatttcaaattgaaagcaacatcttaatggattcaaaactattacaagctgttgtctaaaacaggtgagaaaaaaatttataactgtaaaaacaaatgcacatattgatatttaaaaatgcgtaattaagaaaacccattggtgg

SEQ ID NO: 41249 - DNA, 583 bp, Homo Sapiens
gattcgcttgttgggatttgacaaacagtgcagtgaacttgttgactgcttgcccaaagaagccagtcccctgcgggtgatccgttctctgtactctcataatgatgtggtactgacaacaaagttctctccaacacattgtcagattgcctcagggtgccttagtggacgggtttctttgtatcagccaaagttttaggcacaacttacatcaaataaggaactcttctggtgtttgacttaggaattgcttcaatttagatgaagtattttctttttagaagatcttataagtttgggtcaagatcctggttcttatgggtccatgaacacacttgtgaccttagtacttggtcatccagcatcatacaggcatctccaagttagactctatgcagcatcatcttttgcagcattcctctgctcctgctgatctgtgccactgaactccagttcttctggtcattttgcatggtagctcttgtcacgttccttccttcctcactctctatttctctttccctctccctgtccctctctttctttgtgtttgttgatttttggtgtcaattttgtggacatt

SEQ ID NO: 41250 - DNA, 682 bp, Homo Sapiens
acaagctgttgtctaaaacaggtgagaaaaaaatttataactgtaaaaacaaatgcacatattgatatttaaaatgcgtaattaagaaaacccattgttgttgtgtttttcttgtataccaataattaagccactactgttggcactgtttggttttctgttttaacactgaaggagtgaaagtatttcctatatttatgaatttactactaaaatcttggcaaaaaaagaaaaaaattgtctaacatgtgtgggtgaaaactgttaatcaagtgtttctactcccccccgaaaatcccctgaaagttggacaccaactgtataccctaggttgcttaaagggatttcactattatataaagtcaataaaaatgaagtagttgtatatatgcaacattgtgtacagaggggaaataatgaatagtattaaagaaacattctcgtcttcctttacctttaatcccctaatacctagtctactttttaaattttcagacttcactgctttttgaattcataattctaattttcacattattgttaatggaaaatcatatctaataaaggttttagttattcccatgcacagtatgaaaattctcatttgctgaggtttgtctcaagaaaatgtattggcatgtctttgagaacatgttttattgtctcctgtgtcatttatcca

SEQ ID NO: 41251 - DNA, 624 bp, Homo Sapiens
ccaaaatctgcagatgctcaagtccctgatataaactggcatagtagttgcatataatctatgcacatcctcctgtatacattaagtcatctctagattatttataacacttaatacaatgtaaatgctatgtagttgttataccatactggttagtgaataattacatgaaaaaaaagagtctgtacatcttcagagtttcagtcggcaatttcttggccatggatgtagaacctacagataaggtgagccaactgcattaggaaataactctaataattctgttaattcttagagaggaaaactttcaaaatcttcctcaggtatttattacaactgcctttaccattttagttgtaacacagtttaaattgttatgataacaagtaaataagagcaaagaatgtatttcttaattcaaaactatacgtttgaattcaatatggtataacttaaagtggtataatacatacaatgcatgaatcataatggattcttttataagttattaatttttatggtttaatcagtctaattgttttgactgttatagaaaccaaatattttactgtttcttttaaggactaatattgtcaaaaactgctgttattaacttcacttgag

SEQ ID NO: 41252 - DNA, 771 bp, Homo Sapiens
  misc_feature (564)..(567): n is a, c, g, or t
  misc_feature (569)..(569): n is a, c, g, or t
  misc_feature (576)..(577): n is a, c, g, or t
  misc_feature (579)..(579): n is a, c, g, or t
  misc_feature (582)..(582): n is a, c, g, or t
  misc_feature (590)..(591): n is a, c, g, or t
  misc_feature (597)..(599): n is a, c, g, or t
  misc_feature (601)..(603): n is a, c, g, or t
  misc_feature (605)..(609): n is a, c, g, or t
  misc_feature (615)..(615): n is a, c, g, or t
  misc_feature (617)..(617): n is a, c, g, or t
  misc_feature (636)..(636): n is a, c, g, or t
  misc_feature (649)..(649): n is a, c, g, or t
  misc_feature (651)..(651): n is a, c, g, or t
  misc_feature (654)..(656): n is a, c, g, or t
  misc_feature (661)..(661): n is a, c, g, or t
  misc_feature (664)..(664): n is a, c, g, or t
  misc_feature (667)..(667): n is a, c, g, or t
  misc_feature (670)..(670): n is a, c, g, or t
  misc_feature (686)..(687): n is a, c, g, or t
  misc_feature (698)..(699): n is a, c, g, or t
  misc_feature (701)..(702): n is a, c, g, or t
  misc_feature (704)..(704): n is a, c, g, or t
  misc_feature (707)..(707): n is a, c, g, or t
  misc_feature (714)..(714): n is a, c, g, or t
  misc_feature (718)..(718): n is a, c, g, or t
  misc_feature (733)..(734): n is a, c, g, or t
  misc_feature (737)..(737): n is a, c, g, or t
  misc_feature (752)..(758): n is a, c, g, or t
ggattctagaggccgaggcggctgacttgtctttttttctttttacatacagcttttcctacagttttattaccctgtaattttttttttagttgtagaagttaattctgattttgtgtggatttcagtatttgtctttgttaatggcacatattagcataaatcacttttgtaaatgtaagctttctttttttttcttgaaaaagcctttctatttatcagtattaaataaaggaagttaatctgtttctctgcaggtaataaaatagtgacacactgtattaagatagtgactgctatactcaactctggaagagactagagtatagagcatgagtggcaaaaccacagcccttgggccatatgctgctattcagtcccagatgtagcccctgaagcaagcataaagaaaaatgaattaaaaattaaattaatatggaaagttaaaaaatggattacattagtatgactaaaccatgtctttggcaaagatctaacacaatgtcttaagtataataggtagtctctgtttgtaaaataaatgacttaaatttaaaacatccnnnnanaaaaaannanaanaaaaaaannaaaaannnannnannnnnaaaaananaaaaaaaaaaaaaaaaaanaaaaaaaaaaaananaannnaaaanaanaanaanaaaaaaaaaaaaaaannaaaaaaaaaannannanaanaaaaaanaaanaaaaaaaaaaaaaannaanaaaaaaaaaaaaaannnnnnnaaacaaaaaaaca

SEQ ID NO: 41253 - DNA, 844 bp, Homo Sapiens
  misc_feature (784)..(784): n is a, c, g, or t
gcaaaggaaactatacttttcatttttaaaaatgtaaatagaaaagtttttaacggttttatatagatttcactataaataagcattttaagactgacaaatgttgaactgtacatacatttatcagcataactgcccagtttttttggtgctgaagtactgtaagtagaattcatcaacggtctcctaatttttgcatctacatctggggggaaaaagctgtgatactatagttaataaattcccactagagtgacactgaagatttaaacacaagcattcataagatgcgctgatctctggtggttgtcactagttcttctaggtgataatgatttacccatagatggagctgttggatattattttattgtacaaattcatgtttaaaaaactttgtgactgtttctagttaagtaattttttaacctttcttgggtcatagacttctttggtaaactatgaactctcaccaaaaagatacacatgcaacatgttaaatacatgttagactttgcatacaattttaggggctcatgggcctctaagcctatccatgtattccaggttaagccctctgttatgatcaatccattacttacagattaagtttttataaaataaagtatcttttaaatattcatggatcaagtaacaagagcaaacttgaataaagttatgttctacatattttggcagcatagcatccctgtgtcccttgagaattagccttcatatgtttctgcaattgggatggcaaataaaagtgctatcatctacattnttttaaagaattacaaatattaagaaattatcaagtgaaatttaaaattttcttttaaag

SEQ ID NO: 41254 - DNA, 852 bp, Homo Sapiens
aggagtgtgggcgagctccccagcaccgtggaatcactccagaaggtgcaggagcaggtgcacacgctgctcagtcaggaccaagcccaggccgcccgtctgcctcctcaggacttcctggacagactttcttctctagacaacctgaaagcctcagtcagccaagtggaggcggacttgaaaatgctcaggactgctgtggacagtttggttgcatactcggtcaaaatagaaaccaacgagaacaatctggaatcagccaagggtttactagatgacctgaggaatgatctggataggttgtttgtgaaagtggagaagattcacgaaaaggtctaaatgaattgcgtgtgcagggcgcggatttaaagtccaatttctcatgaccaaaaaatgtgtggttttttcccatgtgtcccctaccccccaatttcttgtcccctcttaaagagcagttgtcaccacctgaacaccaaggcattgtattttcatgcccagttaacttatttacaatatttaagttctctgcttctgcatttggttggtttcctgaagcgcagcccctgtgaataacaggtggcttttcatggatgtctctagtcagagaaaaatgataaaggcttaaattgaggattaacagaagcagattacctcagaatcctgtctggtggcagaattcagtaaaaaaaaaaagtgggtgggggacctttctttcagtgcttaagaaatatttacttttttgtctgcgaattttgaatacccatgctcattgacgttagccaacgcccttatagagagactggctctgagatccgtaggcccaggcgctctcacttgacagataccggtagg

SEQ ID NO: 41255 - DNA, 898 bp, Homo Sapiens
  misc_feature (819)..(826): n is a, c, g, or t
  misc_feature (828)..(829): n is a, c, g, or t
  misc_feature (832)..(833): n is a, c, g, or t
  misc_feature (835)..(836): n is a, c, g, or t
tggggcttcccacaggggaaatctgggcgtgctgtagctcagggtgactcccagctccgtcactagcagggcgacccccttccttctggagccttagctctgaaagcccccagtgggggtgccctttcagatgccccctttccatttcaaaggctctgactcttgatcttgaagccggacgcggcactggcactcggcttcagtttccactgtgacagatggaggtctcctttcgccccagcccaggtggccaagcccatcctggcctcagaacatgctgagcacattttgtagggtggcacctttttatccaagttactagctacacatcagtgtttaaagagaaaaaagtgacctttcattttttttttcttgaaacttgaggaaacaagatacatactactgattttttttttttcttaaaactaaatgcatgactgcagagcggtagaggtgtatatttttcatactgtggggcaaagtatttgtgctgctttttggagatggactggaacgtctggtttctgtccccgggcccggcagctacgtctattttctgtagaaggtgccacagtgagacctggagccaccccttcctgccctggcgccgtttagagctgggagcccgtggactcccggcctgtttctaccttctattcaaccactctgacgtggggagacaagaagaaatagaactttttgatagtgtggtaaaaacattgatttgaactattttagtaaaaggagtaacaaacaagatttgtgatagtgtctactttgagctagataaataaaagccttctttgtgagccaaaaaannnnnnnnannaannannaaacctcgagggcatcctatgtcggggtgccggaaaaaagagggtaatgaaaatgccccctt

SEQ ID NO: 41256 - DNA, 607 bp, Homo Sapiens
  misc_feature (577)..(577): n is a, c, g, or t
tttgttctggccgaaatttttatgagatatctctcacttgtcttccactttgaaccggttaaagctcatagctgtcagctctgaatgaggaggggagaagcccctgggtctttctttgaaaggaatccgctgcttgagggctgcctccctcatggtgtgcgtgtcgtttctcttcctgacgcatcttgtgatatcagaggtaactatgcaaagcatccaggcggttctgaatgtgaagcactacacccagcagagtcccggtgccctctgtccccactgccggcccatgttctctctccggaggtcaccaaggaatgcacaggtttcgactaccagaaaggggagtccttgggttctttcaaaaaattcgtgaggagagctgtctacagtggaatagggggtctccctggggaatgcaggccaagtccttttattttaacatgatgtccatgaagaggtttgccgtctgggcagccctgtcggcaaggagcgtgcatactgcgtttgtgtaattgtttgctgtatctcccttccctctgagctgtattgttctttaatggctgtcttgcccttccanaaaaaattgaaaaaaaaaaaaaaaaatggc

SEQ ID NO: 41257 - DNA, 692 bp, Homo Sapiens
cgcgtccgagaaacacgagctttcggcttccatcccttcgcagtacagatgacaggtctcgtgggctgcctaaactaaaagagtcacgttcccatgaatccttgctgagcccatgcagcacagtggaatgtctggatcttggtagaggggaacctgtatcagtgaaaccacttcatagtagcatccttggacaagacttctgctttgaggttacctacttaagtggaagtaaatgcttcagctgtaattctgcttctgagagagacaagtggatggaaaaccttcgcaggacagttcaacctaataaggacaattgcaggcgagctgaaaatgttcttcgtttatggatcattgaagccaaggaccttgcccctaaaaagaaatatttctgcgaactgtgccttgatgataccctctttgctcgtacaaccagcaagaccaaagcagacaatattttctggggcgaacattttgaattcttcagccttccacctcttcatagtatcacagttcacatttacaaggatgtggaaaaaaaaaaaaaaaagggcggccgcagccatgagtatgctcaggcttcagaagaggctcgcctctagtgtcctccgctgtggcaagaagaaggtctggttagaccccaatgagaccaatgaaatcgccaatgccaactcccgtcagcagatccgggaagc

SEQ ID NO: 41258 - DNA, 578 bp, Homo Sapiens
aagaactcgaagaaggccagaaaggagtaggagatggcacagttagctggggtctagaagatgacgaagacatgacacttacaagatggacagggatgataattgggcctccaagaacaatttatgaaaaccgaatatacagccttaaaatagaatgtggacctaaatacccagaagcacccccctttgtaagatttgtaacaaaaattaatatgaatggagtaaatagttctaatggagtggtggacccaagagccatatcagtgctagcaaaatggcagaattcatatagcatcaaagttgtcctgcaagagcttcggcgcctaatgatgtctaaagaaaatatgaaactccctcagccgcccgaaggacagtgttacagcaattaatcaaaaagaaaaaccacaggcccttccccttccccccaattcgatttaatcagtcttcattttccacagtagtaaattttctagatacgtcttgtagacctcaaagtaccggaaaggaagctcccattcaaaggaaatttatcttaagatactgtaaatgatactaattttttgtccatttgaaatata

SEQ ID NO: 41259 - DNA, 878 bp, Homo Sapiens
  misc_feature (751)..(751): n is a, c, g, or t
gaatcccaccagctacgacaacggcctcatcaagtggttccctgaggtcacgcatttctgccgcgggatccccatggtgctcatcggctgcaagacagacctgaggaaggacaaggagcagctgcggaagctccgggccgcccagctggagcccatcacctacatgcagggcctgagcgcctgcgaacagatccgagctgctctctacctggaatgttccgccaagtttcaggagaatgtggaggacgtcttccgggaggccgccaaggtggctctcagcgctctgaagaaggcgcaacggcagaagaagcgccggctctgcctgctgctctgacccagggcagacagacctcacgacagcactgacagggcccgggggcccaggtgccgattgcaccaaggaggctgccccatcccgaccctccagctcatggtgtctggggcctgcggctagactcttggaacattctggaactctctcctttcctggctggggctctgaccacaaactcccctccaggctgcccctgagacatggtggtgatgtgggtgcaggagccagtgtctgttgtcgggactcgcaagtgccctcatcacagccacccccaccacgagtgtctccccagtgcagactcaagttatgcttgaaatgaaaaagtctatctgggtagggggtaaacgtagacctggcactggttcacgcgggccgccccaagcctgccacctcctgtggcccctgccctccctgggnttcccggagaataggcacccctggaaatccccccaggtccctcctttccctccccccagggaaagcgggagggcacccccaagggggggccgggcccttacccgggaaggaaaccagggccccgaac

SEQ ID NO: 41260 - DNA, 1121 bp, Homo Sapiens
  misc_feature (741)..(741): n is a, c, g, or t
  misc_feature (743)..(794): n is a, c, g, or t
  misc_feature (796)..(810): n is a, c, g, or t
  misc_feature (812)..(812): n is a, c, g, or t
  misc_feature (814)..(816): n is a, c, g, or t
  misc_feature (818)..(818): n is a, c, g, or t
  misc_feature (820)..(822): n is a, c, g, or t
ggtccggaatttccgggatgaaaaacttggagacacatacccaagtatctcaaatgcccggaatgcagagctccggctgcgatggggccaaatcgtccttaagaacgaccaccaggaagatttctggaaagtgaaggagttcctgcataaccaggggaagcagaagtatacacttccgctgtaccacgcaatgatgggtggcagtgaggtggcccagaccctcgccaaggagacttttgcatccaccgcctcccagctccacagcaatgttgtcaactatgtccagcagatcgtggcacccaagggcagttagaggctcgtgtgcatggcccctgcctcttcaggctctccaggctttcagaataattgtttgttcccaaattcctgttccctgatcaacttcctggagtttatatcccctcaggataatctattctctagcttaggtatctgtgactcttgggcctctgctctggtgggaacttacttctctatagcccactgagccccgagacagagaacctgcccacagctctccccgctacaggctgcaggcactgcagggcagcgggtattctcctccccacctaagtctctgggaagaagtggagaggactgatgctcttcttttttctctttctggcctttttcttgctgattttatgcaaagggctggcattctgattgttcttttttcaggtttaatccttattttaataaagttttcaagcaaaaattaanannnnnnnnnnnnnnnnnnnnnnnnnnnnnnnnnnnnnnnnnnnnnnnnnnnnannnnnnnnnnnnnnnanannnanannnaaaaaaaaaaagggggggcgcctcttaaaaatcccccgagggggcccaaattttacgcggcaccccctttttttttgtaaaaaagggggcccctctaaaggggggcgcttatattaaaataagaggcgcggggccccccgtgtttttaacacccccggggtggtggagaaaacaccgcacctcttgggggattttttgggaagaaaaacactctaccctctgggggggggggcgcactattgtgggcaaacacctcccctccccaccaagaaatttataaaagcctctctcggaggggc

SEQ ID NO: 41261 - DNA, 592 bp, Homo Sapiens
gaatgtttcaccctgatcttatgggaggaatcaaactcccaaaatagtgtgtatatatgtaataaacagcgtcacgtaaatacatatatgcagtgcttgttgtccaaatagaaatgaaaataagtggaagagagaggaagaagtcaaaccatatgaaactgaaaaaatatgacgtacgaaatggacaaaaagctttttctgaaaccaactttttacttccatcatccttttttagcctgttgcttcagagagacacaaagtgaacacactggtgtgaatgtcgctctctgtgtgcttgtgtttgtaatgaaagtctacagccaattttacttgtctaccaccgtgttgtgctcaaagagacactacttgagtgaagatttcttctttccctgtaccagctgttacagtgttacgttgtgtttaaaatgtgtatggtttattgcaatctgaacagagctatgggtttctaccataagtcaggttgtttgttccctaacctgtctctcgtagcaaagtcacttttataacagtttaccactatgcttgattataatgtgaaaggcggaattctgagtgtgttaagatggtatta

SEQ ID NO: 41262 - DNA, 804 bp, Homo Sapiens
tagggtcagattttggcaaattttaaagccatggattctgattggtttgcagaaaactacatgggtagaaaaaccaaggttggatggcctcctttggagaagtttaataactggggtggatctctgtccctgggacacccatttggagccactggctgcaggttggtcatggctgctgccaacagattacggaaagaaggaggccagtatggcttagtggctgcgtgtgcagctggagggcagggccatgctatgatagtggaagcttatccaaaataatagatccagaagaagtgacctgaagtttctgtgcaacactcacactaggcaatgccatttcaatgcattactaaatgacatttgtagttcctagctcctcttaggaaaacagttcttgtggccttctattaaatagtttgcacttaagccttgccagtgttctgagcttttcaataatcagtttactgctctttcagggatttctaagccaccagaatctcacatgagatgtgtgggtggttgtttttggtctctgttgtcactaaagactaaatgagggtttgcagttgggaaagaggtcaactgagatttggaaatcatcattgtaatatttgcaaattatacttgttcttatctgtgtcctaaagatgtgttctctataaaatacaaaccaacgtgcctaattaattatggaaaaataattcagaatctaaacaccactggaaacttataaaaaatgtttaaatacataaataatggtggtcagcgttaataaagtggagaaattttgcaaaaaaaaaaaaa

SEQ ID NO: 41263 - DNA, 515 bp, Homo Sapiens
ccactgtcactatcctgcctgcctttatctgccttgccctgcgattatttggctttgtaagcataagctacgtaagacataccacacctaagaaactaaacagcaatgaaaacccatacttctgaaaagggtgtcttttaaaaattaagtttgatcttttgggaaataaagcacatagttttcaaaatgatttaccaagatctatgctctttcaaatggagactgggatattgttgttttgagaccactgttttcctgtttcctcccaaatgttagtcacatatatgattacccttaagttggtcactatctatctatctgtcaataatttaggattaaagtttgaagtgtaattacatttgacttttacaggcatctcagggtggacttcttatgaatacactgaacctatacaaatgatcttagaaaacgtttaatatcagatttctttattttttccaacacaactgaatcagttttcttaaataaaagtttattgtctactgtttaaaaaa

SEQ ID NO: 41264 - DNA, 843 bp, Homo Sapiens
  misc_feature (495)..(495): n is a, c, g, or t
  misc_feature (506)..(506): n is a, c, g, or t
  misc_feature (576)..(576): n is a, c, g, or t
ggatttatatgaaaaatggggtgtcagtcttttcacacgcccagcaggtaacaatgtgggaagctggcagggtcattgatagcaagtaagtacttcctgaaggctttccagttcaaaagattacaagccattctgcctgccaaacaaattatattctgaagatgcctgttttgtaacccttgatgtgaattttttggtgtctgaaatttacaaaagaatgaaattgaaattgtaaaacactaaatgctttgggtttattttgaagtaatctgttactttaaaatgtcaacattaggaagccataaaacaagatattatgaaacccagtattataaatgttatctacatctaaagtattttaaaataacttattggcagctttattctttttttccttacaagatttagaatctttttggttatatgtctatttttcaattttgttatatttttaatttaagtggccaatgtggttatgaacaagatttgtatggncagcttctgtnctttcctaaaacttcagataaatatcattttagctataacctaaaaragtgtttaaataaaatgacagangtgaatttaaaagcagcatatgckaatttactttttcatatgatgatggtctaatggaagtgacatatgctttcttttgtsctaactctgaaaagtatatgtsagagttctggaatatgtctttagccaagaattttattcacttaaatttgtttacaacttgtataaagcaaaaaagaatgtgtgtaactatagtgaacgcatagttttgcttatattatgtgatgtttgccaaaaaaagaataaaaaatgaatgaattaaatcaa

SEQ ID NO: 41265 - DNA, 763 bp, Homo Sapiens
  misc_feature (688)..(688): n is a, c, g, or t
  misc_feature (713)..(717): n is a, c, g, or t
  misc_feature (719)..(727): n is a, c, g, or t
  misc_feature (730)..(733): n is a, c, g, or t
  misc_feature (735)..(735): n is a, c, g, or t
  misc_feature (738)..(738): n is a, c, g, or t
ggagaacattaagttgaagaatggaaattaagagtacgtattcatggtttatatttcttattctatggagttcgtgaacacatctaggtggaatgcatctgagactaagggctggtttttaatcctcataagaaaccagccttgaagaattaacaattctcttcattggtattctaaacctcctaagatatttaggcttctgtacataaaagtgtttttgctaaatttacagtatatatagatcctttcatattattttactaagaatgtttgaactttgcatatttgatatagttcctggtaggaatagcacagctcaaacattagtttttctacttacctcctctaacacgtggtttgtctggagagtttctaaaaattcagctataaccccagttcatgtatttactggtgattgttcttgctgaggtagtaacagcccaatcttgggctgttaaatcctaggaaatctcgaatcatagtgattaaaatagttggggtaaagttgtagcttatatgcaatactacttggaggaattcttctactaatttgtatttaatgtggaaattgtatagtttcattgatttaatcataaataatggaaatggtctccaagaagttttatttttcatttttttgcttatacactctgattcctataatacagtgctataagctatgcacagnaaaataaaatgtttggaaatccaannnnnannnnnnnnnaannnnanaanaaacatgtcggccgccctcggcccc

SEQ ID NO: 41266 - DNA, 623 bp, Homo Sapiens
tgttgagaatgttgttatttggatttctgcactgtttaacaaatgaagtaaaagaaaaacactactgcaatcacgtcttttgttatgctagtatcagtcagatgcacttagagtgaagaaacactgtaattacagcacacagattgcaagtattgcgtaccaagtgatacaactcgaaatgcagttctcatcttcctgttttgagaaatgattattttatcacgcatcagagccttcgtgctttgattatcttgtatgttaacaattctagaaaacattcatgaattcacaaaaatacgttactatggcaggggaacattttgtacacatttaagtatataaaaatactaaaatatgtaattttataacaaagtcacgggtatctttaggttcagggaactagactaggtcattcgtgtaaatggactggtagttacagtcttaggttaaagtattctaatgaagtatgggaactaaattgctggttttctaagataagatatgggatatgggtcatataacttttatattttttatgaagttgattttgtcttgtgtgttatttttaattgtatcattgaagatgtattttaaaccaaaggaattaaattttatatgtctaa

SEQ ID NO: 41267 - DNA, 928 bp, Homo Sapiens
gcataaatgctgtttgagcactggattctttcactgagcacaaagagttgtggggctttagcatctgactgatttgttacggggttgattctgaccataggaagtatgcaatgtgaatcactatttacagagaaacctacaacagatgcttgatgttgtagaaactgggacatatagataccaagcaaaattataagaaacctataaggtgttcaatacgcttgtgtttccaaaattcactgtacatgatcagttggtgttcttgtaccacagtttttaactgaaggaaccagttgtaacagtctcaattttaactaaaacttgaagaactaaaacaacaatgcaaacctttcagcattgttgtggccaaacttgttaaaactgtaatgcaagaaccaaatgcactgtgatgtggcaccaactaattagcaagcatgaatttttcacccaagagtgaacaaaaggaaaatctaccatggcttgaagttaaagagcagaactcctgactaccattctatgactgatcaaaagactaatagttaaaaacctcagcaggctgttcacgatatgcagaaaaaaaagtgctgcagtttagatactctggaatttttcacagtgtccaggtttgtatacttgaaggcctactttctaagaataatttcgtgcgcaggtggtcagggaagcccaagacttggaagtttaaagggcgcaaaatttgtgttttgtttctacaaaacgacaggcttttctggggaaagagagatcccttgggtggacaattggccactgtgtccggtgtgcacacggtggaattccacggtggggcgttaacaggaaagggcagagaaagtatgaggaaacgaacggggaaaaaagcgatgaggggaaaaaaagagttgtttatcttgttatttaaatatataattgg

SEQ ID NO: 41268 - DNA, 880 bp, Homo Sapiens
aagactacaagaaacagaaacaagaagaatttaagcacatagcagtatttccctgcaagataaaaatcctccctcagtacatttttaattctcgagatccgatagtgatgggggtgacggtggaagcaggtcaggtgaaacaggggacacccatgtgtgtcccaagcaaaaattttgttgacatcggaatagtaacaagtattgaaataaaccataaacaagtggatgttgcaaaaaaaggacaagaagtttgtgtaaaaatagaacctatccctggtgagtcacccaaaatgtttggaagacattttgaagctacagatattcttgttagtaagatcagccggcagtccattgatgcactcaaagactggttcagagatgaaatgcagaagagtgactggcagcttattgtggagctgaagaaagtatttgaaatcatctaattttttcacatggagcaggaactggagtaaatgcaatactgtgttgtaatatcccaacaaaaatcagacaaaaaatggaacagacgtatttggacactgatggacttaagtatggaaggaagaaaaataggtgtataaaatgttttccatgagaaaccaagaaacttacactggtttgacagtggtcagttacatgtccccacagttccaatgtgcctgttcactcacctctcccttccccaacccttctctacttggctgctgttttaaagtttgcccttccccaaatttggatttttattacagatctaaagctctttcgattttatactgattaaatcagtactgcagtatttgatttaacaaaaaaaaaaaaaaaaagggcggccgcttctagaagtatcccctcggagggggccccaagccttacggcgtaa

SEQ ID NO: 41269 - DNA, 783 bp, Homo Sapiens
tgtatagagctaaaaaaattgaaaacaaacaaaaaaattgtcttgtattttccaaatgttaatacatttactttagcattgaagccactttgaaacctgagataaatgaatgtgaggtatcttttctgctttcctcatttgtgtagatgtactgtctgttctgttgatttaaattatttttttccagattggcacatgaaatatttaaacttttttgtgtgcctttctgtccaaatgttgcatagttaccagggaagattagtccagtgattacataagagttgggcaccataaaattctctatattttgcctcccatggaggcctttgaaatgcatctttattaaaaatcaaaatataaccaggatactgaaagtcagtatatgaatggtaaaattgttacatatcctatttcatgccattcttgttagttgactggtattttttactgaggagcaactcattccagcatcaacaataagataacctttaagtatggcacacttgtatttttgaggtgtaaaattaacttggcatgataattcctgatcattatttaccccacaattcaaatagtttcttcacggactaggcatgcagaaataagcagtggattttattgaaacctaaaggcatttgaatgacattgttaccaaccattaatgtgctcaggaccttgtaatttttatttactatatgagtggtctttttttacgctgttttttcaatgcatttcttattatctttttaagttcatgattgctgcctcagttattaaaatcca

SEQ ID NO: 41270 - DNA, 815 bp, Homo Sapiens
  misc_feature (721)..(721): n is a, c, g, or t
  misc_feature (731)..(732): n is a, c, g, or t
ccaaaaatttcgccattgtgggagccatgttttcttgtactgagtgtttgatagaatcttaccggggaacatcagactggaagaacagtgtcatcagtggctgcatcacgggaggagctattggtttcagagctggcttaaaggctggggccattggttgtggaggttttgctgctttctctgctgcgattgattattacctccggtgagagtaattgcctgcagggaaggatgatgccagccccggatccgggctgctctctggaggacagtttctgtaccacaccagggccttgcttcagggcctgaagacattcattttccctcatgtcgttggtattctgagggagctgcctggcttctctgcctccagcctttggggtagccacactttgctgctcctggactccagccagccttcacagaggacgtcccgtgccagattctctcacagcagatcgggagacaggatgttgacatataggaattcagctccacaaagcttcaggcctgaccacagctggccctctaggttgtttggtgttgtgggcacagaggtgacagtgtctctgcaggcactcaggaagctgttctaccttggaactccatgcaactatccgtctcgaataccagggcagggcaaggcggactgatgccgtccaaccaattatctcacttgttttgtgttctgtcatccttgttttttttttaaaatacactnccctccccanncgcacacacttacagttcaaaggtggtttattgtattttatttcaatccctatcaaaatatgccggtgcccagatacatcgaa

SEQ ID NO: 41271 - DNA, 735 bp, Homo Sapiens
tgcaagcaagtctgaatgcatagttttactttaattcggcttgacaatttgaataggtaaccccctcgggactgactgaatcgttatgcatgtgtcaatcaatgggaggtgtgcattctctagaagtagttttaggctgttggttggtttggtttgttttttaaatgcagcctgttgaggcactgtcatgtggtgtgaaagatttaaatgtagcaacgctaaagagtaataattggggataagaagtggggacattggccgggcgcggtggctcacgcctgtaattccagcactttgggaggcctaggtgggcggatcagctgaggtcgagagttcgaggccagtctgaccaacatggtgaaaccccatctctactaaaaatacagaaaattagctgggtctggtggtggatgcctgtaatcccagctactcgggaggctgaggcaggagaattgcttgaacccaggaggtggacggtgcagtgagctattactccagcctgggcaacaagagcgaaactctgtctcaacaaaaaaaaggggggggggcacattccagagagtggtgatgacccaaatgttgaaccaattatgttcgggcggggtcttagctgtgaatcctgaatggttcataaagtgacctagctggttaatgcagcagcgttctgggcagcagaacatattcattcttacggacatcctattgctgccttccaggtgatgactttcagcaact

SEQ ID NO: 41272 - DNA, 726 bp, Homo Sapiens
cagcattgaagtatggtgtgttcacgtagttctagcagtccccagctgagtgagtgggagagtacctgtgtgtttcgtaacggccttgatccccttgatagatgtttggatattttttggtgtgccctgtgtgtgtgtgtgtacaaatacatgtgtatattccttttaaagaagctttatcgaacgtggtctgattttgaggtttagcaatagctagctatatatggtaggtgccgctacagtttttatttagcatggggattgcagagtgaccagcacactggactccgaggtggttcagacaagacagaggggagcagtggccatcatcctcccgccaggagcttcttcgttcctgcgcatatagactgtacgttatgaagaatacccaggaagactttgtgactgtcacttgctgctttttctgcgcttcagtaacaagtgttggcaaacgagactttctcctggcccctgcctgctggagatcagcatgcctgtcctttcagtctgatccatccatctctctcttgcctgaggggaaagagagatgggccaggcagagaacagaactggaggcagtccatctagggaatgggactgtgaggccatacttgtgaaacgtctggactgctattctagagcttttatttggtgtgttcgttgcacagctgtttgaaatgtttaataaagctttataaactttataaaaaaaaaaaaaaagagggc

SEQ ID NO: 41273 - DNA, 533 bp, Homo Sapiens
cgcgtgatatttaacattaatattttatttgacactacagcctgtaatactgctctctttcaaaagcaagttttcagatttttataacagacccattttgttttatgaaacatgttcattacagaaacatgagaaaatagagataagtaaaaagaataaaagtcactattatcctaccactttgcgggacacactattaatatttaagcatagattcttccagatgttttgttttatacagcagtaggattgtgtaatgtattctctcttgtagcctattcttcaaagcgtatcttcactttccatgttaacataaatgtccttttatgattgtctaggattccatggatggatggaatataattgagtcatctggtagagcgcatataggacaggacgctaggttgtttatcttttgtttattgtaaagtaactatgtgggatgcatttggtgatctttttaaaaaatgtataaatttcttgagtaattcctggattaaagaatatgcactttttaaaaaaaaaaaaaaaag

SEQ ID NO: 41274 - DNA, 551 bp, Homo Sapiens
actttgagtctgtacggacatttgtacatgagagtcctgccttaattttgctgtttgccctcggatctctgggtttgatttttgcgttgactttaaacagacataagtatccccttaacctgtacctactttttggatttacgctgttggaagctctgactgtggcagttgttgttactttctatgatgtatatattattctgcaagctttcatactgactactacagtattttttggtttgactgtgtatactctacaatctaagaaggatttcagcaaatttggagcagggctgtttgctcttttgtggatattgtgcctgtcaggattcttgaagtttttttttatagtgagataatggagttggtcttagccgctgcaggagcccttcttttctgtggattcatcatctatgacacacactcactgatgcataaactgtcacctgaagagtacgtattagctgccatcagcctctacttggatatcatcaatctattcctgcacctgttacggtttctggaagcagttaataaaaagtaattaaaag

SEQ ID NO: 41275 - DNA, 550 bp, Homo Sapiens
  misc_feature (503)..(503): n is a, c, g, or t
  misc_feature (505)..(510): n is a, c, g, or t
  misc_feature (512)..(512): n is a, c, g, or t
  misc_feature (515)..(516): n is a, c, g, or t
ataagaatgcaggtagataatattctaggcataaaacatttaatgtaccttacctcatgcaatattctttggattctttgttgatttatgatattgctaatataatattttcttaaaatatataacaatatcttttatgcattttgagttccagctggtgcttctttatatttagaaattataatgggaaggtcatttaatttacagatggttttaaaattgaggtaatatctgaggtggcataatttaaaaatatttagcaaatttgtttcatatatactgtcttatttctagatttgtttaaaattggaatatgaaaaactaatggataaagctagcataaaattgatattttagtttgtattattaatatatcatgttaccttatatattaatctactcttgattctgctaattattaccaacaaaattgtattcatgacattttattaatcctctgtgaattttctgtaaataaaattatttctgaaaatctctaaaanannnnnncnccnncccacacaaaaaaaacacaccccccaaacacggg

SEQ ID NO: 41276 - DNA, 900 bp, Homo Sapiens
  misc_feature (29)..(29): n is a, c, g, or t
agatacgtttttaagcctttctatttgtngcccatatttcacaactattggataccagttcaccaacatttgaacttgaagatctagttaaaaagaaatcacattttaagcctgacagaagacacccactctaccaaaaacatcaacaggcattggaagtagtaaataataatgaggaaaaagccaaaataatgttggacaacatgaggaaactggagaaagaactattcagagagatggaatcaatccttcaaaacaagcatcttgatgtggagaaaattgttaatctctttcctcagtgtacaaaagatgaaattcaaatttatcagtcaaatttatcagtcaaagttagttcttagtgatcatatggtcagctaatattagttcttagtgatcagtggtcagtaatcttcaaagtcagaatctatcaccttggtaaattatataaacctaacttgagcagatctgattattcttggatagtattcaagtggtatcttgactattaaactacgtatagtgttgctgaaatagaaagaaaacagcattggaattggattcatgtatcgtgggatacaggtgttatttcaggtgatgtacttgcattattttctttagccatagtaactctttgtcacaataactaagtattcaattatatataaagagtgaaacattaaaatgacgcatggatttatatttactataattatgtagcaccctcaatcattttgtcagttacatcaagaaagcagattcttctttagtcatgaaaatatctcaagtggtaagttgtttgggctttaagcaacattaccagttctacaagaaaatggctagaattacccttggcaatcagattatagtttgcaatgccttttgttaaactaaacacgctct

SEQ ID NO: 41277 - DNA, 590 bp, Homo Sapiens
  misc_feature (38)..(38): n is a, c, g, or t
caaaaacactatgcagtatgcagcaaagtataccgtgnagatcgactccgaaggaagcagatgccttgagcatggacaactgtaaagaattagagcggcttaccagtctttataaaggaggatgaactggaatttttatttataccttttagcgtactctttattttttctgtaagtaagtttggtttcatcatgagggatgaaggaaaagatttgatactgaaaactaaactgaatagttggttcctgaaatcttggactgtttatgacctactggctcctttaaatagtaactgaaaactaaaatggaatattttagttaacgcttctacaagtattttcattttaaaagcttacatgattcctaactaaagtgtcatgagaaaggattatcacacctgtagcaatttccagttttagtgattctccattttttcccttgtcatgtaaatatttatggaatgatcattttgtgtacatacaggttactgcttttttatttaaattcttttagtgtttagctccatgagacacttcagtttaaattgatggaataaatgttatatgacacatttacaaaaaaaaaaaaa

SEQ ID NO: 41278 - DNA, 794 bp, Homo Sapiens
ctaaaacgaggtattaaaagtaacaaaaaggcagtgtttcagaaacagatctcctaatgtcccaatgtcaaatattccagttattctaaataataaaatctttgttcaaggcagataatctcatcagaccctattagagcttcttgaatgaggctattacggaagtggggaatttcttccaggtagcatccatattttattaaattaggatttccagatcatgatagatcagatgatttttttttaatttcccggttttattggtttatcatcagcattcactgctatgcaatgatggtcataagtccattccaaatttaaatttgtttctgttatgtagcctacattaggctgtggaatttacatttaggtaactaaacacagctcataattaaaatcttttctttaaggtcagctaaaaaaaatgtttcctgtatttcttgatactaaaaatgtaatgatttttattttagttcattctaaaagtatgtcttgtaataaaaagtctgtttggaaactggttcatttggacagtgaagtcttttgaaatatttctgctttgtacattttccagaagtttaatattttatcacattttccacaagttgtaacaattgatataaatccatgcccacaaagtattccattttcattacttttactgttcatgccaaagatgtttcaaatatattccattggtaaatctgtctttaacttgaggttatttctacttatgtgttgctaaaattatttctgcaagactgagatcaaactggtttatatataactaaatc

SEQ ID NO: 41279 - DNA, 678 bp, Homo Sapiens
ccacaaggtccactccctgctccacgaagccttaagccataggcccaggatatttctgagagtgaaaccatgactgtgaccaccttctgtccccagccctgtcctggttccttcctatgcccaggtaccacccttcagaccccagttctaggggagaagagccctggacacccctgctctacccatgagcctgcccgctgcaatgcctagacttcccaacagccttagctgccagtgctggtcactaaccaacaaggttggcaccccagctaccccttctttgcagggctaaggcccccaaacatagcccctgccccggaggaagcttggggaacccatgagttgtcagctttgactttatctcctgctctttctacatgactgggcctcccttgggctggaagaattggggattctctattggaggtgagatcacagcctccagggccccccaaatcccagggaaggacttggagagaatcatgctgttgcatttagaactttctgctttgcacaggaaagagtcacacaattaatcaacatgtatattttctctatacatagagctctatttctctacggttttataaaagccttgggttccaaccaggcagtagatgtgcttctgaaccgcaagagcaaacactgaaataaaatagtttatttttcacactcaaa

SEQ ID NO: 41280 - DNA, 983 bp, Homo Sapiens
  misc_feature (933)..(933): n is a, c, g, or t
ggatgctggttgagccttcaaagtcctaaaacgcgcggccgtgggttcggggtttattgattgaattccgccggcgcgggagcctctgcagagagagagcgcgagasatggagatgggcagacggattcatttagagctgcggaacaggacgccctctgatgtgaaagaacttgtcctggacaacagtcggtcgaatgaaggcaaactcgaaggcctcacagatgaatttgaagaactggaattcttaagtacaatcaacgtaggcctcacctcaatcgcaaacttaccaaagttaaacaaacttaagaagcttgaactaagcgataacagagtctcagggggcctggaagtattggcagaaaagtgtccgaacctcacgcatctaaatttaagtggcaacaaaattaaagacctcagcacaatagagccactgaaaaagttagaaaacctcaagagcttagaccttttcaattgcgaggtaaccaacctgaacgactaccgagaaaatgtgttcaagctcctcccgcaactcacatatctcgacggctatgaccgggacgacaaggaggcccctgactcggatgctgagggctacgtggagggcctggatgatgaggaggaggatgaggatgaggaggagtatgatgaagatgctcaggtagtggaagacgaggaggacgaggatgaggaggaggaaggtgaagaggaggacgtgagtggagaggaggaggaggatgaagaaggttataacgatggagaggtagatgacgaggaagatgaagaagagcttggtgaagaagaaaggggtcagaagcgaaaacgagaacctgaagatgagggagaagatgatgactaagtggataacctattttgaaaawtcctattgtkatttgactgtttkbbyckbkkbbsbbksccccccccccmatccnscccctgaaattattttttttattttaawtttttttggaaaatagggaaa

SEQ ID NO: 41281 - DNA, 625 bp, Homo Sapiens
atgacctcaccctccagctctccagttttcaggttggagacattagatggaggccaagaagatggctctgaggcggacagaggaaagctggattttgggagcgggctgcctcccatggagtcacagttccagggcgaggaccggaaattcgcccctcagataagagtcaacctcaactaccgaaagggaacaggtgccagtcagccggatccaaaccgatttgaccgagatcggctcttcaatgcggtctcccggggtgtccccgaggatctggctggacttccagagtacctgagcaagaccagcaagtacctcaccgactcggaatacacagagggctccacaggtaagacgtgcctgatgaaggctgtgctgaaccttaaggacggagtcaatgcctgcattctgccactgctgcagatcgacagggactctggcaatcctcagcccctggtaaatgcccagtgcacagatgactattaccgaggccacagcgctctgcacatcgccattgagaagaggagtctgcagtgtgtgaagctcctggtggagaatggggccaatgtgcatgcccgggcctgcggccgcttcttccagaagggccaagggacttgcttttatttcg

SEQ ID NO: 41282 - DNA, 516 bp, Homo Sapiens
  misc_feature (373)..(373): n is a, c, g, or t
  misc_feature (514)..(514): n is a, c, g, or t
tattatactactaataatagagcacttgtaagcactaagttatctttatccaacatttctccaaatggactgaaagaaacttttcaaggacagtgtattataacaatccctttcccagaattagttgtatagggttggcccaagagatgtaagaaaaatctcacattgctccctaagcaccctgggccttattaaagagcaacttctatttccagtcgggggagtaacactaaagctacaagaaatatgtaataatgataggtaataatgtgttccaaagctttttcaaactagaataaggaggcaaatagaagaatgagatactgatgtccacagttcattggcagaatctaaccccttctgttatcttttntaatactatttttgtttagataaaagtttcaaagaagataaaaatgcttgaagagcctgagagtaaaaagattatgctgcaagctatgatataaactgctcttgcagtccaaagggatacctgattaagaagttcttattnac

SEQ ID NO: 41283 - DNA, 777 bp, Homo Sapiens
cgaggcaggtcataccatgaccggaagtcaaaagttgacctggataggctcaatgatgatgccaagcgttacagttgcactcccaggaattactcggtcaatataagagaagagctgaagttggccaatgtggtcttctttccacgttgcctcctcgtgcagcgctgtggaggaaattgtggctgtggaactgtcaactggaggtcctgcacatgcaattcagggaaaaccgtgaaaaagtatcatgaggtattacagtttgagcctggccacatcaagaggaggggtagagctaagaccatggctctagttgacatccagttggatcaccatgaacgatgtgattgtatctgcagctcaagaccacctcgataagagaatgtgcacatccttacattaagcctgaaagaacctttagtttaaggagggtgagataagagacccttttcctaccagcaaccaaacttactactagcctgcaatgcaatgaacacaagtggttgctgagtctcagccttgctttgttaatgccatggcaagtagaaaggtatatcatcaacttctatacctaagaatataggattgcatttaataatagtgtttgaggttatatatgcacaaacacacacagaaatatattcatgtctatgtgtatatagatcaaatgttttttttggtatatataaccaggtacaccagagcttacatatgtttgagttagactcttaaaatcctttgccaaaataagggatggtcaaatatatgaaacatgtcttt

SEQ ID NO: 41284 - DNA, 504 bp, Homo Sapiens
ctcctcagcactcgcctcctctggctgctcctccgggcttgcctcctcgggctggcccacgctctctgggtcaccgtctccgtccatcgctgcggagggcggtcgcgagaggaggagccggagcgctgcgggctgcgcgagtcccggggcggcgagtcccggcgctgtccgcgtctgtgtcggtcccggcgaccgcgcctcttaaaggcccccgacccgacccgccccgccccgcctctggccccgcgcccggccgccccgcagtcccagcagtctgctcgaggcccggggctgcgggttcctcagcggaccgaggaggctgggaaaggtcaggagtcgttttttttccaactggggaggggtccgatttggggcatctcgcagctcgctcctgggggactgctgggaggaggcggctaggggaggcacggagaggctgggtcaggccgagggtgaggggcgggtggcccaggcggagtcgcccacgcgtccgcggacgcgtgg

SEQ ID NO: 41285 - DNA, 641 bp, Homo Sapiens
tggcatgattgtggatcccctgagatctggcttcccaagagcacttattgacccttcctcaggcctcccgaaccgacttcctccaggcgctgtgcccccaggagctcgctttgacccctttggacccattgggaccagcccacccggacctaacccagaccatctccccccgccgggctacgatgacatgtacctgtgaaggcctcaagaatgtaacatcccaggcttccctccattctcctggagctgccaccgctgtccccatcagcaaccatgttcttgcaggctgggggcaagggattctgctcatgtgtttgcagaccggctgggatagcctccccaccccttatcagagccaagacacctgctgcagctctccacctagctgcagatagctcccaaagagaaatcagtgtgtctctttcaccatcagctcctcccctttcaccaccagctcctctccacttcccaagggagactccggcaaccttcagcaacatatatcctcgaccagatgcagtgctataagaacagaacgcattttggatgttattattaagaaccaaatgtcaatacagaattcatgttgccggttaaaacctgaaacggataagccgagcattatggcagcccaaagaaaa

SEQ ID NO: 41286 - DNA, 772 bp, Homo Sapiens
aggacttgggcatttatattaatacaaaatggtgtaaacggcctgaatatcactgtagtagtatcatacgggggaaagtgtgatggaaaataggtttaaaaatcttaatttttaaaactttagtaagctttatttatattttttaggattttctgaacatagcatgaagggtttagattcatttttctgaaaaacgattaaaaaaactaccaatttattttttgagtgcccacacttgccgtggtgctgtatacatgattttaccttaatcctctataaggtaggtgctaatggtctccattttatagatgaggaaaggctcagagaaattcagaaactgggctaatttaacacagctgtgacagagctcgaattggaccacgtctgattctgaagcccatactctttcagggaggctctatggctgcctcattaaacaactctggtagaatctcagctctataatggagtctatggatctatatttttcctataagacagctgtgtcagacttaggagtgtctttccctcccccaaataaatttccttactactccttcttcataaagcagtggttggtcaccttgactatattaagagcacatcagtgctcgcagcatggcctcttaaactggcgtgggcattttaaattttaatagaaagaatggtaatcaatctgaagaaaatagatcgaaaaccacaattacgggaccgtaccgtcacccaaagccttacctctactatggcacactaaatatcacattagcactag

SEQ ID NO: 41287 - DNA, 879 bp, Homo Sapiens
  misc_feature (388)..(390): n is a, c, g, or t
  misc_feature (393)..(393): n is a, c, g, or t
  misc_feature (431)..(431): n is a, c, g, or t
  misc_feature (446)..(446): n is a, c, g, or t
  misc_feature (469)..(470): n is a, c, g, or t
  misc_feature (472)..(472): n is a, c, g, or t
  misc_feature (477)..(477): n is a, c, g, or t
  misc_feature (479)..(479): n is a, c, g, or t
  misc_feature (514)..(514): n is a, c, g, or t
  misc_feature (565)..(565): n is a, c, g, or t
  misc_feature (577)..(577): n is a, c, g, or t
gggaccttgatgtgaggaaaagataaaatttaaacaataaatttgccacttagattttctagcagcaaagtccgaaaagatagttatatacaaaattctgttttctgaaaacaaaattgtgattcaccttcagaattggccattttttttgtgagtttccttgcatcaaggacactgagaaacacagtcattgtcttaggtgttctatgggaggaagtgaatagagcctttaggaacttcctggtcaagcttatggtgcttattttgatctgggccacttccctccttccagtcatgagtaatcatcaaggagcaagttggagtgtttcaggtgtattttttgtagaacccaaaagattggagccttaacaataaacatcagcactannnaanaaaaaaaaaaaaaaaaaaaaaaaaaaaaaaaaaaaaanaaaaaaaaaaaaaanaacaaaaaaaaaaaacaaaaaannanaacananaaaaaacccaacccccacacacacacaaaaccccnaccccccccaccaccccccaaccccccccaaaaccccccaccaaaaaaaanccttttgggccncccccccccccccccccaaaaaatttttctctgcactctctttttgtggggcgcgggcccccccccaaaggaaaaaaaaaacgttgggacatcccttctcttataaagaaaaaaccgcccgggaaaaccaccacggcttttgtatcccccccacaaaaaaaaaaacccgggggggaaaaacaaggagtgttttttaagaaaaacccaaaaaggggggtttcggagggcctaatcatgggggcccacacccaagggcggaggaaccccgcagcacgcctccaaaaaaaaacaaatcccccccc

SEQ ID NO: 41288 - DNA, 615 bp, Homo Sapiens
aaaaaacaaccatttcctctctgctgagagccagggaaggcgagctctgcgcacacgggcgtccctgcagcagccactctgctttccaggaccggccaactgccctggaggcatccacacaggggcccaggcagcacagaggagctgtgaacccgctccacaccggccaccctgcccggagcctggcactcacagcaggccggtgctaaggagtgtggcgcgggctcgactcccactgctgccggcctcccgagtgactctgttttccactgctgcaggcgagaagaggcacgcgcggcacaggccggcctccgcttcccgggaagacggcgcactcctggccctgggttcttgctgctgcccaccctctgctccctgggatgggccccgaggcgagcagcttcagcacaggcctggccctgctccaggtgcaggaaggaggataaggccgggccgagaggcggcacacctggaccatcccatgggcctccgcccgcgccgccccgaggatgagtggtgatgtcctctagccacccctagcagcgtcggctctccctggacgtgcggccgcggactgggacttggctttctccggataagcggcggcaccggcgt

SEQ ID NO: 41289 - DNA, 814 bp, Homo Sapiens
gctggggcggtcgcagtaatagtggaccttacagaggcggctatggcggtgggggtggctatggaggcagctccttctaaaagaaaatttaaaatgcctgggagtggctataggggtagctctttccaacagcccaagtggggtcaactcctaagccccaccccctcacacacaccgccttccctgttttgcccttgggggagccacttctaaggctgcttacccttgggggtgttcctctatttgcctgccacctctcttgtctctccctctgaagatggactcggccccacatacacattttgtgttacagtcattgatggactctatttttttattattacttggaccttggtcgtttttatactagcaaaatgtcttgttttaatttgtgttttttggggggagggagggagtgaacttgctgattctgtagcaaaacctgggtgggggttggggtggggggtagtttactttgttgtaaggacttgataacctggctacagcgttttctatgaaatctacttggatcccatgcctgaaatttggaagcatatgtacaaaaatcatttttacgttttatttttaataaatcattgtgtttgaccgtacatgtctaacattttttttctaggatccattccgtaccgttttttaagggatatttgtttaagactttacgtgttaattctttattcttgatgtgtacttagagaaacttaagaggtcctgtggtttttttcccctctcctgttgccctgctagttgcgtgttgaattatatcccttacaggcaaaacttttgaagtggtgga

SEQ ID NO: 41290 - DNA, 1113 bp, Homo Sapiens
  misc_feature (33)..(33): n is a, c, g, or t
aacacaaktattttcagttcaggaggcgctttngattgcacagccctgcyagctccggaaaagagggacacagaagctggwtcatttttttwattttttttgggttcttggtccctcctgttttggtacccaacattgaagaccgggacgagcttgcytaccacatcagcatcatgttctatataatattgwggtgtggtactctcctcctcatccttgtcatcattgtgttcaaggagaaacctaaatatccccccagmagggcmcaatccctgagctatgccttgacctctcctgatgcctcatacttaggttccatcgcccggctcttcaaaaatctcaactttgtgctgcttgtcatcacctatgaaactccaagaggaggaggaggagagcaacaccagmaaagtgcmcamtgctgtgtcagaggatmatmtctgagaggaaggtggtgamaactcagggaacacgaacaccccaccttttccttcagcacagctctcacmgcmagmacaaagggcttcgctagagatgtttttggagggaatcagtgggactatttgtggcatggatggcctattcctcctagaacccacgtaagagcttggatgatttagttggagaaaattgcacctatcaccaaatgcaaatttgattcccacctccacccccttttaggttatgggagttggtgttgggacagggtggcagagaatattggagtcaatcctagcttggtctcttgccttccctcttttcctccatccatcgtggacaatgcctgcaaaattttcacaggaagaaagcctattcaggatattaacttgaaatttccagtgtcctaagagcctctcatgaagcccagttctaataagtggcaagctgctctgccggggtcatctcctgggtcatcggactgattgctcaagttctgcaggagaggaagcaccattagaamaactccatcagaacagctccaccgggacttgtgggcctaaattttcctggcctamcgggtctgtcctcaaaccctcttttctaagagctgagmaamcaacmataawaamtttamaaaaamttttttktggcataaaaaaaaacsacycmgggggg

SEQ ID NO: 41291 - DNA, 781 bp, Homo Sapiens
gtccgtctgatttaggtctcttgcagaatagggtggtgaaagctgaaggaactccctaggggttttagctgtagagatcacatgggaggacagcatcttcttccctgccaatttcagatataattggagggagaatttcaggtcttagactataaggatagaatccctttgcttttgcccttgatcacatgtatactaaggtattaagtggcccaagtctttcctttcaccaaagggcagggagaagtgtctatggacagcagggttccaattcttgtcattccaggaatatctgaatattcctggaatgtggaccctgagacagtgctcaggggccactgggagccaatattaggcattgactctcagccaggagtctgactggtctaacaccacactgcaactcctgacctcttgaagtactaagctactttgctgttagtgacagttattacagtttctcagccccattgtctctgccctctgtggcaatggaaggagaatatagagaagacaaaattaaatatagatagacctgagaaggacagccaggatagaattccatttgtgcctattccctgcctcccctcccctcccccatcctaccagttggttattttctcattgcatacgtgatgtgttcactgcctagcctctccctaaagaagagagaagacaagtgggctgactgatctgctctaaatctactgtggtgattaaatcttggttacaacatcctgggaagtttcctgaacaactgtaaaataataaaattattttc

SEQ ID NO: 41292 - DNA, 936 bp, Homo Sapiens
tgtcaggctggtggcgttttggtgtcttcgtttgttatggccgctgctgtcgctatggagacagatgatgctggaaatcgacttcggtttcagttggagttggaatttgtgcaatgtttagccaacccaaattaccttaattttcttgcccaaagaggttacttcaaagacaaagcttttgttaattatcttaaatacttgctttactggaaagacccagaatatgccaagtatctaaagtaccctcagtgtttacacatgttagagctgctccaatatgaacacttccgaaaggagctggtgaatgctcagtgtgcgaaatttattgatgaacagcagattctacattggcagcactattcccggaagcggatgcgccttcagcaagccttggcagagcagcaacagcaaaataacacatcgggaaaatgaaaaactggatacaaacgaggcacttaatacatgtatataatgtatttcttttgtacagtgaagacaaaaaaaatgaaaactcttcctatctacctttattatggtagcccctagaacctttagtgtgctttttcatccaactttttattgttaatagactatttctgttaaacctgaattgttctttgatttccctgtggatttgtaaggtgtttttcttttttacgcatttagcataatcagctgattaagaatggaaaagttaggtgctttagaccaaataaggcactggggcatggggtaggggtgggccaccaagtatactgaattctaaggctagctgttcctgacatatagtagggcaagaccatctcctggaaccttactgtctcagatcaactactctaccactctactctaagatgtagtgagagtagcggagtcactgacctctttaaatcataggacaggaactgcataaaggttcttgaattctgcaggaca

SEQ ID NO: 41293 - DNA, 862 bp, Homo Sapiens
ctggtccggtccggattcccgggatgaaacgcccaggtaaactcaatgcacagaaacttaaagaccttggtgttccaccaggtcctgcctatgggaagctgaaaaatggaatttctgttgttctggaaaatggggttacaatttctccccaagatgtcttaaaaaagcctattgttggaagaaaaatctgcatattgggtgactgctctggggttgtgggtgatggaggagtaaaactgtgctttgaagcagacctgttgatccacgaagcaaccctggatgatgcccagatggacaaagcaaaggagcatggccacagcacaccacagatggcagcaacatttgcaaagttgtgccgtgcaaagaggctggttctgactcacttcagtcagaggtacaaaccagttgccttggccagagaaggagaaacagatggcattgcagaactaaaaaagcaagctgaatcagtgttagatctccaagaagtgactctagcagaagattttatggtgataagcattccaatcaagaaatgaaaccagtgttcctgagtgcacactgacatgtctgtgaatatgttactgaacctatagtccagtttttttatttcttgttttagtctgaaattatttgggccctaataatcctaaaaagaatggagctgcattgatgaattggctcagtatttaaagggagcaaactttttgataataaatcttttttagagaaaaaaaacccagcatcctttttgaagtccagatttgtcaaaatgatagactattcagttatacatctttattttgtgctactaccacagatagcccataattcctgcagtccctgggctttagcttctgcccaa

SEQ ID NO: 41294 - DNA, 420 bp, Homo Sapiens
acgcgtccggttgaaggctagaagtgtgaagtgcagatgagtgtgtgttcttccccaaggtccccccacagctccaggacaccgctgtcctggcatttgtggccactcactttgtaggaaactcatctccttcctgaggagccgggaggctggaccagtcccgtcgtgcagtcaggtgggcggtgtgtctttccagaaggtcacgtggaaatgtctcgggacttgggtcccggagtgcccgtgaagcgtgtttttgctcctgaggtgcattttctcatcatccttgctttaccacaatgagcaatgaggtcgggttttatatgcaacttattgtatctgaattcctgtagcacacctcctaggtatgatttttttaaattaaagaattcagaataaacattttttgatccaaaaaaaaaa

SEQ ID NO: 41295 - DNA, 642 bp, Homo Sapiens
atcgtgttagtgaattttcaatatggaccaggaaggcatatgtattttgaacttgagtgaaaaggttgaagttacagacttttgcatagatggtctgtcaatttaaaattccagaatttattattgccatattttcacatgctgcttatacaagattattattgagtagtaactgcttccctgtctatgtagaagtgcctgtgtttttatttatcgttcagatcaaagaccaaaacattttcttaaatatattttatgtaatattttatttgtatacagtgttgttgatgaaactatttaactagagcatgatattttaacatgttaaggtgtaacatatgttaaataaaactgttattttcgaattttaaaattcgtctcagggggtatgaactactagagtttaaaattctgccaaactattacttatatgtactatggtgtaacatactttcttgaaatatccggttatagaatcgaaggttcttatcagatgggatactggggactataaccaatggaactacagccactgtacaccacaaaacacaagaaacagcacaaaaccgtgtgccgcacccggccccggaaaaagccaacgacacaatatccatggacgcagggccccaatagtaaagggaa

SEQ ID NO: 41296 - DNA, 559 bp, Homo Sapiens
ttttagtagagacggggtttcaccatgttggccaggctagtcacgaactcctaacctcaggtgatccacccacctctgcctcccaaagtgctgggattacaggcatgagctaccacacctggtttggagagtcttaattaaggaaatttccctaatgttcatttattttctaaatccagaccgtgtttcagaataatccttacttgagagtagccattttcttgcctgtacttgtcagaactagaggaaatagccaagactaatgaaaaagattactctaacccttaaaagacttttaaattcactactagagtggtcattttaaaaatacatccatgttttaacttatttgagccttctttatgagtaaatgattcctccttgttctgtctttcaaaccagctaaatatttgtcacaaaagtgcttttttctcactgttgcctattttcatatatcatgctttaaatagctccaattttttaataaaatcctctttaccccctatatccaatcgttatatatctatcccaatagccttaggcctacacttctttccta

SEQ ID NO: 41297 - DNA, 545 bp, Homo Sapiens
ctctgagttcacctagagaagtctaagcataacagctttctttcccagcacgagcctttatagctctctttagctcaaccactctgtccatccagccaatggatgtcccttcccctgtaccccaatttcaagcttattttaggaagccttgaactaccatgtatcctggctcctagctgagtttattagaggtatggagcagtgcaacttaaactcaagttgcacttacattttgaattttaaaatgatggttttatctgttgtgtgaagtggttcacccttgaggaccaggagcctccatatcctgactgaaaaccttttctgagacttagagtaacagtacttttggttccttgagttctcctgtctccagataccaaatgaccttgacttttctgccttgtgaattcgtagtccaatcagctgaaattaaatcacttgggagggacgcatagaaggagctctaggaacacagtgccagtgcagaagtttctccaggtggcctcctttccaacaatgtacataataaagtgtatgcactttca

SEQ ID NO: 41298 - DNA, 690 bp, Homo Sapiens
ttacaatatctatatagatgtaggtctttttaaatttacctagtcattcttctatcatgtatattgatgctgaaagaggaactggtcagctcctctggacaacaaattcttagtctatagtattaggagacatcttctgttttgcaaatgtctgtgaatctgagcaacctggcattctgcttactggccagaaagctggcgggtgacatttgtaacatttcctctttgagactctgagttcacctagagaagtctaagcataacagctttctttcccagcacgagcctttatagctctctttagctcaaccactctgtccatccagccaatggatgtcccttcccctgtaccccaatttcaagcttattttaggaagccttgaactaccatgtatcctggctcctagctgagtttattagaggtatggagcagtgcaacttaaactcaagttgcacttacattttgaattttaaaatgatggttttatctgttgtgtgaagtggttcacccttgaggaccaggagcctccatatcctgactgaaaaccttttctgagacttagagtaacagtacttttggttccttgagttctcctgtctccagataccaaatgaccttgacttttctgccttgtgaattccgtagtccaatcacgtgaaattacatcacttgggaagggacgcatagaa

SEQ ID NO: 41299 - DNA, 895 bp, Homo Sapiens
  misc_feature (732)..(732): n is a, c, g, or t
  misc_feature (764)..(764): n is a, c, g, or t
cttggcttctgggtcaatctccagcctggccactatctagctatgaccacgttgctcctggagatgagcacgccctttacctgcgtttcctggatgctcttaaaggcgggctggtccgagtctctgttttggaagctcaaccagtggctgatgattcacatgtttcactgccgcatggttctaacctaccacatgtggtgggtgtgtttctggcactgggacggcctggtcagcagcctgtatctgcctcatttgacactgttccttgtcggactggctctgcttacgctaatcattaatccatattggacccataagaagactcagcagcttctcaatccggtggactggaacttcgcacagccagaagccaagagcaggccagaaggcaacgggcagctgctgcggaagaagaggccatagctgctccagccggggctccggggcggcagcagagctggcacaccgattctgggaagccccgcgaatgatggcttttgaattaatgaggcagtgaatgttttgtgtttacttctaagggaaatactaactttctttcgcattagtattaattttgaagtagctacaaagtatttttaagaaattataattttatgactgtctggcaggctctgtcagtttagccgcgccggaccgtgttaagcatctaggagaggagtccatggtgtccaggcatcggggcgttacacctgttgaggagtggggtggctntgaatgctggtctctgactcctgactaaaagngatctgtccacctcgttcttccaagttttgggattacggcgtgagccatttacccgtccggagcgggtattctgattgctgcgctttaactattatgccaagtgtatagtacctattatcacatttacgaa

SEQ ID NO: 41300 - DNA, 628 bp, Homo Sapiens
ggcaccccagcctgcggtccatgtgcaggggcaggagccactgactgcctccatgctggctgcagcacccccccaggaacagaagcagatgctgggagaacgcttgttcccactcatccaaacaatgcattcaaatctggctgggaagatcacgggaatgctgctggagatagacaactctgagctgctgcacatgttagagtcccccgagtctctccgctccaaggtggatgaagctgtagcagttctacaggctcatcatgccaagaaagaagctgcccagaaggtgggcgctgttgctgctgctacctcttagacaaggaaaaaccgattcaaaagccaaataaccccttatggaattcaactcaaggtttgaagacttcctagcttgtcctatggacctcaacaccaaggattacaaattgcaaatttaataggtcattttgtatcaaaaggtcaattatgaagcacctagaatttttcaattatacgaatatgttctttgggttctgctgtggcccagacagtgttaactttttttttattgtgggttttgattttttcccccagaaattggttttatttgatgtacccaagtcttacgtttcccaataaagaaaaaaaatct

SEQ ID NO: 41301 - DNA, 1092 bp, Homo Sapiens
  misc_feature (570)..(574): n is a, c, g, or t
  misc_feature (576)..(580): n is a, c, g, or t
  misc_feature (582)..(587): n is a, c, g, or t
gggtccggaattttcaaaatcgcgtcgacccacgcgtccgttcgcgatttagctcttttattgtgcttacttggtccaaatacatctgtggggtgttttgtcatttcttaatgaatgaatcatagttataaccaggggccaagctgcccaagaggctcttcagagatcatggatgctctctttctggaagctgtggcctgatggagcagccccattccagggtcccatctgtccggagttgtgtatgtcaagtccggctcagtctttatttccaacactagccgtggtcctgtgcagtcaagctctcagctagtgtttagggctgtctgtcagaaatggttatacgtgggcaaaagaagatctgacagctcctatataccttatcttactgaattcttaaactttgaaccagttcttccacttactgacttgttaccactgctgactttctgaaaagttttccagtttttttttgttttttgttttttgttttccagtaggggattagaatgtttagtcctacttagtaagaaaaatattgtatttttaatcattcatagtgctggtaannnnnannnnnannnnnnaaaaattggggggtggccgggcgcagtggctcacacctgtaatcccagcactttgggaggccaaggcgggcggatcaccctcatgcctgtaatcccagcattgggatgggaggctgaggtgggtggattgcttgagaagttcaagaccagcctggccaacatggcaaaacccccgtctctactaaaaatagaaaacttagctgggcatggtggcacacgcctgtaatcccagctaccggggaggctgaggcaccagaattgcttgaacttgggaggcagagtttgtagggagcccaagatcacgccactgcattccagcctggcccgaaagggtgagaccggtctcggaaaaaaaaggaaggaaggaaggaacaagaaacaacctggggggaaattaatggtccacccttaaataccctggacagtttcccggaaatggaaatttttttttttctggaagagcaagggatgtgaaccccctctcctaaggagcctttaatgggtt

SEQ ID NO: 41302 - DNA, 838 bp, Homo Sapiens
  misc_feature (75)..(75): n is a, c, g, or t
cggcaagggtatggtggggttggaaggggaatgggcagaaccttcagagcctgagggctcctatccaggccccanggagaagcactaggatgtctgactgaggaggctgggctggagaaccagtgggactggccagctcctttggtttgggctgggctggcccctgacctctatcctcagaaactgacctggtcatctgtggtaagaagttccctcttttgcagcagaaagaacctttcaagaaaaggtggttcgccctggattgccatgagcggaggctgctctattacaagaacccactggatgccttcgagcagggccaggtttttcttgggaacaaggagcagggatatgaagcctacgaagacctgcccaagggcatccgaggaaatcgctggaaagccggactcaccattgtcaccccagagcggagatttgtcctcacttgccccagtgagaaggaacagcaggaatggctggaaagtttgcggggtgtcctgtccagccccttgacgcccctcaaccggcttactgcatcaacagagagtggccgcagcagcaggtgacccattaactgaggaactggctgccactgaacacctggaactccttgtgggaagaagtttgcacctcggccctggctgcccaccatcagtgccccgcagtcagcagccattcctggcagtgaactctgccaggactgaagctgtggctttatccatcagctccctgggccttccccggaaaccaactcggggatctgaggatctggtgcattagatgaacatctatcccctcctcccccataaaacctaggcttgaaatgccctacaggccc

SEQ ID NO: 41303 - DNA, 658 bp, Homo Sapiens
ctaaaaggtcagctcttctgtaaaatgccatgcttcgcagcttcaaaaagcaaaattctgtatttcatggagggagggaagggtcattctcttctaagaaaaatagactggacaggcgaatgcatgcatgcatgtgtttagagttgcttctcagaagacaaagagatgatagcaactattaaaatatgaatgaatgaatgagtgaatgagttgaaggcctagctcgggctgataaagcttttgccttagtagaggttttatgtcaacaccttcaggagggaagcccttatttctgggttgaactccccttccatgatattatgctagcaattgccatcacttagttcctggcgaaggcagaaaaagaaaacaaaaaatcagcattgtcattgacaaaactggatgctgaagataaagtaaaattgtcttttcccttgtcccacatttttgggattaaagccagaattgaataggaaatacagtactatttctgaagttgatagccgatctttaagaagaccctgtctttaaaatgaaactagcaggcaaacacctaaataatcgaaaattaccaaagaacaccaacgaaacaagaaaacctaaagatttttacttcctattcttattcctttccttatactgggacaccccttgcatt

SEQ ID NO: 41304 - DNA, 701 bp, Homo Sapiens
gaccttctggctgctggctttgaggagcacaagttcagaaacttcttcaatgctttttacagtgtggtggaactggtagagaaggacggctcagtgtccagcctgctgaaggtgttcaacgaccagagtgcctcggaccacatcgtgcagttcctgcgcctgctcacgtcggccttcatcaggaaccgagcagacttcttccggcacttcattgatgaggagatggacatcaaagacttctgcactcacgaagtagagcccatggccacggagtgtgaccacatccagatcacggcgttgtcgcaggccctgagcattgccctgcaagtggagtacgtggacgagatggataccgccctgaaccaccacgtgttccctgaggccgccaccccttccgtttacctgctctataaaacatcccactacaacatcctttatgcagccgataaacattgattaattttaggccatgcagtggaacctgtcacctaatgggactgcattctgaatggaacattccggctcttcaattttttaagcaatttagactgtagcaagaaaatgtgcagccttttgggcaaagcccctgggaacgaggcctacccactatggactatggtaacttggtaggatttttagtatttattttaatgggagggacaaatgctttctaactgggccccccgactccgcaccccagt

SEQ ID NO: 41305 - DNA, 654 bp, Homo Sapiens
gggaagcgagactcctggagcaaccccaggctcaaaaatatgggatcctacacctagccacacaccagcgggagctgctactcctggacgaggtgatacaccaggccatgcgacaccaggccatggaggcgcaacttccagtgctcgtaaaaacagatgggatgaaacccccaaaacagagagagatactcctgggcatggaagtggatgggctgagactcctcgaacagatcgaggtggagattctattggtgaaacaccgactcctggagccagtaaaagaaaatcacggtgggatgaaacaccagctagtcagatgggtggaagcactccagttctgacccctggaaagacaccaattggcacaccagccatgaacatggctacccctactccaggtcacataatgagtatgactcctgaacagcttcaggcttggcggtgggaaagagaaattgatgagagaaatcgcccactttctgatgaggaattagatgctatgttcccagaaggatataaggtacttcctcctccagctggttatgttcctattcgaactccagctcgaaagctgacagctactccaacacctttgggtggtatgactggtttccacatgcaaactgaagatcgaactatgaaaagtgttaatga

SEQ ID NO: 41306 - DNA, 500 bp, Homo Sapiens
tgtgtagtggtgaagactcggcttttaatgtacttgtcacctgagtgatgtacattgtacccaataggtaatttttcatccattaccctccttccgccctcttcccttctgagtctccaacatcccttataccactgtgtatgttcttgtgtacctacaagctaagcttccacttataagtgagaacatgcagtatttggttttccattcctgagttacttcccttaggataacagcccccagttccgtccaagttgctgcaaaatacattattcttctttatggctgagtaatagtccatggtacatatataccacattttctttatccacttatcagttgatggacacttaggttaattccattcaatttcattcaatttaagtatatttgtaaggagctaaagctgaaaattaaattttagatctttcaatactcttaaattttatatgtaagtggtttttatattttcacatttgaaataaagtaattttttaacc

SEQ ID NO: 41307 - DNA, 729 bp, Homo Sapiens
aggtgctagtgctggaagagaatggactgaacaggagacccttctactcctggaggccctggagatgtacaaggatgattggaacaaagtgtcggaacatgttggaagtcgtactcaggatgaatgcatcctccactttttgagactccccattgaggacccataccttgagaattcagatgcttcccttgggcctttggcctaccagcctgtccccttcagtcagtcaggaaatccagttatgagtactgttgcttttttggcatctgtggtggaccctcgcgtggcatctgctgcagcaaaagcggctttggaggagttttctcgggtccgggaggaggtaccactggaattggttgaagctcatgtcaagaaagtacaagaagcagcacgagcctctgggaaagtggatcccacctacggtctggagagcagctgcattgcaggcacagggcccgatgagccagagaagcttgaaggagctgaagaggaaaaaatggaagccgaccctgatggtcagcagcctgaaaaggcagaaaataaagtggaaaatgaaacggatgaaggtgataaagcacaagatggagaaaatgaaaaaaatagtgaaaaggaacaggatagtgaagtgagtgaggataccaaatcagaagaaaaggagactgaagagaacaaagaactcactgatacatgtaaagaaagagaaagtgatactgggaaaaagaaagtaga

SEQ ID NO: 41308 - DNA, 576 bp, Homo Sapiens
gcacgagccaccaccatgagctggagtggggatgacaagacttgtgttcctcaactttcttgggtttctttcaggatttttcttctcacagctccaagcacgtgtcccgtgcctccccactcctcttaccacccctctctctgacactttttgtgttgggtcctcagccaacactcaaggggaaacctgtagtgacagtgtgccctggtcatccttaaaataacctgcatctcccctgtcctggtgtgggagtaagctgacagtttctctgcaggtcctgtcaactttagcatgctatgtctttaccatttttgctctcttgcagttttttgctttgtcttatgcttctatggataatgctatataatcattatctttttatctttctgttattattgttttaaaggagagcatcctaagttaataggaaccaaaaaataatgatgggcagaagggggggaatagccacaggggacaaaccttaaggcattataagtgaccttatttctgcttttctgagctaagaatggtgctgatggtaaagtttgagacttttgccacacacaaatttgtgaa

SEQ ID NO: 41309 - DNA, 763 bp, Homo Sapiens
ctttcctgagtcttagaccgatatggccagttgcgcaggtttctgccaactgtgaagtatcctcctggagcagtgacacaatcttggcggagcattgctacccccgctgccccctccacagttcctgaatggtgctaaggatctgcagcagttggcaacgagctggggctgggggcggcctccatgtccactgagatcataggacactccaatggggatgggacctttcccctcctccatcagaggtgctctgaccctaggttacacgggaaagtgccccacatgcaagtctccctgagggttctgcccctaaaggcagactgcctcatgcccgctagctgtgaggttcattgctaccctcggccctactagccctctcttcccccttgtgcagcggaccacttgcccagtttgctgtggtgctagccttccccatcatccaccaggtgatttctgggtcccagggaaagaaagagagagctgatgcaggtttctacagtgaggaacaggcgtttcccaggccccacacccagatttctctatctttgctgtgttttatggcctgggactgagtccacacggatagatttttccttgtaaccttgagacgagaattccaaggagtgtcaccatcagaggcttctcttcattgtgtcaaagaagcccctagctgctctcgtggcctccttcccccactccctatcccttcacctgtgaaatgcctttgctttgcatattgtgtgtggatgtgtgtgtgtgtgtg

SEQ ID NO: 41310 - DNA, 599 bp, Homo Sapiens
  misc_feature (554)..(560): n is a, c, g, or t
  misc_feature (565)..(565): n is a, c, g, or t
  misc_feature (568)..(569): n is a, c, g, or t
  misc_feature (571)..(576): n is a, c, g, or t
  misc_feature (581)..(581): n is a, c, g, or t
  misc_feature (583)..(583): n is a, c, g, or t
  misc_feature (593)..(594): n is a, c, g, or t
  misc_feature (596)..(596): n is a, c, g, or t
tgagaatgagtttattcctactggagcttagttccaatgcatttggctccagaaagaccccagtgccttttgacaatggccagggttttacctacttcctgccagtctttcccaaaggaaactcattccaaatacttcttttttcccctggagtccgagaaggaaaatggaattctggttcatactgtggtcccttgtaacctcaggtctttaatgtgatcactttcaaatttaaaagatccaggtggaaatatttttactatagtaataattctacaaaatacctgaattcttaacactgttatatttcagtataagtggtggctttttcttttcatgtctttgatctggttttattcctgtaattcagccacctgattttgtgaggggggggaataatatgtggtttttgtacaaacatgtttctcagtgtgttgttattttggaaaaaatgaggggagggagtttggcaagaatggagaaaatgaatgaagaaggcctaatctctctctttttcagtgaataaatggaacaccatttctggattctaaaannnnnnnccccnccnncnnnnnnccccncncccccaccannanaac

SEQ ID NO: 41311 - DNA, 623 bp, Homo Sapiens
ctgacagcttgaggaattctctccacacctaggcaataattacgcttaatcttcagcttctatgcaccaagcgtggaaaaggagaaagtcctgcagaatcaatcccgacttccatacctgctgctggactgtaccagacgtctgtcccagtaaagtgatgtccagctgacatgcaataatttgatggaatcaaaaagaaccccggggctctcctgttctctcacatttaaaaattccattactccatttacaggagcgttcctaggaaaaggaattttaggaggagaatttgtgagcagtgaatctgacagcccaggaggtgggctcgctgataggcatgactttccttaatgtttaaagttttccgggccaagaatttttatccatgaagactttcctacttttctcggtgttcttatattacctactgttagtatttattgtttaccactatgttaatgcagggaaaagttgcacgtgtattattaaatattaggtagaaatcataccatgctactttgtacatataagtattttattcctgctttcgtgttacttttaataaataactactgtactcaagaaaaaaaaaagaagaaaaacaaacagacaaaaaagggggg

SEQ ID NO: 41312 - DNA, 759 bp, Homo Sapiens
ggaagagatgctgagggtaacaaggaactcacttggcagtcagagcatcatgctttgaggtttggggtgctcaggctgggagggtagaatgccattccagaggacaagccacaaaaatgccttaatttgagctcgtatttacccctgctgataagtgacttgagagttcccggttttttcctcttgtccttccctcccttctgtccttccatgtgtggggaaagggtgtttttggtagagcttggtttccaaagcgcctggctttctcacttcacattctcaagtggcagtttcattatttagaatgcaaggtggacatcttttggatatctttttctatatattttctaaagctttacatatgagagggtatagggaggtgtttataaaacacttgagaacttttttccttaatatcagaaagcaaaaaaataaaaccacaattgagatttgcctttcaaaccctcaggtttgcctctaaccaggtgtccctggtcaccatcagagtactggaatacgggaaccgaggagaccttggtccttttgtttttgttctggactcttgggagtggaaatgagaatgagtttattcctactggagcttagttccaatgcatttggctccagaaagaccccagtgccttttgacaatggccagggttttacctacttcctgccagtctttcccaaaggaaactcattccaaatacttcttttttcccctggagtccgagaaggaaaatggaattctggttcata

SEQ ID NO: 41313 - DNA, 936 bp, Homo Sapiens
ctgttaatcattgttttcctttatgtccaatgatatgtttaaagtaaagctaaagtccaggcacggtggcttatgcctgtagtcccagcacttgtcaggccaaggcagggggcatctcctgaggtcagaagttcgagactagcctgcccaacatggtaaaaccccgactctactaaaaatgcaaaaaaattggacaggcatggtggctggcaccagcaatcccagctacttgggaggctgaggcaggagaatcacttgaacccaggaggcagaggttgcagttagccgagatctcgccattgcactccagcctgggcgacaagagtgaaaccccgtagcaaaaaaataataataatagtaattaaataaaaataaagtaacgctagaactgttggaccaaatcaagtatatgggtaaatacagaagaaataactgatggtggaaaagatgtttctctttctttaacgttatcattattagttcgttttacatatcttcagacactataggttttaaaaataggtcttctttccatgtaggtcaatcacagagtaaatctgcacactgtacttgttaacatgtcggtatcttcccaggtataatgcgatgaagcttaatctgacatacttgggtattgctacttgaaatttaccttttcctatgatttacctggcaacactggatgcacctagatgatgtgtggtgcagtggtcgacgcgctgtgtcgtgctactctttaaactctctataattatcctaaacaaagcacagccccacaaacgcagaacttgacaacgcaggaccatatcacatgaaacaagacacggcacaacccgcaacgcttcacccaagaccaaacacacccgactgcaacacccacgcacacacccatcacggggtggtgtcaaacaacaaacccacacccaacacacaacc

SEQ ID NO: 41314 - DNA, 615 bp, Homo Sapiens
tggctagaaagggactgtcatgtcccatcctttggccagattgactggggatgtccggacagatgcctgcatgggtggtgagggccacatctgcacacgagccagtggctgcttgcagttcactgctgtgatgccagagtgtgttcaaaggtgactctcctgctcttctggactcttctctcaggcaagaaaggctgcaggctgcctgctatgtgatgcctgagcacaaagccaaggaactgaactaagtctttctgttaagtcctgagtttgtcattggcaggtttacttgtggccagctctctctgcccttgggtgtctgagcaggcagaccagaagaccaggcactggacctgcatgccaaagggactggtcatctcctgaggacctgtaaatgaccctgtggactgttccgcacgatccggaacccactttttattcactccccatgtctttggccttcctcttctttctctttccctctgccatcctgacactgatagtttgtcatataaattccccgggttgtgtttttttttcctagaaaaaaattaaaagggaaaacaaaaccaaaaaaaccagaaaccacgaataaaaaaaaaaaaaaaaaaggac

SEQ ID NO: 41315 - DNA, 542 bp, Homo Sapiens
gcgtccgggacgggtcaccattaaatggtgtgcaagcataattctgttcaaaaatgaaggcatgtttagaggtgtgtcacagttaaaaaccaacctgaactttgcagttagattttaaaagatggtcagttagagtagaaatagcttagaatattccattgagtctaagatacagttagaaatcaacatctttgaaattagggtgtgtcttttaatcagttgatgtcagagtttaacgggcagcatttttttctttcttgggattacaaaaaatgatggtgcattctataattggcagcatcttagatctgaggaagtatgatacttgtttgacggaatggttgacggcagaattttgttaaaaagctatatcttcactgtattttaacacattatctaatttaagaaattgttaagatcccccacctggcagaggacccagtacaaaataggcactcaatagatgttacaccaactttggaagggcaaacatatttcttaatgagaggcagtccttcatgttttgcaataaaatgactttt

SEQ ID NO: 41316 - DNA, 717 bp, Homo Sapiens
tttttaccaattcagggtgggagagaaaactgcagcaccccagcatgtgagttactcaggtgttgggggctagaagggacagtgcgtttaaacaacactcagagctctggccttaaacctgtggccccccaagtctaggagcctcatctcttcctggcagtcatgcgggcaggaggtcctgaaagggaaaacccattcagacaactgttccccaatctaccagccatctgcaggggtcagtgaccgtggccctctccctcctctagaatgtgccacttatgaagagtgccccatggggaaaaggagactcagctgtcccttggcagcttgtgccagtatcccagggcagaagtttccacaggagcctcttgcccttgcgcagagccactgtgagaggcggtgggagccaacacccttgggggagggggcagtactgctcggcacatcccagcatcaggtcagatcactgaaattaaaaaatgtgaattaagttcatatccaccttttggggaagcaggacaaaccaccaccccaccaagtgtgtgacttctccatatcccactgcagtttccattttttaaatgggaattttcaatcccctgtgcttgtctaacgtctgctttaaaaagtttgagaccctgttactgtttgaaaatgcatgcatgttacgatgaatctccaacctgaggaaaaaaataaaactcaaaaagctttgtg

SEQ ID NO: 41317 - DNA, 835 bp, Homo Sapiens
aaggagaaagagtttgaggagacaatggatgcactccaggctgacatcgaccagctggaggcagagaaggcagaactaaagcagcgtctgaacagccagtccaaacgcacgattgagggactccggggccctcctccttcaggcattgctactctggtctctggcattgctggtggagccatccctgggcaggctccagggtctgtgccaggcccagggctggtgaaggactcaccactgctgcttcagcagatctctgccatgaggctgcacatctcccagctccagcatgagaacagcatcctcaagggagcccagatgaaggcatccttggcatccctgccccctctgcatgttgcaaagctatcccatgagggccctggcagtgagttaccagctggagcgctgtatcgtaagaccagccagctgctggagacattgaatcaattgagcacacacacgcacgtagtagacatcactcgcaccagccctgctgccaagagcccgtcggcccaacttatggagcaagtggctcagcttaagtccctgagtgacaccgtcgagaagctcaaggatgaggtcctcaaggagacagtatctcagcgccctggagccacagtacccactgactttgccaccttcccttcatcagccttcctcagggccaaggaggagcagcaggatgacacagtctacatgggcaaagtgaccttctcatgtgcggctggttttggacagcgacaccggctggtgctgacccaggagcagctgcaccagcttcacagtcgcctcatctcctaagcactcctttcccctgctgtccccttcgaccctc

SEQ ID NO: 41318 - DNA, 581 bp, Homo Sapiens
ttgttttaagtcttcaatatcttgagaaatagtagactgtatgttgaaaattgtactgaaataaagtagaaaattgttacgtaccatatttgtaactatcaacttttaaaacttttaacgtttttgttacatgcattgtaattctgctttgtctataagatatggtcaagtacagctctgtgaaagttctgattctcttccttccctgtttgtcaatgttttattctgaagtaaacgttagctctacatataaatcctggaacagaaattgtttatagagactacactaattattttaactgtatacatctgtttaatttgaacacactacatcgtagggtgactgatttttgaagtataccacagacaaaaagttgttactatggtaaactaagctagtttaacacttgagcaaatgcttaagaaggaattaaaaaaaaaaagctttgccaatagctaaaaagtacaagctattaaaaatcagattgaaaagttttgagaaaatgttatttttactgaaagcaagcagtggcctataaagaacattcttaggagccttttctatttgcgttcaaaactgt

SEQ ID NO: 41319 - DNA, 693 bp, Homo Sapiens
ggttatgatccaagcatataaaaagcctgtataatactctttcttcaattctgtttaacagaataaaactacttaattcctgtgggcaggttatattttaagttcaaatgcattgctttaacctttggttacttttattctgttaaacagaattgaagaaagagtattataccggagtgtagtaggctagggtgattgtaagaactctgtaatagaatgtcattgtggatgttacctttttcagatccaagcatataaaaagcctgtatattttttaaaaacacatcttaactccacgctttacgatattataaaagttgaatggttcctcttggtaaggatatttgcttacaagtgctaggaaataactcactgatacctgcgttaacatactttgttttgcctagagaggggcaataaaaatgaaccaaaggatatttccagaaaggattaagaaagctgtttaagaaggccatgactctttaggtgtgtatgtgtacctttcagcatcctaggaatttttatactaaaagcaaaatgttttttccagttagtcttcttcaaggaattactattgttccttttgtcacaggtaaaatcagtgttgggaattataatttgagaaaaatattacccagtaacattgaatgtagatggctaaacgattcttactcagtgtgatgtataatgatg

SEQ ID NO: 41320 - DNA, 552 bp, Homo Sapiens
ggccattatggccggggggatgggtggggtggggatcttgcaaatttctattctcttttactgaaaaagcaggggatgagttccatcagaaggtgcccagcgctacttcccaggtttttattttttttttcctatctcattaggttggaaggtactaaatattgaactgttaagattagacatttgaattctgttgacccgcactttaaagctttggtttgcatttaaattaaatggcttctaaacaagaaattgcagcatattcttctctttggcccagaggtgggttaaactgtaagggacagctgagattgagtgtcagtattgctaagcgtggcattcacaatactggcactataaagaacaaaataaaataataatttataggacagtttttctactgccattcaatttgatgtgagtgccttgaaaactgatcttcctatttgagtctcttgagacaaatgcaaaactttttatctgaaatgaaaagactttttaaaaaagtaaaacaagacaagtacattctttagaaactaacaaagccacatt

SEQ ID NO: 41321 - DNA, 898 bp, Homo Sapiens
  misc_feature (728)..(728): n is a, c, g, or t
gcacagtattggatacctaccctggtgttagtgaagctgatgcaggagaaactctatcttctactggtccttttgctctggaacctgatgcaacaggaactagtaagggtattgaatttaccacagcatctactctcagtttagttaataaatatgatgttgatttatctttaactactcaagatactgaacatgacatggtaatttccaccagtcctagtggtggtagtgaagctgacattgaagggcctttgcctgctaaagatattcatcttgatttaccatctaataataaccttgttagtaaggatacagaagaaccattacctgtaaaagagagtgaccagacattagcagctctgctcagccctaaagaaagtagtggaggagaaaaagaagtacctccccctcctaaagagacactgcctgattcaggattttctgccaatattgaggatattaatgaagcagatttagtgagaccgttacttcctaaggacatggaacgtcttacaagccttagagctggcattgaaggacctttacttgcaagtgatgttggacgtgacagatctgctgccagcccggttgtaagtagtatgccagaaagagcttcagagtcttcttcagaggaaaaagatgattatgaaatttttgtaaaagttaaggacactcacgaaaaaagcaagaaaaataagaaccgtgataagggggagaaagagaagaanagagactcttcattaagatctcgaagtaagcgtttccaatcttctgaacacaaatcacgcaagcgtaccaaggaatctcgttctagggcaagaaagagatcatctaagtccaagtctcatcgctctcagacacgttcaggggtcacgtttcagaagccgggagaaaaacc

SEQ ID NO: 41322 - DNA, 624 bp, Homo Sapiens
atttgtttaagtggctaacatccaaacgactgtttgaaggcatcagagtaatcttcagtgtggaatgttaaataacgcttttatactgtattttgtactatgatgtaactccccttccttatggctaggctactgtaacacttgcctgtaatcagtgaagggctgtgcaccttgtactatttcacaatgggttctgctggacagataatgggccagtgttattgaggtgatcaagatctgttccacagggctaatgccaccatctcccctcaaaattttgtagaggttctaaaaagaaagtggtatgttgtgtgatgatcagcactaagtcctgcattcctgttaaagccacttgggtcataagaagggagtaaaaaatgaagtctgactagaattctattgcagaggccaagtacatttagtatggcattgagttgtgatatagttttactttgatgtgcattttgaatttcagctacacctagatagacgtaaaatgataattaaaatgctgtaaccaacttatctaataaaattggcaaccagccactattttgttgactatgagaaagttaaaagtttatgttaatttttagggtctgatagaatatttcatgtgtatta

SEQ ID NO: 41323 - DNA, 756 bp, Homo Sapiens
  misc_feature (1)..(1): n is a, c, g, or t
  misc_feature (756)..(756): n is a, c, g, or t
naaaaagcggtcggtccgattcccgggatccgtctgagagaagtctcctttgagaagggccaagaggctctttcctgagtgtttgctttcggtttgttggtatgcctgtattgctgggctgtgctgctgctcgaagcagatggttttgactgtctttttgctctttcctatataatgaatagatgagtgaaaggagttttctttttctctttagtacttacgtattgggattcctgtgtcttacagctctccctctccaaataatacacagaatcctgcaactttttgcacagctggtatctgtctggtagcagtgagaccccttgtcttggtgatccttactgggtttccaagcagaggagtcacatgattacaattgccagtagagttgttgtttggggtacaagatgagaagaaagaaaaacctacagcctttctacattctgacatgctaacagtggtttaagtttctaaagtgtttaccagatgctgaaggcaaggggagggagcagaagcacttatgtttacggatattttaaactctgttagagagcagcctttgaaaatccccaatttggttctgctttttgacctctctctaccttttcagggtaatctttgtggcacaaacgatagcatttccaagctttagagttttctgaattcctgcgccttcctgacgtgagccctgagcgatcttctatgcagttctgccatgcgtcctgttggtctctctgtgttctttgttacttgggn

SEQ ID NO: 41324 - DNA, 774 bp, Homo Sapiens
attgacacggatgcctacacctaggtttatttattaaaagcgcttttttacattccttgcaatactgatggtgatgatgcgcaggtctcattggtttcattcttgcagttgccatacagtgcctttccatttatttaacccccacctgaacggcataaactgagtgttcagctggtgttttttactgtaaacaataaggagactttgctcttcatttaaaccaaaatcatatttcatattttacgctcgagggtttttaccggttcctttttacactccttaaaacagtttttaagtcgtttggaacaagatattttttctttcctggcagcttttaacattatagcaaatttgtgtctgggggactgctggtcactgtttctcacagttgcaaatcaaggcatttgcaaccaagaaaaaaaaaattttttgttttatttgaaactggaccggataaacggtgtttgagcggctgctgtatatagttttaaatggtttattgcacctccttaagttgcacttatgtgggggggtggggttgatagaagtttttaatcacaaagtcacaggacttttttcttttgtaactgagctaaaaagggctgcttttcggtgggggcaggtgaaggctcacaggagccctttctcttagagggggcaagtactcttcccttatatctttaatttgaggaatgtacgatataacagttgcagttgactgaaatgccactggaatttgaaaacttgacttttttttctttccttttttttttt

SEQ ID NO: 41325 - DNA, 536 bp, Homo Sapiens
aatcagcaagctctatggagacctaaagcacctgaagacgttcgaccggggaatggtctggaacacagacctggtggagaccctggagctgcagaacctgatgctgtgtgcgctgcagaccatctacggagcagaggcgcggaaggagtcacggggcgcgcatgccagggaagactacaaggtgcggattgatgagtacgattactccaagcccatccaggggcaacagaagaagccctttgaggagcactggaggaagcacaccctgtcctttgtggacgttggcactgggaaggtcactctggaatatagacccgtaatcgacaaaactttgaacgaggctgactgtgccaccatcccgccagccattcgctcctactgatgagacaagatgtggtgatgacagaatcagcttttgtaattatgtataatagctcatgcatgtgtccatgtcataactgtcttcatacgcttctgcactctggggaagaaggagtacattgaagggagattggcacctagtggctgggagcttg

SEQ ID NO: 41326 - DNA, 645 bp, Homo Sapiens
agcgatttagctctgcttctgttctatttcttagtcccaccctcaccataaatatccaagtgtggtttggctgaggagctgagggtgtctgccaatcacagctgctcagctctggcttctgtaaaccgccaggtagaagagttaaagctgcgccctcccgagactatatatcattgtcgttttcagcccgctccgggcaaactgcccatcatgtgcaccaaggccgttagccctgcctcctggcaaacgtccagtgacagctgctgggttccatcaactttgggcagccggttgtcgctgcagggaaggaaccaataagaatttctaaaggaaacctgatcttgctatcaattgctgctgcttaaatggcaggccaactggtcagctgctgatcagggtgtctaggctgaaggagttggagaccttgtgctaggtaggtgaaccagaaaccaccctcgccaccaagactcgctcccaacctggctcccggcaacctcaggtgccttcctcgcccaggtctttcaccctttctacagaaactacctcggtctggatctccccaccaccagcagcctgtgcaatatttattggtgtatcaatttctcccgtctcctgtcccaaagtaataaatcatgtttaataagt

SEQ ID NO: 41327 - DNA, 709 bp, Homo Sapiens
  misc_feature (96)..(96): n is a, c, g, or t
  misc_feature (119)..(119): n is a, c, g, or t
cgcactttaaaagaagaaatttcatcatgatgtccgggctatttcatatttcatgtaccacatggtaaatttccccttaaagttcttaaattaagnaattctaaaaacttcagaaagcnaacatgtcccaatttagggagacttcttgaatgctatttgaattctgcaggatcattttaatgacaattctccttagagaaatataatgcccaggtacatgctcaatcagtgtgccggaagagtgaattcttttcttcactgcagagtcatcacactgttggaatagtctgctctttacaatgctcaggtagggaaaataggaccaaatatatttcccaagtgcctaccattgtgtcatgttacaagtgagagtttaaatattgttgatgtcctgactctgtgagctcatagggagtatcttcatagtaatgacatttgatcagccataaaatttacattatgttcatatgcacccaaaaaagctagtcaggtaatgaatacccttgaagtgaatagcaattttgatttaggcagtgtgttaggccatccttgcattgctataaagaaatatttaggctgggcgtggtggctcacgcctgtaatcccagcactttgggaggctgaagcgtgtggatcacctgaggtcaggagttcaagaccagcctggccaacatggtaaaaccccatctctactaaaaaaaaaaaaaaa

SEQ ID NO: 41328 - DNA, 582 bp, Homo Sapiens
ggaaacacatgctgatctgtggccagccaaacaatacccacttgtcacgccaaatgaagagagaaatgtcatggaagagggaaaagactttcagccctcaagatctacagctcaacaggaacttgatgggaaacctgcttctcctactccggttattgtggcctcccacacagccaacaaagaagaaaagagtttactcgaactagaagtagatttggataatttggaattagaagatattgacacaacagatatcaatctggatgaagatattttggatgattgactgtaatgctttccatttacctgactaaacagatcattattatatataggtattgattgctaccctgaccacagtgctttggactatgagaaacttcttagatttttatatgtaaatgctgtggaccactgggagcacaatgcccacatcatcttaagaagagtttatgtgcagcatttaaatcactgtgttttccttgttaactaaaacagacatgggctttgatttttttcatactattagaccatatctcataaaaccttttgaattaaaaaaaaaaaaaaaaaatggtggag

SEQ ID NO: 41329 - DNA, 655 bp, Homo Sapiens
caaaagaaagaaactcagtcacctgagcaggtaaagtctgaaaagctcaaagacctctttgattacagtccccctctacacaagaatctggatgcacgagaaaagtctaccttcagagaggaaagcccacttaggatcaaaatgatagcgagtgattctcaccgtcctgaagtcaaactcaaaatggcacctgttcctcttgatgattctaacagacctgcttccttgactaaagacaggctgcttgctagtacacttgtccattctgtcaagaaggagcaagaattccgatccatctttgaccacattaagttgccacaggccagcaaaagcacttcagagtcatttattcaacacattgtgtccttggttcatcatgttaaagagcaatacttcaagtcagctgcaatgaccctaaacgagcggttcacttcgtatcagaaagccactgaagaacatagtactcggcaaaagagccctgaaatacacaggagaattgacatctcaccaagtaccctgaggaagcatacccgtttagcaggggaagagagagtttttaaagaagaaaatcaaaagggagataaaaaattaaggtgtgactctgctgaccttcggcatgacattgatcgccgtagaaaagaaagaagtaaagaac

SEQ ID NO: 41330 - DNA, 650 bp, Homo Sapiens
taggtagcgaggcctgggtggcgtgaagatgctggcacaataccgcatcagtatggccgcctacgtgtcaggggagctggagcacgtgacccgccgcaccctgagcatggacaagggcttctgaggccagccatgcccacgcccctccccagcccccacccatgccagcgcagcgccagggctcagatggggcctgggctgttgtgtctggagcctgcaggcaggtgggggctgcgtccctgctcagcccatcccctgcctctatccctggccacctgccaggcctccctccggctggtgtcttgagaccagcctgccaggccctccagcaggaggacagagtgccctggggcatccaccttcctgcccaggggacgtggcgctgtcggtgtttggaggctgctgccccctggctttggcgccccatgggccctcagcgtctccccatgctgggctcactacatgggccagcccttgctctacctggccggtaggctgctggcgcctaggttgtgttgagagggggatgcccctggccctgcctcactgtgacctgctcctgcccacgtgcagcacctgtcaccttttctagaaataaaatcaccctgactgtggggtgcatcggtctccggaaaaaaaaaaaaaaaaaa

SEQ ID NO: 41331 - DNA, 827 bp, Homo Sapiens
  misc_feature (645)..(645): n is a, c, g, or t
cagtttcggtccggaatcccgggacagcaggcccatctggagtgggagtgggcacttccaccccgcccacaggccatccggctgtgcaggccagcccctaggagcaggtcccgggtgactggcagttttcacggtctagggccgagacgatggcatggggcctagagcatgaggtagagcagaatgcagaccacgccgctggatgccgagagaccctgctctccgagggaggcatctgtgtcatgctgtgagggctgaggacggggccctagtctctggttttctggtcttaacatccttatctgtgtccgccacggaggtgactgagctgctagcgagttgtcctgtcccaggtacttgagttttggaaaagctgactcacgcccatccatctcacagcccttccctggggacagtcgcttccgccttgacacctcactctcagttgaataactcaagcttggtcatcttcagactcgaattcttgagtagacccagacggcttagcccaagtctagttgcagctgcctcggcaagtccccatttgctcaggcagccctgaatgggcctgtttacaggaatggtaaattgggattggaaggaatatagcttccagcttcataggctggggtgaccacggcttangaaacagggaaagaaagcaaggcccttttcctgcctttcccgggatctgtctactccacctccacgggggaggccagtggggaagggctgtcacctcttccccatctgcatgagttctggaactctgtcctgttggctgcttgcttccagctccccccaatctccatcgcagcgggttcctc

SEQ ID NO: 41332 - DNA, 603 bp, Homo Sapiens
ttgtctttggaaccacaccagaagacatcctcaggaacaaaggctgctccagctctaccagtgtcctcctcacccttgacaacaacgtggtgaatggttccagccctgccatccgcactaactacattggccacaagacaaaggacttgcaagccatctgcggcatctcctgtgatgagctgtccagcatggtcctggaactcaggggcctgcgcaccattgtgaccacgctgcaggacagcatccgcaaagtgactgaagagaacaaagagttggccaatgagctgaggcggcctcccctatgctatcacaacggagttcagtacagaaataacgaggaatggactgttgatagctgcactgagtgtcactgtcagaactcagttaccatctgcaaaaaggtgtcctgccccatcatgccctgctccaatgccacagttcctgatggagaatgctgtcctcgctgttggcccagcgactctgcggacgatggctggtctccatggtccgagtggacctcctgttctacgagctgtggcaatggaattcagcagcgcggccgctcctgcgatagcctcaacaaccgatgtgagggctcctcgg

SEQ ID NO: 41333 - DNA, 696 bp, Homo Sapiens
agaaaatatggaggaactgttacatgttcggtactaagtcattttcaggggattgaaagactattgctggatttcatgatgctgactggcgttagctgattaacccatgtaaataggcacttaaatagaagcaggaaagggagacaaagactggcttctggacttcctccctgatccccacccttactcatcacctgcagtggccagaattagggaatcagaatcaaaccagtgtaaggcagtgctggctgccattgcctggtcacattgaaattggtggcttcattctagatgtagcttgtgcagatgtagcaggaaaataggaaaacctaccatctcagtgagcaccagctgcctcccaaaggaggggcagccgtgcttatatttttatggttacaatggcacaaaattattatcaacctaactaaaacattccttttctcttttttcctgaattatcatggagttttctaattctctcttttggaatgtagattttttttaaatgctttacgatgtaaaatatttattttttacttattctggaagatctggctgaaggattattcatggaacaggaagaagcgtaaagatatccatgtcatctttgttgagagtcttcgtgactgtaagatgtaataccgacttcttacttcagccgacaaacgacacacaacacagacaacacaacaaggc

SEQ ID NO: 41334 - DNA, 626 bp, Homo Sapiens
cttttttctttcatttttccaaaagagaaaaaaatgacaaaaggtgaaacttacatacaaatattacctcatttgttgtgtgactgagtaaagaatttttggatcaagcggaaagagtttaagtgtctaacaaacttaaagctactgtagtacctaaaaagtcagtgttgtacatagcataaaaactctgcagagaagtattcccaataaggaaatagcattgaaatgttaaatacaatttctgaaagttatgttttttttctatcatctggtataccattgctttatttttataaattattttctcattgccattggaatagatatctcagattgtgtagatatgctatttaaataatttatcaggaaatactgcctgtagagttagtatttctatttttatataatgtttgcacactgaattgaagaattgttggttttttcttttttttgttttgttttttttttttttttttttttgcttttgacctcccatttttactatttgccaatacctttttctaggaatgtgcttttttttgtacacatttttatccattttacattctaaagcagtgtaagttgtatattactgtttcttatgtacaaggaacaacaataaatca

SEQ ID NO: 41335 - DNA, 421 bp, Homo Sapiens
ctaaaatatcttacttttgcaaacattacgaaaatatactgccacattaatatgttgctagggcccctgctaggaccttaagaaggagctcatgtgagtcaggaccctgaatgttaggcctcgttagctctatggttcatatgcttcttgaaccaagcagggcacttcccagccacattgccaggcaacaggactaaactacctccaaagcaagcagtcttttcagttttgactgagtgatgtgaggaacttcttttcttttcttttttttttttttttgagacggtctccctatgtcacccaggctgtggtgcagcaacccaatcttggctcgctgcaacccccacctcccgggttcaagcaattatcctgcctcagccacctgagtagctgggattacaggttcctgtcaccacaccca

SEQ ID NO: 41336 - DNA, 607 bp, Homo Sapiens
agatatgatttaccaccaccaccctgcccccgctcccgtgaagaaagcagggcaagtgctgtgctgcccatttgggcctgcatagtgccatgattggaacccaggaactctggtctccttgcctagtgcttttcaaaactctgtgctacacaggagtggatccaggcctgaaggtcatacaattctgggtgacagagcaaggctctgtctcaaaaaaaaacaaaaacaaaaacaaaaaagactgatatcgcacctaaattattattatattaaaagaagcagagtatgagagacaggtacatggtccagtaggaagagaagcagccctgattctaccacttaaggtgatgtatgatcttaggctggacacttctctccctcatccgttttcctcttcaacataatgaaatagacttgaaagtctctaaggctctatcagttctgacattctaggcttcatatacattaagttgagccatatgtaatcactgcgtttgaggttagaaacagctgagtatcgtagtttcatatatggttccagctaatacatgcaatgtggctggtgaacacttttgaattcagaacttttccagatcttaggttgaac

SEQ ID NO: 41337 - DNA, 868 bp, Homo Sapiens
  misc_feature (617)..(617): n is a, c, g, or t
ccacgcgtccggttgaatatcattgaagttcttaatgctgactctactatgggttgttaatagtcttctcttgacatgactctttatgcaacataacatacattggtattcttcagggtttaaaagaaaacactgagctgtttcctccaagttttattaaccttttatttaacttactgctttatttttttctcttttaatatggttattgttaaaatgagagtcacttgctagactggtctctttaaatgtaaggtctagtatcaatatttacttcattcaagtggaataaatggcttttgtagttacttccagttttcctcaagaatagaaataagtctgttcataagcaataccttcagtttgttcagttcacttccacgttaaataaagaataggattattcactggtaataatagagtcattaagaaatattaagcatgcagctaaaaattgaacaaccctgtaatgatacatttaagaattattcaaaggtgctacatggcagggttagagaataaaaagaacgtggtgtttgaagcaaaacagatctgtattggcatctggttctaccttttatcagatgttgtgccttgtgcaaatcacattttctctngagtctccattttctcatttataacatggcggagaataatacttatatttgtggtagtagtgtgaacattaaaagatatgttgtgaagtaccattcgagtggtgaatccgttttatgagaatgtcattctggaaaaatatgcaattttaaagtttaggtaagcctaacttaatcctacttaattaatgaattgttggtcaccaaaaaaaaaaaaaaaaaaaaaagggggggaaaaacccgggcccatggca

SEQ ID NO: 41338 - DNA, 888 bp, Homo Sapiens
ccaaatacctcaccaagaaaacccaggcagccagcgtggaggctgttaagatgctggatgagatcctcctgcagctgagcgcctcagtgcccgtggacgtgatgccaggcgagtttgatcccaccaattacacgctcccccagcagcccctccacccctgcatgttcccgctggccactgcctactccacgctccagctggtcaccaacccctaccaggccaccattgatggagtcagatttttggggacatcaggacagaacgtgagtgacattttccgatacagcagcatggaggatcacttggagatcctggagtggaccctgcgggtccgtcacatcagccccacagcccctgacactctaggttgttaccccttctacaaaactgacccgttcatcttcccagagtgcccgcatgtctacttttgtggcaacacccccagctttggctccaaaatcatccgaggtcctgaggaccagacagtgctgttggtgactgtccctgacttcagtgccacgcagaccgcctgccttgtgaacctgcgcagcctggcctgccagcccatcagcttctcgggcttcggggcagaggacgatgacctgggaggcctggggctgggcccctgactcaaacacacagtggttttgaccagagaggcccagatggaggctgttcattcccttgcagagtcggcattgtacataaaggctgagcactgctgatgcgaaaaaacaaaacaaacaccagaccaaaaacacacaccaaccaccacacccacacaaacgagcagcacaatagagggagaacacgaaataacgagccagagccaggagtacccaaccttgttaaagggacacgcggccccagagggcaaaacaccccgct

SEQ ID NO: 41339 - DNA, 663 bp, Homo Sapiens
gcgtccggtaatgtggtcttttttttagattttgtgcagttaatacttaacattgatttattttttaatcatttaaatattaatcaactttccttaaaataaatagcctcttaggtaaaaatataagaacttgatatatttcattctcttatatagtattcattttcctacctatattacacaaaaaagtatagaaaagatttaagtaattttgccatcctaggcttaaatgcaatattcctggtattatttacaatgcagaattttttgagtaattctagctttcaaaaattagtgaagttcttttactgtaattggtgacaatgtcacataatgaatgctattgaaaaggttaacagatacagctcggagttgtgagcactctactgcaagacttaaatagttcagtataaattgtcgtttttttcttgtgctgactaactataagcatgatcttgttaatgcatttttgatgggaagaaaaggtacatgtttacaaagaggttttatgaaaagaataaaaattgacttcttgcttgtacatataggagcaatactattatattatgtagtccgttaacactacttaaaagtttagggttttctcttggttgtagagtggcccagaattgcattctgaatgaataaaggttaaaaaaaaaa

SEQ ID NO: 41340 - DNA, 778 bp, Homo Sapiens
acattcggaaggcactctacgcttccaagatcatctcttacgctcaaggctttatgctgctaaggcaggcagccaccgagtttggctggactctcaattatggtggcatcgccctgatgtggagagggggctgcatcattagaagtgtattcctaggaaagataaaggatgcatttgatcgaaacccggaacttcagaacctcctactggacgacttctttaagtcagctgttgaaaactgccaggactcctggcggcgggcagtcagcactggggtccaggctggcattcccatgccctgttttaccactgccctctccttctatgacgggtacagacatgagatgcttccagccagcctcatccaggctcagcgggattacttcggggctcacacctatgaactcttggccaaaccagggcagtttatccacaccaactggacaggccatggtggcaccgtgtcatcctcgtcatacaatgcctgatcatgctgctcctgtcaccctccacgattccacagaccaggacattccatgtgcctcatggcactgccacctggccccttgccctattttctgttcagttttttaaaagtgttgtaagagactcctgaggaagacacacagtttatttgtaaagtagctctgtgagagccaccatgccctctgcccttgcctcttgggactgaccaggagctgctcatgtgcgtgagagtgggaaccatctccttgcggcagtggcttccgcgtgccccgtgtgctggtgcggttcccat

SEQ ID NO: 41341 - DNA, 1087 bp, Homo Sapiens
accttccagtccctcatggttgcagacctaggcgatgtgaatgtcaatctttacaaccttcaggacagctgccggcgaattcaagaggcctatgagaaaattgtagcagctggctgtattcctctgaccttgggtggagatcacacaatcacatatcccatattgcaagcgatggcaaaaaagcatggcccagtggggctgctgcacgtggatgcgcacacggacacgaccgacaaggccctaggagagaagctctaccacggggcgcccttccgccggtgtgtggatgagggtctcctggactgtaagcgtgtggtgcagattggcatccggggctcttccacgaccttggatccctacagatacaaccggagccagggcttccgggtagtcctggctgaagactgctggatgaagtcgctggttcctctgatgggggaagtcaggcagcagatgggaggcaaacccatttatatcagctttgatattgacgctctggatcctgcctatgcgccagggacagggacacctgaaattgctggtctcactcctagtcaggctctggagatcatcaggggttgtcaaggcctgaacgtgatgggctgtgatcttgtcgaagtttcaccaccgtatgatctttctgggaacacagccctgctggcggctaacctgctgtttgagatgctatgtgctctccccaaagtgacaaccgtctgagtcttgtgctcttcaagacaaaacagattgcgtcgctgacaagttctcaagaagaacttatgagtaagcagtctgagaactaaagagtttatgccaagaaaaactttctgctgaaagtgcctttgctggctgggaacccgggataatcagtagaaatctcacccaaacaggaacattttctaagaaacttggattaatttgggggaacaaaaaaaggagaaacctggaccgggcttttgaattttttttccctctggaggaaaagaaggaggggcataaggggggaaaagtggggggaaaaatttccttttcaaacattaatcttaaaccccttaaaaaaaatttggacatttttaaaaaaaaatcttat

SEQ ID NO: 41342 - DNA, 527 bp, Homo Sapiens
atcgattagaaagtcagcatcatttccagatagaaaaggctctagttgagaaacttcagcaggattttgtagctgactggtgctctgagggagagtgcctagcagctattaactccacctataatacttcagggtatattttggatccacacactgctgttgcaaaagtggttgcagatagggtgcaagacaaaacttgccctgtgattatctcatctacagcccattactcaaagtttgcacctgctatcatgcaggctttaaagattaaagaaatcaatgagacttcatcaagtcagctctatttgctgggttcatacaatgcattacctccactgcatgaggctttattagagagaacaaaacagcaagagaagatggagtaccaggtctgtgcagctgatatgaatgtcttgaagagtcatgtggaacaacttgtccaaaatcaattcatatgaaagctttcagagtaaatttttttttctagctataagcatgcaataataaatctcaaacactgatttgga

SEQ ID NO: 41343 - DNA, 820 bp, Homo Sapiens
ggcagcagtgatcctctgaacctgcagaggccccctccccgagcctggctggctctggcccggtcctaagctggactcctcctacacaatttatttgacgttttattttggttttccccaccccctcaatctgtcggggagcccctgcccttcacctagctcccttggccaggagcgagcgaagctgtggccttggtgaagctgccctcctcttctcccctcacactacagccctggtgggggagaagggggtgggtgctgcttgtggtttagtcttttttttttttttttttttaattcaatctggaatcagaaagcgggggattctggcaaatggtccttgtgccctccccattcatccctggtctggtcccctgttggcctatagccctttaccctgagcaccaccccaacagactgggggaccagccccctcgcctgcctgtgtctctccccaaacccctttagatggggagggaagaggaggagaggggaggggacctgccccctcctcaggcatctgggagggccctgcccccatgggtttacccttccctggggctctctccccgaacactgttggttacaattccaacccggaataaacctacccgctttcattgtgaacacacccaaccacaaccagacctacacccccaacacacaacaggggggggcgcgtcaaaaaaccccccggggggaccccctagacggcccccctcttctcgtcacgcggcggccccgaggggcgcactataacagaggacggcggcgagtaacaccccgtccgggacaaccggcggcgggcaccgcgacaacc

SEQ ID NO: 41344 - DNA, 810 bp, Homo Sapiens
ctcggaggcagcggttgggctcgcggcgagcggacggggtcgagtcagtgcgttcgcgcgagttggaatcgaagcctcttaaaatggcagatgacttggacttcgagacaggagatgcaggggcctcagccaccttcccaatgcagtgctcagcattacgtaagaatggctttgtggtgctcaaaggccggccatgtaagatcgtcgagatgtctacttcgaagactggcaagcacggccacgccaaggtccatctggttggtattgacatctttactgggaagaaatatgaagatatctgcccgtcaactcataatatggatgtccccaacatcaaaaggaatgacttccagctgattggcatccaggatgggtacctatcactgctccaggacagcggggaggtacgagaggaccttcgtctccctgagggagaccttggcaaggagattgagcagaagtacgactgtggagaagagatcctgatcacggtgctgtctgccatgacagaggaggcagctgttgcaatcaaggccatggcaaaataactggctcccagggtggcggtggtggcagcagtgatcctctgaacctgcagaggccccctccccgagcctggcctggctctggcccggtcctaagctggactcctcctacacaatttatttgacgttttattttggttttccccaccccctcaatctgtcggggagcccctgcccttcacctagctcccttggccaggagcgagcgaagctgtggccttggtgaagctgccctcctcttctcccctcacactacagccctggt

SEQ ID NO: 41345 - DNA, 594 bp, Homo Sapiens
ttctccgaggggctggagcggggatctgatgaaaaggtcagactgaaacgccttgcacggctgctcggcttgatcacagctccctaggtaggcaccacagagaagaccttctagtgagcctgggccaggagcccacagtgcctgtacaggaaggtgcctggccatgtcacctggctgctaggccagagccatgccaggctgcgtccctccgagcttgggataaagcaaggggaccttggcgctctcagctttccctgccacatccagcttgttgtcccaatgaaatactgagatgctgggctgtctctcccttccaggaatgctgggcccccagcctggccagacaagaagactgtcaggaagggtcggagtctgtaaaaccagcatacagtttggcttttttcacattgatcatttttatatgaaataaaaagatcctgcatttatggtgtagttctgagtcctgagacttttctgcgtgatggctatgccttgcacacaggtgttggtgatggggctgttgagatgcctgttgaaggtacatcgtttgcaaatgtcagtttcctctcctgtccgtgtttgtttagtactttt

SEQ ID NO: 41346 - DNA, 708 bp, Homo Sapiens
gcggccactccaggacttagaatagtgcctaaagtgctgcagccaaagacagagcggaactatgaaaagtgggcttggagatggcaggagagcttgtcattgagcctggcaatttagcaaactgatgctgaggatgattgaggtgggtctacctcatctctgaaaattctggaaggaatggaggagtctcaacatgtgtttctgacacaagatccgtggtttgtactcaaagcccagaatccccaagtgcctgcttttgatgatgtctacagaaaatgctggctgagctgaacacatttgcccaattccaggtgtgcacagaaaaccgagaatattcaaaattccaaatttttttcttaggagcaagaagaaaatgtggccctaaagggggttagttgaggggtagggggtagtgaggatcttgatttggatctctttttatttaaatgtgaatttcaacttttgacaatcaaagaaaagacttttgttgaaatagctttactgtttctcaagtgttttggagaaaaaaatcaaccctgcaatcactttttggaattgtcttgatttttcggcagttcaagctatatcgaatatagttctgtgtacagaatgtcactgtagttttgagtgtatacatgtgtgggtgctgatacctgtgtattttctttgggggtggaaaaggaaaacacttcaggctgagaaaagtat

SEQ ID NO: 41347 - DNA, 786 bp, Homo Sapiens
  misc_feature (1)..(1): n is a, c, g, or t
  misc_feature (726)..(726): n is a, c, g, or t
  misc_feature (772)..(773): n is a, c, g, or t
  misc_feature (786)..(786): n is a, c, g, or t
nttgtacaggcgtgacggtccggattcccgggatggtatttacagcaaaatactgtgtatccttttatgggtaaaacaaaagtgaacattgcatgcatgtaatgtgatgaatttgtaatttaggagttctttggggcttctgtgacttgggaaatgcttacattcaggccttaatgttgcattagctagcatgttttccctctgatgtatatagtcactgttgtataaactaatctttgcttgttttctactctgtgatctttccatatcatatttcattaatgatcagttagtgtcaaggagtcaaaacagattaaaattaatttcatgtgtatatggtggaaatttgtggctagtgtgatttttgtttgtttccttttaagtactgttgatcagttgtgacacttactggttaaacttacgttgctaaagatttctctataataagccacacattatatttagactatattaagggaccttggttttcttctagatagcagctgtcccaaagaaaatatttcttctttgtctgttaagatttagctattatctgccagttgttaagaggttttggttccaaactcaaccagcaatgttgagagctgaacttaagatagctgttgtactttttgctttccatctgttactgtccttcattcttggctccctactatctataaacagctgctgtgaagaagaaaagttgaaatagagttggcttanattttaaaaaagaaaaagaaaattgaggttttaggaatttcatggnntacagctctggtn

SEQ ID NO: 41348 - DNA, 580 bp, Homo Sapiens
agatttctacccaggcagcattcaagtccgatggttcctgaatggacaggaggaaacagctggggtcgtgtccaccaacctgatccgtaatggagactggaccttccagatcctggtgatgctggaaatgaccccccagcagggagacgtctacatctgccaagtggagcacaccagcctggacagtcctgtcaccgtggagtggaaggcacagtctgattctgcccggagtaagacattgacgggagctgggggcttcatgctggggctcatcatctgtggagtgggcatcttcatgcacaggaggagcaagaaagttcaacgaggatctgcataaacagggttcctgacctcaccgaaaagactaatgtgccttagaacaagcatttgctgtgttttgttagcacctggttccaggacagaccctcagcttcccaagaggatactgctgccaagaagttgctctgaagtcagtttctatcgttctgctctttgattcaaagcactgtttctctcactgggcctccaaccatgttcccttcttcttagcaccacaaataatcaaaacccaacataaaaa

SEQ ID NO: 41349 - DNA, 586 bp, Homo Sapiens
gctactccgacctggcgtcatcgggccggctcctgaggggggcctggtttttgcctgcctgtacgagagcggggccaggacctcctatgatgagatttccttttgtacattctccctgcgtgaggtcctggagaacgtgcccgccagccccaagccgcccaaccttggggacaagcctcgggggtgctgctggccctcctgacaggccttctggccgtgcccatgccccttgggtgcctggggcagaggggtggaatacgttggggtgccccacgatagctgtggggggggctcttagtgcaagatcctgtggattagaaacaagttgctcctcagagctctcaagcagggactgctctttaggaaggggagcagcggctgggagtgagcagggcagggtgggggcagggtgggggcacgaagtgggccctgggtgacccccacagctcccttccgaggctgcagggccaggcgcgggaccgcaggtagcccagggtgttgtgggtggcagcacttgtttactggctgctttctggctcgaaataaaggaatcgtgcttgtgtcggggtaaaacaacaaaaaaaaa

SEQ ID NO: 41350 - DNA, 948 bp, Homo Sapiens
ggtattattttttaatcaagggagatacacctatcagatgtttaaaataacaacactacccactgaaatcagggcatatagaatcattcagctaaagagtgacttctatgatgatggaacaggtctctaagctagtggttttcaaactggtacacattagactcacccgaggaattttaaaacagcctatatgcccaggcctaacttacactaattaaatctgaattttggggatgttgtatagggattagtattttttttaatctaggtgattccaatattcagccaactgtgagaatcaatggcctaaatgctttttataaacatttttataagtgtcaagataatggcacattgactttattttttcattggaagaaaatgcctgccaagtataaatgactctcatcttaaaacaaggttcttcaggtttctgcttgattgacttggtacaaacttgaagcaagttgccttctaatttttactccaagattgtttcatatctattccttaagtgtaaagaaatatattcatgcatggttgtaataaaatcttaatgtttaatgacaaaaaaaaaaaagaaaaagagaaaaaaagaaaaaaaaaaaaaaaagaaaaaaaaaaaagagggggggggaataaaataaacccgggggggacccatattgccgtaccccagtttgagcaaagggccccaagagaggacaaaaaaaaaacagcaggggcagtaaaacaggtcgagatggcaacaggcgagtgatttgggagaacccctcgtggcggggagccgaggcaccacacgagattgagcgaggaaacaaccgcgggtcgggacaccccttggcggcgaatgtcgcaaattaaatacgcggcgaagacatgggaagcgcgcccagagagcagacgcaggacacgtacacaaaagaaaccacaacaatcactatccga

SEQ ID NO: 41351 - DNA, 976 bp, Homo Sapiens
  misc_feature (964)..(964): n is a, c, g, or t
ccagaataacagagctttcttagttggtgaagacttaaacatctgcctgaggtcaggaggcaatttgcctgccttgtacaaaagctcaggtgaaagactgagatgaatgtctttcctctccctgcctcccaccagacttcctcctggaaaacgctttggtagatttggccaggagctttcttttatgtaaattggataaatacacacaccatacactatccacarawatagccaagtagatttgggtagaggatactatttccagaatagtgtttagctcacctagggggatatgtttgtatacacatttgcatatacccacatggggacataagctaatttttttacaggacacagaattctgttcaatgctgtcaaatatgccaatagtttaatctcttctattttgttgtcgttgcttgtttgaagaaaatcatgacattccaagttgacattttttttttcattttaattaaaatttgaaattctgaacaccgtcagcaccctctcttccctatcatgggtcatctgacccctgtccgtctccttgtccctgcttcatgtttgggggcctttctttaactgccttcctggcttagctcagatggcagatgagagtgtagtcaagggcctgggcacaggagggagagctgcagagtgtcctgcctgccttggctggagggacacctctcctgggtgtggagacagcttggttccctttccctagctccctggtgggtgaatgccacctcctgagatcctcacctcttggaattaaaattgttggtcactggggaaagcctgagtttgcmaccagttgtagggtttctgttgtgtttttttttttttttttgaaaaaaaactawaatadaaattctcctattaaawwaaattattttaakttttatggtaaaaakgrgragctgrgagtrggggayaadgatawttdamargtgggggkggnagatggkgamat

SEQ ID NO: 41352 - DNA, 919 bp, Homo Sapiens
  misc_feature (865)..(865): n is a, c, g, or t
ggtgtggtgggtccagctcaccctctcccacgcaggggctgaactatcggtatcacctgggttgtaactgcaagatcaagtcctgctactacctgccttgctttgtgacttccaagaacgagtgtctctggaccgacatgctctccaatttcggttaccctggctaccagtccaaacactacgcctgcatccggcagaagggcggctactgcagctggtaccgaggatgggcccccccggataaaagcatcatcaatgccacagacccctgagcgccagaccctgccccacctcacttccctcccttcccgctgagcttcccttggacactaactcttcccagatgatgacaatgaaattagtgcctgttttcttgcaaatttagcacttggaacatttaaagaaaggtctatgctgtcatatggggtttattgggaactatcctcctggccccaccctgccccttctttttggttttgacatcattcatttccacctgagaatttctggtgccatgccagaaagaatgaggaacctgtattcctcttcttcgagataatataatctctatttttttaggaaaacaaaaatgaataactactccatttgaggattgtaattcccacccctctgcttcttcccacctcacatctccagaccctcttccctttgcccttctcctcatacatatagacacagacaaggaacttgctgaaagccaaccattcaggatcagtcaaagcagcagcagatgactcaagtgtgtgaagatgtatacacagagctgcactgatgtccaacagacttgtctgctggtctgctgtagatgagggaggaaagagactcaggagtcgagatgtgcgantccaattcccagcatgatgctggtgacagatttctgagttgagcagacaaccag

SEQ ID NO: 41353 - DNA, 900 bp, Homo Sapiens
agaaagcagcattgtcatcagatgcatgataaaccaaaatatgaaaatgggaaatgtttaattaacctagtaattgggtgggttaagtacatgggtgaattttatatgtgatttttgttttgttttgttttgttcagattaactgcttatagccttagaaagccttttacaaaattaaaaaaaaaatagatgtgcattcagtttttaagaatggaatcatccaaaggaattcctttttttgaggtttggatgttgcagctagtaaaggatatttttgctctgttcagcagttctaaaaattgctgaagtaggggccaggtcactggtagttatagtatggaatgggagaagtgaaagttcagttatagaactttccatacttccaagtttactgcaagtttttatgcttgagagagatgctttctaatataagactgatgtgttgattttactgattgtactgtacatctattaaagccttagattattacattacgggttggaacccataccaatgtaatttcaatcgtgttaagaaagtaatggtgacttcacatgttattgtagttagttacattatagaatattacttatttttcttgttaaaatgtagtttttcatttcctacatttattagattttcattttctattaacaattgaataccatttcagtttatagacttgttttattagattttaccaatgaatttttcaaaatacaaaaaaaagtagtttttccttcataacatactcagttttgaattacatgtagtgtcacatgaatattcgtattggtactaaatgatttatattttactgatttaatatacagtgtaagaatgtcagtcattgttagttcttgtctaagtttcattaaaagaacaaagatcttttatac

SEQ ID NO: 41354 - DNA, 720 bp, Homo Sapiens
  misc_feature (709)..(709): n is a, c, g, or t
  misc_feature (715)..(715): n is a, c, g, or t
tctagatcctagatattagaataaaatttattttctactgtatccatttcaaatgttaaaatattgtttaatatttttgaaatccctgagtatcaggccttgttataaataagctgcataatcaataaatagaacaagggactttttgttgataatccaaatactcaaagtttacgtaatgaaaattatagcgtgtgtgcaaactcttgagggttgattatgctgcaatttagcatgttggaacgtctagggagaaggttgactttttgcacttctgtatatagtcaaaagagagaaacctgtataatagtaagatcttattttgaataaaaacgtctataattacaaggagttttgttaaggctaatacaatgacagactgagcaaaattgcttgcaaaagtggcacagagttagcactccataccccttcaaacatgttgctttgctttcttgtggacagcttgtagtttgccaggattttttcagctggaaagatacgccatcctttcaaaccctcatgactgacaaaaactccatggggccaaatctgcctgaagatcattaccaaaaatagcaggtacttctaccattaaggtgaaatcatggatcagatattccttacatttttcaaaactactgcatgtttaaaacttcaacaaaaaaagagagaaagaactatactaagaacatatattattcagatcagnttctgncaatt

SEQ ID NO: 41355 - DNA, 554 bp, Homo Sapiens
gccaagggacgatgtggaaaacccagtgtccatctttccaccctccctgatctccagaaccttcgactgacccccttgtctttatgctgatgttgagttttgggattgttactggttgaagtgggggcagatgcctgtcaccaaggtgttgactgtgtgagaaaagcagtttgggtgacaaatcctgtgtggcacaagttggatcgcttcctagaaataagcaacacctctcccaaaaagcagcccacaaggcaggggcccagcagcccagccatcactcatctttgaggaaatgagttggtagcctctgtgcactgtttggtggccacatcacaggtgatgtcctgttcacatacctgcttgtatttaaagccctcagtctgtcctgttgtgtggggcgaagtgatggactctgccaggtggacatgctgtgggtggatgttcccggcgtgtgccgggcctgaatggacaggggccacttcacagcatgtcagggaaaatcactgtcacacaattccaatggattttgtgctctttttgaaaaaaaaaattct

SEQ ID NO: 41356 - DNA, 918 bp, Homo Sapiens
  misc_feature (742)..(742): n is a, c, g, or t
  misc_feature (831)..(831): n is a, c, g, or t
  misc_feature (843)..(843): n is a, c, g, or t
cctcgtcctccgctttgtcaagggacagtttcacgagtaccaggagagcacaattggagcggccttcctcacacagactgtctgcctggatgacacaacagtcaagtttgagatctgggacacagctggacaggagcggtatcacagcctggcccccatgtactatcggggggcccaggctgccatcgtggtctatgacatcaccaacacagatacatttgcacgggccaagaactgggtgaaggagctacagaggcaggccagccccaacatcgtcattgcactcgcgggtaacaaggcagacctggccagcaagagagccgtggaattccaggaagcacaagcctatgcagacgacaacagtttgctgttcatggagacatcagcaaagactgcaatgaacgtgaacgaaatcttcatggcaatagctaagaagcttcccaagaacgagccccagaatgcaactggtgctccaggccgaaaccgaggtgtggacctccaggagaacaacccagccagccggagccagtgctgcagcaactgagccccccttgcctgcccgctgcccccgcctcctccgcctgaatgacccgactggaatccactctaaccaatcgcacttaacgactcgggccaccactgggggggcagggggaggggtccaccatgatttctccatataattttgatcataggccggagtgagtcattccacctgcacctttctgtacaaatactaatntcattttaagtcttaagtcacttttttaatatatatgatcttctgctcttcccacttcctcccctttctactgctctcccattttcccntgctgggagtangcacatgctcttgccccccacccctgtattgggggaacgtggggtcagtgcagctaccctttctttcccctctgg

SEQ ID NO: 41357 - DNA, 550 bp, Homo Sapiens
gggtcctcgccaaaatgaaagggtttgatgtgttcaatgcactggatctcatggagaacaaaaccttcctggagaagctcaagtttggcataggggacggcaacctgcagtattacctttacaattggaaatgccccagcatgggggcagagaaggttggactggtgctacaataaccagtcaccagtgcgattctggataaagccactgaaaattcgaaccaggaaatggaaccccaccactgttggtccaattttcacacacgtgagaatccctggcaaagggagcagaactgaaccggctttaccaaaccgccagcgaacttgacaattgtattgcgatggcgtgggctgcgtgacgtcacctccggtcgtgtctctggtctccgtgttttccagttaattacatcctcatgcagccgtgatcaagggaatgtaactgctgaaaactagctcgtgattggcatataatggagttaacgggtgaataataaaagtatatatatatattatatatatataaatattttaaatatctttcatgttccaaa

SEQ ID NO: 41358 - DNA, 811 bp, Homo Sapiens
ccagtggctgttctggaagaaacagatctcctggcaaaggccccagcatctccctcactgaaaccaggtggccggctcctcggactctgctttatgttgcggtgagaactctgcccaggtgtgcagggtttggcttgtgggctgcttgctgctcatctgatttttgtcccagtagtccctgcgttcttcattcaaccccttctgggacttcagctcagagagcaccatcccgggggtcagggcctccccacaggagccctgcagtgtggtagcgccatggctgtctcaaaccaagcaaaggaaggaccctgaggccttcacgctaaccgtcctcgagcaactgctgttggaaggcctccctgggcctggcccccaccctctgccacccagtcctcccagctgccatgtttcaaagacgacctttacctcctgcctttggattgactctgcatttgaccacggactccagtctgtgtgtagggagagagctgagtaggaggcctccactccggatcgaggcctgtatagggctcgtttccccacacatgcctatttctgaagaggcttctgtcttatttgaaggccagcccacacccagctactttaacaccaggtttatggaaaatgtcaggccttccccacaactcctgtctaactgctgtcgcccccctacttgctggctctcagaagcctaggggagtccctgtggtcctgaattctttccccaaagacgaccagcatttaaccaacctaagggcccaaaggccttggacaactgcatggagctgcactctaggagaaggaggggaac

SEQ ID NO: 41359 - DNA, 589 bp, Homo Sapiens
aggaccagtatgccaactacgtggtccagaagatgattgacgtggcggagccaggccagcggaagatcgtcatgcataagatccggccccacatcgcaactcttcgtaagtacacctatggcaagcacattctggccaagctggagaagtactacatgaagaacggtgttgacttagggcccatctgtggcccccctaatggtatcatctgaggcagtgtcacccgctgttccctcattcccgctgacctcactggcccactggcaaatccaaccagcaaccagaaatgttctagtgtagagtctgagacgggcaagtggttgctccaggattactccctcctccaaaaaaggaatcaaatccacgagtggaaaagcctttgtaaatttaattttattacacataacatgtactattttttttaattgactaattgccctgctgttttactggtgtataggatacttgtacataggtaaccaatgtacatgggaggccacatattttgttcactgttgtatctatatttcacatgtggaaactttcagggtggttggtttaacaaaaaaaaaaagctttaaaaaaaaaa

SEQ ID NO: 41360 - DNA, 762 bp, Homo Sapiens
ttaagtttatgaaattctaaaaaatgccttttttggagactatattatgctgaagaaggctgttcgtgaggaggagatgcgagcacccagaacgtcttttgaggctgggcgggtgtgattgtttactgcctactggatttttttctattaacattgaaaggtaaaatctgattatttagcatgagaaaaaaaaatccaactctgcttttggtcttgcttctataaatatatagtgtatacttggtgtagactttgcatatatacaaatttgtagtattttcttgttttgatgtctaatctgtatctataatgtaccctagtagtcgaacatacttttgattgtacaattgtacatttgtatacctgtaatgtaaatgtggagaagtttgaatcaacataaacacgttttttggtaagaaaagagaattagccagccctgtgcattcagtgtatattctcaccttttatggtcgtagcatatagtgttgtatattgtaaattgtaatttcaaccagaagtaaatttttttcttttgaaggaataaatgttctttatacagcctagttaatgtttaaaaaagaaaaaaatagcttggttttatttgtcatctagtctcaagtatagcgagattctttctaaatgttattcaagattgagttctcactagtgtttttttaatcctaaaaaagtaatgtttgattttgtgacagccaaggacgtgccaaagttagcttgtccgagttctttaaatagagcctttat

SEQ ID NO: 41361 - DNA, 585 bp, Homo Sapiens
tttttttttttttgaaggaataaatgttctttatacagcctagttaatgtttaaaaagaaaaaaatagcttggttttatttgtcatctagtctcaagtatagcgagattctttctaaatgttattcaagattgagttctcactagtgtttttttaatcctaaaaaagtaatgttttgattttgtgacagtcaaaaggacgtgcaaaagtctagccttgcccgagctttccttacaatcagagcccctctcaccttgtaaagtgtgaatcgcccttcccttttgtacagaagatgaactgtattttgcattttgtctacttgtaagtgaatgtaacatactgtcaattttccttgtttgaatatagaattgtaacactacacggtgtacatttccagagccttgtgtatatttccaatgaacttttttgcaagcacacttgtaaccatatgtgtataattaacaaacctgtgtatgcttatgcctgggcaactattttttgtaactcttgtgtagattgtctctaaacaatgtgtgatctttattttgaaaaatacagaactttggaatctggaaaaaaaaaaaaa

SEQ ID NO: 41362 - DNA, 750 bp, Homo Sapiens
ggctggctcagcctgtctccagggstgctgcggcccagccccgagcctgcctccctcttggcctctcatccattggctctgcagggcaggggtgaggcaggtttctgctcataagtgcttttggaagtcacctacctttttaacacagccgaactagtcccaacgcgtttgcaaatattcccctggtagcctacttccttacccccgaatattggtaagatcgagcaatggcttcaggacatgggttctcttctcctgtgatcattcaagtgctcactgcatgaagactggcttgtctcagtgtttcaacctcaccagggctgtctcttggtccacacctcgctccctgttagtgccgtatgacagcccccatcaaatgaccttggccaagtcacggtttctctgtggtcaaggttggttggctgattggtggaaagtagggtggaccaaaggaggccacgtgagcagtcagcaccagttctgcaccagcagcgcctccgtcctagtgggtgttcctgtttctcctggccctgggtgggctagggcctgattcgggaagatgcctttgcagggaggggaggataagtgggatctaccaattgattctggcaaaacaatttctaagatttttttgctttatgtgggaaacagatctaaatctcattttatgctgtattttatatcttagttgtgtttgaaaacgttttgatttttggaaacacatcaaaataaataatggcgtttgttgta

SEQ ID NO: 41363 - DNA, 744 bp, Homo Sapiens
tgattgggggcttgctcctggtggtggccctgggccctgggggtgtctccatggatgagaagaagaaggagtggtaacagtcacagatccctacctgcctggctaagacccgtggccgtcaaggactggttcggggtggattcaacaaaactgccagcttttatgtatcctcttcccttcccctcccttggtaaaggcacagatgttttgagaactttatttgcagagacacctgagaatcgatggctcagtctgctctggagccacagtctggcgtctgacccttcagtgcaggccagcctggcagctggaagcctcccccacgccgaggctttggagtgaacagcccgcttggctgtggcatctcagtcctatttttgagtttttttgtgggggtacaggagggggccttcaagctgtactgtgagcagacgcattggtattatcattcaaagcagtctccctcttatttgtaagtttacatttttagcggaaactactaaattattttgggtggttcagccaaacctcaaaacagttaatctccctggtttaaaatcacaccagtggctttgatgttgtttctgccccgcattgtattttataggaatagtgaaaacatttagggacacccaaagaatgatgcagtattaaaggggtggtagaagctgctgtttatgataaaagtcatcggtcagaaaatcagcttggattggtgccaagtgttttattgggtaacaccct

SEQ ID NO: 41364 - DNA, 1126 bp, Homo Sapiens
  misc_feature (210)..(210): n is a, c, g, or t
gatgtcttcgcagcttgtcacccacctccaccgggtggtctcggagctgctgcagggtggtacctccaggaagccatcagacccagctcccaaagtgatggacttcaaggaaaaacccagctctccggccaaaggctcggaaggtcctgggaaaaactgcgtgccagtcatccagcggactttcgctcactcgagtggggagcagagcgncagcgccacggacacagacagtggctatggaggagaatcggagaagggcgacttgcgcagtgagcagccgtgcttcaaaagtgaccacggacgcaggttcacgatgggagacaggmtcggcgcaattmagcmagagtccgaagaaccccccacaaaaaagaaccggatgcagctttcggatgatgaaggccatttcactagcagtgacctgatcagctccccgttcctgggcccacacccacaccagcctcctttctgcctgcccttctacctgatcccaccttcagcgactgcctacctgcccatgctggagaagtgctggtatcccacctcagtgccagtgctatacccaggcctcaacgcctctgccgcagccctctctagcttcatgaacccagacaagatctcggctcccttgctcatgccccagagactcccttctcccttgccagctcatccgtccgtcgactcttctgtcttgctccaagctctgaagccaatcccccctttaaacttagaaaccaaagactaaactctctagggggatcctgctgctttgctttccttcctcgctacttcctaaaaagcaacaaaaaagtttttgtgaatgctgcvagattgttgcattgtgtatactgagataatctgaggcatggavgagcagattcaagggtgtgtgtgtgtgtgtgtgtgtgtgtatgtgtatgtgcgtgtgcgtcmcatgtgtccygccgtgttggtataggrctttaaagcycctttggcatagggartcacgargattgcttgmawcaggarattgcggggtatawasarmsgytgggstttccccccararaataccccytcgaamacataactggwttyaaaasytcaarcttggtckgkgatmcyytcatttgggcggggcktgggt

SEQ ID NO: 41365 - DNA, 1115 bp, Homo Sapiens
  misc_feature (745)..(745): n is a, c, g, or t
  misc_feature (754)..(754): n is a, c, g, or t
  misc_feature (762)..(762): n is a, c, g, or t
  misc_feature (771)..(771): n is a, c, g, or t
  misc_feature (841)..(841): n is a, c, g, or t
  misc_feature (844)..(844): n is a, c, g, or t
  misc_feature (916)..(916): n is a, c, g, or t
tggaggagagctcgtggctcattgaggacggcaaggtggtgactgtgcatctggagaagatcaataagatggagtggtggagccgcttggtgtccagtgaccctgagatcaacaccaagaagattaaccctgagaattccaagctgtcagacctggacagtgagactcgcagcatggtggaaaagatgatgtatgaccagcgacagaagtccatggggctgccaacttcagacgaacagaagaaacaggagattctgaagaagttcatggatcaacatccggagatggatttttccaaggctaaattcaactagcccctgttttttcctccctgaactcttggggctgagctgcaaccacccaactttctttcccactcttctctgggacttgtgggcctcagggcttggggcaggcatgggactggcccaggcacacaggtcccggggcatcaggagaaaggctgggtcttgggaccttgtcctccccagttggcctactgttacacattaaaacgatttgcccagctccttctgtgtcctctcttgcctctggcctttctctggggcacaggcctcttacggctgctgctgggaactgggagtttggcttctagcccagattctgccatgtgacctagggcacatccttgcccctctctgggcctcagtttctcattacttaaagattaaaacaaggcttggccgggtggtgatggttcatgtctgtaatcccagcactttgngaagctgangggagcanatcacctgnatgtcaggagtttgagaccagcttggccaacatggagaaacccagtctctactaaaatacaaaatacccncgngggggggggggggtgcacacctgtaatcccagctactccggaagctgtagcaggaaatccttggaccccccngggtggcccgaagtttccaattaaacccaaattgcactacttccttccaaaatggggtgaccgaagactccttcctcaaaaaaaaaaaaaaaactccggggtttcttttttccggggggcggaaaaaaaaagggtatggaaaggggccccgggggcccaaacgggttccccgaacccacttttttttggaaaaaagggg

SEQ ID NO: 41366 - DNA, 619 bp, Homo Sapiens
  misc_feature (619)..(619): n is a, c, g, or t
ggcttgcctatgatactgtctctccagtgaaatgattactcctccattactctattgatacaatattgtgcatgctagtgttgtatttctatacagtagcttgaaattgattaacttatactgtaggtgttatgtattcctatgacaaaaaaaattaagtcttcaaattttttaaaggttttttttttttaatttaatttttccttttgggggtaaagtttgctctaccaaatagtgattgtaacaaattgatctgttttggatgttgctatagtgacatgcagttatatattttgtttttaaaagggggggagcaaaagaaacaccagtgttagcttaatcttaatgtctggtgtttgtcatggtgaaattataactattacagtgttggagaacaacaaatatgttctctgaatgagcctttgtgctttttgtcatgttatgcagtgaactatttttaaggtctaatcagtgattatttttccagctccgtgtttctctaaggaattatttcacacacggaccatctttagcagtttcctcagtgatggaatatcatgaatgtgagtcattatgtagctgtcgtacattgagcaaataaacttacagatctgacaan

SEQ ID NO: 41367 - DNA, 534 bp, Homo Sapiens
aaaaattgacagcagtgacttgaaaatgattctgctccctttgaaagcattcattttgctagaactgttagacacattgcagtatgctgtattgaaagtaggaatatagttttaaaaaccctttgaacaaagtgtgtgcataaccagtcatgagataaaacaacacaatgcatgttgcctttttaatgtaaatacccttaggtatcattaatagtttcaaaatattgtggtttagtaaagttgatacctggttataaatattatgcctttatttttggctagaagaagaattatttttagcctagatctaaccattttcatactcttaactgattgaaacagattcaaagaagtatcgagtgctatgcattgaaacttgtttttaaatgttagatggcactatgtatattaatgtaaaacaatgttaatttactcaagttttcagtttgtaccgcctggtatgtctgtgtaagaagccaatttttgtgtattgttacagtttcaggttatttatattcgatgttttgtaaaact

SEQ ID NO: 41368 - DNA, 871 bp, Homo Sapiens
gcagatgctgcaggctcttgctggagtaaatcctcagctacagaatccagaagtcagatttcagcaacaactggaacaactcagtgcaatgggatttttgaaccgtgaagcaaacttgcaagctctaatagcaacaggaggtgatatcaatgcagctattgaaaggttactgggctcccagccatcatagcagcatttctgtatcttgaaaaaatgtaatttatttttgataacggctcttaaactttaaaatacctgctttatttcattttgactcttggaattctgtgctgttataaacaaacccaatatgatgcattttaaggtggagtacagtaagatgtgtgggtttttctgtatttttcttttctggaacagtgggaattaaggctactgcatgcatcacttctgcatttattgtaattttttaaaaacatcaccttttatagttgggtgaccagattttgtcctgcatctgtccagtttatttgctttttaaacattagcctatggtagtaatttatgtagaataaaagcattaaacaagaagcaaatcatttgcactctataatttgtggtacagtattgcttattgtgactttggcatgcatttttgcaaacaatgctgtaagatttatactactgataatttgtttatttgtatacaatatagagtatgcacatttgggactgcatttctggaaacatactgcaataggctctctgaggcaaaacacctgtaactaaaaaagtgaagatcagacaatactcttaaagctgagtattcctaattcgtatagaaatctttccgcatctcgacaaacatctcccaacaaagtgccggtagtcaggttgttgaactccggggaag

SEQ ID NO: 41369 - DNA, 567 bp, Homo Sapiens
tcagccgcctggcaaaccgggcacccgaacctaccccacagcaggtagcccagcagcagtgaagatgcagactgataccacctccaccgctgagcagtgaccttcctcactttctcttgtcccagcttctcccctgggggcctgagagaccctcaccttccttctgcccatcttccatgttgtaaaggaacagccccagtgcactgggggaggggagggagtgaggggcagtggtgcccttcctgcagaagagacatgcagcagtagcgctggcgccatctgcaggagctggcgggctggccttctggaccctggcttctccccactgtaacgcctgttacacacaaactgttgtgggttcctgccaggcttgaagaaaatgatctgaattttttcctccttttggttttattttgttggtttattttgtgttttcttttctcctttttggggggtattcagagtgggctgggcccctgggcgagacacagctacctctgttggcatctttttaataccaggaacccagcggctctagccactgagcggctaaatgaaataaagtgg

SEQ ID NO: 41370 - DNA, 788 bp, Homo Sapiens
gcctaggctttgtggatgtccagaactgcattagccgctgaggagagccaccgaaggccccaacaggggatgctcatcactggagactgcgactgggaagaacactgccccctccctcgggttgggtggcccagccagctggccagcctccactcccactctgccagacaccctgacacccacccaggctttgaagagcatggagggggagcctcagagctgacagtcctgcttagagcccttaaaaagacttgaaagttcactgggactcagtttaccttaatgccttagcagaagataaatcctacctagagacctttgttccttaaagcaataactgacaactctttgtagtcctccttgtgggtagttaagagtggggtcacccctttaactccaagcactacattttggcggctgccggcctctgggggaggtggcagttatgctgttactagtgattttagggctttgttatttaacttatttcaagggtgctgtgctcagccctgcccatggctgtgcagctccctccgtgcctcagatctgctgtagccagtgcagacctcactgtcgtgtccatgccacccccggcatggctccaggtggcctggtgactccatgatggacgatcttgctcccaggacctgcctcttcccaggcttcctggggaagagttgtacgcccaggcaacaagggctgagctgcgcttgcgtggtgttcatgacgcttgttttcctcctttgggtgtactgtttacaaatcttttggctggaactatttgtttg

SEQ ID NO: 41371 - DNA, 525 bp, Homo Sapiens
ggctactgtaacctccgcctcccgggttcaagccattctcctgcctcagtctcctgagtagctgggattacgggtgcgtgccaccatgcctggctaatttttgtgtttttagtagagacagggtttcaccatgttggtcgggctggtctcaaactcctgacctcttgatccgcctgccttggcctcccaaagtgatgggattacagatgtgagccaccgtgcctagccaaggatgagatttttaaagtatgtttcagttctgtgtcatggttggaagacagagtaggaaggatatggaaaaggtcatggggaagcagaggtgattcatggctctgtgaatttgaggtgaatggttccttattgtctaggccacttgtgaagaatatgagtcagttattgccagccttggaatttacttctctagcttacaatggaccttttgaactggaaaacaccttgtctgcattcactttaaaatgtcaaaactaatttttataataaatgtttattttcacaaaaaaaaaa

SEQ ID NO: 41372 - DNA, 1038 bp, Homo Sapiens
ggagtgtctcacaggattgcacctgtgacatcctgatggatgcytccctgtggccctcctggggcaagggtggacagactcagacccccagcatggttagcgctgaccttcattgaggtccctttggmaccagatgtcctgttacagacaccttcctctgtgtaagtctcctcaccttgaggggtctttagtaatgcatctgggctagcatctcaactgcyggtagcatttatctgacttggaaagttggagaagaggcattcctactggagaaaaatgtcagtgttttcctataagccctgtgttagcyattcattatatttgtgcttaaagatgttccttcattcatcaacyaggggaagtccagatgcgggttatcttgaaagaaacaaactgacattctaggcagacagttgtctatgtggtctgagggtcagcagctgttagtctccttcctttggctcttgagacccacacatatcactttagccctaacaagggctcctcccacctccacctgttgccccagttgaaaagcatccattatgagctgaggtcagcctggatctggaattgcagcccacataaacataaaggaggatgtccctggtctgttccatccccacggatggtgttgctgctgggcaacagtgttggcttcttttaagtaccccctttcctcctcacccacctccaaactgactagcactcagagggacttatgataaaggttcagctccaggggtagtacctgagtgtgtgccatgccccttcagaccagctgcttccatcagaattccagggtcacagccccaacagaagcagcagtgcctctgtaggaggggtgctgggctctggccttctcatgcagagaggtccgggacagggtcagtatcgtgggcatgtgtatagcttcccaagttcttttacagtccctgctgggactccctgacttactttggttggttcctagtgctacttgttttacaaactacactttgtagaattgattagawtaccttgtttatttaatgtgag

SEQ ID NO: 41373 - DNA, 914 bp, Homo Sapiens
  misc_feature (832)..(832): n is a, c, g, or t
  misc_feature (864)..(864): n is a, c, g, or t
ttcaggaaagttttctttggatgaagaagccattcttccagatcaaatagtatgttctcctgttcctatgttaagggatctgacacagaacactgtagtcagtattaattttaaagacccacagtttgctgaagattacatttttaaagctgtaatgcttccaggagcaagaaagccagcagcagtactgaaacctagtgactgggaaaaatccagcaatggacggcagtggaagcctcagcttggctttaaccgtgaccggaggcctgtgcacctggatcaggcagccttcaggactttgggccatgtgatgccaagaggctcaggaactggcatttacagcaatgctgcaccaccacctgtgacttaccagggaaacttatacaggccgcttttgagaggacaagcccagattccaaaacttatgtcaaatatgaggccccaggattcctggcgaggtcctcctccccttttccagcagcaaaggtttgacagaggcgttggggctgaacctctgctcccatggaaccggatgctgcaaacccagaatgcagccttccagccaaaccagtaccagatgctagctgggcctggtgggtatccacccagacgagatgatcgtggagggagacagggatatcccagagaaggaaggaaataccctttgccaccaccctcaggaagatacaattggaattaagcttttgtaaagctttcccaaatcctttcatcattctacagttttatgctatttgtggaaagatttctttctcaagtagtagtttttaataaaactacagtactttgtgtatttcttttaactgtgtatatntctactgatctgatctcactgtttatgttgcnttcaaagatgtatgttgcataatacagtggatctgaatttattattgctt

SEQ ID NO: 41374 - DNA, 550 bp, Homo Sapiens
catagtgctttacattttacaaagtccttttgcacatactatttcacaagtacatcacatcagctttcatatagctttatattattttacatcagttttacactgatggagaagctaaggttcagaaaagtgaccaactcaaagtcgtaaagtgtagtaggatttggcctcagatctttgactccgttgtgtgcagattctgctgtattagtgttccttctaaatattgtatgcagttttcccagtgttacgagattggtgttgctatccatttgttgtgaatgaagacttgtcctatagtacatgacagggctgagagtggactgtagttcttagctgaaccctttctactgtttaaaacaatcatcaggcctatcctctgctcccaggggaatgtgggagagaaaagggttcttggccaggctgtaggtggtggctcacatctgtaatcccagcactttggaaggctgaggtgggtggattgcttgagcccagggatttgagatcagcctaggcaacatggcaaaaccccatctctacaaaaaaaaaa

SEQ ID NO: 41375 - DNA, 837 bp, Homo Sapiens
aattttctaatgttagctttgaaacaaacttaagtcagacctcctatgatgacctgatcaggaaagttgtagaagtcttcaagccaggaaaatttgtgaccaccttgtttgttaatcagagttctaaatgtcgcacagtgcttgcttcgccccagaagattgaaggttttaagcgtcttgattgccagagtgctatgttcaatgattacaattttgtttttaccagttttgctaagaagcagcaacaacagcagagttgattaagaaaaatgaagaaaaaacgcaaaaagagaacacatgtagaaggtggtggatgctttctagatgtcgatgctgggggcagtgctttccataaccaccactgtgtagttgcagaaagccctagatgtaatgatagtgtaatcattttgaattgtatgcattattatatcaaggagttagatatcttgcatgaatgctctcttctgtgtttaggtattctctgccactcttgctgtgaaattgaagtgcatgtagaaaaaaccttttactatatgaaactttacaacacttgtgaaagcaactcaatttggtttatgcacagtgtaatatttctccaagtatcatccaaaattccccacagacaaggctttcgtcctcattaggtgttggcctcagcctaaccctctaggactgttctattaaattgctgccagaattttacatccagttacctccactttctagaacatattctttactaatgttattgaaaccaatttctacttcatactgatgtttttggaaacagcaattaaagtttttcttccatgagttgagtccttaagaaaatgattc

SEQ ID NO: 41376 - DNA, 644 bp, Homo Sapiens
  misc_feature (598)..(598): n is a, c, g, or t
agtcacattcgctattcagttgtaaaccgaatggatgggaggggagaaaatacaagctctccacacaggtatgctcctctcttttctgagagagaaggcatgggattttcagcataaattccatgttatgtgagtgctgtttgagttctgaagttcctatcaatatctgttcctgcaagtgatctctgtaagaccaccttacatgctggtcttagttattgttaaaattgcaaggtttcttcacaccctctttgataagaagtgtttagctggcagagctttcccttgacttctgagtctagtgtgggttggcccatgacagtgggaagaaatccaacatgttacatggagaccttgtatgtaaacaaactctgtagcctttgaaagtggaactgctttttacagttaaagggctgctaaatggcttgcagatgagatcttctggctcaccttgatcttcacatgaacccattgtgacctatctggatttcctaggacctgtagtttccatttgggttatattagtgcctcaggaatgtgtcactactggtcaagcaatactcagaaattcaggctgtgaggggttagattagagganagtaatttaggtgagctatccagagctttcaacctcagggtttata

SEQ ID NO: 41377 - DNA, 855 bp, Homo Sapiens
gctggcctggccctaggtttggttatgttgggctctaaaaatgctcaggctattgaggacatggttggttatgcacaagaaactcaacatgagaagattctgcgtggtcttgcagttggcatagctttagtaatgtatgggaggatggaagaggctgatgctctcattgaatctctctgtcgtgacaaggacccaattcttcgaaggtctggaatgtatactgtagccatggcttattgtggctctggtaacaacaaagcaattcgacgcctgctacatgttgctgtaagtgatgttaatgatgatgtcaggagggcagcagtagaatcacttgggttcattctattcagaacccctgaacagtgcccaagtgttgtctctttgttgtcagagagttacaaccctcatgtgcgctacggagctgcaatggccttggggatatgctgtgctggtacaggaaacaaggaagccattaatttgctagaaccaatgacaaacgaccccgtgaactacgtgaggcaaggggcactcatagcttcagctctcatcatgatccagcagactgaaatcacttgtccaaaggtgaatcagttcagacagctgtattccaaagtcatcaatgataagcatgatgatgtcatggccaagtttggcgctattctggcccagggcatactggatgcaggtggtcataatgtcacaatctccttgcagtccaggactgggcatactcatatgccttctgtggttggcgtccttgtatttacccagttttggttctggtttcctctttcacacttcctgtcattggcttatacccctacctgtgtcattggccttaacaaggacttaaag

SEQ ID NO: 41378 - DNA, 524 bp, Homo Sapiens
ggagggcacctctgtctgagtttcctctttggaaaaagaagttactgttcaacttaccaaaatgccttacacattccttacaaataaaccaaccaacctacacagcgttatccaggtccaacttccggtagctccgagagaagccatgagagacaagtctcttagagccacagaagtagaccttccagagccccagtttgtaaatgaacctgtgtcacatttgataaacactatcctgggcgcagccccgggccaccgccgagtgacgccaaagccctggttgactctgacagccccgtgggtgtgtgggaggccgggcgctctggggtctgtctgtcagtgcaatcgtttagtgttttttcagtggggcggggcgggaagcgggtgggaccgggcagccagttctcaaaggctgtggggccgactggaggccacagcccctcacccctagacgttgccaaccagaactgacgtgtgacctcctgggtgttgatgccattaaaaccaacgttggtgcccggaaa

SEQ ID NO: 41379 - DNA, 507 bp, Homo Sapiens
tccttgggggaggaggccagcttctcctggggcatggctggaactgtggcgacaggagcaacgataatggggggctgcactggggttggagccacagccacagcaggagcccgcactggttctcgaaggaggacagtcacattgggggctggatcatgatcaggtatcttcccattaggtttctcttcctttttcttggtctttcctttcttctccactgttttctccttctttttcttctcgactttctggtggtgagttttcgccatctccttgcgctggttggctagggcttcttcatatgacgtttccttcatggagaaagtcgacaccaggaagatgccaatggcagaaacaaccatgaatcctccaaagaccacaacccccaaggtttgagtgtcgtaaatatccatcctggcttgctttcctttcacctgcagccagagacgcgagagggaaagcgagagggcaggagccgccgccttcgcagccgccgcggagccggga

SEQ ID NO: 41380 - DNA, 936 bp, Homo Sapiens
agagcgaagcccagaaacagagcgatgagcttgccctggtcaggcagcagttgagtgaaatgaagagccacgtagaggatggtgacatagctggggccccagcttcctccccagaggcgcccccagccgagcaggaccccgttcagctgaagacgcagctggagtggacagaagccatcctggaggatgagcagacacagcggcagaagctcacggccgagtttgaggaggctcagacctcggcatgtcggttacaagaagaattggagaagctccgcacagccggccccctagagtcttcagaaacagaggaggcctcacagctgaaggagagactagaaaaagagaagaagttaacaagtgacctggggcgcgccgccacgagactgcaggagcttctgaagacgacccaggagcagctggcaagggagaaggacacggtgaagaagctgcaggaacagctggaaaaggcagaggacggcagcagctcaaaggagggcacctctgtctgagtttcctctttggaaaaagaagttactgttcaacttaccaaaatgccttacacattccttacaaataaaccaaccaacctacacagcgttatccaggcccaactttccgggattccgagagaagccatgagagaacaagtctccttagagccacaagaagtagacccttcccagagcccccagttttgtaaaatgaaaccctgtgctccccattttggataaaccactaatcccgggggcgcaggcccccgggggcccaccgccccaaatgggaccgcccaaaaggccccttggggttggacactccgggaacgagccccccccatgggggttggctgtttggggaaaaggaccccgggcaggggggcttcctttgggggggggcgccccggggccccctggggccccaagggtggggccaaaa

SEQ ID NO: 41381 - DNA, 653 bp, Homo Sapiens
  misc_feature (394)..(394): n is a, c, g, or t
  misc_feature (529)..(529): n is a, c, g, or t
  misc_feature (549)..(549): n is a, c, g, or t
  misc_feature (554)..(554): n is a, c, g, or t
  misc_feature (588)..(588): n is a, c, g, or t
  misc_feature (590)..(590): n is a, c, g, or t
  misc_feature (641)..(641): n is a, c, g, or t
  misc_feature (645)..(645): n is a, c, g, or t
  misc_feature (647)..(648): n is a, c, g, or t
gtgctttgcagtatgaagatgtaagcactgctgtccagaatctacaaaaggctctcaagttactgacgacaggcagagaatgaagcctttgtatgacagacccatgtatttttggcatgaggaactaacagtccattactctatcttcagcctatcaggatcacagttttaaggaagacttggttttgttgaatatgacaatgaaatctgtgtgtatcagatttttattgaagcattcatcagcagcctcaaccagttttcattgtccatttactagattcaatcgtctctgagtatatagggctgatgttagcaagaccctaaaaatgtccattgaaccctgcttcaaaaaatgaaaacacacctctataaaatgtgtactgggaataagctntgtatttacatacattaggggaattttttaaaatctgtaatgtttggacaaacagatgatattactttgctataaaattataaatgtaacttttaataaagatagccagaatattctaaattagaaattacgttnttgtttccctcaagacatanaacanatataaacattctaaactgctggatgaatctganangacattaagttcaaatttaaaattatctcattattataactccatttgttnttangnnttgtg

SEQ ID NO: 41382 - DNA, 501 bp, Homo Sapiens
cacgtgtgccttggtcactactgaagagctgcctcctggaagcttttccaagtgtgagcgccccaccgactgtgtgctgatcagagactggagaggtggagtgagaagtctccgctgctcgggccctcctggggagcccccgctccagggctcgctccaggaccttcttcacaagatgacttgctcgctgttacctgcttccccagtcttttctgaaaaactacaaattagggtgggaaaagctctgtattgagaagggtcatatttgctttctaggaggtttgttgttttgcctgttagttttgaggagcaggaagctcatgggggcttctgtagcccctctcaaaaggagtctttattctgagaatttgaagctgaaacctctttaaatcttcagaatgattttattgaagagggccgcaagccccaaatggaaaactgtttttagaaaatatgatgatttttgattgcttttgtatttaattctgcaggtgttcaagt

SEQ ID NO: 41383 - DNA, 792 bp, Homo Sapiens
gcttgcttccccctcctcggatgtccctttgcaggcccctgtcgttcctccggcaccagtgtccttggctgccatggcaagctcatcaggggcttgtaccctggtcaccaagcatggtagcagctgcctgcattgtatctccatctggtcactgcaggtgccaacccttcatcccccatgttttcctgggccatggagggctgacctccgtttctggggaatgtggctgagctgtggtaaccagctacaccccaggtgctctttccatggtggtgcctgctcatcttgctgatgcaaactaggaagttaggctgcatctcggagtggctttcgctggagaggtgctttgctgtctctcagactcagtcactgtgttccctccccgcctctcttatctccatggctgtttgcagctctcccaggtactttggggtctgagctggaattcctttgtggtttgctcttctgcttctcactcttgtattaagaaggattccacaaagggagagtggcatccctgctgctgctgtgccagaccagagtttcctgaggggccctgaccctaaccctccagctcagccctgtacacctgaccctgtaaatgagtggggtttgctgactgtaatccctgacaccagtaaaaccaaaaagactcttgggggctcagtgtgagagccagggttacctactctgccaagtgaggacaaactgctaggctgtatcccataatttcaggatgagaaacatttaacataaaaatttgtagtaaacataaaaaaaaaaaaaaaaaaa

SEQ ID NO: 41384 - DNA, 656 bp, Homo Sapiens
cccgggatttgtttttggggaaaaacaaaattactaaacttcagaacctggatgcgctcaccaacctgacagtcctcagtatgcagagcaaccggctgaccaagatcgagggtctgcagaacctggtgaacctgcgggagctgtaccttagccacaatggcatcgaggtcatcgagggcctggagaacaataacaaactcacgatgttggacattgcatcaaatagaatcaaaaagattgaaaatatcagccatctaacagagctgcaagagttctggatgaacgacaatctccttgagagctggagcgacctcgacgagctgaagggagccaggagcctggagacagtgtacctggagcggaaccccttgcagaaggacccccagtaccggcggaaggtcatgctcgccctcccctccgtgcggcagatcgatgccacgttcgtcaggttctgagtccttcttggctcctcatgtggtccctctcctcggaagaactgcccagccacgggtttttaacccacctgttgctcctgaggtcgtcactatatcaacagtcacaaacccaatggcaataaaggcactgacgatagctggcgcgcgcgacgccacacaccattttcagatgccgttgcaattaaatcttgccacactgtc

SEQ ID NO: 41385 - DNA, 510 bp, Homo Sapiens
agcctcagcagtgtagagagtccccggcgctctgatgttggagagaaagaacagaccagcgcccttcctgactacatccgaaacttcacacagggtgtttctgagcaccagcacttccagcgcttcacttaacggcataaagcaaaacaggaccttggcacaccgtcagctcgaactcaacactggcagccaccgtctcacccctgcggaggagcgctcccgtctcccacaggtgccttaccgcgttccctcccgctgctttcatttttctgacctaataattacgggaaatggaaagtctgggccagcatcaataaaatgacaccaaaaataagtagatgaaatcaaatgaatatgagaacatcttgttcttcaatatcacgggtttttgttaatgtttcataagtaattctccccacttgatttttcttctataaaatcccatagaacaatgtttatgctatagccatttaatatatgtacaaattgtaaagaatatgtataaatgtt

SEQ ID NO: 41386 - DNA, 560 bp, Homo Sapiens
gctgtttgtactcaaatatattttctcagtttcagatcctctgctattttattgagtggaaagtcttgagctaaaagggttcaagaagaataatgttgcatttccttatgtctcaggaaacactttttatggtaacttgtcagattgtctatgaacaaacccacttttttagacattgataaagtcttcttttcttcacgtgatattttatacaagaacacttcagatgtattagatgtgactgattttaacaaatcctattagatttgtatcaactagttacatgttctattcatagtcttttgtgaatcattgcctttttgtttaaaaagatggcctattttgagcctttgtataggtacattcctgtttttgtgacaaaagaaaaactttaaaattgtcccaaacagaaaaataatggctatcagaagtatgttttgttttagtgtgagttaccgttactgtatttgtttattgtaaaggtggacatttagcgttcagtgcagttttcaataaaaagtaattaaaatttgttaagttctgaaaaaaaaaaaaaaaaa

SEQ ID NO: 41387 - DNA, 893 bp, Homo Sapiens
  misc_feature (789)..(789): n is a, c, g, or t
  misc_feature (845)..(845): n is a, c, g, or t
gacatcaagatctgggacatccgaacccttgactgcatccacgtcctgcagacgtctggtggcagcgtctactccattgctgtgacaaatcaccacattgtctgtggcacctacgagaacctcatccacgtgtgggacattgagtccaaggagcaggtgcggaccctcacgggccacgtgggcaccgtgtatgccctggcggtcatctcgacgccagaccagaccaaagtcttcagtgcatcctacgaccggtccctcagggtctggagtatggacaacatgatctgcacgcagaccctgctgcgtcaccagggcagtgtcaccgcgctggctgtgtcccggggccgactcttctcaggggctgtggatagcactgtgaaggtttggacttgctaacaggatccaggccaggctgtggtttcccctgaaccagccctggacctttctgagccaggctggccacatggggtggtctcggggtttctgcctgccccgtgggcataggtggacaggctctggcagccgggcagtgccctccccgtcccatgctcggcgagcctccctctactcggcactgtccttgctgcccagcccctctctgggtgccaggtacgacgcttgccccggcccaccctccatccccaccctccatccccaccctagatggagcgagggcctttttactcaccttttctaccgtttttagactgtatgtagatttggttacctcctggttgaaaataatgctccacagactgtggctgtgagtggggacagctcctcgggacnagggggctgtgtgtgggctttgaggttggtgtgcacaggcactggctgctgtgaantgggggggcatggggcagttttcttttggttggacccccagaacttcg

SEQ ID NO: 41388 - DNA, 836 bp, Homo Sapiens
caactagttacatgttctattcatagtctttgtgaatcattgccttttgtttaaaaagatggcctattttgagcctttgtataggtacattcctgtttttgtgacaaaagaaaaactttaaaattgtcccaaacagaaaaataatggctatcagaagtatgtttgttttagtgtgagttaccgttactgtatttgtttattgtaaaggtggacatttagcgttcagtgcagttttcaataaaaagtaattaaaatttgttaagttctgaaattcaagtacatctcactaatgtaaatgttctctacttgagatgtttaaggcagttgcattgtcaattagccaatttccagctcttgttactacagggttccataaccagactcaagaccgctgacaattaattacctgtgataacaaaaagtttaatttgaaaaatcaaaacctcacacaagtccatcattatcacgtcatgccgtccttaagatgcaatggtgggttagtgctaaatcaattcaaaaaaaaacaaagtggctcaacttttagagttctgactttaatctaccccaaagcaaaatgacctggacctggttcaagggagggaagtgaaccttgaaactgttttggccaataaccttaacaaacaaaatgatatttaccaaaagaagtgttgcaaatagtctcatgagttaagagcttgatttaatggatcttctttttaaatagaattaacctttataccaaaaaaaaaataaaaaaaaaaaaattttgggggggtggccctaagaaggtttttaaacacactgggtgggggggggccaagtgaaaggaacggggt

SEQ ID NO: 41389 - DNA, 629 bp, Homo Sapiens
cggacttctgggaaagcaccgttgccaggagcttgacgccttcagagcccgcgtgtagggcgtgacccccgctgccccggcgccagccatgccgctaatgctgccgcttcggtccccacctgcaaaaggcttcctcagcacccagatctcctctgggggtgcagagggtcccgatgagctgcttccctggggcaggcttggttcagtgcctgctcgggaacctgctcgcttgacaatggcctcgcccagggaggacgggaagtagcccacccggtcattgcccgtccggttgtcatggatgcagcccttccaccggccatccggatgctgctcgaggactgtgatgatgtcccctgccttcacgttgaggctggtcaggtcgtaattgttgcaataatccttggtcgcccggacctgcagggccgctgaggcctctcgcaacagctgcttgatctccctgctggcctgggacgtggtgaactggtgcacgatgtccaggctgtctggctgtaggtgttcctcacgtgggcattgatcccgctatccagcagcagcgaccacctctgtctttccgcagagcgcagcctcgtgcagggccgtgccggacttggtctggcggttaatgtcga

SEQ ID NO: 41390 - DNA, 557 bp, Homo Sapiens
ggaaaagggagggcgagaatgaccacacaacacagccttggaccatgagcagaagcgtccgtgggaactccactggggtggatgggctgcctgcacagcccctggagagggggccaggcacaccctcagaggagctgcaagcccgtggcctggcctgctacatgccctgcttccacgtggctgccacgctgacacacccacattcaccaaacccacccgcgccctgggacgcagccacgccaggaggaggacacggccgccgagagcaaggcacaacctcgagttcttggggcgcagagaacttaggagagaagcacggaggagcccccggcagagcacccgcccccgggccccagccttccacctgtgctagcagcctggggcctccactctggccggaggaaggaccgcaggcagacagcctgggcctctaacagcttttgtccggagctagacttcgtgtcctttcagttggtaaatggttttctatagaatcaataatatttctttctttagatatatatttgttaaagttaaaaaaaaaaaaaaaaaaggac

SEQ ID NO: 41391 - DNA, 498 bp, Homo Sapiens
ccccctgatgatgggcctccaggggagctcgggcctgacggccctgacggtccagaggaaaagggccgggatcgtgaccgggagcgacggcggagccaccggagcgagcgcgagcggcgccgggaccgggatcgtgaccgtgaccgtgaccgcgagcacaaacggggggagcggggcagtgagcggggcagggatgaggcccgaggtgggggcggtggccaggacaacgggctggagggtctgggcaacgacagccgagacatgtacatggagtctgagggcggcgacggctacctggctccggagaatgggtatttgatggaggctgcgccggagtgaagaggtcgtcctctccatctgctgtgtttggacgcgttcctgcccagccccttgctgtcatcccctcccccaaccttggccacttgagtttgtcctccaagggtaggtgtctcatttgttctggccccttggatttaaaaataaaattaatttcctgtt

SEQ ID NO: 41392 - DNA, 611 bp, Homo Sapiens
tggatatctctgcaacaaaggcagtccacataagtaatcctaaaacagctgaatttcaggtggcacgcactacccttcttcctggcctcctgaagaccatagcagcaaatcgtaagatgccccttccactgaaactgtttgaaatctctgacattgtaataaaagattctaatacagatgtaggtgcaaaaaactacagacatctctgtgctgtttattacaacaagaatcctgggtttgagatcattcatgggctgctggacagaattatgcagttgctcgatgtgcctcctggtgaagacaaggggggatatgtgatcaaagcatcagaagggcctgctttcttccccgggcgatgtgcagagatctttgccaggggtcaaagcgtcgggaagcttggggtccttcatcctgacgttatcaccaaatttgagctgaccatgccctgctcctccctagaaatcaatattggaccctttttgtgaagattggtctctgtggtgtgattctcttcccaggtgtccctttctcctcccctagtgtccttaagtcctcctccacagggaacatctatttgggctttgatgtttaataaagtagaaagcaytgtc

SEQ ID NO: 41393 - DNA, 942 bp, Homo Sapiens
  misc_feature (19)..(20): n is a, c, g, or t
  misc_feature (28)..(28): n is a, c, g, or t
tgatgggtgtgtgaaccgnntgtgttgnaaatagtggctggtaccggtccggaatatcaagaattaggcatcttgatctccaatgtgcttcctgactctgatgcacatagagcaggactgcaggaaggggaccaagttctagctgtgaatgatgtggatttccaagatattgagcacagcaaggctgttgagatcctgaagacagctcgtgaaatcagcatgcgtgtgcgcttctttccctacaattatcatcgccaaaaagagaggactgtgcactagaaagttgcagcccacagcccttcatgtggactctgtcatgacatgctaactagacttcaggggagccacttctgttttcagcccctccctggaatagtgagttgggaggatggggagacagctaaccaactgcattacccaaaccatattgcacttttagttccctagttttctaggtgagcttcattccctgaaaggaggatgatgatatctaggcataacctagcctgtgaggaacctagttaggaaagacaactgacatttattgaatatcatgcactagtcccttacatatgtcatattttaattatagaaatcagtagcaaaaagaatcttggggattttccatctgacttccctggccatcttatcccatccttgcactaccagaagattcatacacttttgagactccagtgagacgctgttttcaccccttcctcctcctagcctctctcccaaaaagtaaaacacaatgcttgaagaaaaaacaatctatctgggcaacgtacttacataaatagaccctgggatcaataaccacccgtatatcacaaacagggattatacagaaagggggggcccgcccttaaaaaaaccccccgcggggggcccaaagctttatacccgtaaccccagtttttttcttggtaaaaaaggggg

SEQ ID NO: 41394 - DNA, 816 bp, Homo Sapiens
cgggattttctagaaaggcagttgaggaggagggagcgcttgagggggactggcctggcgtgcactccgcacctcggggacattattgcgcgtggaacggctgcttttggaagactattgcccagaagaaaagatgtttggttttcacaagccaaagatgtaccgaagtatagagggctgctgtatttgcagagctaagtcctccagttctcgattcactgacagtaaacgctatgaaaaggacttccagagctgttttggattgcatgagactcgttcaggagacatctgcaatgcctgtgtcctgcttgtgaaaagatggaagaagttgccagcaggatcaaaaaaaaactggaatcatgtggtagatgcaagggctggacccagtctaaagactacattgaaaccaaagaaagtgaaaactctatctgggaacaggataaaaagcaaccagatcagtaaactgcagaaggaatttaaacgtcataattctgatgctcacagtaccacctcaagtgcctccccagctcaatctccttgttacagtaaccagtcagatgacggctcagatacagagatggcttctggttctaacagaacaccagttttttcctttttagatctcacttactggaaaagacagaagatatgttgtgggatcatctataaaggccgttttggggaagtcctcattgacacacatctcttcaagccttgctgcagcaataagaaagcagctgctgagaagccagaggagcaggggccagagcctctgcccatctccactcaggagtggtgactgaggtttttatgtag

SEQ ID NO: 41395 - DNA, 621 bp, Homo Sapiens
taccagcggattcacgagaagattcaggagagggtcatgaacaatctggggacatggatcgactggcagtacctacagaatgctgccaagctcttggccaagtgtcgatacaccctgcaatacacctacccatatgcatattacatggagtccggacccaggaagaagctgtttgaataccagcaggctcagctggaggctgagatcgaaaacctctcatggaaagtggagcgtgcagacagctatgacagaggggacttggagaaccagatgcatatagcggagcagcggaggagaaccctgctgaaagatttccatgacacctaagttgggatgtggatgtgccggggtgaggaagatgtggctgcaaggtctcccggctgccatactgcatgctgcaggctctgcctttcatgaccccaggcaacagccagggccccactcctgagagacactggcaacacctcttagttgatttctgttttcttctcttttcgctttttgtttctaccagggtagaggccatgttgaactggcctcttttcaggacttttatttccccctggatggttgttgggagggaggggaaagtgttttctgaatgggctattaatagtatta

SEQ ID NO: 41396 - DNA, 561 bp, Homo Sapiens
aaatgaacccagaatggaacagtggggagctaactgtgaatgaggagagtacctgctgcaggacctggaggtcaggtgtgaatrctgtattggcacagggaataaatatcctggcgtctggagccttcacctctccgtcaagtcyttcctgtgatactgccatggcacaggatctgagttgcagctctgcaccctaaatcacaccctgggcattgtctgggctgcagggctgccaggttctgtacttgtgtccagctgtggccctggatgctggagctggagggttttctgtgctcagactgtagcctgtagctcttggcctgtgtagagccccctcctgtgccctcagtggctgtcgtttgttaacatcatcaggaagatgggaaaggtcaggcagaatttttctgccctacaaagggtggaagagaaaggacacagtattttcatgaatttaccatatatctttgtttttcttcaacgaaaaagttaattgaggcaatgtcatctgctcaaagttgagtggkttattcacaataaactgtaagtttctgattataaaaa

SEQ ID NO: 41397 - DNA, 577 bp, Homo Sapiens
cacgcgtccgcgagtggcgcccgtatgccctgcgctcctccacagcctgggccgggccgcccgggacgctgaggcggcggcggcggccgagggggccggtcttgcgctccccaggcccgcgcgcctgagcccaggttgccattcgccgcacaggccctattctctcagccctcggcggcgatgaggcgctgaggcggctgccggcgctgcgccggagcttaggactcggaagcggccgggccgagggcgtggggtgccggcctccctgaggcgagggtagcgggtgcatggcgcagtaacggcccctatctctctccccgctccccagcctcgggcgaggccgtccggccgctacccctcctgctcggccgccgcagtcgccgtcgccgccgccgccgccgccatggccaatgacagcggcgggcccggcgggccgagcccgagcgagcgagaccggcagtactgcgagctgtgcgggaagatggagaacctgctgcgctgcagccgctgccgcagctccttctactgctgcaaggagcaccagcgtcaggactggaagaagcacaagctcgtgtgc

SEQ ID NO: 41398 - DNA, 766 bp, Homo Sapiens
gggtagaaattgttttatgttgatgggaggtttgtttgattgtcaaaatgtacagccacagccttttaatttgggagcccctgttgtcattcaaatgtgtacctctacagttgtaaaaagtattagattctactatctgtgggttgtgcttgccagacaggtcttaaattgtatattttttggaaaagtttatatactctcttaggaatcattgtgaaaagatcaagaaatcaggatggccatttatttaatatccattcatttcatgttagtgggactattaacttgtcaccaagcaggactctatttcaaacaaaatttaaaactgtttgtggcctatatgtgtttaatcctggttaaagataaagcttcataatgctgtttttattcaacacattaaccagctgtaaaacacagacctttatcaagagtaggcaaagattttcaggattcatatacagatagactataaagtcatgtaatttgaaaagcagtgtttcattatgaaagagctctcaagttgcttgtaaagctaatctaattaaaaagatgtataaatgttgttgaaacattatggtggttatttccagctgtcttttttgtttttcaatcctttatcatacattggctttccgaatgatccctttcatcagataaagctttttctggcttattctaggacatttgttataaactttttgtaaatgataatgaaggaaagagaaacggtaaacctaggaagttcaaccaatttttaaaaccatcc

SEQ ID NO: 41399 - DNA, 502 bp, Homo Sapiens
tctccacttctggtcccctgtggtgatgtgcctgtaatctttttctccacccaaaccccttcccacgacaaaaacaagactgcctccctctcttccgggagctggtgacagccttgggcctttcagtcccaaagcggccgatgggagtctccctccgactccagatatgaacagggcccaggcctggagcgtttgctgtgccaggaggcggcagctcttctgggcagagcctgtccccgccttccctcactcttcctcatcctgcttctcttttcctcgcagatgataaaaggaatctggcattctacacctggaccatttgattgttttattttggaattggtgtatatcatgaagccttgctgaactaagttttgtgtgtatatatttaaaaaaaaaatcagtgtttaaataaagacctatgtacttaatcctttaactctgcggatagcatttggtaggtagtgattaactgtgaataataaatacacaatgaattctt

SEQ ID NO: 41400 - DNA, 597 bp, Homo Sapiens
gatttgcacagatgtagctgctagaggaattgatatccacggtgttccttatgttataaatgtcactctgcccgatgaaaagcaaaactacgtacatcgaattggcagagtaggaagagctgaaaggatgggtctggcaatttccctggtggcaacagaaaaagaaaaggtttggtaccatgtatgtagcagccgtggaaaagggtgttataacacaagactcaaggaagatggaggctgtaccatatggtacaacgagatgcagttactatctgagatagaagaacacctgaactgtaccatttctcaggttgagccggatataaaggtaccagtggatgaatttgatgggaaagttacctacggtcagaaaagggctgctggtggtggaagctataaaggccatgtggatattttggcacctactgttcaagagttggctgcccttgaaaaggaggcgcagacatctttcctgcatcttggctaccttcctaaccagctgttcagaaccttctgatttttacatttactgaataagatttgagtaatgaaagtctgtagtcttaaaactctaaaacagttgtactgcttccaagc

SEQ ID NO: 41401 - DNA, 598 bp, Homo Sapiens
atgaaacttatggctacaaagagggcaaaccgtgcattattataaagctcaaccgagttctaggcttcaaacctaagcctcccaagaatgagtccttggagacttacccagtgatgaagtataacccaaatgtccttcccgttcagtgcactggcaagcgagatgaagataaggataaagttggaaatgtggagtattttggactgggcaactcccctggttttcctctgcagtattatccgtactatggcaaactcctgcagcccaaatacctgcagcccctgctggccgtacagttcaccaatcttaccatggacaccgaaattcgcatagagtgtaaggcgtacggtgagaacattgggtacagtgagaaagaccgttttcagggacgttttgatgtaaaaattgaagttaagagctgatcacaagcacaaatctttcccactagccatttaataagttaaaaaaagatacaaaaacaaaaacctactagtcttgaacaaactgtcatacgtatgggacctacacttaatctatatgctttacactagctttctgcatttaataggttagaatgcaaattaaagtgtagcaatag

SEQ ID NO: 41402 - DNA, 655 bp, Homo Sapiens
atggcccatcgatgagcatttttaacatactccatagtcttttcctgtggtgttaggtctttatttttatttttttcctgggggctggggtgggggtttgtcatgggggaactgccctttaaattttaagtgacactacagaaaaacacaaaaaggtgatgggttgtgttatgcttgtattgaatgctgtcttgacatctcttgccttgtcctccggtatgttctaaagctgtgtctgagatctggatctgcccatcactttggctagtgacagggctaattaatttgctttatacattttcttttactttccttttttcctttctggaggcatcacatgctggtgctgtgtctttatgaatgttttaaccattttcatggtggaagaattttatatttatgcagttgtacaattttatttttttctgcaagaaaaagtgtaatgtatgaaataaaccaaagtcacttgtttgaaaataaatctttattttgaactttataaaaagcaatgcagtaccccatagactggtgttaaatgttgtctacagtgcaaaatccatgttctaacatatgtaataattgccaggagtacagtgctcttgttgatcttgtattcagtcaggttaaaacaacggacaataaaagaatgaacaca

SEQ ID NO: 41403 - DNA, 687 bp, Homo Sapiens
acggagaggaagccttttgcagtgctggtgtgtcctgctccctccccacattccccatgctcaaggcccagccttctgtagatgcgcaagtggatgttgatggtagtacaaaaagcaggggcccagccccagctgttggctacatgagtatttagaggaagtaaggtagcaggcagtccagccctgatgtggagacacatgggattttggaaatcagcttctggaggaatgcatgtcacaggcgggactttcttcagagagtggtgcagcgccagacattttgcacataaggcaccaaacagcccaggactgccgagactctggccgcccgaaggagcctgctttggtactatggaacttttcttaggggacacgtcctcctttcacagcttctaaggtgtccagtgcattgggatggttttccaggcaaggcactcggccaatccgcatctcagccctctcagggagcagtcttccatcatgctgaattttgtcttccaggagctgcccctatggggcggggccgcagggccagccttgtttctctaacaaacaaacaaacaaacagccttgtttctctagtcacatcatgtgtatacaaggaagccaggaatacagggtttcttgatgaatttgggttttaatttttggtttttattgcacctgacaaaaatacaagttatcttg

SEQ ID NO: 41404 - DNA, 795 bp, Homo Sapiens
cgctattaattacagccttcaattccctggcctggaaagatactctgtcctgccagaggacaacctcacagctctgctggcctctcctcaaacaagtgctgtcagggacactgctcgcagatgcagttacgtggcttttcaccagtgtgctgaaaggcttacagatgcacgggcagcacgacgggtgcatggcttccctggtccatctggccttccagatatacgaggcactgcgccccaggtacctggagataagagctgtaatggagcaaatccctgaaatacagaaggactcactggaccagtttgactgcaagcttttaaacccctccctgcagaaagtggctgacaagcgccgaaaggaccaattcaaacgcctcattgctggttgcattgggaaacccttgggagagcagttccgaaaagaagttcacattaagaatcttccctcacttttcaaaaaaacaaagccaatgctggagacggaggtgctggacaatgatgggggtggcctggccaccatctttgaaccctgaatcaagcttttgggcatccttcctcggcctttcttgtcatctcttctttccctttgtagccgatctctaggcccttcttgcactgcacctcactttccaccactgtcagcctggaaagagatcaggtctggagctggagagacaggcctgtgccggaccagaagtaatatactaaagtatcaagaagggagtttgggcttaactatctgctaaatgtcccaatagtcccatctacttgggaattgggttcaaaaagtga

SEQ ID NO: 41405 - DNA, 673 bp, Homo Sapiens
gactaagtccaggtgccttccacaatctcatggtctttcaggtccctggttacttttctcaaaggccatttccaaaagaatactgccttcacatcacaacctgtactgtgagtccattctagaggtcactgaaaggccctgtaaagagaggacatggatacgggacctggccctgaggttattactggccgtaaggcagagttaatccatacagaaaccagtgtgtccatgtgctctgcacaaaaacagacctgttgtccatccagtccactgacaagagggtttccccgagagccgaagtggactgaagctacagtttttagctggtgcgggccacaggcagggtcagattgagaagaagcaaagctggggaagcagaagttgggagtcttgtgttgctccctcttcctgtgtggtgctctgggtttctgtggatcgtgaaggcgatctcaagagtgtttccctccaaacctgatagctgcctattcctgtctggttggggctgtggaggatgtagttgtatttattgcattgtaatatttttaacatcctgtgacttcatgctagaaattttctattgtttatagaaactttttgtaaaaacattaactctaaagcacatctgcatgtcagtaaaaatctccagttcgtacaaaaaaaaaaaaaaaaaaaa

SEQ ID NO: 41406 - DNA, 1083 bp, Homo Sapiens
  misc_feature (964)..(964): n is a, c, g, or t
  misc_feature (1046)..(1046): n is a, c, g, or t
ggaaactttccccactccctaaggggcatgtctgggttaggtgctaagtgctgaagagaacttggtcagttctctcaactttgctttgggcaagaatctggtcacctgatgggatccatggtacaggctactgctaaacttggcacagtatcaagtatagtacctccaaggaccagggctgggcagtctttagtgctaacatcccctttagagttcacacatcttgcccttccatgaatgacccctcagtctggcctccccagcctcaaggtccactcaggcacaagagccacagtaccctagatagtgtcacatgacaccgttgtcatccaaggataatacagaccaactaggctacatctgtgatgagcagctagcaaagccgctggtcttctcctaggactaagtccaggtgccttccacaatctcatggtctttcaggtccctggttacttttctcaaaggccatttccaaaagaatacatgccttcacatcacaacctgtactgtgagtccattctagaggtcactgaaaggccctgtaaagagaggacatggatacgggacctggccctgaggttattactggccgtaaggcagagttaatccatacagaaaccagtgtgtccatgtgctctgcacaaaaacagacctgttgtccatccagtccactgacaagagggtttccccgagagccgaagtggactgaagctacagtttttacctggggcgggcccaagggcagggtcagattgaagaaaaaccccatttggggcaccaaaaattgggaagtcttgtggttgcccccctccttcctggggggggggctctttcgttttcggtggcccttcgcagcggggattccccccggcgcggttttccaccaaacccgcgcacgctgcccccacttcgtcggcctggccggctcgctctcgccccttaccccgctttccccctatagctncgcccgcccgcggatttttacgcatcacgtgcagcccccgcgcgctttcactacacctagatcatcacgtttatcccccccncccccgcctgcgcgctgagtaacgccaccgacacccc

SEQ ID NO: 41407 - DNA, 695 bp, Homo Sapiens
attcccgggatggccctggtaggctcctttagaaggaccatttctgttcctagagcttaactagaattcattcttcactgaaaaaaaaaaaaagttacttaagaaagcatttctttcctaatctcactcaaatctgcagaattatttgtaattagtaatacaaaatctggccaaaaggagacttgtaaatagcgtaaagtggtgtcttatgctaaacggtggaatgtataggcagagaagctctttgaagttgtcagatgagctgggctcacaagcctgattcaaacaggctgtcggtctcctctcaccccttaatactgtgcagcccaaactcctaggactcttgaacatctgagcagttttgtgctttgagccactttttgacaaaaatggctccatttttccacagcgtggttttcttaaaatagtttaatgttttatagtctcatagtagtagtgttgctttctaagctataacagtcgactttattcttctactctgaaaaatcttgacttgtttgagtgtatataatatatataaagggagccttaatggattggttttcataatttaatattttttgtatttgctcttgtataattgtttttaacggaaagtattaaagaattgagggtggaattcttagaaccaaagttattcttaataaaaatcaccacatgcttggaccatgcaa

SEQ ID NO: 41408 - DNA, 770 bp, Homo Sapiens
gccgaggcttctgggccactcaggccagtgcacccctgggcagagccccttaaagctgctgtcactagatgcccatggtccagggcctggtgggcgtgagaggataggtggcagggcagaaactgggcagccctgacttgatagcagcagggggagctcccaagctgccaagcccctgcctccagccttcctgagtttctctctcctgaaccctactctctcctttttgcttcctcagtttttatcaggctttctctgggggacagcagtctctgagcaccagggagcagttgccctcaggcctgtgcccagcatgccctcccctttttatacgaatgttttctaccagtgtgcttgggtttgccatgatgcgaggctgagttgctgtagcgtcttgattctctccctgggtctgcgttccctcccctgggcctgactgagcctgctcattgtttttccctttattacacaggacagccaggggaggaggggggcccagccctgggaggctggtgggaggcagggggcaggcctgcggatgcatgaaataatgttggcattattttttaattttttaaaaaataaatggtatcttatttaattgtcctgttccttcccactccccgcctcctaggatgttagcccaagctcagggtaggcccagggggctgggagaaatgaagccacccatggggactggggaccaggggccttcagcatggcttctaggttccctcctcccctacccatctccctactcacagtacaga

SEQ ID NO: 41409 - DNA, 641 bp, Homo Sapiens
tggagcgacttctcatactttctttgaagactcatagaaagctggatctagagcttttgaatccttaattagcacagtagaaattagctttctatgggaatgctttagtgttagcagttgacaattaggcccatattcaatctgaatgggaacaaaagtaaatgcaatgataatatactgctagttagagaaacatgttagttgattatacctgaaatggattatttatctcatcagcaagtattatttgaataaaatgagaaatgcttaagaaaaattgttgctctatagtaatttggtttcgaagaatggaatggtaactattttttcccatcgttcttttgagagaaggaagtgtgatgactgatgatcttgaaaagcccatttctgattgcacgttgactggaattctttctttgtgtctgtggactagcgatgctgtttgtaaaatgaagattcgggactggctcatatctttttatctaactagatgtcagatcttgaaatctgtattctcgaagcaattctgccacttgatcgtattcacaggggccctggtaggctcctttagaaggaccatttctgttcctagagcttaactagaattcattcttcactgaaaaaaaaaaaaaaaaaaggac

SEQ ID NO: 41410 - DNA, 702 bp, Homo Sapiens
  misc_feature (675)..(675): n is a, c, g, or t
ttagacttcgactcaggatccagtcccttacacgtacctctcatcagtgtcctcttgctcaaaaatctgtttgatccctgttacccagagaatatatacattctttatcttgacattcaaggcatttctatcacatatttgatagttggtgttcaaaaaaacactagttttgtgccagccgtgatgctcaggcttgaaatgcattattttgaatgtgaagtaaatactgtacctttattggacaggctcaaagaggttatgtgcctgaagtcgcacagtgaataagctaaaacacctgcttttaacaatggtaccatacaaccactactccattaactccacccacctcctgcacccttccccacacacacaaaatgaaccacgttctttgtatgggcccaatgagctgtcaagctgccctgtgttcatttcatttggaattgccccctctggttcctctgtatactactgcttcatctctaaagacagctcatcctcctccttcacccctgaatttccagagcacttcatctgctccttcatcacaagtccagttttctgccactagtctgaatttcatgagaagatgccgatttggttcctgtgggtcctcagcactattcagtacagtgcttgatgcacagcaggcactcagaaaatactggaggaaataanacaccaaagataaaaaaaaaaaaaaag

SEQ ID NO: 41411 - DNA, 678 bp, Homo Sapiens
cttacatcacctcccaggagatgaagtgtattcttcactggtttgccaattggtcaggtccccagcgtgaacgtttcctagaggacctggtagctaaggcagtgccagaaaaattacaaccactgctggatagtctggagcagcttagtgtgtctggggcagaccgaccaccttctatctttgagtgccagctacatctttgggatcagtggtttcgaggctgggctgagcaggagcgcaatgaatttgtcagacagctggagttcagtgagccagacttcgtggcaaagttttaccaagcagtggctgctacagctggtaaggactgataggcattcagaccaaagaagataaccatagctgatggagccatgactctctacaatgataactcaattcaaatgtgttgcctaaagctctggaactggtattccaaccagctgaccgaactcactgaccagtacaggcatggttatttcaacattaatagcatgtcaactggactcctatttgtaaatgttatcaatctaagcaatccagctcatcagtctactagtttgcttctttccgagagatgtcaagtcctcaagaatttgatggcttcttctgcagctataaccacaaggaacctacacattgtaactcaagtccactgctggctcatgaaatgtgtaaagt

SEQ ID NO: 41412 - DNA, 693 bp, Homo Sapiens
cgcgtattttgcctttgctgctactttttctagttagatttcaaacttgcctgtggacttaataatgcaagttgcgattaattatttctggagtcatgggaacacacagcacagagggtaggggggccctctaggtgctgaatctacacatctgtggggtctcctgggttcagcggctgttgattcaaggtcaacattgaccattggaggagtggtttaagagtgccaggcgaagggcaaactgtagatcgatctttatgctgttattacaggagaagtgacatactttatatatgtttatattagcaaggtctgtttttaataccatatactttatatttctatacatttatatttctaataatacagttatcactgatatatgtagacacttttagaatttattaaatccttgaccttgtgcattatagcattccattagcaagagttgtaccccctccccagtcttcgccttcctctttttaagctgttttatgaaaaagacctagaagttcttgattcatttttaccattctttccataggtagaagagaaagttgattggttggttgtttttcaattatgccattaaactaaacatttctgttaaattaccctatcctttgttctctactgttttctttgtaatgtatgactacgagagtgatactttgctgaaaagtctttccccta

SEQ ID NO: 41413 - DNA, 574 bp, Homo Sapiens
ctggaggacacaggctcatgtgtgggtcttcatcctgcctgaccggcagatcttcctctacaccttgggcaaagtctatgcgaagatggtttcttagctctccatttgccatgattttcctcccattcatcatgagggagtttctcaaaccaggagtttatatttattttttagaaaatacacacttttcaggagaaacctgagcatgattttggattctccacctccccccagtctctgcacctgggattcagctcaaggattcagtgtcttcatttttacaaaagttcccccaagaaatcagcaaccagcctctgtttcatctgggagcccctcccttggccccctgggtttgggggtgctgccctactgggaacagcgggggtctgtcacccgtctgagccgcacccccctgtgtggatttcaggaagagcctccctttctttgcgtctccctttctttaattaacattttcaaaagtaataaattcttactgacgacttgtaacttagtcatattttatacttgtagcctttaataaagccatttaaaaaaaaaaaaaaaaaaaaaaaca

SEQ ID NO: 41414 - DNA, 695 bp, Homo Sapiens
gatgggactgaggcttcaggtggtactggagcacatgcctgtaggccctgatgccattctcagatacgttcgcagggttggtgatcccccccagccacttcctgaggagccaatggaagttcagggagcagaaagagcttcccctgagcctcagcgggagaatgcttccccagcccctggaacaacagcagaagaggccatgtcccgaggtccacctcctgctcctgaggggggctcccgggatgaacaggatggagcttcagctgagacagaaccttgggcagctgcagtccccccagaatgggtccctattatccagcaggacattcagagccagcggaaggtgaaaccgcagccccctctgagtgatgcctacctcagtggtatgcctgccaagagacgcaagacgatgcagggtgagggcccccagctgcttctctcagaggctgtgagccgggcagctaaggcagccggagctcggcccctgacgagccccgagagcctgagccgggacctggaggcaccagaggttcaggagagctacaggcagcagctccggtctgatatacaaaaacgactgcaggaagaccccaactacagtccccagcgcttccccaatgcccagcgggcctttgctgatgatccttagctctttgctctatggcccttcctcatcaggggaccgtttcccccct

SEQ ID NO: 41415 - DNA, 606 bp, Homo Sapiens
tcccgggatcttcaaaagaagagagattccaagcaacccatctttcttcagtatgtatgttctgtacatacttatcggagcgcgccagtaagtatcaggcatatatatctgtctgttagcaatgattattacatcatcagatcagcatgtgctatactccctgcaagaaatatactgacatgaacaggcagttcttggagaagaaagagcatttctttaagtacctggggaatacagctctcagtgatcagcagggagtttatttgaggacatcagtcacctttggggttgccatgtacaatgagatttataatcatgatactcttcggtggtagtttcaaaagacactactaatacgcaggaagcgttccagctatttaatgctggcaactactgtttaatggtcagttaaatctgtgataatggttggaagtgggtggggttatgaaattgtagatgtttttagaaaaacttgtgaatgaaaatgaatccaagtgtttcatgtgaagatgttgagccattgctatcatgcattcctgtctcatggcagaaaattttgaagattaaaaaataaaataatcaaaatgtttaaaaaaaaaaaaaaag

SEQ ID NO: 41416 - DNA, 496 bp, Homo Sapiens
ctctctctctctttctgtgtgtgtgtgtgtgtgtgtgtgtgtgtgtgtgtgtgtgtcttgtgcttcctcagacctttctcgcttctgagcttggtggcctgttccctccatctctccgaacctggcttcgcctgtccctttcactccacaccctctggccttctgccttgagctgggactgctttctgtctgtccggcctgcacccagcccctgcccacaaaaccccagggacagcggtctccccagcctgccctgctcaggccttgcccccaaacctgtactgtcccggaggaggttgggaggtggaggcccagcatcccgcgcagatgacaccatcaaccgccagagtcccagacaccggttttcctagaagcccctcacccccactggcccactggtggctaggtctccccttatccttctggtccagcgcaaggaggggctgcttctgaggtcggtggctgtctttccattaaagaaacaccgtgcaacgtg

SEQ ID NO: 41417 - DNA, 993 bp, Homo Sapiens
ctggaccggtccggaattctcgggatggctgcaacaacagcagcggcagcgtgaaatcaacttgttggcctatcatggggcatgccatggggctggtcctttccctaccggttcactgcttgaccttcgcttcctcagcaccttcaagcccccagcctacgaggatgtggttcaccgcccaggcacaccaccccccccttatactgtggccccaggccgccccttgactgcttccagtgaacaaacctgctgttcctcctcatccagctgccctgcccactttgaaggaacaaatgtggaaggtgtttcctcccaccagagtgcccccccccatcaggagggtgagcccggggcaggggtgacccctgcctccacacccccctcctgccgctatcgccgtttaactggcgactccggtattgagctctgcccttgtcctgcctccggtgagggtgagccagtcaaggaggtgagggttagtgccaccctgccagatctggaggactactccccgtgtgcactacccccagagtctgtaccgcagatctttcccatggggctgtcttccagtgaaggggacatcccataagtagttttgagagggtggatgggttacttgcccaccagaaacagccctagtcccaactccttgcgttcctttggcccctccctgcctacctagaatctgcctgaaagggctggagaggggcaatattgggggactgtgctagctttacccccgcaggacatacacaggaagccttgatctcatttaagagaatggaaccactaaccaacacacctttttttcccccccaccccattttttctcccgccgcatacaccctttttcttccctaacgccggggggccccctctaaaaatatcccttccggggccccaaattttacgcgtacccccatcttttctttgtaaaaagggggcccccaaaatcgaaccccatactataacctaagcgcctgggcccaccaa

SEQ ID NO: 41418 - DNA, 599 bp, Homo Sapiens
ccccgcgtccgcaaattctggcagacattgatctggatccaggctgtacattgaataaaaagattcgaaatgcacagttagcacagtataacttcattttagttgttggtgaaaaagagaaaatcagtggcactgttaatatccgcacaagagacaataaggtccacggggaacgcaccatttctgaaactatcgagcggctacagcagctcaaagagttccgcagcaaacaggcagaagaagaattttaatgaaaaaattacccagattggctccatggaaaaggaggaacagcgtttccgtaaaattgactttgtactctgaaaacgtcaatttatattgaacttggaggagtttggcaaagtctgaataggtcaacctgcaggcgtaactatttttgacctagtcagtttttaaacaatgtgcatttgaaggagttaattaaaagagagccaataaaatgattttactcattcagtatctgagtactggaagtgaaacatgaggaatgctttagtgtaatgtgggagaacttttttgtaaatttaatgcaattgaaaaagttttcaaattcaattaagataactagaattggatta

SEQ ID NO: 41419 - DNA, 582 bp, Homo Sapiens
ctccatcctttcagaaagtctccaagccaagttcaggctcactgacctggctctgacgaggaccccaggccactctgagaagaccttggagtagggacaaggctgcagggcctctttcgggtttccttggacagtgccatggttccagtgctctggtgtcacccaggacacagccactcggggccccgctgccccagctgatccccactcattccacacctcttctcatcctcagtgatgtgaaggtgggaaggaaaggagcttggcattgggagcccttcaagaaggtaccagaaggaaccctccagtcctgctctctggccacacctgtgcaggcagctgagaggcagcgtgcagccctactgtcccttactggggcagcagagggcttcggaggcagaagtgaggcctggggtttggggggaaaggtcagctcagtgctgttccaccttttagggaggatactgaggggaccaggatgggagaatgaggagtaaaatgctcacggcaaagtcagcagcactggtaagccaagactgagaaatacaaggttggcttgtctgaccccaatctgcttgaaac

SEQ ID NO: 41420 - DNA, 610 bp, Homo Sapiens
cgcgtccggacaggctgggacctttgaggaagataaagccttccttgactacccatcatattcagtgtccctgttcctcactcagagaggaaggcagaaccagtcaggcttatttcagtaagttccacagttctacaagactgcaggaattctccttaagggaggagagcaagcaggtgtggccccagcttctggaaatggcagaagagagggttttctcattgaatgggggtgggggctcgtgtgtcctgggaaaccccatcagtcccttcatttcttgagactcaactcctgggaggagagggtctcaagagttgtccctggaaggagggcgggggcagtctgcatctatttcaggttgtggctcttggttctaggactcttacttctctggctaagggctcagcttcttgggacttcaaccatcttctttctgaaagaccaaatctaatgtaaccagtaacgtgaggactgccaagtatggctttgtccctatgactcagaggagggtttgtcgggcaaattcaggtggatgaagtatgtgtgtgcgtgtgcatgggagtgtgcgtggactgggatatcatctctacagcctgcaaataaaccagac

SEQ ID NO: 41421 - DNA, 968 bp, Homo Sapiens
  misc_feature (535)..(535): n is a, c, g, or t
  misc_feature (539)..(541): n is a, c, g, or t
  misc_feature (543)..(549): n is a, c, g, or t
  misc_feature (552)..(552): n is a, c, g, or t
  misc_feature (574)..(574): n is a, c, g, or t
  misc_feature (592)..(592): n is a, c, g, or t
gaacattcatccaattgaatttacaaaatctttccaaaattataagggagaaaaatcgggtttacttcaatctttaaaaatctggcacctcttagtaactttcagtatttctaaattgctctaaaattttataataaatagattagggttttgcaatagtcttaatttttaagccaaaggttttctgagaccttaggttttgtagtctaaccagcttatgtggttatttaaaagaatattctttgtgtttttaaattgctatttttaaaaaagctttttattacccattttataaaatgttatactcatatttgtctgaatttttccagtattcctacatgaaattgtatgtattaaaaactcaatattagtggcaaatattaatactattaaaatggattttggtgctatattcttgtagctaaagcctagtagaattctcaagaataggtgaaatacactttcaaagttgcctgtcatttaaaagaccaaataagcattttgtattaaataaattagcagatggttagagaanaaannnannnnnnnaanaaaaaaaaaaaaaaaaaaaaanaaaaaaaaaaaaaaaaanaaaaaacaaaaaaaaaaagggggggggcgttcaaaagaatccctcgagggggcccaagttaaccggtaccccctttttttggaaaagggggcccctaaaggggggccctattaaaagctagggcacgggcccgctatttatcaaaggccgggatctgggaaaactggctaactttgggaacttttgggaagggaaccctatcttttggggggggggacaaatattgggccaaccctccccccaaaaaattttaaggcccctagggggaaaataaaaaaattttttaaggggtaaaagggggtaaaaacaaaaccggcaaaatggcttgccgcgcttgaaaaaaatttgcttttcacgggagaaggtttttttgcat

SEQ ID NO: 41422 - DNA, 861 bp, Homo Sapiens
accgtgtgggatgaggccgagcaagatggaattggggaggaggtgctcaagatgtccacggaggagatcatccagcgcacacggctgctggacagtgagatcaagatcatgaagagtgaagtgttgagagtcacccatgagctccaagccatgaaggacaagataaaagagaacagtgagaaaatcaaagtgaacaagaccctgccgtaccttgtctccaacgtcatcgagctcctggatgttgatcctaatgaccaagaggaggatggtgccaatattgacctggactcccagaggaagggcaagtgtgctgtgatcaaaacctctacacgacagacgtacttccttcctgtgattgggttggtggatgctgaaaagctaaagccaggagacctggtgggtgtgaacaaagactcctatctgatcctggagacgctgcccacagagtatgactcgcgggtgaaggccatggaggtagacgagaggcccacggagcaatacagtgacattgggggtttggacaagcagatccaggagctggtggaggccattgtcttgccaatgaaccacaaggagaagtttgagaacttggggatccaacctccaaaaggggtgctgatgtatgggcccccagggacggggaagaccctcctggcccgggcctgtgccgcacagactaaggccaccttcctaaagctggctggcccccagctggtgcagatgttcattggagatggtgccaagctagtccgggatgcctttgccctggccaaggagaaagcgccctctatcatcttcattgatgagttggatgccatcggcaccaagcgctttgacagtgagaaggctggggaccgggag

SEQ ID NO: 41423 - DNA, 537 bp, Homo Sapiens
  misc_feature (493)..(493): n is a, c, g, or t
tgcaggagggagaacagttgagaagtgttttgtgtggaaatgtgtccaagaggcgtcagctgctgcacagagaactcactgcccagaacactgcgcttggggaacagacctcacccccacctcaaatctgctctccactgggcctgttggcagccagctcagctggggaagggacagcatgactcgctttgtcgatgaaaagcacgaagttgtcagcacagaacctggccagtccttgagaaactccctccttggtggtcagaggtcaagcagcccatgtggcccacggtcctgaagaactgggctatgtccctgaggctcctctctaccgtctgactgtggggtctggggaacaggcatttaaaccaggctgctgccctggggagtgcccactggacgccagggtgccccatagggacagggtcacaaagccctggggcttcccctgccagtcctggtgaggacagtgtggtcactatctcagagagacganaaatgaatattctgtcatttcagactaaactactcacccagctc

SEQ ID NO: 41424 - DNA, 613 bp, Homo Sapiens
cgtccgatttctaatcttggttgatgacacccccagggtacttgtcattcacacgagaaacctggaagactttgactttccttcccttttactcagtcatttctttgctcccttataaataactcccaaatccatgtcccttctccatccctacttccagtgccgccttttgttcaggttcccatttttcccctaccttgtatattttcagaggcttcctaattaatcttgccctcctccatttcagtccattttttcctcattgtgctactatagtggattttctaagctatatctaatcttaatggttctccacttaaaaaatattttctggctggacatgtggctcacacctgtaatcccagcactttggtaagccaagatgggtggatcacttgaggccaggagttcaagaccagccaggccaatatggtgaaacccctgtctctaataaaaatacaagaaattagctaagcacggtgacatgtgcctgtaatcccaggtacttgggaggctgaggcatgagaattgcttgaacccaggaggcggaggttgcagtgagctggaatcacgccactgcactccagagcgagactctgtctcaaaaaaaaaa

SEQ ID NO: 41425 - DNA, 756 bp, Homo Sapiens
ccgtcgaccccgcgtccgctggggatggggaaaagagatctcgaatcaagaagagcaagaagcggaagttaaaaaaggcagaacggggggatagactccctcctgctgacagtgaaagcaaggaggtgggcagcactgaaacaagccaagatggagatgccagctccagtgaaggcgagatgcgggtcatggacgaggacatcatggtagaatcaggtgatgactcatgggatctgatcacatgttactgtcgaaagccctttgcagggcggcccatgattgagtgcagcctgtgtgggacgtggatccacctctcctgtgctaagattaagaagaccaacgtccccgacttcttttattgccagaaatgcaaggaactgaggccagaggcccggcggttaggggggcctcccaaatctggagagccctgatggcaccaactttagcctggaacttccaaatgacaacatgatttgggaactgagcctcagggtcctcagcctatcccctggagcttggatactgtctgcacttcaaggcaggaattctcaagggagacttgtttgaaaatgagtgtctcactttcccaccctatccttcctccccactctgtggacttgaaattgaatccattacggttggggatgggaggctgtctgtgtcccgacacataatctctgtctcttggacctgccaccatcactttctgggtcaggattggaattgggatggaatgggacagttgtctataaaact

SEQ ID NO: 41426 - DNA, 546 bp, Homo Sapiens
aggtacaaatctattgtcaagtacaagacagctttctactccttctaccttcctatagctgcagccatgtacatggcaggaattgatggcgagaaggagcacgccaatgccaagaagatcctgctggagatgggggagttctttcagattcaggatgattaccttgacctctttggggaccccagtgtgaccggcaaaattggcactgacatccaggacaacaaatgcagctggctggtggttcagtgtctgcaacgggccactccagaacagtaccagatcctgaaggaaaattacgggcagaaggaggctgagaaagtggcccgggtgaaggcgctatatgaggagctggatctgccagcagtgttcttgcaatatgaggaagacagttacagccacattatggctctcattgaacagtacgcagcacccctgcccccagccgtctttctggggcttgcgcgcaaaatctacaagcggagaaagtgacctagagattgcaagggcggggagaggaggctctcaataaataatcgtgtaaccttc

SEQ ID NO: 41427 - DNA, 703 bp, Homo Sapiens
aaggaaaggtcacagtgacctaggattggaaccttcctgcccttttggcttgcagactgccttctatcccagaacagctgagaaatctatgaagctgagattctgaaggacccagcttaggttcttccacttaggcctcaattcccttccttttccaggggcagccttagttcccatggccctgaaacacacacatttcccccttcctttcccagaagccactggccccccatagcacccagtgcatcctttttacaagtggaagaactaggatggctttccaaagtcttctagaaatgaagttctttctctgtgcagctttcccccttggagcaggagtgaagatgtttcattatcttgggcctgggaaaccacttccccaggcttctccctccccccacccccataggaacaggatttggccttagcttctgggcctatcggctgccttccctctacttcctaccacctcttctgccttcctttgagctctgttgggcttggggatcttagttttcttttgtttatttcccagctcatttttttcttctggtcagtttttttaagggggggtgttgtggttttttgtttttgttttgcttctgagaaagcatttgcctttcttcctctcccaacataacaatcgtggtaacagaatgcgactgctgatttaccgatgtatttaatgtaagtaaaaaaagga

SEQ ID NO: 41428 - DNA, 698 bp, Homo Sapiens
acaatctcaatgtcgttagtaggaagataagaggggagaaaaagctgtagaacaaatgtttggggttaccattgaaaatctaatgtctgcaatatttttctcctcacaacttggaaacgttcccagttcattttcagtcctgttgtgagcacagttctgaagggtttattattgtcaaaataagttttgttttgttttgtttatgttgggttttaatgttgtctcttgacccttaatgctcaggttcttgtgggagttaatcagccacatccaatgttaccttgagggggaagaagagggtgatgctcagaagctaaacaagacaggggccacatgaccctctattgattagccccaagtagaaagtcctgtggttttatgtttaatggtaatagttgatcatatatggcataattttctatcagcttcctactcagtcactataaacacagacttgaaatagtactttaaatgtccaaatacctaaatgtgctaaactggaggtaactatttctaggtagttgaatttttgaaagtcatgatcagccacacaactgtacgtacatacttatttgctcatgcacttttctgtatgcaaataacagctatacattttactcatttcaataaacctggagtggcagacaaaacaacacagaacaaacaaaaacaaaaaaccacaaaaaccagaacaaagg

SEQ ID NO: 41429 - DNA, 586 bp, Homo Sapiens
ttaaggatttccaactgcggctttcactttctgtgcccgcgcggaagggagagcagacttcttctgggactttgagtgcctttgccagttatttcaacagcaaggttggcattcctcaggagaatgcagaccatgatgactttgatgctaatcaactattgaacaagatcaatgaaccaccaaagccagctcccagacaagtttccctgccagttaccaaatctactgacaatgcatttgagaaccctttctttaaagattcttttggttcatcacaagcctctgtggcttcttctcaacctgtatcttctgagatgtatagggatccatttggaaatccttttgcctaaattctgaacttggtctgcagaccatccagaggaataaaaaggttggccttagtagtcaaaaacaaagctgatagccagacacgttctgatttctgcccttgttccagctttgacgtattatctgttgccttatttctcattgcctcttctacttgtaaaatgcttttcactttctgtctaggttaaagctaaactgaatctatggctttaaataaattaagatcctaaactctcta

SEQ ID NO: 41430 - DNA, 608 bp, Homo Sapiens
  misc_feature (21)..(21): n is a, c, g, or t
ctctctcctttaccaccatgncagtaacagacttttggtgatgaggaggaagaacaaataatagaagaaaataaaaatgagatagaagaaaagtaagaaccaagattcatatgaagtgatattagattgttccttttacaaaagtgtttagcttcaagactggaaagggaatatgagtgtaagtttactatatataaagctaagatgtggatttacaggaagaaccctggtttgaataactgatctgaaattagtagttacctgtaaatggcagatcttttaggaaaataagagaaaggtaagggctcttttgaataaactgctgttttatttgtggcacaactgatcaatcttggaaattctttaagtatttttaataagaaatgaattatcatttcttgccagaatttgctaccttaaggtgattgggaaaattctgttgcaagaacattaacatttagtatgactcctttttactgtattcttgcagttaataactgcagctattatgttaataacaagttgtttgtattttatttttgtttataccagtcttaaagatccaggttctgaataaaaaaattaattgatacaaaaaaaaaaaaaaa

SEQ ID NO: 41431 - DNA, 802 bp, Homo Sapiens
  misc_feature (716)..(716): n is a, c, g, or t
ggtcatatcatactgttttgaataaattttcaaatccttattgttcagagttgtttgggggttctgtttcagagcataaaacctaaaggttatagtagaacaaggcaccttcttaaaagaaatcttgcttcagaccatcagttacagagaatttctaaagtaaaattgaagcaactacaacttctccttagacactttggaatctaaccacttaaggacctttttaaagagatagcttctcttctttctgaagatcaatttctcccaaggccaagattgtccttttctcccatttcttgctagctattgcaaatgagggaagaacattattcatctctcctccccttttttttctgattcttttttcagtcagttttgctcctgggttcaagtagtattaccaccctttcacaagcaacagactctcacagggcaaaaaaaaaaaaatctaatgattcacagacagatctggagcctctcttcattctcagtaattgctagtcccaagaactagaattgcaaatgggcacaacctatatccttcctgtggaagaggaggccactctcttgagctgaagttccagaagagcagttaatgttcaagagaaattgaactcaactcagcaacaaaggactctatttttgagagcaacatatcacaaagctaaatgtgattgtgccaaacacattaggtgcttatttggggtcatgctagngcctttatcagtaactggaaaacttttcttgcagccacaatctcaatgtcgttagtaggaagataagaggggagaaaaagctgtaa

SEQ ID NO: 41432 - DNA, 623 bp, Homo Sapiens
  misc_feature (503)..(503): n is a, c, g, or t
ccaggcaccgatttctgcaccggagtacactgtgacaccatcgccacaacaggctcgggtctgtcctccccatatgttacctgaagatggagctaatctttcctctgctcgtggcatttgtcgcttatccagtcttctactcgtagggcataccagcagatcttggatgtgctggatgaaaatcgcagacctgtgttgcgtggtgggtctgctgccgccacttctaatcctcatcatgacaacgtcaggtatggcatttcaaatatagatacaaccattgaaggaacgtcagatgacctgactgttgtagatgcagcttcactaagacgacagataatcaaactaaatagacgtctacaacttctggaagaggagaacaaagaacgtgctacaagagaaatggtcatgtattcaattactgtagctttctggctgcttaatagctggctctggtttcgccgctagaggtaacatcagccctcaaaaatacttgtctcaacagncttggaaaatattaaagatttggcaaacttcttgtgtttctgtctctgcatttgtatgccattcttaataagtccaaaccctggaaattgttttttcttccagaaagtctggaggaacgc

SEQ ID NO: 41433 - DNA, 559 bp, Homo Sapiens
ccctgccgcatgacttttcctgaaggcttgcttttccctcgcctttcctgaaggtcgcattagagcgagtcacatggagcatcctaactttgcattttagtttttacagtgaactgaagctttaagtctcatccagcattctaatgccaggttgctgtagggtaacttttgaagtagatatattatctggttctgctatccttagtcataactctgcggtacaggtatttgagaatgtactacggtacttccctcccacaccatacgataaagcaagacattttataacgataccagagtcactatgtggtcctccctgaaataacgcattcgaaatccatgcagtgcagtatatttttctaagttttggaaagcaggttttttcctttaaaaaaattatagacacggttcactaaattgatttagtcagaattcctagactgaaagaacctaaacaaaaaaatattttaaagatataaatatatgctgtatatgttatgtaatttattttaggctataatacatttcctattttcgcattttcaataaaatgtctcta

SEQ ID NO: 41434 - DNA, 1041 bp, Homo Sapiens
ttcgacctggacgtcttcaagaacttctcgtagatgctgcctagggttgcttgggccactgccctctccacacccatgactgccccttgcttctcaactaaagattagtgcctcagcgctgcccacaccaccgccctcctcgctgtgccaccacccctccctctgctctcataggagttaggctgtcgtccccctccagtgcttggctgccccacaggccacacgctgcccaggctctgctgacttctgagcagttttccaggaggccggggggagcaggaggaggaaaggtagcccccgagggatgtccttggggaggggtcagctctggccacaatcctccccaccagtctcacccactaggataggaactgggccttgtgtgctggcttccgctgtcacccagcaaggcacaggctcctgtatttgagactaggatagcttcatcttgagcctgagccttagaatctgtagaggagcctggagtcggatctagccatggctggcagaggtttctagggtgggccccagccgtggcgtgaactgaggatgacccggggcagctggcaggagagagccttggcctgacctggcacagaaagggcagcttcagtctctgcagtgtccattatctgctgttccttcgagggttccaggctgtgtgtggggcccaagcatgccccacccacccctcctgggcccaggcagcacctggagcccacagagtctgtgtgtagccaggaagccccgctcaggtagccaccgccggggcactggctgctctgtcttggtcctgttaaccctccacctcctctcttggactccctccccaccccaaccactctttctttctcctttaacccaatggagactttctgatgcatcgttttctttgctgtgccaaagcaggtcagaagagggagaggacgggstgggggtgagggggcaggcatggcaaggggcagctgccctcatttatamtctrccttmaagggaarawytrwttwtttatttkgttaaaaaaamaaaaagraaaaaaaa

SEQ ID NO: 41435 - DNA, 605 bp, Homo Sapiens
ttcccgggatggcttcatttcctgccacttgattggtcagtacccagagacctacagggcctgcgtggcccggaaccccgtgatcaacatcgcctccatgttgggctccactgacatccctgactggtgcgtggtggaggctggctttcctttcagcagtgactgcctgccagacctcagcgtgtgggctgagatgctggacaaatcgcccatcagatacatccctcaggtgaagacaccactgttactgatgttgggccaggaggaccggcgtgtgcccttcaagcagggcatggagtattaccgtgccctcaagacccggaatgtgcctgttcggctcctgctctatcccaaaagcacccacgcattatcagaggtggaggtggagtcagacagcttcatgaatgctgtgctctggctacgcacacacttgggcagctgaagccctgccattctgcatgagctgatcagcctgtgccacacttcgctcttgaggagctcaacgcgtctggcagggcagcaggaggctttctgggctctggactccacggatgcgtgggcagaggaatgtgggctatgtagtcataataaattaggacacagag

SEQ ID NO: 41436 - DNA, 642 bp, Homo Sapiens
  misc_feature (629)..(629): n is a, c, g, or t
ttttttttttttttttttcagatcaccatctaagttacatctttagctcaggtccatccttctcaagatctccttcttagccccccagcccctggtgctgtctgtggtcaggtgaccttactcaggagcagatatctccttggccgccatggagcctcatccatccacacgtgcctgtagcattccagagctcactgcccttctagatgtgccttcccgcttggcttccagcggcttgtgctcactctgtctgccaggtatgagaagaacacgtaagaccgccaccacactcaccctccctcaaggccctgtgccataggggtggcgacccgacctgcccccagaacttttggatactggaggcagttgcataggtctccctctctgggcaccaggactcagtccagcccaagactactctgggcagctcccatcccagtctggggccatttgcagactcaggaaaggatttctacagtgttctataaaagccaaaagagagagtgggtttgggaagagtgagggtggttggggagaggggaccgatgtgcctcattgtttagtggtgattacaaatatgcttttctggataaagtttggttgtttgctcttggaaaaaaaaaaaaaanaaaaaaaaaaaaa

SEQ ID NO: 41437 - DNA, 607 bp, Homo Sapiens
tctctgtgccttcgtctttcccatggggagggattctggttccagggtccctctgtgtatttgcttttttgttttggctgaaattctcctggaggtcggtaggttcagccaaggttttataaggctgatgtcaatttctgtgttgccaagctccaagccccatcttctaaatggcaaaggaaggtggatggccccagcacagcttgacctgaggctgtggtcacagcggaggtgtggagccgaggcctaccccgcagacaccttggacatcctcctcccacccggctgcagaggccagaggcccccagcccagggctcctgcacttacttgcttatttgacaacgtttcagcgactccgttggccactccgagaggtgggccagtctgtggatcagagatgcaccaccaagccaagggaacctgtgtccggtattcgatactgcgactttctgcctggagtgtatgactgcacatgactcgggggtggggaaaggggtcggctgaccatgctcatctgctggtccgtgggacggtgcccaagccagaggctgggttcatttgtgtaacgacaataaacggtacttgtcatttcgggcaaaaaaaaaa

SEQ ID NO: 41438 - DNA, 707 bp, Homo Sapiens
acagcatcagggttaagaagactttttttttttttttttaactaggagaaccaaatctggaagccaaaatgtaggcttagtttgtgtgttgtctcttgagtttgtcgctcatgtgtgcaacagggtatggactatctgtctggtggccccgtttctggtggtctgttggcaggctggccagtccaggctgccgtggggccgccgcctctttcaagcagtcgtgcctgtgtccatgcgctcagggccatgctgaggcctgggccgctgccacgttggagaagcccgtgtgagaagtgaatgctgggactcagccttcagacagagaggactgtagggagggcggcaggggcctggagatcctcctgcagaccacgcccgtcctgcctgtggcgccgtctccaggggctgcttcctcctggaaattgacgaggggtgtcttgggcagagctggctctgagcgcctccatccaaggccaggttctccgttagctcctgtggccccaccctgggccctgggctggaatcaggaatattttccaaagagtgatagtcttttgcttttggcaaaactctacttaatccaatgggtttttccctgtacagtagattttccaaatgtaataaactttaatataaagtagtcctgtgaatgccactgccttcgcttcttgcctctgtgctgtgtgtgacgtgaccggacttttctg

SEQ ID NO: 41439 - DNA, 817 bp, Homo Sapiens
ggtatctcagcgtttgagtcagccaggagtagcaataggtttggcttggactcccttaggtggagaaatcatgttcgtggaggcgagtcgaatggatggcgagggccagttaactctgaccggccagctcggggacgtgatgaaggagtccgcccacctcgctatcagctggctccgcagcaacgcaaagaagtaccagctgaccaatgcttttggaagttttgatcttcttgacaacacagacatccatctgcacttcccagctggagctgtcacaaaagatggaccatctgctggagttaccatagtaacctgtctcgcctcactttttagtgggcggctggtacgttcagatgtagccatgactggagaaattacactgagaggtcttgttcttccagtgggtggaattaaagacaaagtgctggcggcacacagagcgggactgaagcaagtcattattcctcggagaaatgaaaaagaccttgagggaatcccaggcaacgtacgacaggatttaagttttgtcacagcaagctgcctggatgaggttcttaatgcagcttttgatggtggctttactgtcaagaccagacctggtctgttaaatagcaaactgtaggtccaaatctcaattttttagaattttaagttatgaagtgctcaaaggtactgacacagttgattttattcacaccattaggggtatgcaagatgtccctgttttataaacataatcacaacagtdataaacctcaagtagtggctagtgtttagtatagaaatataagatgttgatttagtaaactgataaaaa

SEQ ID NO: 41440 - DNA, 918 bp, Homo Sapiens
  misc_feature (801)..(802): n is a, c, g, or t
  misc_feature (815)..(815): n is a, c, g, or t
gaatatagagtcaaaattcacttcaaagtgaacagggatattgtgtcaggcctgaaatacgttcagcacacctacaggactggggtgaaagtggataaagcaacatttatggttggcagctatggacctcggcctgaggagtatgagttcctcactccagttgaggaggctcccaagggcatgctggcccgaggcacgtaccacaacaagtccttcttcaccgacgatgacaagcaagaccacctcagctgggagtggaacctgtcgattaagaaggagtggacagaatgaatgcatccacccctttccccacccttgccacctggaagaattctctcaggcgtgttcagcaccctgtccctcctccctgtccacagctgggtccctcttcaacactgccacatttccttattgatgcatcttttcccaccctgtcactcaacgtggtccctagaacaagaggcttaaaaccgggctttcacccaacctgctccctctgatcctccatcagggccagatcttccacgtctccatctcagtacacaatcatttaatatttccctgtcttacccctattcaagcaactagaggccagaaaatgggcaaattatcactaacaggtctttgactcaggttccagtagttcattctaatgcctagattcttttgtggttgttgctggcccaatgagtccctagtcacatcccctgccagagggagttcttcttttgtgagagacactgtaaacgacaccagagaacaagaataaaacaataactgtgtgtgttcctggctgaaacnnccaacccccaccncaaccccccacccacaaaaacttccagggattcttatgtcgggtgcgggaaaaaaaagggaattgaaaatggcccactggtccatagccggttttcctggacc

SEQ ID NO: 41441 - DNA, 702 bp, Homo Sapiens
  misc_feature (650)..(650): n is a, c, g, or t
tgttggatattctaagagacttttttgaactcagacttaaatattatggattaagaaaagaatggctcctaggaatgcttggtgctgaatctgctaaactgaataatcaggctcgctttatcttagagaaaatagatggcaaaataatcattgaaaataagcctaagaaagaattaattaaagttctgattcagaggggatatgattcggatcctgtgaaggcctggaaagaagcccagcaaaaggttccagatgaagaagaaaatgaagagagtgacaacgaaaaggaaactgaaaagagtgactccgtaacagattctggaccaaccttcaactatcttcttgatatgcccctttggtatttaaccaaggaaaagaaagatgaactctgcaggctaagaaatgaaaaagaacaagagctggacacattaaaaagaaagagtccatcagatttgtggaaagaagacttggctacatttattgaagaattggaggctgttgaagccaaggaaaaacaagatgaacaagtcggacttcctgggaaaggggggaaggccaaggggaaaaaaacacaaatggctgaagttttgccttctccgcgtggtcaaagagtcattccacgaataaccatagaaatgaaagcagaggcngaaaagaaaaataaaaagaaaattaagaatgaaaatactgaaggaagccctc

SEQ ID NO: 41442 - DNA, 587 bp, Homo Sapiens
tctgttttatcttagttttatacataatttaccatcagatagaactttatggttctagtacagatactctactacactcagcctcttatgtgccaagtttttctttaagcaatgagaaattgctcatgttcttcatcttctcaaatcatcagaggccgaagaaaaacactttggctgtgtctataacttgacacagtcaatagaatgaagaaaattagagtagttatgtgattatttcagctcttgacctgtcccctctggctgcctctgagtctgaatctcccaaagagagaaaccaatttctaagaggactggattgcagaagactcggggacaacatttgatccaagatcttaaatgttatattgataaccatgctcagcaatgagctattagattcattttgggaaatctccataatttcaatttgtaaactttgttaagacctgtctacattgttatatgtgtgtgacttgagtaatgttatcaacgtttttgtaaatatttactatgtttttctattagctaaattccaacaattttgtactttaataaaatgttctaaacattgcaaaaaaaaaaaaaaa

SEQ ID NO: 41443 - DNA, 564 bp, Homo Sapiens
ttaaagcaagatactcagtttagttctttacaaatcataagaagaacaaaattagatgttgacattgctattttaggctgtgtgttttccatatgcttcttgctttccctgtcacaggtggtggcagcaatattggtgtgattgaggttatgctggcaccactcgcacacaggcgcacaatggtgttagctgggcagaaagagtggcatctctggctaccgggctgggggcgacctttaccataggatgaagtaaccttgcattcggctgcaaggtgtactgtacgtacacaggtgctggtcgatgtccactttctgcttttctttctttctttttttcttttttaaagtaatttcccccacagtaaaatacactgactcctgagtaaattgattttccagttttatggaattgggagtctgacaagtgaaaccaatttaatgtaaagtatttggctttcaaatggtttctctgtgctattttttggaattctttcagattccagagatatcttacgtctttgattcaatttaaaatttgtacttattttcttttagaaataat

SEQ ID NO: 41444 - DNA, 751 bp, Homo Sapiens
gggtgctattttttggaattctttcagattccagagatatcttacgtctttgattcaatttaaaatttgtacttattttcttttagaaataatgtattgtgtctgtgcagaaaaaaaaaaaaccaaaaaggattgctttactccaagaggagagattgtcttaggataaacctccaagctcacatttaatataacagactgaagtaaacattagaatcctgtttagagctattctgcacagttaactactgatctttagaatctaaaattgtatatgaacttattcttaaataattgaaccgttttatattcaaatgacttatgatcgtggttagtttgggaaaaataagatggttaaattttgatttattgaaatgtaattgtattattttcataaaatagcattttcattttgtaatgtggtttaacatccttgttgtttgccaaagaaatttcatttggctgtgaatattctatttgcttgcagtatctgtttctcttcctaggctcaagttggtgacccaagcctattgtaaacaagtgattatctcaaagggagatgccaatggagtaacaatttgttaaccttacgttttctgtctgtatatttttttaaaaatctggtagtttctggaaaaaaaagagaaagggggtttgtagtactttaaccctatttattttccgtatatttttagtttaattagttttggaataatggattcagtatagctttgtgggtaaattgcatgcc

SEQ ID NO: 41445 - DNA, 905 bp, Homo Sapiens
tcgcagtcattcctgcggcttgcgcgcccttgtagacagccggggccttcgtgagaccggtgcaggcctggggtagtctcctgtctggacagagaagagaaaaatgcaggacactggctcagtagtgcctttgcattggtttggctttggctacgcagcactggttgcttctggtgggatcattggctatgtaaaagcaggcagcgtgccgtccctggctgcagggctgctctttggcagtttagccggcctgggtgcttaccagctgtctcaggatccaaggaacgtttgggttttcctagctacatctggtaccttggctggcattatgggaatgaggttctaccactctggaaaattcatgcctgcaggtttaattgcaggtgccagtttgctgatggtcgccaaagttggagttagtatgttcaacagaccccattagcagaagtcatgttccagcttagactgatgaagaattaaaaatctgcatcttccactattttcaatatattaagagaaataagtgcagcatttttgcatctgacattttacctaaaaaaaaagacaccaaacttggcagagaggtggaaaatcagtyatgattacaaacctacagaggtggcgagtatgtaacacaagagcttaataagaccctcatagagcttgattcttgtatattgatgttgtcttttctttctgtatctgtaggtaaatctcaagggtaaaatgttaggtgtcagctttcagggctctgaaaccccattccctgctctgaggaacagtgtgaaaaaaagtcttttaggagatttacaatatctgttcttttgctcatcttagaccacagactgactttgaaattatgttaagtgaaatatcaatgaaaataaagtttactataaatatta

SEQ ID NO: 41446 - DNA, 739 bp, Homo Sapiens
cacgaggtgacagcacaatggacattaagaatttccatcaataatttatgaataagtttccagaacaaatttcctaataacacaatcagattggttttattcttttattttacgaataaaaaatgtatttttcagtatccttgagatttagaacatctgtgtcacttcagataacattttagtttcaagtttgtatggtagtgtttttatagataagatacgtctatttttttcaaaattcatgattgcagtttaaatcatcatatgacgtgtgggtgggagcaaccaaagttatttttacagggactttattttttgatctttatttgagattgttttcatatctatctaaattattaggagtgtgtgtatcagaagtaattttttaatgtcttctaaggatggtcttccaggcttttaaactgaaaagcttaattcagatagtagcttttggctgagaaaaggaatccaaaatattaataaatttagatctcaaaaccactatttttattatttcattatttttcagaggccttaaaattctggataagagaatggaggaaaatactcagagtacttgattattttatttccttttattaaaaaattacttctatgtttttattgtctcttgagccttagttaagagtagtgtagaaatgcatgaacttcaatcctaataggataaacttaaggaaaacacaataaacatgaaggtgtaacatcttatacacagata

SEQ ID NO: 41447 - DNA, 655 bp, Homo Sapiens
atgcccatatttatcaccagcactttgattctgtgatgcagctgcaagaggaggcccacctcaacacctcctttaagcactttattttctttgttcaggagtttaatctgattgataggcgtgagctggcacctcttcaagaattaatagagaaacttggatcaaaagacagataaatgtttcttctagaacacagttacccccttgcttcatctattgctagaactatctcattgctatctgttatagactagtgatacaaactttaagaaaacaggataaaaagatacccattgcctgtgtctactgataaaattatcccaaaggtaggttggtgtgatagtttccgagtaagaccttaaggacacagccaaatcttaagtactgtgtgaccactcttgttgttatcacatagtcatacttggttgtaatatgtgatggttaacctgtagcttataaatttacttattattcttttactcatttactcagtcatttctttacaagaaaatgattgaatctgttttaggtgacagcacaatggacattaagaatttccatcaataatttatgaataagtttccagaacaaatttcctaataacacaatcagattggttttattcttttattttacgaataaaaaatgtattttt

SEQ ID NO: 41448 - DNA, 525 bp, Homo Sapiens
cttccacttgggttttatcttgttttaattgtttttgtatcaaaacttgaaattcctctatttctattgggatataaaagccttccccttcagtgaagaaaacatttattttttatttgattcctaggatttagtaaactctagctgtctatttaaaatgtactgaggcacaacaagtattatactggaagacttgccaaactggcaaagctttaagttcatcagcattctatgtggttcagagctgtgatttttgcaaagtattttaccaacctcctcgatggctttgataaaggttagatttgatgtttttttttagatttatttttcttactccactaaactataaagaaaataattacttagaaactccattttaaataatcatttcctagaaattcttaaatatatacagaattttaaagaaaacatttcatctgatttagttagcatccacatatcattgaggaattaaagtgtgggacagtcattattaaaaaaaagagagaaaagccctctattaga

SEQ ID NO: 41449 - DNA, 583 bp, Homo Sapiens
aagtagaccaccatctatgcatgtggatgactttgttgctgctgaaagtaaagaagtggttcctcaagatggaatacctccaccaaaacggccactcaaagtatcacagaagatttcttcccgtggtgggttttcaggcaatagaggaggacggggtgctttccacagtcagaataggtttttcacaccacctgcttcaaaaggaaactacagtcgtcgggaaggaacaagaggctccagttggagtgctcagaatactcctcgaggaaattacaatgaaagtcgtggaggccagagcaattttaacagaggccctcttccaccattacgaccccttagttctacaggttaccgcccaagtcctcgggaccgtgcttctagaggtcgtgggggacttggaccttcctgggctagtgcaaatagcggcagtggaggctcaagaggaaagtttgttagtggaggcagtggtagaggtcgtcatgtacgctcctttacacgataaaaatccttttgggaacatcttaactgtatatgaacatttcacgaggacaataaaaataagacattgaaggaccaatttaga

SEQ ID NO: 41450 - DNA, 626 bp, Homo Sapiens
cgccgccatgccggacagctgggacaaggatgtgtaccctgagcccccgcgccgcacgccggtgcagcccaatcccatcgtctacatgatgaaagcgttcgacctcatcgtggaccgacccgtgaccctcgtgagagaatttatagagcggcagcacgcaaagaacaggtattactactaccaccggcagtaccgccgcgtgccagacatcactgagtgcaaggaggaggacatcatgtgcatgtatgaagccgaaatgcagtggaagagggactacaaagtcgaccaagaaattatcaacattatgcaggatcggctcaaagcctgtcagcagagggaaggacagaactaccagcagaactgtatcaaggaagtggagcagttcacccaggtggccaaggcctaccaggaccgctatcaggacctgggggcctacagttctgccaggaagtgcctggccaaacagaggcagaggatgctgcaagagagaaaagctgcaaaagaggccgccgctgccacctcctgaggcagctgtgggtgcccctgctgtgtggctctgtatgactgttgctgaaatataaagccctgcaacctgaaaaaaaaaaaaaaaaaaaaaaaaaaaaggg

SEQ ID NO: 41451 - DNA, 662 bp, Homo Sapiens
attcccgggatcacccctgaggcttctcttctgcttcctccccacagcagcagtgttgtactgctacttctataaacggacagccgtaagactaggcgatcctcacttctaccaggactctttgtggctgcgcaaggagttcatgcaagttcgaaggtgacctcttgtcacactgatggatacttttccttcctgatagaagccacatttgctgctttgcagggagagttggccctatgcatgggcaaacagctggactttccaaggaaggttcagactagctgtgttcagcattcaagaaggaagatcctccctcttgcacaattagagtgtccccatcggtctccagtgcggcatcccttccttgccttctacctctgttccaccccctttccttcctttcctctctgtaccattcattctccctgaccggcctttcttgccgagggttctgtggctcttacccttgtgaagcttttcctttagcctgggacagaaggacctcccagcccccaaaggatctcccagtgaccaaaggatgcgaagagtgatagttacgtgctcctgactgatcacaccgcagacatttagatttttatacccaaggcactttaaaaaaatgttttataaatagagaataaattgaattcttgttccataaa

SEQ ID NO: 41452 - DNA, 580 bp, Homo Sapiens
ctaaccttctattagaaaaggggacaggggaatgagtaaacttcttttattgcggacaaatgtgcacatagccgctagtaaaactagcctcaaacaggatgctcatagcttaataataaaagctgtgcaaaggccatgaatgaatgaattttctgtttatttcactgatgcacacattacctcattgacaattcagaagtaaatccaacgtgtgttgactcttggaaagcagcaaaaacaggagctgaagaaaagaaattcttggaaccagccgtaacccagtaaggaattgtgaagttgtgtttttattttgtttcattttttgcagagtattaagaacattattctggaacatcagaacgtttcccttagaccgatcccagcaggtggcagctcagattgctgcagtgttgtaattataactgattgtacttaagttatggatgtagagaatatgtttcattcatttattcagcatgtaaataaaattgatcctgttgagttatcataattgcagttcaaaacaaagaaagaaaaaactcaagggggggcccgggacccaaatccgcccttaagggaa

SEQ ID NO: 41453 - DNA, 811 bp, Homo Sapiens
gttttctccaaaaagggcatttcaacaatgggaattatttaatgtaacartgggcacagattacttatcttccttctctgctttgtgactcaccagcagtaacacacacaatccacatcttgtgcacctcaaatgaacagacttggtttccttgctttcttgacatttccatgactgtttcacatacaaactattgggtgaggtttttcagctgttaccgacccacgtcctgctgtctctgtgtggtcctacaaaaactgtccattcccacccctttgctttgccatttgcaagagtctggaattgtcaggtctcagcttcgaaaagtcctggttccactgacaggacacattctttagtgggaattaagacctacaaagtctagtttgtatgtaggtatgaagggaattttttaaataaattgaaaagctgtgaacagcattagaactttgtctatttcttaattttaaaatatgctgatatgccttaaactgtagttgtagatccttgtcattttgctgtttgaaaataaccaatgtgttttctaaaactgtcgtgtaatctactttcattgttaatgcagaattgtcatatatgtaagctgcatgttagacatttgtcttttttaaactaaagtaattgtattgatgtgaagcatatcattttttcaaatatgaaagtgatcacttagcaacatgcttggtaatttggcatctgttaaggtaggagagtggtgaacagataatctatgcatatatcactagtgccaagacataaagcggggggaaaatatatttttacccaaacatta

SEQ ID NO: 41454 - DNA, 594 bp, Homo Sapiens
ctgagtaggaatatgaaaatgacaccttttccaaatattaaattggaaaacaaggtctacaaaatcatgatacttttttaaaaggcagagcattcttttttcggcaattttgataagcaaggtgtagatttacatttttgtccttgctcccaacgaaatggataaacaaaaataaattaccatctactcatggaatgttgttgtgttagccagtctgaaagcccaccttaatttttatataactgtctttagctcttcttttgacagggcaggccttgttctgaactgtttcgcttctgactgttaaacaccgatgacgcatgcactgcacttcttcgttttcttcttgctcccccattggcctgagtttcttgtgcattactcctctccctccttcgttagaataggtatatcagctgtgtaaatagagcaagaaaacagtattctgcatctgtggcatttatgtagagttgcagttgtgtactgctgaaaatgcaggcttttgtaacagtgtgatctttactgatgcactcatgacaagtacccaatgtattttagctattttagtagtatttgttcaataaatacgcaagc

SEQ ID NO: 41455 - DNA, 731 bp, Homo Sapiens
cccctcgctagcagcgaccacctcctgccagccaccgaggaagctccaaaggtatgtgaagcctgcaaaaataaaaatgatgatgacaacgacataatggaaacgctttgtaaaaatgattttgcactgaaaataaaagtgaaggagataacctacatcaaccgagataccaaaatcatcctggagaccaagagcaagaccatttacaagctgaacggtgtgtccgaaagggacctgaagaaatcggtgctgtggctcaaagacagcttgcagtgcacctgtgaggagatgaacgacatcaacgcgccctatctggtcatgggacagaaacagggtggggagctggtgatcacctcggtgaagcggtggcagaaggggcagagagagttcaagcgcatctcccgcagcatccgcaagctgcagtgctagtcccggcatcctgatggctccgacaggcctgctccagagcacggctgaccatttctgctccgggatctcagctcccgttccccaagcacactcctagctgctccagtctcagcctgggcagcttccccctgccttttgcacgtttgcatccccagcatttcctgagttataaggccacaggagtggatagctgttttcacctaaaggaaaagcccacccgaatcttgtagaaatattcaaactaataaaatcatgaatatttttatgaagtttaaaatagctcactttaaagctagttttga

SEQ ID NO: 41456 - DNA, 654 bp, Homo Sapiens
ccgaatcttgtagaaatattcaaactaataaaatcatgaatatttttatgaagtttaaaaatagctcactttaaagctagttttgaataggtgcaactgtgacttgggtctggttggttgttgtttgttgttttgagtcagctgattttcacttcccactgaggttgtcataacatgcaaattgcttcaattttctctgtggcccaaacttgtgggtcacaaaccctgttgagataaagctggctgttatctcaacatcttcatcagctccagactgagactcagtgtctaagtcttacaacaattcatcattttataccttcaatgggaacttaaactgttacatgtatcacattccagctacaatacttccatttattagaagcacattaaccatttctatagcatgatttcttcaagtaaaaggcaaaagatataaattttataattgacttgagtactttaagccttgtttaaaacatttcttacttaacttttgcaaattaaacccattgtagcttacctgtaatatacatagtagtttacctttaaaagttgtaaaaatattgctttaaccaacactgtaaatatttcagataaacattatatttcttgtatataaactttacatcctggtttaaaaaaaaaaaaaaa

SEQ ID NO: 41457 - DNA, 695 bp, Homo Sapiens
ttttcacacaacagaaaccacctgacatccacccgctgaagcgcactgctgttcagataggggacggaaggtcgtttgtttttgttctgagctccataagaactgtgctgacttggaaggtgccctgtgctatgtcgtgcctgcagggacacgtcggatcccgtgggcctcacatgccaggtcaccaggtcaccgtctccttccacccctgcagtgtgctgttgtgcacgtcagggacgctgttctctatgcccactgccctcctccctctcctggcccagcagtattgctcacgggggctccagccgccggcgtggccctcatgagctacgcctgggtcttctgcagactcatgcagccctatggccgctcagaccaaggcgcagagcaactatcagggcagctctgcctcctcctcccatgaggtggggagaggcaacagggcagcccccagaggagtgtcctggccgctgtcctcccggggcccatgatggccatagatttgccttgtggtgttggatcaggtactgtgtctgctcataagtacttgtgtcatccagaatgttttgttttttaagaaaattgaattacttgtttcctgaaatattctgaggttaatatgttagttttcatagaacattgagaggcccctgccactttcaataaagacctgacttggaaaaaaaaaaaaaaag

SEQ ID NO: 41458 - DNA, 679 bp, Homo Sapiens
  misc_feature (642)..(644): n is a, c, g, or t
tggaccggtccggaattttcgggataggaatattgctaaaaacaaacaaaaaaaactgttatcgaactttctttgttgctgctagttaaaacttgttgcaacttttcacttctcttgtgtccaggtatgcagcaaaattctgcaatttcaccttaaagatactgttggttttacagatgctctccaacctattttctataagatgaggtagtggtgaactcagataacaaacttctcttctaaactggttctgcttctaagacaagcatctcctgccctctctccttcctccccatctctcgcacgcagtctagagatggactgagccttgcttctcactggcagtgttgagctttggagatgggatggttgctatgccaagccttgtttctctgctcagaagaagtagagaagctattatcaattaaaagcatgctgtgatgtgactcctggaagtgacgtaggagtgagtggcaggttgtttgatttaataggtatcttaatcaagaattaagcttgcaacattggctttgctcagatgcagatggaagtgtgatcacaatcattttgaatccctcttcctcacttttttttctaagaaaataaacattttactgtttttatggaaaaaaaaaaaaaccnnnaaaaaaaaaaaaaaaaaaaaaaaaaaaaaaaaaag

SEQ ID NO: 41459 - DNA, 510 bp, Homo Sapiens
gtgaccttttccgggatttcttgttcttatcaagcaagaattaagcacatgctaaacgtcttccatttgacttctctactcggtgtctcagacagtgtcttcccagaaaaccaccaccctctacctatagatgaaacatgctcatgtcatttttctcatggtcacatttaacagttttgacatgttatacttgcgcatagatccaagcgtttcttgggaacctgacttttgagtgtttaataaagccggaagtggtgttgccctgaaccagcagattttcacctgggttctggctccggtgtttaacactggatacatctttgatgtgcgaaagtgagttcatcttcagacacatttggtacatccagaaatagatccaagaaatggggtggttgagtgggtccgcacgaaatgcttgattatgtcagcaacacccaacactgtctgttttccatttgttggttttaatcataaaattgtcaagtgaaaaaaaaaaaaaaaaaaaaaagg

SEQ ID NO: 41460 - DNA, 750 bp, Homo Sapiens
  misc_feature (9)..(9): n is a, c, g, or t
atttcttcnggacaaggtgtggccccatttggccctgagggtcccagcttttgagactctgaaggttcagagcgcctgggccggctattacgactacaacacctttgaccagaatggcgtggtgggcccccacccgctagttgtcaacatgtactttgctactggcttcagtggtcacgggctccagcaggcccctggcattgggcgagctgtagcagagatggtactgaagggcaggttccagaccatcgacctgagccccttcctctttacccgcttttacttgggagagaagatccaggagaacaacatcatctgagcatgtgtgctctgcactggctccactggcttgcatcctggctgtgttcacagccttgtttgctgcttccatcttccccagtactgtgccaggccttctccccctccccagtgtcctctcctctcaggcaggccattgcacccatatggctgggcaggcacaggcagtgaggccgaggccaatagcgagtgatgagcgggatcctaggactgatctgtagcccatgctgatgtcacccaccagggcaatccatctggaggcctgagcaccctggcccaggactggcttcatcctggcactgaccaggaaagactgcctctgaccctcttagcagacagagcccaggcatgggagcactctggggcagcctggctcaggtttattgattttcgtctgtttaccctatccattaatcaatacatgtaattaac

SEQ ID NO: 41461 - DNA, 604 bp, Homo Sapiens
gcttgaactgttcaagccttttatagccttaccataagtatttagatatggtgtccttttctgttttggggggggagtttgttgtgtttttttaaagtaagtgcttaagtattaactttgggttgtcccctctgtatgtttcgaaggggtttggttctttttgcttctgttttcttaaacatgttttccactcccacttgggcattttggaagctggtcagctagcaggttttctgggatgtcgggagacctagatgaccttatcgggtgcaatactagctaaggtaaagctagaaacctacactgtcactttactgagatttctgagtatacttttcatattgccttaatgtagcagtaatgtgtttatgcatttgtttctttgcacagacattttgtcaaatattaaaactctacttttttatggcacatattagcatataagcctttattccaagaggtatttattttttcacttgtaaaaaaataatgtttccacgtaaagaactctgttatatcctagaggactctgtcttttatattcgggataataaagactttaaaagccgaaaaacacaaacagcaccagctaaaaaaaacactt

SEQ ID NO: 41462 - DNA, 614 bp, Homo Sapiens
tgcttagttgatgtcagcgtatgtgtatttggtggggaaaacctaatttcggggatttctgtggtaggtaataggagaagaaagggcactgggggctgttctccttccttccctgggctgtatccatggactcctggaaggcacagagaagggagctataagaggatgtgaagttttaaaacctgaaattgttttttaaagcacttaagcacctccatattatgacttggtgggtcaccccttagcttcctccctctcccaccaagactatgagaacttcagctgatagctgggggctccccagatgaggatgcagggatttgggagcagtggaagagggtgcccaaccttgggttggaccaacccttggctcgcagctcaactctgcttcccgcattcctgctccacgtgtcccagcttctcccctgtgacgggaaggcaggtgtgactccaggctctgcactggttcttcttggttcctcccaccaggccctttgttcctcatgtccccatgtttctctccctctgcgtcttagcacctttcttctgttcaaagttttctgtaaattttctcttttttttctttctttcttttttttttttttataaattaa

SEQ ID NO: 41463 - DNA, 737 bp, Homo Sapiens
ggccaagttctgcagcgagaacgcagcgcaggcgctgcacctcggggagcgcatgcaggaggccaagaagctgctgggctccctgcagctgctctttgataagacggaggatgtcagcttcatgaagaacaccaagtctgtgaaaatcctgatggacaggacccagacctgcacgagcagcagcctttcccccactaagatcggccacctgaactccaagctcttcctgaacgaagtggccaagaaggagaagcagctgcggaaaatgctagaaggccccttcagcacgccggtgcccttcctgcagagtgtccccctgtacccttgcggcgtgagcagctctggggcggaaaagcgcaagcactcaacggccttcccagaggccagtttcctagagacgtcgtcgggccctgtgggcggccagtacggggcggcgggcacagccagcggtgagggccagtctgggcagcccctggggccctgcagctccacgcagcacttggtggccctgccgggcggcgcccaaccagtgcactcaagccccgtgttccccccatcgcagtatcccaatggctccgccgcccagcagcccatgctcccccagtatggcggccgcaagattctcgtctgttctgtggacaactgttactgttcttccgtggccaaccatggcggccaccagccctaccccgctccggccactttccctggacagtgcctcgcaggagtactcacag

SEQ ID NO: 41464 - DNA, 500 bp, Homo Sapiens
tctgtctgtctgtggtggtctgggtctggagccatctctccggcgtactctaactgatttatcttccttttctccacagacccaggcacccccctgcctccagaccccacagccccgagcccaggcacggtcacccctgtgccacctccacagtgaggagccagccagacatctctccccctcaccccctgtggacatcacggttccaggaacagcccttcccccaccactgggaccctccccagcctggagagttcatcactacgtaaggaaagctccttccgcccctccaaagccctcaccatgcctaacagaggcatgcatttttatatcagattattcaaggacttctgtttaaaagatgtttataatgtctgggagagaggataggatgggaatgctgccctaaaggaagggctggtgaaaggtgtttatacaaggttctattaaccacttctaagggtacacctccctccaaactactgcattttctatggatt

SEQ ID NO: 41465 - DNA, 689 bp, Homo Sapiens
cggcaggtggccctggagatgggaaagtgtctgtgtcgaggcgctgagctctctctctgtttctccttttttcctctactccttccccttcacacccccgtggctggaaggaacctcggcttccctgaaagcttgggggtcccacccttcttaccccacccgggaggaacgcccagggccccgggcttgtttctcctcttgttttccttttgggcagtttgatcactgatcgagtaaggaatgacctttagattgtgcgacttttgtttttgtttttttaaatttttttaaaccaagaatgatttctcctgcttccttctcctcaccatcttcccagacggagttcaaaggccacttctcaagcagcttttggcaccttcagcctcagagtggaatcttttaaagacaggacccctatgtccaggaaaggggaaaaggaactttgccaatgatagtgaccacagcaaaagcaaataataataatattaataataataaagagaaataaaataataaaataaaaaacaatagcacagcccttgttgaggtcagcagggaggaggggctgcccggagttgggtccttgcctggattttgacacagcaacttcctgtagtgagcactttgtatgaatcgtggacttcctgttctcaaggcgcaggtatttattctgtatctgtctagagcac

SEQ ID NO: 41466 - DNA, 566 bp, Homo Sapiens
tgcaggcctggggtagtctcctttctggactgagaagagaagaatggagaagcccctcttcccattagtgcctttgcattggtttggctttggctacacagcactggttgtttctggtgggatcgttggctatgtaaaaacagtttgctgatggccgccaaagttggagttcgtatgttgatgacatctgattagcagaagtcatgttccagcttggactcatgaaggattaaaaatctgcatcttccactattttcaatgtattaagagaaataagtgcagcatttttgcatctgacattttacctaaaaaaaaaaaagacaccaaatttggcggaggggtggaaaatcagttgttaccattataaccctacagaggtggtgagcatgtaacatgagcttattgagaccatcatagagatcgattcttgtatattgattttatctctttctgtatctataggtaaatctcaagggtaaaatgttaggtgttgacattgagaaccctgaaaccccattccctgctcagaggaacagtgtgaaaaaaaatctcttgagagatttaga

SEQ ID NO: 41467 - DNA, 854 bp, Homo Sapiens
  misc_feature (21)..(21): n is a, c, g, or t
  misc_feature (618)..(618): n is a, c, g, or t
ccagtgtaaagggcagggcancagcttggagtccaagcatttgctgatgcattgctcattattcccaaggttcttgctcagaactctggttttgaccttcaggaaacattagttaaaattcaagcagaacattcagaatcaggtcagcttgtgggtgtggacctgaacacaggtgagccaatggtggcagcagaagtaggcgtatgggataactattgtgtaaagaaacagcttcttcactcctgcactgtgattgccaccaacattctcttggttgatgagatcatgcgagctggaatgtcttctctgaaaggttgaattgaagcttcctctgtatctgaatcttgaagactgcaaagtgatcctgaggattacagctgtggaatttttgtccaagcttcaaataattttgaaagaaattttcccatatgaaaaaaggagagaacactggcatctgttgaaatttggaagttctgaaattatagtatttttaaaaattgcactgaagtgtatacacataaagcaggtcttttatccagtgaacaggatgttttgctttagcagcagtgacataaaattccatgttagataagcatatgttacttaccttgttattanatatttcttgaaaagcaaattttaatggtttaattttatgtggacgtatgttaaattatccaactaccctattgttaagcatttgggttttaaatttttatgctaatataaatgctcaagtaatttaaaatattgaaaacatccctgttggtataaatttctgagtaaatgcattggatcacgtggactttgaaaccccttttgaaatggcttttgctaaaatggctcccgccaca

SEQ ID NO: 41468 - DNA, 879 bp, Homo Sapiens
  misc_feature (782)..(782): n is a, c, g, or t
  misc_feature (803)..(803): n is a, c, g, or t
tttgaccacaaaattattgttgagtatttaccaaagaaaaaaaatgaccttcggtatattgaaatgcagcatttcagaaaaagctgccttcgtatggaatgcaaaaggaattggtaaatttaattgataaccatcaggtaacagtaataagtggtgaaactggttgtggcaaaaccactcaagttactcagttcattttggataactacattgaaagaggaaaaggatctgcttgcagaatagtttgtactcagccaagaagaattagtgccatttcagttgcggaaagagtagctgcagaaagggcagaatcttgtggcagtggtaatagtactggatatcaaattcgtctccagagtcggttgccaaggaaacagggttctatcttatactgtacaacaggaatcatccttcagtggctccagtcagacccgtatttgtccagtgttagtcatatcgtacttgatgaaatccatgaaagaaatctgcagtcagatgttttaatgactgttgttaaagaccttctcaattttcgatctgacttgaaagtaatattgatgagtgcaacattgaatgcagaaaagttttcagaatattttggtaactgtccaatgatacatatacctggttttacctttccggttgtggaatatcttttggaagatgtaattgaaaaaataaggtatgttccagaacaaaaagaacacagatgccagtttaagaggggtttcatgcaagggcatgtaaatagacaagaaaaagaagaaaagaagcatatatanagaacgttggccagattatgntagggaactgcgaagaaggtattctgcagtactgtagatgttatagaatgatggagatgataaagttgatctgaat

SEQ ID NO: 41469 - DNA, 691 bp, Homo Sapiens
tttttttttttttttctgtttcataacacaaggctggttgtggcctacaaacctaatttcatgacccagtggtttgcagtccagcgtggcctacacggatatggggagccactgagggatgttttccccccttgcttgtgccttaaaggcagagaagcgaggcggatgccctggaagcacccagcatcacacccaggcttgtgcggggccaggctgggagcccatgcagtagggcagaaggcagcggaggccaggtctgtcccggctggagaacagcgtccacgcagtcctgcctggggtcaggccctcactgaccctcaggggagcccccaaggtgctgtctgtctagacaggctgtcccaccccagggtggctagtggccatatgcagggaatggtgcttctggctgtggcacgcactggatcacccaggtcccagcagacatggccgcccaaagtcagcaagcctcctttgtgctatgtggagctcacagcctcacatgtgaacacccgtgtctgggttgcctggggtgatcctccctcctgcgtggtggctgtctctggaaagatcccttgccgctgccacgggcagccccagcccccgtccgtccaggctcacccacagtagtgatgcagacgtgacgtgggggaagggggctgagccctgtggctgggttctgacaactgtaacg

SEQ ID NO: 41470 - DNA, 574 bp, Homo Sapiens
tttgccctgattaaaaaatctcccaaagccccaaattcctgttagccaggtggaggcttctgatacgtgtatgagactatgcaaaagtacaagggctgagattcttcgtgtatagctgtgtgaacgtgtatgtacctaggatatgttaaatgtatagctggcaccttagttgcatgaccacatagaacatgtgtctatctgcttttgcctacgtgacaacacaaatttgggagggtgagacactgcacagaagacagcagcaagtgtgctggcctctctgacatatgctaacccccaaatactctgaatttggagtctgactgtgcccaagtgggtccaagtggctgtgacatctacgtatggctccacacctccaatgctgcctgggagccagggtgagagtctgggtccaggcctggccatgtggccctccagtgtatgagagggccctgcctgctgcatcttttctgttgccccatccaccgccagcttcccttcactcccctatcccattctccctctcaaggcaggggtcatagatcctaagccataaaataaattttattccaaaata

SEQ ID NO: 41471 - DNA, 632 bp, Homo Sapiens
ctacgagggaggggaagcggttggacgtgttcgcttgggttcctgctgcggcagctacctcgcaatctctctgcatcgatcgccgctcgcaagctactgaccgtactcgggcgtattaggagccgcgttccagcctcacaccccacggtgctgttttcgacttcagaaaggatctagtctcagcacagaagcgcctcaggcgcggcgcaaagctcgagcggacggcgggggcggccggagcctctctcgggggagccgcgcctgaggaggcggaagaacccccctgacgcgactggcgtgtgcttctgcccgccaccgcccctcccgctctcacccgggccgtccctggccactgcccctgccgcggaggcagcggcggcagcggctctcctttccacagccggcgctccgcgacccgcttggctcctgagcccgtcgggtaggctctcctcgagttcccgctcttcaccccttccctcaccctcttctttcgtcacccgtccccgaccccacccgagcccggcgcctcagctgcccccgccatggcgtgcggagccactctgaaaaggactctggatttcgacccgctgttgagcccggggtccccgaagcgcatgcgatgtgcgccattg

SEQ ID NO: 41472 - DNA, 839 bp, Homo Sapiens
  misc_feature (793)..(793): n is a, c, g, or t
tttgttttcctctttgatgttagtaaatttggtgtaatacgtgggggcttccatatttcaaagtggaagctttcttctctgaagtcgatatatggttttgaattactagagctttggtcagtatttccttccctatatgtcacagagggcaccactgagaactgcgtgcataggacctcaaaatacaaaattagcagggcctcacagtcagcttcctcatggctagtttttcccccttatattacaatttttgttttataagtcatttttttcctgatatttccaccacttttcagagtcatctacaaaatttttctttcctcaagaaaagagttccttttgccttattccttatgccttccccactggtattgagggttttgataataaattggtaggaaaaaaaagtacctcctagaaggaagccttccccaccatttccaggtgccaactgctaagcagatatattccaaaaatggtaactgtcatgtgcacactgttggttatttttaataagcctcttcctactagaacattttattttccttgttcaccatacaatcatgtactctttaacagaaattgcttttaaaaaatatctggaactatctttaaaaaaactttattaataatcatgtatttttactgatcacattttgaaatgcctaaaagactttattgttctaattatccagatgtacctttgtaaaatagctcttttatgaattagctgataaggctgtatgtttctggaacaaaatattggtcatctaaaaactttctgttttctggngtctgggaaatagaaaataagatttaaatattaataagcttaaagg

SEQ ID NO: 41473 - DNA, 639 bp, Homo Sapiens
cttctgatgcacagccacatgcatttctcctcagtggaccagcttcaccagggacttcatctgcagcatcctcaccattaaaaaaagaacagcccttatttactctacggcaggttgggatgatctgtgaacgtttgttgaaagaacgtgaagagaaagttcgagaagaatatgaagaaatattgaacacaaaacttgcagaacaatatgatgcgtttgtgaagtttacgcatgatcaaataatgcgacgatatggagaacagcctgctagctatgtttcatgaatcacgtatcctgcatttgtgggctgccttgttccttgttgagttgttgcaagaggtcccaattatgacatgcagcaatgccaataccccttctgtgaatacaggttatttcaagctttcgtcagtggcaaccactcttaggcagcagcaactggttttggaaatttccctgatgtcagtaccacctggatgtggacctttgctacctgtattaataccagtggcctcattttgctgtatcattacaatttggcttcttatattaatgtttgaaaaggattaaagctggtattctagaacatgcccttcactggttgtgtaaataaaactgtagaatgacacttcaaaaaaaaaa

SEQ ID NO: 41474 - DNA, 687 bp, Homo Sapiens
ttttttttttttttttttgcaaatacagagttttattgtctccattcctaggaggtggctatcaaagagcaagtgggaatggtacaggtatttctttgttccaccagatatgtatctgtatctgtatctatatatatagatatagatatatgtttgtaaacaaagccaggcatacaaacaggttaatttccgcaaagtacatttgaatagtcttaatctttaaaatgtttaactaaaagatggtataaactactaagcattttattacgcttattagctccgtcagccaaatgtgcccttgaatgactgaaaactaaaatattatcccaagaataagtcaaattacaagtatttcaaaaccaaaatacagcaaatgcccaaagtaagtgagccttctgagctaaaatgctgttggtaaaagcacagaaatgttggtatgtgaagaagcccagcactggggacaggaaaaatagaggcatatgcttcatttagggtaggattaaaaccaaagttatcttcaggtgcgtcataaaagctggcctacctcactgaactttatacttaaaaatagttacaatagcaaattttgttatatatatatttcaccacaattaaaaatcaataatataccaaaacccatctgattatacactttaaatggatgaattatatgatatgtgaatatct

SEQ ID NO: 41475 - DNA, 856 bp, Homo Sapiens
  misc_feature (800)..(804): n is a, c, g, or t
  misc_feature (806)..(816): n is a, c, g, or t
  misc_feature (818)..(839): n is a, c, g, or t
  misc_feature (841)..(842): n is a, c, g, or t
  misc_feature (845)..(845): n is a, c, g, or t
  misc_feature (852)..(852): n is a, c, g, or t
  misc_feature (855)..(855): n is a, c, g, or t
ctttttcttttttttaagtctcacaagacatggggcatctccacaaatttaagttcctgtccatttggaaatttgtttctatgtgtacagtttgtcagagaaaaacaaagtttttgtatgaatacagaatgtgatttacgcaagaattgacagaaaactagttgtgaagtgcttgccttaaggaaacctttggtttccatcgcatcccatctgccaaggaatgcacggttgttgctgatgttcatgagcatattaaccactaggttatctaaattaatctcagctgtgaactttgtgtttttcaacacattctgtcacaccatttttgtgacagaaaaatacttgaaaattattctaatgtagtttgtagtaggttcaaatttttattcagacatgctctgacagatggaaaattgtactctgaagagaaaatgcaatcttctggatgtccaacgagggagcttccccttggaagcatctcctaagaatcacagtttaggtttgaatcgccttgttatgatgaggagaggaacttgatgttagtcagaaataaagtcacatgccctttagataacttgaaatcacacatggagttgataaggaatggaccaaaataggtcctcaaacaattttgcaacacttaattaagttttcctctcttcctcttccatactatgtggaaataccagtgttacggcagggcgtacttctaactcacagtaagccagatagatcttgtccatggcaaattccttgtttaaaataaacataccatttagcccagtttggattggaagccnnnnnannnnnnnnnnnannnnnnnnnnnnnnnnnnnnnnannacnacacaanacna

SEQ ID NO: 41476 - DNA, 750 bp, Homo Sapiens
caagtttcaaaaaaggacagtagagcttacctatcgtgggatcagatacttcagggatacaaagtctacaggtccaactgctgccactggcagtaatcgaagacttcagcagacacaaaatcaagtagatgaggtggtggacataatgcgagttaacgtggacaaggttctggaaagagaccagaagctctctgagttagacgaccgtgcagacgcactgcaggcaggcgcttctcaatttgaaacgagcgcagccaagttgaagaggaaatattggtggaagaattgcaagatgtgggcaatcgggattactgttctggttatcttcatcatcatcatcatcgtgtgggttgtctcttcatgaagaaccagcggaactcaaaactgctgttcaagaaacctcttcaagacttttgacttagaacctgctatattatcaagcttacctactgttatctctaaaattttttttgtgttaatgtaaagttgaatttctaggaaacgtgcctttgttttttaatatgcactccaaattagaaggccggccccgtccacattttgcacagtgcctttacagatttacgtatgggctgatgaagaggccttcttaagttccagagtgctataatctagatgtaatgttgtcactaattaattgccattactcccagttagttacccttgtcaattggcattattttcagaaccacatttttaacctttgggtaatcagatttccactaatgcttc

SEQ ID NO: 41477 - DNA, 710 bp, Homo Sapiens
actcagtctcctgggggtgggcagcccctgctgcagcccaccaaggtggatgcagctgagggtcgtcggccgcaggccctgcggctgattgagcgggacccctatgagcatcctgagaggctgcggcagttgcagcaggagctggaggcctttcggggtcagctgggggatgtgggagctctggacactgtctggcgagagctgcaagatgcgcaggaacatgatgcccgaggccgttccatcgccattgcccgctgctactcactgaagaaccggcaccaggatgtcatgccctatgacagtaaccgtgtggtgctgcgctcaggcaaggatgactacatcaatgccagctgcgtggaggggctctccccatactgccccccgctagtggcaacccaggccccactgcctggcacagctgctgacttctggctcatggtccatgagcagaaagtgtcagtcattgtcatgctggtttctgaggctgagatggagaagcaaaaagtggcacgctacttccccaccgagaggggccagcccatggtgcacggtgccctgagcctggcattgagcagcgtccgcagcaccgaaacccatgtggagcgcgtgctgagcctgcagttccgagaccagagcctcaagcgctctcttgtgcacctgcacttccccacttggcctgagttaggcctgcccgacagccccagcaactt

SEQ ID NO: 41478 - DNA, 582 bp, Homo Sapiens
  misc_feature (537)..(537): n is a, c, g, or t
gaaggcgttagcaacgccgcagtagtgagtgccaaacttaagttatttgctttcggaggtaccagtgtcagtcatgacaagctccccaaagttcagtgttacgatcagtgtgaaaacaggtggactgtaccggccacctgtccccagccctggcgttacacagcagcagctgtgctggggaaccagatttttattatggggggtgatacagaattctctgcctgctctgcttataaattcaacagtgagacttaccagtggaccaaggtgggagatgtgacagcaaagcgcatgagctgccatgctgtggcctctggaaacaaactctacgtggttggaggatactttggcattcagcgatgcaagactttggactgctacgatccaacattagacgtgtggaacagcatcaccactgtcccgtactcgctgattcctactgcatttgtcagcacctggaaacatctgccttcttaaatgcagtacattctaaagagagtgagcatgagctcactccatcactcgatgagataatantgagatttctacttcggagaggccaagtctaatgaagagaaaaaa

SEQ ID NO: 41479 - DNA, 895 bp, Homo Sapiens
  misc_feature (803)..(803): n is a, c, g, or t
gaaaataggggttaagactgataacaaccttttacattgtgactgtgtttgcattgtctaatgacagataaatccttaacatttctctccaccttagtactttagactaattgtgtttgtccgtccatgccatgaatgagtgggctgtagttgggcctaaataaatgagctgttggaagaaaagaatcacagtactttccagcagtcagtccctggttcctagatgtgttctaagcaatgcaaatgtctaattgtcccccagtgggcatagtcagtgtcgtttatattgtagcagttacagctctgtagtttatgatgcaaatctgccaagagagatgtatgtgtcactgcatggcttctgaaagcaggatgaattttctgcagctgtttcaaagttggggtctgttcttgaatcctctattaattactgtgtgtgagccagagggagctgtggtaagggttgggcccccagcctgtagggaactttctggactcccactctttgaatcgatataggcatttggtctcactacttgaccattctcaccctgtgaaacgtcccacactttgaagcaaatacaattcacagcacagtacacacaaaaaccttggcataagacagagaaggttcttcttattttgtgggctggttgctgtagaaacacataacaaagggcagccctccacttctggtataattgtgtagccccttttctttgggcttgacacctgtcttgaataagagtgattagagctgcataatgtccctctcttggctattgaccatgtggttcacgtacaanactctgttataagttgaaggaaaaatgttcatgttcataatgtacttgggttgctatacctaactttttgggaggtttggaaaaacgtgtta

SEQ ID NO: 41480 - DNA, 1031 bp, Homo Sapiens
gctgccctgctgctcctgctgttgctgctgctctggtactgccagatccagtaccggcccttctttcccctgaccgccactctgggcctggcggcttcaccctgctcctcagtctcctggcctttgccatgtaccgcccgtagtgcctccgcgggcgcttggcagcgtcgccggcccctccggaccttgctccccgcgccgcggcgggagctgctgcctgcccaggcccgcctctccggcctgcctcttcccgctgccctggagcccagccctgcgccgcagaggactcccgggactggcggaggccccgccctgcgaccgccggggctcggggccacctcccggggctgctgaacctcagcccgcactgggagtgggctcctcggggtcgggcatctgctgtcgctgcctcggcccgggcagagccgggccgccccgggggcccgtcttagtgttctgccggaggacccagccgcctccaatccctgacagctccttgggctgagttggggacgccaggtcggtgggaggctggtgaaggggagcggggaggggcagaggagttccccggaaacccgtgcagattaaagtaactgtgaagttttcaaaaaaaaaaaaaaaaaaaaaaaaaaggggggggcccacttaaaaaaatttacttgcgggggggcccaatttttagggcgtacccagttttcttggttacaaggggtgggccaccataaagggagaggcggcattaaaaacagaaaagcgacacgggcgcgtgttattaaacaaagtgtggtagattgtgggaaacaccgcgtaacgtgggggaaactattgggagaaagacaccgcttatcttgcttgggcgggtgcgcacatatgttgggcaacaaccattcctaacaaaaaatattttaatcacttaaagcggaaaatataaaaacttaacggcttctcatactgtggtttaccaacacgcggaaattgttggggcatagaagatttggctacagagagtaatattattgaacaatttttca

SEQ ID NO: 41481 - DNA, 677 bp, Homo Sapiens
tggacagaagcccacttagtttcttgggagcaacagcacgtatcagaagccagacttgctcttcggtcatgcactttgggatacagcgtataggtgcagccctgtcacaacaccaacagaagtagcagcctctgggtgcagtcacccacaccccaaagctggaaggatctggttcaacatagcacaaacccttaggaaaaatgaaattaacatcactgatgtgtaatccagtaaaatctccctttttcgggtgtgtatgtgggcatgtgcccatttctatgtgtgtgtctacgtgcagctcactaccaacagcctcatgtgcacttgacctgacagtgctcgctgagaactctcaccaggttggcgcctgaatgccttactctcagcagtcagaggcttgcttgctctgtgcagatttttaattttcttttttggccctaggctggttgggacctctacagcttcattctttcaccattaaatagtggcctttttcagtattttccctcttcccctttataaattatgctaaagccacaaagcacatttttggggatcatagaaggttggggttccagaaaggcatctgtgtgatggttccattgatgtgggatttccctacttgctgtattctcagtttctaataaaaagaaccaaatgaaatatgaaaaaaaaaa

SEQ ID NO: 41482 - DNA, 894 bp, Homo Sapiens
  misc_feature (595)..(595): n is a, c, g, or t
ctgtttttgggtgctataggccgcatagatttcctgcagggaaatcagtcagcttggtttacagtcgtggcttccaacatcctccctgtgcatatcacctccttggacagggcagacgctctgtatcagaagcatgcaggtcatacgttactccagattccaatgggtggaaaagaacgaatggcaggatttcctcctcttgttgctgaagacattatgttaaaagaaggactgggggcatctgaagcagtggccgacatcaagttttcctctgcaggttgggtttcagtaacacctaattttaaggacagactgcatctccgaggctatacacctgaaggaacagttttgaccgtccggccccctctcttgccatatattgttaacatcaaaggacagcgcatcaagaaaagtgtggcctataaaaccaagaagcctccttcccttatgtacaacgtgaggaagaagaaaggaaagataaatgtatgagaccgaccttgttcactccagatattaactgtattgaacacaacaaaatacattgaatttgtatttaacatattacgcataaataaagctccattcttaccttttnttctttttctctttctcccgagacggggcccgtctgtgccggttgagtgcgggcgaactttggcccgggaccaaccccagggagagaactcttggctacagccccagtagtggtggacaggctgggcgattcccggagttcgtctctcaacacaggcgacattagggcacgggcaaccaagcagaggacgcacgccgagacctaggcgcagagaaggataacacaggcaggagacaaaacaggagggcagtactgcagatgccccgagttgcatgacgaccccgcaaccagagggggcg

SEQ ID NO: 41483 - DNA, 767 bp, Homo Sapiens
ccaccagagacctgacatcggatacgtgcaccaggtggccaagcagatgcacatctggatgtccagcacctgagcgtggatgcaccgtgccttatcaaagccagcaccactttgccttacttgagtcgtcttctcttcgagtggccacctggtagcctagaacagctaagaccacagggttcagcaggttccccaaaaggctgcccagccttacagcagatgctgaaggcagagcagctgagggaggggcgctggccacatgtcactgatggtcagattccaaagtcctttctttatactgttgtggacaatctcagctgggtcaataagggcaggtggttcagcgagccacggcagccccctgtatctggattgtaatgtgaatctttagggtaattcctccagtgacctgtcaaggcttatgctaacaggagacttgcaggagaccgtgtgatttgtgtagtgagcctttgaaaatggttagtaccgggttcagtttagttcttggtatcttttcaatcaagctgtgtgcttaatttactctgttgtcaagggataaagtggcaaatcatttttttccgtggagtggtgattctgctaacatttttatctacgtcttataacttggtgagtgaccatgagagcctgcacctgggcagagtgtcacaggcaaaaggcatcgggaaccagacatcttcttggcacgcagctgggccacttctcctggaccccgcctgtgtaccccgacctccccctccctaatccgg

SEQ ID NO: 41484 - DNA, 757 bp, Homo Sapiens
  misc_feature (751)..(751): n is a, c, g, or t
tggaccggtccggattcccgggatctctgttgaaagggataaagtggaaatcatttttttccgtggagtggtgattctgctaacatttttatctacgttttataacttggtgagtgacgatgagagccctgcacctggccagagtgtcacaggcaaaaggcatcgggaagcaggagcatcttcttggcagccaggctgggccatcttctcctggacacctgctgtgtaccaggaacttcgtcacctccttgaatgctggcggttcatttcatgatcagtgttaagcattttcctccatgggaaggaagcatgggatatagaaaagcgaagggctgtcctttacaaattctggttctgcaacttcctagcgtgactttgggcttgggcaagtttcttagccgttctgagccttcatttcctcatctgtacaatgagattaatagtacctatcatctaccttcaggattgctgacagacagaatttgaaataaaatatgcaagttagctaatacaaaaagtagatgatccaaaaatggtagccactcacccttcacaaactgaagtccatggaccacggaagtcgagaattaatgtacacctgtatcatgtgtaggaaaccagaaatgtgttccttatttcttgttcccaaacaggattaactgtgaagactaatttataaatgtgaacctaagaaaaaaaaaaaaaaaaaaaaaaaaaaaaaaaaaaaaaaaaaaaaaaaaaaaaaaaaaanaaaaag

SEQ ID NO: 41485 - DNA, 610 bp, Homo Sapiens
cggcctaggatcagtacctgttgaaaaaaactggttctccacccctcccccatacaaaatccacaacaaagcgcagtggtctcttgtgaatgactgacacagatcagcctcttacacttgacttctgctcatcaagtgccaattcaatggagcaggaggaggggatatcatatatttaggggaaagacttaagcctttgagctctccagcttggaccacacattgcccttttctcagggaaggaaatggaaacaaaaagccaacagggcaggggttttgtaagtggaactctggattgactggtcagttgctacaatcagaatatgctttcttggaccatgtttgagactcagaagaatgggcctttctgccataattcttcactagtcaagaatgccagcagtttctttgtataaagagacctgcctttaaaatcatacattctgaacattttagtcaagctacaacaggtttggaaaacctctgtgggggaggggcgagtataaagttttcctcttttttaactgttccctttgcccttcaaactgcagatatttttttttttaagtggggacttctccctacttgattaaagattgagtggaattct

SEQ ID NO: 41486 - DNA, 634 bp, Homo Sapiens
cgcgctcataccctgtcctttctccctgaccccaagggcacagaggcaaggcctcctgtctacagcagcttcctcagtttcctactgccttaggaggcccctgcttgtgctcagggaaggcctcttcatgggcatgttcctgctggggcggtgcggtttggtcccaactctgctaagttttctgagatgagggtctagccctgttggggacagaaaagtgtgtagaccttcttcctgctagggctgcactgtcctgggtgttgggcccttctggtggacaaggctgtgccaaccctgtacagaatcgagtgctgtagcctggccagaccccagagcccttgtgccatctttcttcctggccagagtgatggggttccagccatggggaagcaacccaatcctctgtctccttgctccaatggaggcagaagagcccaggacccaagcgtcttggcaggggtgctgtgaatgtccagtggtcccagctccccaccctggccctgccccagcctgtgtagctcttcctgcatgtggatgctgcatgtctggtctggggcttggatgttgcactgccccactgcctgtcccttctggtaaaataaagaactcttaatgcccaaaaaaaaaaaaaaag

SEQ ID NO: 41487 - DNA, 587 bp, Homo Sapiens
agggacagagcagaggaaagcaaaatgaatttcctttatttacccaaaacttgttgactgaatttttgtataggtccgggaaaataagcctaaacaaatagttgtagccttagaaaaactgttttcccatttctttctgagttagaatcagcatagcctccctgtcgccttaaatgtaaaaatcctattttgattaataccccagcctaagagttatagcaatacgagagactgaatctatttttgtttcgggtctttacctcatagtatgaaattagtaagacactgcatagattttgccctgaatactggtgtgcccaggtatgccgtgctctctctctgtttccagtggtggtaattttaaggcctaaagaaagctggggttaatcctgaagctaaaagtaaatgtttcttgaattgattttgttctgtggtacaaataacatctatgaatatcatatctgtatatatctgaaccaagttgtgtgcagagaggttgatataactatatttacagaaaatgatttttacaattaaagttcacattttaacatgaataaaaaaaaaaaaaaaaaaatcgctaatcg

SEQ ID NO: 41488 - DNA, 497 bp, Homo Sapiens
  misc_feature (33)..(33): n is a, c, g, or t
gacgaagggctctccccctccaagcggcggcanctctctatgcggaaccaccacagtgatctcacattttgcgagattatcctgatggagatggagtcccatgatgcagcctggcctttcctagagcctgtgaacccacgtttggtgagtgggtaccggcgcatcatcaaaaatcctatggatttttccaccatgctggagcggctgctcaggggagggtacaccagctcagaggagtttgcggctgatgcctcctggtatttgacaactgccagactttcaacgaggatgactctgaagtaggcaaggctgggcacatcatgcgccgcttcttcgagagccgctgggaggagttttatcagggaaaacaggccaatctgtgaggcaagggaggtggggagtcaccttgtggcatctccccccaccttccaaacaaaaacctgccattttcacctgctgatgctgccctgggtccagactcaagtcagatacaaccc

SEQ ID NO: 41489 - DNA, 680 bp, Homo Sapiens
  misc_feature (617)..(617): n is a, c, g, or t
ttttttttttttttttttgcttttaagaggtggattgaagaatatttgaattgactttatattatgcataaatatttatattttatctaaataactgcgctgtaacaaactttgtgttagacagttgaaactgttagagttgggggctctgctttttccccctggcaattttcccctggtataagatgtgctagattaatttcattgtgaggtggatgggggagtgaaattgtgaggtggatgggggagtgaaatctccatggttcctgctttgtgttcctctcccagctccatctctttccctagggaccaggcactcatatggcggggtggggtcctagcctcagtttgaagaagtgggggctggagcggggttgggggtggtagggatagggcatgatcaaaggggccatttcttgcttttctttcctcatcttcactgcccccttgagctaggtggattttctcttcatgacaagagtatttggtagggaaagcaggtttaaaataaaaagacaacccaccccctgcccttttgcttccctcccatcagtctggttgacaggaagaaaccacaccatcaacaccaacaagtttctgtgttccttttacagcanaagggactttttatataaccaaatgtggtgttttagtgactttttgataatgtacagtttttt

SEQ ID NO: 41490 - DNA, 570 bp, Homo Sapiens
tgcgcttctgagctggaagaggccgggcattggtggtccccaggctgggccctgcaggtgctgggccttcaggcccagtgtgagcctgctctgcaagaagggaggggacagctggcttcagccaggctcggtggacaccctggccctctcggggcagagccgccagtgtttctcagggatgtgactgaggcccaggagggacctgtgagggtctgtttacagaggctgggcaggggccgcttggctgtggggtgtgcgctgccccggcacctgcttgccctccgcgctcatctggggccgcagcatgcctatggttccgcttccggccgggagccctgaacacgggtgtgcagactcaccctaaagggcggcccaggccccacgctagaaggctggcgagaccgaaggcagcatgtgaggcctctcctgggagtgggggttgtgtttcccacagtggcctcagctgcgcccccgctcaggtgagcccgaaggcaggagccgggaggcactcctcccaaacactccactcagaccataaagcactcctgtttcaaaaaaaaaaaaaaaaaa

SEQ ID NO: 41491 - DNA, 590 bp, Homo Sapiens
gttgacctttaaatgcaacagtttttaaaatatattgctgcattttatagaatagtaaaggtacgattatacttgagattttcctccatttttatttcttcgtgaacatagagtttggggccgaaaatgtttttaaagtatgtgtttgagttaaatataaagttggttcacttcaaagctaaaaaattgttaaacttgcagcttggtattgcagagaagattttataagaattttgctttagagaatgccactttggctgaactacaagtgtaggccaccattataatttataaatacagcatacttcaaaactgtttgttatctcttgttaccatgtatgtataaatggaccttttataaccttgttctctgcttgacagactcaagagaaactacccaggtattacacaagccaaaatgggagcaaggccttctctccagactatcgtaacctggtgccttaccaagttgtgcttttctgttttcaagtgtaaatgatgtgagcagaatgttgtacttgaaaatgctataagtgagatggtatgaaataaattctgacttatgaaaaaaaaaaaaaaaaaaaaaaaaa

SEQ ID NO: 41492 - DNA, 441 bp, Homo Sapiens
attgagaagccaattcaccagggaccagatgctgctgttaccggccatataagaattcgtgcaaagagccagggaatggccttaagtcttggagataaaatcaacttgtcacagaagaaaactagtatataaaaataaacaaaaagtccttgaagctttacagttaatttaggtatgggcttactggactccaacatcttttgtactctttcatgcttatatagaatctgagttcatgctgaatacttttcagccaataatttatagcctttcccttaaatcaagattgagtttaaaattatagtttgtcttttgtcttaacagttctgaatgctgtcctcaaagtatataatgtttcatgtaccaagacccttttcacagtacaataaacagatctattcataaatttttgttattttataaataaatgattacataatt

SEQ ID NO: 41493 - DNA, 668 bp, Homo Sapiens
cacgcgtccgaatttttggtaatatagtttatgatgtctctggagcagcaagtgacagaaattgtgtggttctcagtgatattcacatcgacatcatggactatatccagcctgcaacttgcactgatgcagaattccgtcagatgtgggccgaatttgaatgggaaaacaaagtgacagttaacaccaacatggttgatttaaatgactacttacagcacatattaaagtcaaccaatatgaaatgcctgactccagaaaaggccctttctggttactgtggctttatggcagccaacctttatgctcgttccatatttggtgaagatgcacttgcaaatgtcagcattgagaagccaattcaccagggaccagatgctgctgttaccggccatataagaattcgtgcaaagagccagggaatggccttaagtcttggagataaaatcaacttgtcacagaagaaaactagtatataaaaataaacaaaaagtccttgaagctttacagttaatttaggtatgggcttactggactccaacatcttttgtactctttcatgcttatatagaatctgagttcatgctgaatacttttcagccaataatttatagcctttcccttaaatcaagattgagtttaaaattatagtttgtcttttgtcttaa

SEQ ID NO: 41494 - DNA, 882 bp, Homo Sapiens
  misc_feature (841)..(841): n is a, c, g, or t
tttggcagctttagcaatatgtcggcacagtttcgttctctccatcagtatgctgcccagaggatcatcagtttattttctttgctgtctaaaaaacacaacaaagttctggaacaagccacacagtccttgagaggttcgctgagttctaatgatgttcctctaccagattatgcacaagacctaaatgtcattgaagaagtgattcgaatgatgttagagatcatcaactcctgcctgacaaattcccttcaccacaacccaaacttggtatacgccctgctttacaaacgcgatctctttgaacaatttcgaactcatccttcatttcaggatataatgcaaaatattgatctggtgatctccttctttagctcaaggttgctgcaagctggagctgagctgtcagtggaacgggtcctggaaatcattaagcaaggcgtcgttgcgctgcccaaagacagactgaagaaatttccagaattgaaattcaaatatgtggaagaggagcagcccgaggagttttttatcccctatgtctggtctcttgtctacaactcagcagtcggcctgtactggaatccacaggacatccagctgttcaccatggattccgactgagggcaggatgctctcccacccggacccctccagccaagcagcccttcaagttcttttatttctgggtaacagaagtagacagacaggttacttggtgtatcttctgttaaagaggattgcacgagtgtgttttcctcacacactttgatttggagaattggtgctagtttggcatagataactcagcgtagatagtattgcaaaaaagggaggaaatacncaacaataataaatgtaaaaacctgctatttcacatgcagt

SEQ ID NO: 41495 - DNA, 640 bp, Homo Sapiens
gaggatgtaccttgtgtctctttcaagtgccttaatccgagccagcagggccttctgcttgcctgctgccatactgtatgtaggaaagtgttctgtggctgctttgtgtcaagaaaagagcagtcactctcagaatcttgattccccatcagccaaagcaaaagatggctgctgctttgtaggcatgtgcctgcaagtgggaccttgctgggcattatatgccctgtgggggtttcagagaccctgaaagaggagggaggacccgcctccttgtctgcacaactgcatgcacttctctccccatcgctccacaacctgaaaccgagaaggagttgctgaccagtgcccaccccggcagcccgggaggaacacaggcagctcctttcccttcacgtggtctgcagagagcagggtgagctgccagctgcccctctccaccagggtaccctgtcttggtggttaggggccacttttcctttgaggctctagtggaggtggatgtccttctctgccaggcttggcacatgatgtgaagaataaatgcccaattcttactgttcaggtttgatgtggaatcacagctgcagtgatatatattttttatcagtgcttggttggttttaaataaagtgcacgctat

SEQ ID NO: 41496 - DNA, 797 bp, Homo Sapiens
ctgcctaccaatatttaatcttttatgattgcctttttataactttttatattctcagcagagtgctttaccaattgaagtaaaatgtggcaggctggagttattgaagcagagtggcagtcttcagtttgcagagtaggggtctgtcttttaaactctgagtgcaaacttcagagttcttgccttggctgcagtttttttccttcaagaatgcagtactaacatttatttgagtggagttactgaacagtaacatagctgtgatttttggtatttgaaacactggttttaaatattttgacttgttgagggtatgttttatatagcaagacattatatagcagtaaaaaatggtgttttatcttctatataattcctgtttttattattaacaaaacagtcctaaatagcagccctcaattgtgaaaaaatttactttaaactacattaggttgtgaatgcaggttttatcagaactatgtttttgttcagtttatctgttcatatggataaatattggttgggatgacttggtgtctaatgtgtagtgctacacacctaacttatggggccaaaatagcatgtcctaatgcttgctgctgatttaaacacattaaaggtactttgcaggaaatccttgcaccatgggattaatatccaattgctgcttgtacactcattcattactaaaagttttgagaaatttttttttccagtaatgagcttaagaaatttgtggaaaataactcacctggcatcttacatctgaaataaggaatgatataaggttttttttt

SEQ ID NO: 41497 - DNA, 582 bp, Homo Sapiens
  misc_feature (511)..(511): n is a, c, g, or t
ttaccagtaggtttgtgaaattggttctttgtatgggggatggtcctttttcacacagctaggtcttttcagaagtggtggaaattggcagctggggtactttcagtttggactgatattcatcacacctcagataaaatgcagagtaatatatagttgcactttataaatggtggttaaatggaaatgttcaagccattttatagttgtgatgcacaatataatttaagtgcttctgtcaaagtattcctccagtacaatttgtatagtttgctgcccttgatgagcaaaaagtatttatcttgggcttatctgaatgatcaggatgagatttaatgcccatatcttaccagttcagttatctccagagccatttcaccctttagagtgagtcacatgcagggagtgtgaatgtcagaggtggtttattatccagtctgccttacccttaatctgttcacagatatttatttactaatgctttttttttcttaagagttatgggataggnaaaatgaagtgtttgctcttcatttactaaatgattgtaaacttgagtttttcatcaaaataaaattccat

SEQ ID NO: 41498 - DNA, 880 bp, Homo Sapiens
gtttcggtccggaattccgggaggatgataaacacccaggacagtagtattttgcctttgagtaactgtccccagctccagtgctgcaggcacattgttccagggcctctgtggtgctcctgatgcccctcacccactgtcgaagatccccggtgggcgagggggcggcagggatccttctctctcagctctaatatataaggacgagaagctcactgtgacccaggacctccctgtgaatgatggaaaacctcacatcgtccacttccagtatgaggtcaccgaggtgaaggtctcttcttgggatgcagtcctgtccagccagagcctgtttgtagaaatcccagatggattattagctgatgggagcaaagaaggattgttagcactgctagagtttgctgaagagaagatgaaagtgaactatgtcttcatctgcttcaggaagggccgagaagacagagctccactcctgaagaccttcagcttcttgggctttgagattgtacgtccaggccatccctgtgtcccctctcggccagatgtgatgttcatggtttatcccctggaccagaacttgtccgatgaggactaatagtcatagaggatgctttacccaagagccacagtgggggaagaggggaagttaggcagccctgggacagacgagagggctcctcgctgtctagggaaggacactgaggggctcagggtgagggttgcctattgtgttctcggagttgactcgttgaaattgttttccataaagaacagtataaacatattattcacatgtaatcaccaatagtaaatgaagatgtttatgaactggcattagaagctttctaaactgcgctgtgtgatgtgttctatctagcct

SEQ ID NO: 41499 - DNA, 755 bp, Homo Sapiens
  misc_feature (683)..(683): n is a, c, g, or t
  misc_feature (685)..(685): n is a, c, g, or t
  misc_feature (693)..(698): n is a, c, g, or t
  misc_feature (701)..(701): n is a, c, g, or t
  misc_feature (712)..(712): n is a, c, g, or t
  misc_feature (720)..(720): n is a, c, g, or t
  misc_feature (723)..(723): n is a, c, g, or t
cacaattggtttgggtctgcattgccatagtgcccgagttaaaactgcaggccactctgccttgcagtggcctctgatttcattgtgggtgcatccacaggtggcccgagctgttctttcagctgctccaaggattgagacccaagtcatcatgaaaaaggcccaagtacagtcttaatgcgataaatccactagctaagacgtcgagtgccaagaccagccttccagccgaggtttggacaaagtctcaggttcccgtgactcagggtaaggtgctggggctgccagaggacctgccccagcaagatttttgtcaagagcgagactccatcagcccaggcagacgggagcaggttcttggccagcgtagacagcagcaaacagcagcagggaagccattctcactgcatcctccctgcagtagccacggccaggcccttaggaggagcagtgaccgggggtgtccagaaatatcctgtccctggatggaaactaggtctcgtttggatttttttttttttttgccgtgttaggaaattatttattaatttacaagacaggttttaactcagccgaggtgggaaatggtgtccctgtccctcccaaagcacagagcacagaaatgaggccgtttacatggcgagtctccgtgctggtgtttaagtcattaaaaagatactccnangagaaaannnnnnaanaaaaaaaaaanaaaaaaanaanaaaaaaaaaaaaaaaaaaaaaaaaaaaaaaag

SEQ ID NO: 41500 - DNA, 677 bp, Homo Sapiens
ctgaagaaaatgactggcaaacctgaacccaaggttgtttattttggtgacagcatgcattcagatattttcccagctcgtcactatagtaattgggagacagtcctcatcctggaagaactcagaggggatgaaggcacgaggagtcagaggcctgaggagtcagagcctctagagaagaaaggaaaatatgagggaccaaaagcaaaacctttaaatacttcatctaaaaaatggggctctttttttattgattcagttttgggactggaaaatacagaagactccttggtttatacatggtcttgtaagagaatcagtacttacagcactattgcaattccaagtattgaagcaatcgcagaattacctctggactacaaatttacaagattctcttcaagcaattcaaaaacagctggctactatccaaatcctccactggtcttatcaagtgatgagacactgatatccaaataagttgtctttactgaaaaatgaagtgaagacccatatatgcagttaaaaaaaagttaattttcaaaaaatactgtaaaagactttaaggaacaagttttattgaccaataagttgatatttgtccataggtctcctttctataaatcatcttgatgtttaacaactcttattatattaaaatctcagtatcctaaaac

SEQ ID NO: 41501 - DNA, 751 bp, Homo Sapiens
gctaacggcagcagctgcggcagcgcggcggccggcggtccgacctcctacggcacccttaaggagccgtcggggggcggcggcacagccctgctcaacaaggagaacaaattccgggaccgctcgtttagcgagaacggcgatcgcagccagcacctcctgcacctgcagcagcagcagaaggggggcggcggctcccagatcaactccacgcgctacaagaccgagctgtgccggcccttcgaggagagcggcacgtgcaagtacggcgaaaagtgccagttcgcgcatggcttccacgagctgcgcagcctgactcgccatccgaagtacaagaccgagctgtgccgcacctttcataccatcggcttctgcccctatgggccgcgctgccacttcatccacaacgcggacgagcggcggcccgcgccgtcggggggcgcctccggggacctgcgtgcctttggcacgcgcgatgcgttgcacctgggcttcccgcgggagccgcggcccaagttgcaccacagcctcagcttctcgggcttcccgtcgggccaccatcagcccccgggcggcctcgagtcgccgctgctgctcgacagccccacgtcgcgcacgccgccgccgccctcctgctcttcgggctcgtcctgctcctcctccgcctcctcctgttcctcggcctccgcggcctccacgccctcgggcgccccgaactgctgcggcccccgcggcgggcgcttaatttact

SEQ ID NO: 41502 - DNA, 497 bp, Homo Sapiens
cgtggccgccgccgcctactaccgcagtcagcagcagcagcagcagcagggcctggcgccccccgcgcagccgccggcgccgcccagcgcgaccctccccgccggggccgccgcacctccctcgccgcccttcagcttccagctgccgcgccgcctgtccgactcgcccgtgttcgacgcgccccccagccccccggactcgctgtcggaccgcgacagctacctaagcggctccctgagctccggcagcctcagcggctctgagtctcccagcctcgaccctggccgccgcctgccaatcttcagccgcctctccatctccgacgactgaggcaagagggcgccagtgaggaggaagggaaggcggttcagagatgttggaggacacccctcgccatctcgcccttgctgggggcacgggagtggggggggtgacatgggccctaggcagactgcaagcccgaccgagcacttggactcgaactctgtgccgggag

SEQ ID NO: 41503 - DNA, 796 bp, Homo Sapiens
  misc_feature (365)..(365): n is a, c, g, or t
atgtgtaaattgtacaataatttttttgctgttgtactcactgctaatagtggattgtatagggtggtgtttttatttcatttattgtagacaaaaataatgaatttagtatacacatacccactaattcaagtatgtcagagcacaaagttggcagctggttatatttaattcagcccctctgaaaagcacatacagtctatactttgtttataaataccctaggtcctccctgcccctaaatatatattttggtgaagctgtggtgcactattaattttctgtttcaaaatgcaatctaaagatgcaataaatatgatgaccttgatagttttaatgaaatcttcaattcttgcagctgtgtntcggaaagtgattaagcaatatttctcaaacctgatgattcttggatatttagctattgtcctccaaagagtcatcgtttcacgttttcaaacatgtgcttggtggctgaagattcttgtcagatatcctgtgcttccagagtatttttatcttcaattttatttaattttgtttcattttgttttcataagacaatgtctcagatatgtaatggggcaaaaccactatagatttctgtgggatagaaaaaatgaaatgttactaataagtttaaattgacccttcgtttgactatcagtactgttgatacatttattagaatgtatgtctcagaagatggttctgttaaattatggtcaagttaaacagttgattctagtatggattaaagatcacataattttttccccaaataaaaaaaaaaaaaaag

SEQ ID NO: 41504 - DNA, 611 bp, Homo Sapiens
  misc_feature (542)..(542): n is a, c, g, or t
ctagcaagatatatgggagagccttagaaaaatgcagatcacatcctgaggtgatcggtgtctttggtgagtctgttaaaggctatggggaggtgacaaggcggggtcgccggcagcatgtcaggttcactgaatatgtaaaagatgggctgaaacacacgtgtgtgaaattctacattgagggctctgagccagggaagcaaggaacggtgtatgcgcaagtgaaagagaacccaggaagtggtgaatatgattttcgatatatatttgtagaaattgaatcttatcctagaagaactattatcattgaagataatcgatcccaagatgattaaaatagggtttctgatggatgttgaatggcgtggactcgctactccgttcttcacagctgccttccagaatgtgttcaaaagaaagacaagaaggagtgtatggcttataaagtgaatctaatacagtatttgttgcatttaaacaaactagacattttcttacggatatttctgctttaacaccatctttcatgattagaaatgttntgtattggaaatgttacaccatgtaaataaaggaaatagattttagtattgtattcattctatattata

SEQ ID NO: 41505 - DNA, 540 bp, Homo Sapiens
aggaaattcaactggccttttaatcagcaagatcgccagcaagtactgtaactgtaaaggaaaatctctcctctctggagaacccacacaaaccattgacctgagtgcgcatgacagccactggcttctttttctatgattgaaaatctgccatcgctgactgttggccagtttcaaagggacccattgtatacagggtgcaaatgtattatacggatgtttccttttgtacacttcatttttacaagttttgctactcacaagctttatgtagtggaggatagaggtatttttggtctttagaagcttgtcggggtgagggctgctaacttacacttcagaggcctgtgtcccaaaggcctggctgcgtttgccgtgctgtgcgaggacctgtgtacacaggcaggtgtgcgcctgcccgagcgcgagtagctcttgtgtagtggtgaaatgctgcaggcatctgtttattaaaattgctgctgtgaaagacagggataaaatatccacaatataagaaaaaaaaaaaaaaaaaaaaca

SEQ ID NO: 41506 - DNA, 715 bp, Homo Sapiens
  misc_feature (686)..(686): n is a, c, g, or t
atagggagagcgagagagagactggagacgcacagatccccccaaggtctcccaagcctaccgtcccacagattattgtacagagccccaaaaatcgaaacagaggaaacgaacagcagttgaacatggacgaaggaattcctcatttgcaagagagacagttactggaacatagagattttataggactggactattcctctttgtatatgtgtaaacccaaaaggagcatgaaacgagacgacaccaaggatacctacaaattaccgcacagattaatagaaaagaaaagaagagaccgaattaatgaatgcattgctcagctgaaagatttactgcctgaacatctgaaattgacaactctgggacatctggagaaagctgtagtcttggaattaactttgaaacacttaaaagctttaaccgccttaaccgagcaacagcatcagaagataattgctttacagaatggggagcgatctctgaaatcgcccattcagtccgacttggatgcgttccactcgggatttcaaacatgcgccaaagaagtcttgcaatacctctcccggtttgagagctggacacccagggagccgcggtgtgtccagctgatcaaccacttgcacgccgtggccacccagttcttgcccaccccgcagctgttgactcaacaggtccctctgagncaaggcaccggcgctcccctcggccgccg

SEQ ID NO: 41507 - DNA, 640 bp, Homo Sapiens
ccgattgaatacagagggaagtttatgctgagagaacagtttgaagcaaatgggtatttctttaaaagaccatacccttttgtgttattctactctaaatttcatgggctagaaatgtgtgttgatgcaaggacttttgggaatgaggctcgattcatcaggcggtcttgtacacccaatgcagaggtgaggcatgaaattcaagatggaaccatacatctttatatttattctatacacagtattccaaagggaactgaaattactattgcctttgattttgactatggaaattgtaagtacaaggtggactgtgcatgcctcaaagaaaacccagagtgccctgttctaaaacgtagttctgaatccatggaaaatatcaatagtggttatgagaccagacggaaaaaaggaaaaaaagacaaagatatttcaaaagaaaaagatacacaaaatcagaatattactttggattgtgaaggaacgaccaacaaaatgaagagcccagaaactaaacaaagaaagctttctccactgagactatcagtatcaaataatcaggaaccagattttattgatgatatagaagaaaaaactcctattagtaatgaagtagaaatggaatcagaggagcagattg

SEQ ID NO: 41508 - DNA, 831 bp, Homo Sapiens
gaaccagccacaggagcacagcataagtgacatcctcacgacctcacagactctggaaacagtgcccctaatcccagaggtagtggagcttccaccgtcactgcccaggagctctccttgtgtacatcatcatggttccccaggagtggatttaccagttaccataccagaagtttcttcagtccctgatcagatcagaggagagcccagaggctcatcaggacttgtaaacagcagacagaagagctatgaccactcaaggcaccatcatgggagcagcattgctggaggactggtgaagggggctttgtctgttgctgcctctgcatacaaggccctgtttgctgggccaccagtcactgcacagccaataatttctgaagatcagacagcagccctgatggcccatctctttgaaatgggattctgtgacaggcagctgaacctacggctgctgaagaaacacaattacaatatcctgcaggttgtgacagaacttcttcagttaaacaacaacgactggtacagccaacgctattgaggagtgaccttgtattaaataactgcctgctgctcagagatgatctttattctgtcattggggtatgggatagaagcccttgcttatttttaatctgatgaatctgtatagagcccatcgttgagttaccaagacaatacctgctacagtattttggggagcaaactaaagaccaggaacttaaatgtttcactttagacattggatgaatagtatgaagacaagttttcagttgatctggataaaactattttagtgcattgacagtgtacttcaattcttatagaacc

SEQ ID NO: 41509 - DNA, 844 bp, Homo Sapiens
gtgaacttgctgctcctggaggcgcgcatgcaagccgctctgctgtacgccctccgtgccatcacccgctacatgacctgactcctgagcaggacctgggcccggttcagctccccacaaggacttctctgtctggagacagccccagaccctttgtgtccaatgccgagccctccccgcgctgagtgggcttgtgtgtgatgtgcagtcccgaagccacaccctcccttttcctcactggaatggacagttcattgcactgactctgggatctcagccctgctcctgggagctggaagagcacttggagatcctaagggaccacacccttcctccttcccctgcccacagaggcagagggcacaggaaagaagccgggccaagctcggaattaatgtgccacaagtgttgtggccttcctgaactgggaagtccctggctggcccccgggggagaggggcaaatgcctccgggactgacactccaggcagctttgccttctctcccctgtcatttccagatttcattacctcctacttgccattcacccatcaatgtgaaagtcagggtcacagctggtctgtgtgtccagttccctaaaagcctgttctgttgggcagctgaggctgtggccgaatcctagttcagttttgtgacttccctttgccttttcacttttctcatggttaatggtgtgaggcggtcagggagaaaaggccagtacatgaaccaagaaaaaaggggttattctgggagtggagcctgggggcacatggcttgagaggggggttaaatataacccttatggggataggggccaccgggcccgggggaaggggagggc

SEQ ID NO: 41510 - DNA, 403 bp, Homo Sapiens
gatgaatgaactcaaaagttcgagttgtgctcttcacgttggttcgataatggcctttatttgaaagctttttaatttttctttacagtaaatattccattctgatttcataaattaaacatttatgcctcccttttgtgttgacactgtagctcatactggaaaagtcgatcaatgttttgcagtttattgaaagtagttctatatataacaatgttataagcatttctttagaaatggttgaaaatgcttctaaaatgtgattatcgaccatggtatgcatgatcgttgtaattgttgacattccttttagaagttgtgaaatgttacaacttgtgcttatgtagacacaatcttctgtctcagtacagaggcactgacttcaataaagtctatttatact

SEQ ID NO: 41511 - DNA, 780 bp, Homo Sapiens
tgttgatgtaccaaatcaaggtagtaaacaatccaagatgcagttggaggccatcctgccctgccctatgctctgtgaactgacctagctaggccttgttcctctatctgtgaatgcgtgactcatcgatatgggcgtttgtgttgggcccataccaaccttgtttagtcccacagtgttttgttcgccccacggaggccaagaaagccgcagatgaggccaagatgagatttgcccacatagatggagatcatctgacactgctgaacgtctaccatgcttttaaacaaaatcatgaatcggttcagtggtgttatgacaacttcattaactacaggtccctgatgtccgcagacaatgtacgccagcagctatctcgaattatggacagatttaatttgcctcgtcgaagtactgactttacaagcagggactattatattaatataagaaaagctttggttactgggtattttatgcaggtggcacatttagaacgaacagggcattacttaactgtgaaagataaccaggtggttcagttgcatccctctactgttcttgaccacaaacctgaatgggtgctttataatgagtttgttctaacaacaaagaattacatccggacatgtacagatatcaagccagaatggttggtgaaaattgcccctcaatattatgacatgagcaatttcccacagtgtgaagcaaagagacagttggaccgcatcattgccaaacttcaatccaaggaatattcacagtactgaattcagtgct

SEQ ID NO: 41512 - DNA, 792 bp, Homo Sapiens
  misc_feature (412)..(412): n is a, c, g, or t
  misc_feature (566)..(566): n is a, c, g, or t
  misc_feature (572)..(572): n is a, c, g, or t
  misc_feature (579)..(579): n is a, c, g, or t
  misc_feature (613)..(613): n is a, c, g, or t
  misc_feature (628)..(628): n is a, c, g, or t
  misc_feature (630)..(630): n is a, c, g, or t
  misc_feature (637)..(637): n is a, c, g, or t
  misc_feature (640)..(640): n is a, c, g, or t
  misc_feature (667)..(668): n is a, c, g, or t
  misc_feature (674)..(674): n is a, c, g, or t
  misc_feature (685)..(685): n is a, c, g, or t
  misc_feature (690)..(690): n is a, c, g, or t
  misc_feature (692)..(692): n is a, c, g, or t
  misc_feature (710)..(712): n is a, c, g, or t
  misc_feature (721)..(722): n is a, c, g, or t
  misc_feature (725)..(725): n is a, c, g, or t
  misc_feature (735)..(736): n is a, c, g, or t
  misc_feature (754)..(755): n is a, c, g, or t
  misc_feature (759)..(759): n is a, c, g, or t
  misc_feature (764)..(765): n is a, c, g, or t
  misc_feature (767)..(767): n is a, c, g, or t
  misc_feature (775)..(776): n is a, c, g, or t
agattcggccacaagcgacgcggctagggtcaccgcccgcccttcccggcgcaccccgagcttccacagctggggcagcccctctggcttctaaatccgcggtcgggattcttcctcctgtttagttttttagtttttccttaaaaaaaaacaacacatcgatggactttgcttccctgttcttgaagaatacttgaatgtcggggggcctgggggtgggggcctcggagaccgtctgcctggccctgctgcccctcctgaatctcgtatgatggtcacagtccggtggccgtgggggtgctctgccttccctggtccccactgcccatatctgtggactgccccttccaaagacccctggggggggtggggcattccgcccacccctttcccccatcacttctcgcctgtnagtgattccatgtttcgtaacgggggattctctgcctttttgtatcaaagaacaagcaaatggacccccgcccgctgcagggcccatagccatcgggttctaaagctgagtggctagcagcgtttgtttgtttgtttgttttttttttctgaangtgggnaagtaanttctcctcccttcccaacccctgttggatccaangtgggaacctggaangnacttggnaanaaaccggtaacttgggaaattgaggtnnaagaanccttggaaggngcccntnggggcccaaagggcaaannntcccaaatnnggnttgggggganngggtaaaaaggggaaatnntggnaaaanngnaaacgggnnggttttaaaaaaaaaa

SEQ ID NO: 41513 - DNA, 580 bp, Homo Sapiens
  misc_feature (51)..(51): n is a, c, g, or t
  misc_feature (497)..(497): n is a, c, g, or t
  misc_feature (539)..(539): n is a, c, g, or t
aacttggggagttaagacctggcagctctggacagccccaccctggtggcncaacaaagaacactaactatgcatggtgccccaggaccagctcaggacagatgccacacaaggatagatgctggcccagggccagagcccagctccaaggggaatcagaactcaaatggggccagatccagcctggggtctggagttgatctggaacccagactcagacattggcacctaatccaggcagatccaggactatatttgggcctgctccagacctgatcctggaggcccagttcaccctgatttaggagaagccaggaatttcccaggaccctgaaggggccatgatggcaacagatctggaacctcagcctggccagacacaggccctccctgttccccagagaaaggggagcccactgtcctgggcctgcagaatttgggttctgcctgccagctgcactgatgctgcccctcatctctctgcccaacccttcccncaccttggcaccagacacccaggacttatttaactctgttgnaagtgaataaatctgacccagtgccccatgaccataataga

SEQ ID NO: 41514 - DNA, 641 bp, Homo Sapiens
tccttttgtgtatatagagtgagctgatttgggctcaggaaaacctagtcgcttgttgctctcgtctgtgacatttttgtacactggtttgctactcatggcaagaaacagacaaagccccatgaaaaataaaacaaaacaaaagtcatttcaaacaaagctgttgttttgaaaactcttgctttcttttggtgtccattttgtgttctattttaaagaatctttcatttatattggtgttattgtagtgaagagaatgtgataggctgatctgtaatggtttctgtcaggagcttagcaaatgcctctgcccctcttcccctacccctgtccttcctcagttcccagctgggattgctatgcactgggcagacccgtcactgtctcccctgaacccccacacagtggcttcccttagaaccagtctttgtactctccctaaacagcagcaggcttaggatttttgtcaggctggttcttgcgtgctctgtgcccccaccagtttgctcacctcttggggcattttgtaatgtgttttctctgtcttgtaaaaccttttgattgtaccgaaatggtatctgcagtcgcctttggaaataaatggtcattaatttgtgtaaaaaaaaaaaaaaaaaaaaagg

SEQ ID NO: 41515 - DNA, 727 bp, Homo Sapiens
agtcagtgaaagccctcagctccctgcatggggatgaccaggacagtgaggatgaggttctgaccatcccagaggtgaaagttcactcgggcaggggagctggggcagagagctcccacccagtgagaaacgcacagagcaatgcccttcaggagcgtgaggacgatagggtggggctggtcaggggtgagaaggcgaggaaagggaagtccagctctgcacagcagaagacagtgagctccaccaagctggtgtccttccatgacgacagcgacgaggacctcttacacatctgactccgcagtgcctgcaggggagcacggagccgcgggacagccaagcacctccaaccaaataagacttccactcgatgatgcttctataattttgcctttaacagaaactttcaaaagggaagagtttttgtgatgggggagagggtgaaggaggtcaggccccactccttcctgattgtttacagtcattggaataaggcatggctcagatcggccacagggcggtaccttgtgcccagggttttgccccaagtcctcatttaaaagcataaggccggacgcatctcaaaacagagggctgcattcgaagaaacccttgctgctttagtcccgatagggtatttgaccccgatatattttagcattttaattctctccccctatttattgactttgacaattactcaggtttgagaaaaaaaaaaaaaaaa

SEQ ID NO: 41516 - DNA, 589 bp, Homo Sapiens
cgaatgccaagcttttaattctaataggtaatgttcttcttttgtcttattgaaacaatgagaatactctgtgcatttcaaatgcactccgattatgctgaggttttattcacataagcacaatatgtgttttatttataacttcataacaaacttataatataataatttaccttagcagacatgcaaaagcttattcttgtgtgacttactttctttaagctaataatataaaaataaatatgtatcttaaaaatctataataaaacattagaaattaaagatatgtgctttttattttgcagatgagttcatttgcttctgtagatgtgttttcagagctaggtacagaggaatgtttgctacctttagcggtgaaaaaagaaagagagtcaagaattttgttggattgtgtttgagtgtgcatatatttgatatcatcattatatttgtaatctttggacttgtaatcatagcctgtttattctactgtgccattaaatatactttaccttatacataacgaataaaatacctagatgtagatttatttaaaaaaaaaaaaaaaaattcattggcctgcgtttac

SEQ ID NO: 41517 - DNA, 815 bp, Homo Sapiens
ccaagacatggaacgctgggctaagagtttgaataagcagaaagaaaactttaaaaatagctttcagcctgtcaattccttgagggaagaagaaaggagagaatctgctgcagcagacgctggctttgctctctttgagaagaagggagccttagctgaaaggcagcagctcatcccagaattggtgcgaaatggagatgaggagaatcccctcaaaaggggtctggttgctgcttacagtggtgacagtgacaatgaggaggagctggtggagagacttgagagtgaggaagagaagctagctgactggaagaagatggcctgtctgctctgccggcgccagttcccgaacaaagatgccctagtcaggcaccagcaactctcagaccttcacaagcaaaacatggacatctaccgacgatccaggctgagcgagcaggagctggaagccttggagctaagggagagagagatgaaataccgagaccgagctgcagaaagacgggagaagtacggcattccagaacctccagagcccaagcgcaagaagcagtttgatgccggcactgtgaattacgagcaacccaccaaagatggcattgaccacagtaacattggcaacaagatgctgcaggccatgggctggcgggaaggctctggcttgggacgaaagtgtcaaggcattacggctcccattgaggctcaagttcggctaaagggagctggcctaggagccaaaggcagcgcatatggtttgtcgggcgccgattcctacaaagatgctgtccggaaagccatgtttgcccggttcactg

SEQ ID NO: 41518 - DNA, 1017 bp, Homo Sapiens
cggtgctgtgaaggctggacggtggaggacctgctggggtctcctgggacccgcctgttgcttctgccctcccctgtggaaaggtctatatgacgggccgcctgaggccccagaactcgtctgtgaaccaccttttccagccagagttcccaaagctggaacgctagctgcctgctcttccttaagatggcctccccccgacccgccacggccctcagttgccagggatggggccaccactgtcacactgtggaatacaagacagtgaactctgtctgcctgaacgagtcatgtaaattaagttctagagcagctctctgagcaggataaggtcccctgacagtgagttgtgtggtgggggcagcctctgcctcaaaaattcaccaagcagaatgcctctcagcctcatgtgttggtcctctgctcctcctagctccccagggatgttggggacccagcttgtctcggcagctaagaagcagtgaccaggatgtggattttggcgacctgtgtggtggccttgagctgctttctgtgtttgtgaggactgactcccatttcctaaaggaaatgcccccggggaggacattgggaggaagatggcctgagtgtgcactttggctctgctacctgctcctgaagccccgctaaaaataattcatccaagattcctttgtagttaaagggtccagttctgactggagcctctagagagctgggcttgtatgttcttttggccttttgttcctacctaaatgaagaaaccatgcctggaggggccgtgaacacagaaccctcaagacaaggatgacagagctggaggacacatctagctgccattgcaacctcactgggctcccagactctgtgtgtgagaaattaaacccctgcttgcttgagtcccgtttgttagatctctattcyttgcagattgtgttytgamcccaccgcccaacctcgkgkatcgatmwkraggcamgkgagtaaaaaacgatttsagggcgkaaaraatgtbgc

SEQ ID NO: 41519 - DNA, 783 bp, Homo Sapiens
ttcccgggatcgacctcccggccaccccggccctgtgcctgctcggaagarctcactgccagctgcggcctgggcaccgcgggccatgtgtgtttgcatgaggaactctttagtggcagacacctaagagacggctgcggtcaccccacgcctccgcggctcaggagccgtcctgggtgcataggaccagtttctgtgacttttctccagttgggcatgttgacagacatgtttcccctcctcccaccctcattttctggtcctcgcgactkagagccaggggcgacatcatgaccttctgtcccggccgccttagccccgggcacagggaaggcagctgggccgtttctgtytgtgtcccatcctgctgtccttctgtyctggatgtttcatgggcccggggccccccagggaagcttacccctcctgtgctgggtggaggccacgggacacctcaggtgccacccaccttggccctaaaacagccaccaggaaagcagccggagagccggacagcaggcagcctgtytgggttcctgaggcctgggggtggcagacgagcccacggcgccgtggtcccagcagcagggttgtcagtcggagcatcctggggctccctggctcctggccgtctgtgaggtaggcgcagtaccgtgtatcgtaggtagcagtaggaacgggggccgccgcggccctgcagccgctcatggcggtgaggtgtgtgccaagcccacccggggtgcagggcgtgacgtgtggggaataaataggcgttgtgacctc

SEQ ID NO: 41520 - DNA, 852 bp, Homo Sapiens
aactttctaagtcattttgcttagaaattcagtgtggcccataccctttgtcctcccagcctggcatccaggcagggacaccctcacaccaccagccccagggagcttccctgctataaacacagacccccttgtctttgcctctgatttttacacagtgtagagtggccagcagtgaacaggttgaggatgtgcgggtagatagataactttgggtctggtttgtgtctgtgttcatgtttgtttaagggatatgtgtgactgtgggtggggacgtgtgcttgtggggcacaggtggcggcccctgctggagcccggctgggcgcagcgcctatgtaggacgggtgttctcagtgacctacctcccaggctcctctgcacctgcaaaggaacaggagtgagtcgtgactgacaggggtggttgagactagactaggtagagtagttaccaggagatgtgaatgtgcgtcaggtgatggatgggtttgtcaagggaatcgttaccgttttataccaaaggtattaacatgggcagcctttgacacatgtattccaaaaacgagtttatattttcaaacggtttttacagcttagactttgtacttactgccctgcctgtgacagttgtatgccttcattttgtatccaacagcaaagtctacaataaaactttaaaacaatcatgactgaatgtcaaaatcgtgtattgggcagatgctttttaaactgtcgtgtgagaaacttttatattaggccatttggattttattaagtgctaaggaaagagggcttacaaaatgtttcgtaaatattttatactgtttaagtgttaaacaccaaccctgtctttct

SEQ ID NO: 41521 - DNA, 954 bp, Homo Sapiens
gctgatccccccacgaggggaggtgaacgcggccgacgccttcgacattggctccttcgatgaggaggacacaaaaggaatcaagttactggacagtgatcaggagctctaccgcaacttccccctcaccatctcggagcggtggcagcaggaggtggcagagactgtcttcgacaccatcaacgctgagacagaccggctggaggctcgcaagaaagccaagaacaagcagctgggccatgaggaagactacgccctgggcaaggactgcatcatgcatggctacatgtccaagatgggcaaccccttcctgacccagtggcagcggcggtacttctacctgttccccaaccgcctcgagtggcggggcgagggcgaggccccgcagagcctgctgaccatggaggagatccagtcggtggaggagacgcagatcaaggagcgcaagtgcctgctcctcaagatccgcggtgggaaacagttcattttgcagtgcgatagcgaccctgagctggtgcagtggaagaaggagctgcgcgacgcctaccgcgaggcccagcagctggtgcagcgggtgcccaagatgaagaacaagccgcgctcgcccgtggtggagctgagcaaggtgccgctggtccagcgcggcagtgccaacggcctctgacccgcccacccgccttttataaacctctaatttattttggccgaatttttattatttgtttttccgccaaccggaaaaaggtgttattctggaaattattgggagtttcccgtgggcccagccttgggccccgttccccccgggaaggggccccgcttggcctcgcggctcctgggtgcacccaccctaggcccgctgcccggggggcccctctggtgactggaattatagggggcttgcccccgcccccccgcggtgccttccccgggggggcgcccacacagccaaac

SEQ ID NO: 41522 - DNA, 627 bp, Homo Sapiens
ggcactggcttactcgggtgctcttaccttctagtcacttgccccatgggaatggaatgagctgggagccccctccctgggtgactgctcactcagcctctgtgatggcagtgtgagctggactgtgtcagccacgactcgagcactcattctgctccctatgttatttcaagggcctccaagggcagcttttctcagaatccttgatcaaaaagagccagtgggcctgccttagggtaccatgcaggacaattcaaggaccagcctttttaccactgcagaagaaagacacaatgtggagaaatcttaggactgacatccctttactcaggcaaacagaagttccaaccccagactaggggtcaggcagctagctacctaccttgcccagtgctgacccggacctcctccaggatacagcactggagttggccaccacctcttctacttgctgtctgaaaaaacacctgactagtacagctgagatcttggcttctcaacagggcaaagataccaggcctgctgctgaggtcactgccacttctcacatgctgcttaagggagcacaaataaaggtattcgatttttaaagataacaaaaaaaaaagaaaaaaaaaaaaaaaaggg

SEQ ID NO: 41523 - DNA, 690 bp, Homo Sapiens
  misc_feature (648)..(648): n is a, c, g, or t
  misc_feature (668)..(668): n is a, c, g, or t
  misc_feature (677)..(677): n is a, c, g, or t
  misc_feature (685)..(685): n is a, c, g, or t
  misc_feature (688)..(688): n is a, c, g, or t
ccgtatcaggagactgaaagttcatactaatttacaaactttgtaaagactggtgctgttcattcatattgggaagaaccctttcttttgtgaccctaggaccatttttcaaaatgcgctttcttcgtagaagaaatgttcagtttaattagctttggattttaacatgtttttctgaatgaccagatgtaggcttagccagtttattttctctaatttaatggataataaatattaagctcttggttaaatgtttttcagccattgaaaatgttatgaaaaagccttgaatatgcatgctgctttcatttttataaactttttattttttaactatagctttattagtaattccaaaatgctgcaatgtagctgatttcctcactcagacagctggctttgtgggtggcttttttcatactactgttaacttttttaaaaaagaagcaatgtaaagaccgtaatgcactaagctttttttttttcttttacacgtttaaaaacttcttaaagcactctgtaatataatgattaaattgctcccttttataaacattgctaatgtggtctgagttttgtttgacaataattttaatgttctcaaaatttgaaatgtcaagtattagaaatgaagcctttgaatatagntgtttccccttgcaatatgntaactctgngtagctgnatnta

SEQ ID NO: 41524 - DNA, 726 bp, Homo Sapiens
  misc_feature (723)..(723): n is a, c, g, or t
  misc_feature (726)..(726): n is a, c, g, or t
cctctgcacaaagcccagtcctccggcccagaacatcctggcccggagtcctccctgccctcaggggctctcagcaagtcagctcctgggtccttctggcacattcaggcagatcatgcataccaggctctgccatccttccagatcccagtctcaccacacatctacaccagtgtcagctgggctgctgccccctccgccgcctgctctctctctccggtccggagccggtcgctaagcttcagcgagccccagcagccagcacctgcgatgaaatctcatctgatcgtcacttctccaccccgggcccagagtggtgccaggaaagcccgaggggaggctaagaagtgccgcaaggtgtatggcatcgagcaccgggaccagtggtgcacggcctgccggtggaagaaggcctgccagcgctttctggactgagctgtgctgcaggttctactctgttcctggccctgccggcagccactgacaagaggccagtgtgtcaccagccctcagcagaaaccgaaagagaaagaacggaaacacggagtttgggctctgttggctaaggtgtaacacttaaagcaattttctcccattgtgcgaacattttattttttaaaaaaaagaaacaaaaatatttttccccctaaaataggagagagccaaaactgaccaaggctattcagcagtgaaccagtgaccaaagaattaattacccttcgnttn

SEQ ID NO: 41525 - DNA, 449 bp, Homo Sapiens
aagggttagtattaacaaatggcaatgagtagaaaagttaacatgaagattttagaaggagagaacttacaggacacagatttgtgattctttgactgtgacactattggatgtgattctaaaagcttttattgagcattgtcaaatttgtaagcttcatagggatggacatcatatctataatgcccttctatatgtgctaccatagatgtgacatttttgaccttaatatcgtctttgaaaatgttaaattgagaaacctgttaacttacattttatgaattggcacattgtattacttactgcaagagatatttcattttcagcacagtgcaaaagttctttaaaatgcatatgtctttttttctaattccgttttgttttaaagcacattttaaatgtagttttctcatttagtaaaagttgtctaattgatatgaaaaaaaaaa

SEQ ID NO: 41526 - DNA, 547 bp, Homo Sapiens
gggattacaggagtgagccaccatgcccggctggcagttgcatggaagagaacacctctttatggcttaccctctagaatttctaatttatgtgttctgttgaaatttttgtttttttacctttattgaaacaacaaaaagtcagtattgaaacatatcttcctgttttctgttgtcaaatgatgataatgtgccatgatgttttatatatatcattcagaaaaagttttattttttaataacattctattaacattattttgcttgccgctggcatgcctgaggaatgtatttggctttgattacacactaagtttttgtaataaatttgactcattaaaaaccttttttttttaaaaaaaaaaaaaagaaaatctcattagtgaacttatctttgcagctgagtacttaaattctttttaaaaagataccctttggattgatcacattgtttgacccagtatgtcttgtagacacgttagttataatcaccttgtatctctaaatatggtgtgatatgaaccagtccattcacattggaaaaact

SEQ ID NO: 41527 - DNA, 804 bp, Homo Sapiens
agaatactgtttataatgatgggcagtcttcggccattcctgtagccagtatggagtttgcagccatatgtctcagaaatgccttgttgctgctacctgaagaacagcaagatccaaagcaggaaaatggggctaaaaatagtaatcaattaggtgggaacacagagagcagcgaaagcagtgaaacttgcagcagtaaaagccatgatggagataaattcattccagctccaccttcttctccattgagaaaacaggaattagaaaacttaaagtgctccatacttgcttgcagtgcctacgtggctctggctttgggtgataacctcatggctttgaatcatgcagataaacttcttcagcagcccaagctgtcaggatctcttaagtttttgggacatttatatgctgcagaagccctcatctctctcgacagaatatctgatgccattactcacttgaacccggagaatgtcactgatgtctccttagggatctcttcaaatgagcaggaccaaggatcagacaaaggtgaaaatgaagcaatggaatcctctggtaagcgggcccctcagtgctaccccagttccgtcaactctgccaggactgtgatgctgttcaaccttggcagcgcttactgcctgaggagcgaatatgacaaagcccgaaagtgtctccaccaggcggcttcaatgatccatcctaaagaggtgccccctgaggccatcttgctggcagtctaccttgaactgcagaatggtaatactcagctggccttacagatcatcaaaaggaatcagctgc

SEQ ID NO: 41528 - DNA, 705 bp, Homo Sapiens
cactgagtcctggagctatagatggtcatgacagtgtggtagacaatgtctccagccctgaaaccttgttatttttagtggcatgcaggctatacctcagtattgtggacatgcacccaggaatatgtacagtcacaagattactcatcaggaccaatgagaccctttgcacagcatccttggaggggattcgcaagtggcagccctgttgattaatctctacatcattttaacagctggtatggccttaccttgggtgaactaaccaaataatgaccatcgatggctcaaagagtggcttgaatatatcccatgggttatctgtatggactgactgggttattgaaaggactagccacatactagcatcttagtgcctttatctgtctttatgtcttggggtaggggtaggtagataccaaatgaaacactttcaggaccttccttcctcttgcagttgttctttaatctcctttactagaggagataaatatttgcatataatgaagaaatttttctagtatataacgcaggccttttattttctaaaatgatgatagtataaaaaatgttaggataacagaatgattttagattttccagagaatatgataaagtgctttaggtatgaaaataaaatcatctttgtctgaaaaaaaaaagaaaaagaaaaaaaaaacaaagggggggggggaaaaaaaagcc

SEQ ID NO: 41529 - DNA, 605 bp, Homo Sapiens
ggcacgagggccgctccaccattttttttttttgtttacagtgctacacttagtgtgagtcaagaagtgcttgagttacagaaacttcttattcaggtttgagtaagcattttacttccatgtgtacttttaaataatccataccttgaagaagttggccaatgatattatatacatgctgatctgattgttcttttcattccttgagtcaacttcagggtcttggatactaaagagaaggagaactgtggttaatgttttggatcatcatttgtgaacaaggccagactttgcccattttaggctatccaggacttaaggtagccatctggatcataagaaggtcctgcagttgagacaaaatgacccaagtgtattttccacaagttttgatcctgtgtaatatttctttttccttccctagtgtatgtagatacaaggcatggaatgcagttccactttctccccagagttgatctttttgtgattgctttcccgtctctagtagtattctgttgtgtctagagaactgattttttcctacatacgcaaattgtacatttgtaagtgaaaatgtcaatacattaaagcattaaccttaaaaa

SEQ ID NO: 41530 - DNA, 648 bp, Homo Sapiens
gctactggtgccactggctgagccgggggtgtgggtagctgaggcagaggatgagccactgcttacctgaggggacctgggggctctactgaggcctctcccctgggggctctactcatagtggcacaaccttttagaggtgggtcagcctcccctccaccacttccttccctgtccctggatttcagggacttggtgggcctcccgttgaccctatgtagctgctataaagttaagtgtccctcaggcagggagagggctcacagagtctcctctgtacgtggccatggccagacaccccagtcccttcaccaccacctgctccccacgccaccaccatttgggtggctgtttttaaaaagtaaagttcttagaggatcataggtctggacactccatccttgccaaacctctacccaaaagtggccttaagcaccggaatgccaattaactagagaccctccagcccccaaggggaggatttgggcagaacctgaggttttgccatccacaatccctcctacagggcctggctcacaaaaagagtgcaacaaatgcttctattccatagctacggcattgctcagtaagttgaggtcaaaaataaaggaatcatacatctcaaaaaaaaaaaaaaaaaaaaaggac

SEQ ID NO: 41531 - DNA, 748 bp, Homo Sapiens
cacttgctgtttccagccgctgaatctgctgagtgtgcagcctgcatcacctgctgtatgccgatcatctcagaaagggctgtgtagagtagggccctgttctccttaggatgttgcttcttcattttttttttttttaggggtgggtcagggttgtgacacaccagcccaggtgagagctgctgcgggtcacctcatatttatttatcccttcttgcctgtgaggactgcggcttttcgctgtggctcgtccttaacgtttctgaaccaccttggtgccctgagcaggaagatgtgccacttcctagcaggcgcaaggcctgtgcggaagaaacgccgctccctgccaccagggctgaagatgcgagcccgtcctcatgacgcaggcgccaccctgctgccggagccgggcttcggcagtcttctccactgagggactgggctgggaagtcctgcgtttcagtggagcgtatgagcgtcaagtcctgctttctcagtagccccattgcggggccccaccattcatcctgtctgaaggtcctgggtttggtgtgaccgcttggcggctggtgggtggggttttcaagtgggtgacggcgctctccggcagccggggatggccgtgtccgcactgaccaggcctgtggagagtgctcggcctaaccttagaacacatttgtaactgaatacagtgttttcaatttgtacagaatagttagaatattctattaaagtggtgaaacattga

SEQ ID NO: 41532 - DNA, 534 bp, Homo Sapiens
cgtccggtaagcttttaagaaaaacaaagttttaaacgaaatactgctctgtccagaggctttaaaactggtgcaattacagcaaaaagggattctgtagctttaacttgtaaaccacatcttttttgcactttttttataagcaaaaacgtgccgtttaaaccactggatctatctaaatgccgatttgagttcgcgacactatgtactgcgtttttcattcttgtatttgactatttaatcctttctacttgtcgctaaatataattgttttagtcttatggcatgatgatagcatatgtgttcaggtttatagctgttgtgtttaaaaattgaaaaaagtggaaaacatctttgtacatttaagtctgtattataataagcaaaaagattgtgtgtatgtatgtttaatataacatgacaggcactaggacgtctgcctttttaaggcagttccgttaagggtttttgtttttaaacttttttttgccatccatcctgtgcaatatgccgtgtagaatatttgtcttaaaa

SEQ ID NO: 41533 - DNA, 638 bp, Homo Sapiens
  misc_feature (607)..(612): n is a, c, g, or t
  misc_feature (615)..(619): n is a, c, g, or t
  misc_feature (628)..(628): n is a, c, g, or t
  misc_feature (634)..(634): n is a, c, g, or t
ccccagcaagaaggcgagttagttttctagagacttgaaggagtctcccccttcctgcatcaccaccttggttttgttttattttgcttcttggtcaagaaaggaggggagaacccagcgcacccctccccccctttttttaaacgcgtgatgaagacagaaggctccggggtgacgaatttggccgatggcagatgttttgggggaacgccgggactgagagactccacgcaggcgaattcccgtttggggcttttttttcctccctcttttccccttgccccctctgcagccggaggaggagatgttgaggggaggaggccagccagtgtgaccggcgctaggaaatgacccgagaaccccgttggaagcgcagcagcgggagctaggggcgggggcggaggaggacacgaactggaagggggttcacggtcaaactgaaatggatttgcacgttggggagctggcggcggcggctgctgggcctccgccttcttttctacgtgaaatcagtgaggtgagacttcccagaccccggaggcgtggaggagaggagactgtttgatgtggtacaggggcagtcagtggagggcgagtggtttcggannnnnnccnnnnncccctcccncccccnaaag

SEQ ID NO: 41534 - DNA, 757 bp, Homo Sapiens
ggactctgtgtttctttcatgcagcgaggacaatagaattttactctgggatacccgctgtcccaagccagcatcacagattggctgcagtgcgcctggctaccttcctacctcgctggcttggcatcctcagcaaagtgaagtctttgtctttggtgatgagaatgggacagtctcccttgtggacaccaagagtacaagctgtgtcctgagctcagctgtacactcccagtgtgtcactgggctggtgttctccccacacagtgttcccttcctggcctctctcagtgaagactgctcacttgctgtgctggactcaagcctttctgagttgtttagaagccaagcccacagagactttgtgagagatgcgacttggtccccgctcaatcactccctgcttaccacagtgggctgggaccatcaggtcgtccaccacgttgtgcccacagaacctctcccagcccctggacctgcaagtgttactgagtagattggatttaagacaaaaagcaagtcccccatgagtgtccacttctttgccctgccctctcagcttgtgagacaacacaggagccttctatagtatgttgatatgctagatctgtgccgttaataggcatcgtctctcagcctgagggaggctggattctgggttcctgtagtcacagggaggaaaagctttcttaaaaatggacatgtatgtgcgtgtgagtgtgtgtgtagatttatagtttttggtagtggcaggaataaa

SEQ ID NO: 41535 - DNA, 758 bp, Homo Sapiens
  misc_feature (578)..(643): n is a, c, g, or t
  misc_feature (646)..(653): n is a, c, g, or t
  misc_feature (656)..(675): n is a, c, g, or t
  misc_feature (686)..(686): n is a, c, g, or t
gggggcatccctgggttcttggaagcagctcttatgctactcatagagatgggattgactttatttttttatagtgcttaattcaccattatgagaaatgcttccagtcacaaaaatgcagcccagctcactctgaggaagaagcaggacttggtacggttttacacaactccttaccattaaactgaatcagaaatccattttctggctgaataaaaagtttggcttgcctgtgtaatgcccactcccttccccctggctccctagtgatgggacatatatgagagagaagtgtttttctatcatagacaccataggggaaagtttggggatgaaggagagcttaaaggtgtttcaattaagttagaaaactgacacaggctgttgagaattctttgccacttttcccaccccaaaacagcatggggcctgacatcttctgccctggtcccctttctcttgatgtggaaagtctgaatgcagtatttatagacttctaaggttttaaaatccagtatcaagaagaaaatcagaaatactggttggtgaaataaagagtttaggcattgttaaaaaannnnnnnnnnnnnnnnnnnnnnnnnnnnnnnnnnnnnnnnnnnnnnnnnnnnnnnnnnnnnnnnnnttnnnnnnnnaannnnnnnnnnnnnnnnnnnnaaaatttgtgnggggcggcccctgggcccctccagaaaaattttttttaaaacacattttcctttttgggggcgccgcggggc

SEQ ID NO: 41536 - DNA, 500 bp, Homo Sapiens
ccggaagagagggagaagacagttctgcagtctaccaatcgaaaactggagcggaaagttaaagaactatccatccagattgaagacgagcggcagcatgtcaatgaccagaaagaccagctaagcctgagggtgaaggctttgaagcgtcaggtggatgaagcagaagaggaaattgagcgactggacggcctgaggaagaaggcccagcgtgaggtggaggagcagcatgaggtcaatgaacagctccaggcccggatcaagtctctggagaaggactcctggcgcaaagcttcccgctcagctgctgagtcagctctcaaaaacgaagggctgagctcagatgaggaattcgacagtgtctacgatccctcgtccattgcatcactgcttacggagagcaacctacagaccagctcctgttagctcgtggtcctcaaggactcagaaaccaggctcgaggcctatcccagcaagtgctgctctgctctgcccaccct

SEQ ID NO: 41537 - DNA, 780 bp, Homo Sapiens
agcacagaaaactgtaattcctggaacctgctgcgtaaaaccataaaggagtgtgttaccagtagtttggagggcatttttaaatttattttcaaaattttaagttaaaagtcagtcttacagcttggatgtttggatgtggatgtttggctgaatttatatatagtgtgtactcatcaataccacattctttgttgtattcaagaaccgttaagagtgtgctaattccctgtaggtacataatgaggaaaatttgctccactacaaccattaaaaaataattttggccagatacggtagctcgtgcctgtaataccaacattttgggaggccaaggcagaaggatattgaggctaggcattcaagaccagcctaggcaggataataagaccttgtctctatttaaaaaacaaaaagcctagcatggtagtccatgcctgtagtcccagctgttcgagaggctgaggcaagaagatcacttgagcctaggaatttgatgttacagtgaggtatgatcatgccactgcactccaacctgggcaacagaatgagaccctgtctctaaaaaattttttttaaataaataatttaactcttctaataatgttttgttgcaggaaatgtatttcagataaaatatggatttgaaaaacagaaaatatactttatgttctgaaatttgtatttaagtataaaatgtgaatcatcttgtctaaatagcttacagcatagttggcttaaatgaaaataaaatgatatgcttataaaaaaaaaaaaaaa

SEQ ID NO: 41538 - DNA, 874 bp, Homo Sapiens
cttcgccactacatcgacaaggtgcgcttcctggagcagcagaataagatcctgctggccgagctcgagcagctcaagggccaaggcaagtcgcgcctgggggacctctacgaggaggagatgcgggagctgcgccggcaggtggaccagctaaccaacgacaaagcccgcgtcgaggtggagcgcgacaacctggccgaggacatcatgcgcctccgggagaaattgcaggaggagatgcttcagagagaggaagccgaaaacaccctgcaatctttcagacaggatgttgacaatgcgtctctggcacgtcttgaccttgaacgcaaagtggaatctttgcaagaagagattgcctttttgaagaaactccacgaagaggaaatccaggagctgcaggctcagattcaggaacagcatgtccaaatcgatgtggatgtttccaagcctgacctcacggctgccctgcgtgacgtacgtcagcaatatgaaagtgtggctgccaagaacctgcaggaggcagaagaatggtacaaatccaagtttgctgacctctctgaggctgccaaccggaacaatgacgccctgcgccaggcaaagcaggagtccactgagtaccggagacaggtgcagtccctcacctgtgaagtggatgcccttaaaggaaccaatgagtccctggaacgccagatgcgtgaaatggaagagaactttgccgttgaagctgctaactaccaagacactattggccgcctgcaggatgagattcagaatatgaaggaggaaatggctcgtcaccttcgtgaataccaagacctgctcaatgttaagatggcccttgacattgagattgccacctacaggaagctgctgg

SEQ ID NO: 41539 - DNA, 577 bp, Homo Sapiens
cactgttggcctctggatttttcctaattttgtttatcacgttttgcacaaagcagagccactgtctaacacagctgttaacgaatgataaactgacattatactctaaaagatggtgtatttgtgcattagatttgcctgaaaaactttatccatttccattctttatacaaataccatgtaatgtgtacatatttaactaaagagatttatagtcataattattttattgtaaagattttaactaaagtttttccttttctctcaaactgagttctgaaatttatttgattctgatctgaaactattgtcttcgtaaaagttagatctgacttcagacagaaaccaataccagcttccttttcctttaaactttgaagagtgttgatttgttactatattactatgcaaaactggcagttatttttataatataaatttataatttgattttttattttaaaaactgggttaatcaagtctcggtaagtcctttaaaccatttaggatttttaaaacatcaaaatttatgatttacattcataggaataaaataaaatattattagaactctggt

SEQ ID NO: 41540 - DNA, 632 bp, Homo Sapiens
aagcaagaagagatgtgttgaagccaaaatggtacaccgatatttaagaaggaaagcgaatccaaacggtgtgatctaaagaatcaataagcctcaagccttatgtttctccaatgttacgctcgcttgcctagctttacgaatattgcttgttttctgtttatgcatagccttgatttgtttgactcccctccccccatttacatgcatgcaatcagacaggccactaaggtaaaagagtctgctctatcatagtgttgagagcgtgtgtagtgctgcatcttatgacaaggggacagacaagctgggacgtcagggaaatgaacaaaagggacgcaggttatttggggtgagtgggtggtgggagcctggagcaaggtggagggtgcagaggggctggggtagggcatgtaggagggaggtgggtgggtcaggtgagtggaaggggtgtgtatattgtgttgatgacgtacgttatatccatggaagatagccgctgtggcaagctgtcacatcaccacagctccctagggtctgccgagaaggcaggcagtcttgggttctgttctttgtcacgtcccctacaagtaaatttgtttctttgaacgtttattaaaatgccaagaccaaaa

SEQ ID NO: 41541 - DNA, 531 bp, Homo Sapiens
ggcaatccatcccggttctctctgagggccacgggcttgggtagtggaaagggtgtttgggaaattgttaaatcagttacccgtagtagagctatttcttgtacttctaagttttctagaagtggaaggattgtagtcatcctgaaaatgggtttacttcaaaatccctcagccttgttcttcacgactgtctatactgagagtgtcatgtttccacaaagggctgacacctgagcctggattttcactcatccctgagaagccctttccagtagggtgggcaattcccaacttccttgccacaagcttcccaggctttctcccctggaaaactccagcttgagtcccagatacactcatgggctgccctgggcagccagcattcattgtaagttccctctttgaaaactggtgtgtgggtgttcagttctgtgtctggtgggtatggacagacagtaatctcctgtgatctgtgctagctgtgaggcagctctggaacgtgaagagctgtttggtttgaaccgtgaacaa

SEQ ID NO: 41542 - DNA, 616 bp, Homo Sapiens
  misc_feature (616)..(616): n is a, c, g, or t
gggccctgcacctgtgcagcgaagcttagcgttcatccgtgtaacccgctcatcactggatgaagattctcctgtgctagatgtgcaaatgcaagctagtggcttcaaaatagagaatcccactttctatagcagattgtgtaacaattttaatgctatttccccaggggaaaatgaaggttaggatttaacagtcatttaaaaaaaaaatttgttttgacggatgattggattattcatttaaaatgattagaaggcaagtttctagctagaaatatgattttatttgacaaaatttgttgaaattatgtatgtttacatatcacctcatggcctattatattaaaatatggctataaatatataaaaagaaaagataaagatgatctactcagaaatttttatttttctaaggttctcataggaaaagtacatttaatacagcagtgtcatcagaagataacttgagcaccgtcatggcttaatgtttattcctgataataattgatcaaattcatttttttcactggagttacattaatgttaattcagcactgatttcacaacagatcaatttgtaattgcttacatttttacaataaataatctgtacgtn

SEQ ID NO: 41543 - DNA, 582 bp, Homo Sapiens
  misc_feature (574)..(574): n is a, c, g, or t
tagatcccaggtaaacatattcttttctgagaggataaatacctgcattcagatattccaggtaaatataattgagtcagggagtagtaaatctgatggagaattcactttggggaggggaaaaagaatagtatgcaagacccttattggcttttaattatacctgaaaccaaaatggatatttttagtctctctgcatgtgagatttggtgtaacaagatagaactataatatatacagtatatggaaggatagatatagtgctttgttcattttaattgcaaagctgccaaaatagttgaagcttaattacttgacttgccttgatttataggactggggcttggagaaaatgagcagatgttcctctaagacatcgattacagaagccttatatacatggatttgattttgtatttgtagctgaaagtcactgttgtctaaaactaacttttctaagttatcaaaacaacctaatttcttttccaacaaggagaacttaatggcatgaaggattgtgtgacacattggaaaagccagcttactgccactctcttcctttggccatagaggnaagggtgt

SEQ ID NO: 41544 - DNA, 620 bp, Homo Sapiens
ttttttttttttttttatgaatctacctttccattgattgatttaagttcaggccacttttctgtcttttatttggttactgttgttatttgtttttaagttaggatgctttttaacagcctttagaagccgctgctgaaattgatactgggggaagggttccccttccttctagagcagaaaagggagagaggtgttgtattcctgtttggtaacctcagtctcctgtaagacctcctaccacatggcgagtatacaccaatcaggagagggtagctgcctgcataggagcctcgcttccgattattcccttcccaatattattcatccagacttagccacagtgcacaaaagcaaacctgctagagaggcagtgaacaccacagcttctccccagctaggtgccttttacatcgggtttgttctccttccatggtgtgttgctgacattgtcactgagtcccatgtgaggtgctggtgagtattacctttcatctgtgccatgctctagaaccttgaccttgatagttcaccacctctgatggatccctgttttaaataaaaacgattcactttaaagcctaaaaaaaaaaaaaaaaaagcaatgatctgcctcgtgc

SEQ ID NO: 41545 - DNA, 576 bp, Homo Sapiens
agcgaggcaagatggagttagtgcaggtcctgaaacgcgggctgcagcagatcaccggccacggcggtctccgaggctatctacgggtttttttcaggacaaatgatgcgaaggttggtacattagtgggggaagacaaatatggaaacaaatactatgaagacaacaagcaattttttggccgtcaccgatgggttgtatatactactgaaatgaatggcaaaaacacattctgggatgtggatggaagcatggtgcctcctgaatggcatcgttggcttcacagtatgactgatgatcctccaacaacaaaaccacttactgctcgtaaattcatttggacgaaccataaattcaacgtgactggcaccccagaacaatatgtaccttattctaccactagaaagaagattcaggagtggatcccaccttcaacaccttacaagtaaagacaatgaagaacagttgaaacatgcaaaatatggagcttttcatgtaattactcttttactgtttaccattcactataattcacaattaaaaattgtgtgactaaaaaaaaaaaaaaaggccaca

SEQ ID NO: 41546 - DNA, 582 bp, Homo Sapiens
tggactgcatttaaatttgatttccatcttaatgttactcagatataagagaagtctcattcgcctttgtcttgtacttctgtgttcattttttttttttttttttggctagagtttccactatcccaatcaaagaattacagtacacatccccagaatccataaatgtgttcctggcccactctgtaatagttcagtagaattaccattaattacatacagattttacctatccacaatagtcagaaaacaacttggcatttctatactttacaggaaaaaaaattctgttgttccattttatgcagaagcatattttgctggtttgaaagattatgatgcatacagttttctagcaattttctttgtttctttttacagcattgtctttgctgtactcttgctgatggctgctagattttaatttatttgtttccctacttgataatattagtgattctgatttcagtttttcatttgttttgcttttgtttttttcctcatgtaacattggtgaaggatccaggaatatgacacaaaggtggaataaacattaattttgtgcaaaaaaaaaaaaaaaaa

SEQ ID NO: 41547 - DNA, 584 bp, Homo Sapiens
caagcgctttgtaatggaggtagaagtagatggacagaaattcagaggcgcaggtccaaataagaaagtggcaaaggcgagtgcagctttagctgccttggagaaactgttttctggacccaatgcggcaaataataagaaaaagaagattatccctcaggcaaagggcgttgtgaatacagctgtgtctgcagcagtccaagctgttcggggcagaggaagaggaactctaacaaggggagcttttgttggggcgacagctgctcctggctacatagctccaggctatggaacaccatatggttacagcacagctgcccctgcctatggtttacccaagagaatggttctgttacccgttatgaaatttccaacatatcctgttccccactactcattcttttagcaaatgacagaagctaattcctattgaacaacaatacagtacaacacagaatgttagagaaaaagcctttttatcctgctttctttgaacacatacttgatcaaaattatttgtaaagaacatctttcctactttttgattttaacaaatgcaaatttagttctctaaaacttgaaaa

SEQ ID NO: 41548 - DNA, 700 bp, Homo Sapiens
  misc_feature (483)..(483): n is a, c, g, or t
  misc_feature (604)..(604): n is a, c, g, or t
  misc_feature (613)..(613): n is a, c, g, or t
  misc_feature (680)..(680): n is a, c, g, or t
  misc_feature (689)..(689): n is a, c, g, or t
ctagcttgattattatgtttattacaatttttaataaattgaataggtagtactcatatatatggaattaaattgatgtggctatctttgtcttttttataaagtaaggcacagtcattcagtcttaggtaaataatgtactctcttaatatgttaatactcatgagaattgggatctgatgcatcaccatttgattggtagcaacagtggttgtaaaacttggttgctgaattgagttgtttctatgttaagtgtcaaaatgatagtgtagggaaagtacaggtggtggggacatatgcattaagaatcttgttagtgttgcaatctaaatagaatggaataaacaggtgttaagacatatttatagtggtaaattgttgtagtatggtattctgtaaacttgaaaacttgatctactctttgtaggtatcatttgaaagcaaacttgaaaatgttttgtacatagtacatacttgtatagncctgtgagatgaagtatggctatcagaccaaaggataagccaaactgtaggtagcagaatggaaattattattttgagaggaaaatttgtctttgaatggtgattatgacttaatcatttnaaaactganaaacttgacaaaaaccctgtatgaaataaacatgaaattaatagcacctgatttcattgtaaaattntaaagcagnttaaagggtac

SEQ ID NO: 41549 - DNA, 769 bp, Homo Sapiens
cccacgcgtccgcggacgcgtgggcggagaagtttgaccacctagaggagcacctggagaagttcgtggagaacattcggcagctcggcatcatcgtcagtgacttccagcccagcagccaggccgggctcaaccaaaagctgaattttattgttactggcttacaggatattgacaagtgcagacagcagcttcatgatattactgtaccgttagaagtttttgaatatatagatcaaggtcgaaatccccagctctacaccaaagagtgcctggagagggctctagctaaaaatgagcaagttaaaggcaagatcgacaccatgaagaaatttaaaagcctgttgattcaagaactttctaaagtatttccggaagacatggctaagtatcgaagcatccggggggaggatcacccgccttcttaaccagctcaccctccctgtgtgaagatcccctgggactgcgatgcggcgtgaggctgggactgcgagtgctgacgccaccttcctgctgaggtgggactgggccctggacacacccctcagcccctctgtcctcattgtttggcctcatgggaccgaggggctggaggagaggcggagctgtgccccagctgttccagcagcttgtctggcgtcaactggctttcagagtgctgacccctcatcactgtggggatcattctctctgagggcagatgaggcgcaggaaaatagtcttggaaatgttaaatatgatgggtaaattaaaagttttacaacattct

SEQ ID NO: 41550 - DNA, 777 bp, Homo Sapiens
  misc_feature (692)..(692): n is a, c, g, or t
gttacgtgatgagaataggtgaacacaccttgtcagtgatgatgtaaacttctctccttggcaggacatgggcaaacatgctgattggtgcaaatgtggtgccgagctgtccatagctgcagtgaaagatgaagagcaagaccttctctaggttttctagctttcattaaatgtatttttttccccagagctaatttgaaagttgattggaccactgtggatggggtgtcattaagaatgtgggaaataggggccgagtgcggtggctcacacctgtaatcccagcagtttggaaggccagggcaggtggatcgcttgatcccaggaggtcgagaccagcctggggaacacatcctgtctctacaaaaaatacaaaaattagccaggcagggtggtgcatgcctgtagtcccagctacttgggaggctgaggcaggagaattttttgagcccaggatgcagaggttgaagtgagccaagatcgtgccactgcactccagccttgagacagagcgagaccctgtctcaaaaaaaaaaaaaaagaacgtgggaaatatgaacctttgaaagttaatctgtgaattgaaagtttaacaataaaagtagttgtttgtttcctttggaagagttttgttccagatgtttgtaatttggttgtttgtaatttggaatgagagaatttttttttcttangagtgattgcaagaaattaacatgaacaacagtggtcataaactgattaaagctgacacgtcagtaacaaaaaaaaaaaaaaaag

SEQ ID NO: 41551 - DNA, 732 bp, Homo Sapiens
attttggcagaatagaagattggctcatcagtgaagcgcagtatcttagctctagattctattttcatgcatcacagaagtgctatacggttaggtctgtttgtgctcagtcaagaactaagaaatagtatgaattgtaagtcaagatgggcaactcagatggagcagcttagtctcacagtttgcttgtctatttattttatttagtgccaaatgtattccattttaaaagtaagccagagtgagtcaaggcatatacacactttctcacaaaacttcctaaacagatttgggggtttaatatgtccaactcctcatgaaatatattcaatccacttaaatatattccatctttttaacataaaatgtaaagcttagcacccatcattaatttatgtctctgttttatccagtggttaaaaaaggattctgcctctttagtcctcactgttaaataaaacccaatcatagtaagtgattaactagcaaaaagtaaagctatttatagcaaatttctagatcattagaaaagcactggtagttgtacaatatcagtgttgactttgaacttctttaacgagatcatgaattcttttcccttagccaaaacatgaaatatttaacctagttgtctctaaaagttttgtaatcatgagttagatatatgtcatctcctattcattgcttttatgtgatcaataaatcttttacaaacccaaaaaaaaaaaaaaa

SEQ ID NO: 41552 - DNA, 756 bp, Homo Sapiens
ccacgcgtccggccgggaagagaccatctttgcctgacacagcactcttcctgtgggctgagggcatctccaaagctgcctgatgcctgtttttcagaaccctcacatccctctttccaggtcctcactcttgggatatgggggcttaggaaaacaatccaactccctagcccagaccctcaggtcaggaggcctgcgtgtggggctgcaaaaggagaggacgacgctgtcggaggcagggagagcaaattaccacagcttcttggcccagttctgcccttctttgctttgggattgcactgggccatcagctcatgccaggctatgggggcagccagttggcattgctccccagactgaacagaaacctggccgccggatgggacctcctttggcacagacttgactgtgtaactgcataaactgcagtagcatcattgccctagatgccccaggagacctggcaccatgaggattacagacagtggaatcttactgtcatctggacagctgttttcctgtttggatggtaaaggaagttgagagtctttagacctgtgcacagccccgcaccaaggggtgctgtatgctctaggcatcccctcccccaggggattttctaagtagatggggggacacggtgaactggctgtgtccatctttgtcactgagtgaaatctctgttttctattctctgagaagataagtttgtatgttctgagaataaatacatgaatattaaaaaaaaaaaaaaag

SEQ ID NO: 41553 - DNA, 631 bp, Homo Sapiens
ggagaaggcagcagaagtctatacccggctcaagtcgcgggtctcggcccaaagatcgaggcggtgcagaaagtgaacaaggctgggatggagaaggagaaggccgaggagaagctggccggggaggagctggccggggaggaggccccccaggagaaggcggaggacaagcccagcaccgatctctcagccccagtgaatggcgaggccacatcacagaagggggagagcgcagaggacaaggagcacgaggagggtcgggactcggaggaggggccaaggtgtggctcctctgaagacctgcacgacagcgtacgggagggtcccgacctggacaggcctgggagcgaccggcaggagcgcgagagggcacggggggactcggaggccctggacgaggagagctgagccgcgggcagccaggcccagcccccgcccgagctcaggctgcccctctccttccccggctcgcaggagagcagagcagagaactgtggggaacgctgtgctgtttgtatttgttcccttgggtttttttttcctgcctaatttctgtgatttccaaccaacatgaaatgactataaacggttttttaatgaacaaaagaaaccaaaaaaaaaaaaaaaaaag

SEQ ID NO: 41554 - DNA, 641 bp, Homo Sapiens
gatttattgagcctatccaagttataacatattacgaagtcctgttgtaagaacgcttggtttcatagagactgtttacaggttcaagcaataaatgcgggagtgtttttctttaggtgtacaatatgcaataatagtgacatctttcagaaagagatgttgagaatgggaattcatattcctgaaaaagatgcttcctgggaattagaggaaaacgcttatcaagagcttctgcagcactatgagcgttgtgatgttcgaagatgtcgttgcaaagaagggcgagactataatgcacctgatagcaaatgggaaataaagcgctgtcagtgttgtggttccagtggcacacatttagcctgctcctcattacggtcatgggagcaaaattgggagtgtttggaatgtaggggtattatctacaattcaggagagttccaaaaagccaaaaaacatgtattacccaattctaataatgtggggattacagattgtttgttggaagagtcatcacctaaattacccagacagtcacctggatcccagagtaaagatctactgaggcaaggcagcaaatttagaagaaatgtatcaacactattaatagagttaggattccaaatttaaaaaaaacaaaaaaa

SEQ ID NO: 41555 - DNA, 1004 bp, Homo Sapiens
  misc_feature (808)..(808): n is a, c, g, or t
  misc_feature (918)..(919): n is a, c, g, or t
acttcataaacctcaatataaatactctcaaaatggttgtatggattttatttaggtatggtagcatggttaataaaagtaaaaactgttttactcacattttttgtaaattaggattacatatagaatgccacaatttctctaggtttattcaattttcaaattattcctcattttattttaaagcattaaatagaaaagctaattggttaaattttgttatataaatcagagtcatatattctgggatttgtgttactatgcatacttttctaggatgtcaccaaattagttgtttaaaatgtttttagattactgatttatattaagatgacccacactgcaattagattatgcctagtgggaagtattatataaaaagcagaattaagctgggcacatgtgcttgtaatctcagttataagggaggctgaggtgggagaatcgagatactcagccagcctggcaatgtagcaaagactccatctcaaaaaaaaaaaacagaattgcacaaattttctggaatctatggacattccatgagcttaaacacttttgaggtggataacatttagttgaaaatacctaagaaagtgtgtcttctttaaagccttggctttaatcatgggaaattgttgttgttgttgttgttgtttgtatcctatgtttggtattctgtatgtctgatccataatcattttagatatttgaatgatctctgtggattggtaggtttggccatttgaccattatttattatcaagttggttgtatgctaaggtaagttgacgccatagcattatacagntatcttcattgctcttgaatgatatctgttatataagcaatgtataaataaagtaaaaaagatagaatgaaaaacccattctaatgtcaccactcagagaatagtacccnnatttctgtgtatccctctataaactctttactcccggttcctttaattttttaactttaataatgctactaaaagacataaccta

SEQ ID NO: 41556 - DNA, 617 bp, Homo Sapiens
ccacgcgtccgatggaaatgcacaacaaattggccagtatatgcctaatggttggcaagttcctgcatatggaatgtatggccaggcatggaaccagcaaggatttaatcagacacagtcttctgcaccatggatgggaccaaattatggagtgcaaccgcctcaagggcaaaatggcagcatgttgcccaatcagccttctgggtatcgagtggcagggtatgaaacccagtgaataaggactccagaatctaaagccagtggcttgaggctacagggagtgtagtaaagccgttgtttacttaaagatttatcaaatcagtcagtgcaaatgtcagatacaatgtatttatttaaaagattcatttttaatcatgaaattacttatcatccacattgttttaaaaagaaacaagatgctggatgtctgccaatttttgccttcattaccttttttgataaagtttctcagatccttgtttcaaacacaaatgcagggattgctgccactttttaactattaagaggcagaaaattgcacaatattgaacttttttccactgaagtagtgtgcagttctagtttgcattcctgatatgatttaaaacatgtaatat

SEQ ID NO: 41557 - DNA, 865 bp, Homo Sapiens
  misc_feature (668)..(668): n is a, c, g, or t
  misc_feature (694)..(694): n is a, c, g, or t
  misc_feature (753)..(753): n is a, c, g, or t
  misc_feature (785)..(786): n is a, c, g, or t
  misc_feature (797)..(798): n is a, c, g, or t
  misc_feature (809)..(809): n is a, c, g, or t
  misc_feature (865)..(865): n is a, c, g, or t
agaggtaatccccagaagcattttgtagcatcctgtgtcataaacctgagagtctttctgcaaaaatccttagtgagctttttacagtacacacattacctgatgtgaaagctttggggttttggaacagttacttacaggctgttgaagatggtaaatctacaacaacaatggaagacattcttatttttgcaactggttgcagttccattcctccagctggatttaaacccactccttcaattgagtgtctgcatgtggattttcctgttggaaacaagtgtaataactgtttagcaattcccatcaccaatacatataaagagtttcaagaaaatatggacttcaccataagaaacactctaagactagaaaaggaagaaagttctcattacattggacattaaaatgtttccttgaacaaagagaagcttctttaaaagctgctattgataactctcttttatttcactaaccttttcatcatcactttgaacaaactagttagcttcttgacctaataaaatttatgatatgaatataaaggaatattatagccacttaggctaaaaaaaggttttttttgttaaagcatactagtcaaaattggtgataatttctcattttcttgatatagatacttcataaacctcaatataaatactctncaaatggttgtatggattttatttangtatggtagcatggttaaataaagtaaaaactgttttactcacattttttgtaaattangatacatatagaatgccacatttctctagttnnatcatttcaanntatctcatttnattaagcataatagaaagctattggtaatttgtaatatcaatctaatctggattgn

SEQ ID NO: 41558 - DNA, 963 bp, Homo Sapiens
cttggtaacacggtccggaattcctgcggatagataactcatctaaagcagaaagacagatgctttaagtaataagcatagcaaggaagaatgttctagtctcccaagcaagtcttttaatattgaacactgtcatcagaattcttcttctactgtttcattggaaaacgaagatgttggatcatttagacaagaataccgccagccttacttatgtgaagtgaaaacaggccaagctctagtttgtcctgtttgtaacgtagaacaaaagacttcagatctaaccctgttcaatgtgcatgtggatgtttgcttaaataaaagttttatccaagaattaagaaaggataaatttaacccagttaatcaacccaaagaaagctccagaagtactggtagctcaagtggagtacagaaggctgtaacaagaacaaaaaggccaggattgatgacaaagtactcaacatcaaagaaaataaaaccaaacaatcccaaacatacccttgatatattttttaagtaaacattgaacattttatcattaatttttaattgaaactagttattttataatcaatgaatttgttctttctgattttaagtttgcagatttatttagtgaaggcaagtggaataatcccttcctcaaataatggttgcttttctaagatacatatactgattcctgggtatctctttttataaccctgaagaaatttacttcccatttataccttcaatgggaaaatcaatcctggttaaaaaaataaatccttaaaaggggaaaattaaggaatggggataaacaaggggaattcttttgtattaagtttctaaaaccggaaataataaaaaaacactcttgtaaggggccccttcaaaaaaatttccaccccattggccgatttattttattcttaaaaaaaattttttcgcacgagccttaacactaacttttggggg

SEQ ID NO: 41559 - DNA, 703 bp, Homo Sapiens
  misc_feature (668)..(668): n is a, c, g, or t
  misc_feature (695)..(695): n is a, c, g, or t
  misc_feature (701)..(701): n is a, c, g, or t
taaaaaaaaaaaccaaaactgtgcagagtctagaagttgtttgtcatcttcagcttgtgcacaattctgttttaggttaaaaaaaggcattgtttgagctgtcccatctccactgttatccctttggggttttttaatataaattattagtttacatcatttttgtatctacatcttttttcacaaatttgtcttgccttattaaagttctgtaaaatatacttaaatggaaaaaatgatgttcatttagattgaaaacttttctcagatggattgataattgcattcatcttgtgttttatatgagaaggtgcctcaagaatttcctgttggatttgtttaaaaggatttttatctttcgtgataaactttgctgtgtaccaggaactataaaaacaaaaacttgttactaaagaaaatatctgaaatgtgataagttcttatgccatgttaatttcatgtgtcaacttcaacatttacatgtattatttcattatgtaaaatgttttagcaatttaatattttgcacagttagcaaactttgtatgtcatttccttcaaggcatcatgcagagttgacatgagatttataaggttttaagttgtttgcatgtgaaaatcaaatacatactttggtagtctttgaatacaaagtcatctgctcttgnttttcaagaattttgagacccaagttntatggnaa

SEQ ID NO: 41560 - DNA, 765 bp, Homo Sapiens
cacgcgtccccttactagcataagtggttttcttcagcaaaataaatatcaccgtattatctgtgttaaaatggtttttgcctaaaatataatttttaatttggcttttcttatttaaaattccattatcttatgaataagcacttgaatcagtttttaaaatatttagtctaagatgattcaaagtagttttattttaatacaggacttttaaatggcagtatttcatttcttgtcaattatgttggtactttccacaaatctataaagaaggataaattgtaccatcattttattataatcctcaagagaaaatgtgtaattcaaaagattaatgtgtattaaaacacattatgtatcttagttacatttctatcagtacttttattaatatttgtgaaagaagacagcttaatagtagttagcttaagtagtttctccaagtacttttgtgctatcaatgagttcttctcaaaaaataattagttaggccaggcacaatggctcacacctgtaatcccagctactcagatggctgaggcaggagaactacttgaacctgggaggtcaaagctgcagtcagccaagatcttgccactgtactccagcctgaagagcgagactctgtctcaataatataataatagttattatttaattgcaacatgaagttggaagccattttctgttacttctttaaggagctaaatcttttatatttttgttttctctccccttgcgtttcatattttagcttatgatcta

SEQ ID NO: 41561 - DNA, 866 bp, Homo Sapiens
aggcactctgcgatgtgtgcccaaagcagaacttacagggcctgcaggaagctggtgtggggagagaaacccaaccccactgtcaacatagggagcatcaccaactccagactggctcctgtgggtatggtgtttccgctgggctgggtcctcaacatgccaaggtgctagtgggtccctaagagggcccatgtgggggtgaagtcatgaggtcctgaaggcttaggcccctgtcattcccaccctcactcttgctgcacagttgtgtttactttttctgggtagaggatgctgaactgactcagcaccctcctgcagggcggggttagggaatttggtgctcaattgctctcccttgctcttccccaaactgaaaatacctactgcaggatccctcggggcacactgaagcttggctgccaaccctcttacttcctttgttacagggaggggttggcttggggtgaaaagttctgccctccgcagggagcagctccagctgcctggcagtgctcccagtttgtagggaagccacaccagatctgggtgccttgggagaaccagtccttccttttgacccaccccaggaagatggagtgctcttttctaggcccatgttctgccagcaaccgggatgcgtgggcaactggactctgcacgggggtctacaggttgagggaggttggtcacaatgagaacctcggggtttgaggtggccatgggcagacagcgaaagggagggaaggtgtgggtgtgccgtgtgtgcatgtggtggtgtgtacggggaaagggtcttccctggttttatttaaataaagtagttatgtaacagtaaaaaaaaaaaaaaaaagaaaaaaaaaaaaaaa

SEQ ID NO: 41562 - DNA, 593 bp, Homo Sapiens
cattaaataagagaaactgatatacattatttttttctttttaaagatgacttataagaaccctgaaatttatataggtgagacaatagaaataaaaagatcttcagccaggcctttctgaaggagttattctgctaaaaatggtcttagttgtctgaaaagccagctcttgaacctcttcacaacagtatcaacactggcttctcccggttcattttatgcgtgcgagaagtcagtggtaactgctgcagggcttaatacattagtggtaactggtttaaaaaacaaagactgtaagcctgtgtgtgccactgtttgcttcaacagtatatcctactaataagcctcacctatttaatccaatgagttttaaatctaaatctcattcccttcttctttccctaccttttttttctttttttcttaaaaaaatattttgtgttattaacagaaattcatatttggtgtggcttaacggtatttcagaaggtcatcagattgtgagactgcttccttgaaacatttttgtgctattgttttaaaaaaataattaaaaaacagttggcgttaataaaaatgtcaatgtgaaactg

SEQ ID NO: 41563 - DNA, 627 bp, Homo Sapiens
atttctaggtacaaataccagaattatacttgaaaatacagttggtgcactggagaatctattatttaaaaccactctgttcaaaggggcaccagtttgtagtccctctgtttcgcacagagtactatgacaaggaaacatcagaattactaatctagctagtgtcatttattctggaatttttttctaagctgtgactaactctttttatctctcaatataatttttgagccagttaatttttttcagtattttgctgtcccttgggaatgggccctcagaggacagtgcttccaagtacatcttctcccagattctctggcctttttaatgagctattgttaaaccaacaggctagtttatcttacatcagacccttttctggtagagggaaaatgtttgtgctttccctttttcttctgttaatacttatggtaacacctaactgagcctcactcacattaaatgattcacttgaaatatatacagaaattgtaatttgcttttttttaaaaaagggggctaaagtaacactttcctacttatgtaaattatagatcctaaattcacgcaccccgtgggagctcaataaagatttactgaattgagtttaaaaaaacaaaaaag

SEQ ID NO: 41564 - DNA, 604 bp, Homo Sapiens
caaacattagcagtccgggcatggtggctgaagcctgtgatcccagcatgttgggaggccgagtgggaggattgcctgagcctaggagtttaaaccagcctgggcaccatggtgagaccccatctctattatttaaaatgtttcttaaataaaaaaaacacaaacattagcaactagttggctagccataattcctcccttgtttcgattgccagttagaagcaatttttatttcactggttatttgcaagagaaggggtaaaaaaacagcatcagagtgcaacactgaagtgagcttactttaatttgtaagtgaagctgttgctgaacatgaccactatcgttgctgaaatataaaattatactcactgattgtaatggttgaaattttcctgaataatcattagccaaagatcaactctctaatggtgctaatggcaatctagctaatgtgcaaatttaggaagtcttcagtactaagtacataattttcaaataatattttttaattgtctactttggatgttagctatgtcttgtgagtataaattccaattttaagcactattttgatgcaaaaaaatgaataaaaaatttaatttat

SEQ ID NO: 41565 - DNA, 625 bp, Homo Sapiens
ccgcgtaattgcagtgcatttagacaggcatctatttggacctgtttctatctctaaatgaatttttggaaacattaatgaggtttacatatttctctgacatttatatagttcttatgtccatttcagttgaccagccgctggtgattaaagttaaaaagaaaaaaattatagtgagaatgagattcatttcaatgtaatgcactaaagcagaacacgaacttagcttggcctattctaggtagttccaaatagtatttttgttgtcaaactttaaaatttatattaatttgcaaatgtatgtctctgagtaggacttggacctttcctgagatttattttatccgtgatgtattttttttaattcttttgatacagagaagggtctttttttttttaagtatttcagtgaaaacttggtgtaagtctgaacccatcttttgaaatgtattttcttcattgcaggtccacctaatcatcctgtgaaagtggtttctctatggaaagctttgtttgcttcctacaaatacatgcttattccttaagggatgtgttagagttactgtggatttctctgttttctgtcttacaagaaacttgtctatgtaccttaatactttgttta

SEQ ID NO: 41566 - DNA, 750 bp, Homo Sapiens
ctacgtcatcaactctcgcacccagggcttcctggcgctcttctcaggtgacacaggggagatcaagtcagaagtccgtgagcagatcaatgccaaggtggctgagtggcgcgaggagggcaaggcggagatcatccctggagtgctgttcatcgacgaggtccacatgctggacatcgagagcttctccttcctcaaccgggccctggagagtgacatggcgcctgtcctgatcatggccaccaaccgtggcatcacgcgaatccggggcaccagctaccagagccctcacggcatccccatagacctgctggaccggctgcttatcgtctccaccaccccctacagcgagaaagacacgaagcagatcctccgcatccggtgcgaggaagaagatgtggagatgagtgaggacgcctacacggtgctgacccgcatcgggctggagacgtcactgcgctacgccatccagctcatcacagctgccagcttggtgtgccggaaacgcaagggtacagaagtgcaggtggatgacatcaagcgggtctactcactcttcctggacgagtcccgctccacgcagtacatgaaggagtaccaggacgccttcctcttcaacgaactcaaaggcgagaccatggacacctcctgagttggatgtcatcccccgaccccaccctgttttccaccagagttctgacactgtgactctgtataaaatggttgggaagctgcaaaaaaaaaaaaaaa

SEQ ID NO: 41567 - DNA, 833 bp, Homo Sapiens
tccgaatgggccagtatgaatttcccaacccagaatggtcagaagtatcagaggaagtgaagatgctcattcggaatctgctgaaaacagagcccacccagagaatgaccatcaccgagtttatgaaccacccttggatcatgcaatcaacaaaggtccctcaaaccccactgcacaccagccgggtcctgaaggaggacaaggagcggtgggaggatgtcaaggaggagatgaccagtgccttggccacaatgcgcgttgactacgagcagatcaagataaaaaagattgaagatgcatccaaccctctgctgctgaagaggcggaagaaagctcgggccctggaggctgcggctctggcccactgagccaccgcgccctcctgcccacgggaggacaagcaataactctctacaggaatatattttttaaacgaagagacagaactgtccacatctgcctcctctcctcctcagctgcatggagcctggaactgcatcagtgactgaattctgccttggttctggccaccccagagtgggagaggctgggaggttgggaggctgtggagagaagtgagcaaggtgctcttgaacctgtgctcattttgcaattttatcagtaatttgacttagagtttttacgaaacctcttttgttgtccttgccccactcctctccaccagacgccttcctctctggatactgcaaaggcttgtggtttgttagagggtatttgtggaaactgtcatagggattgtccctgtgttgtcccatctgccctccctgtttctccacaacagcctggggttgtccccgctggctcacgcgttc

SEQ ID NO: 41568 - DNA, 653 bp, Homo Sapiens
  misc_feature (563)..(563): n is a, c, g, or t
ggagaacgagtctttcttataaactaacagagcaggtatatgcctgttagaccttagctgtggggttcctttactattgggtgaatcattaggtataaaaaataatcatcaaccaggcaaattactttgcttcctagctgatgtcatcccacattggtacaggtgttattcagtactgggtggttcagcagggaagccgggtgggaccagtgtgtctgtcatgaaaccactaactgcattcctgactgaagagccatctgtcatttattggggaaggtcttcagttgagctctcagccttaggaaggaagcacgtggaggagggacggaggaggttcccttgctgggcatgcttcgtagagggccaggagcagcaggtcatgtgcacatgccgttgcagcacaagcttatgcttcccgtagccgtggcttttcattctgcacagtcccaggtcccagctcccctcttatggtttctgtcataatgtgctttatctgattgactccaaacatcccgaaatgtcacctgcagatttctcgtgggaaccaatatgtacatgtttgncattatgctgtgagaattaaatgtgttagatggaaatgctattggcgggaatatataaaaaaaaagaatcttctgttctgcatggaactg

SEQ ID NO: 41569 - DNA, 813 bp, Homo Sapiens
gggaaaacctagggcctggccccaaaacttccctactctgtggctagtcctgctgccaacaaaatcgtagcgacctggcttttcacagctttgcttttatttccaagtcaaggacaagccgcttcattcactcctgggcatttactcttcttgtgggtctgtgatattccttgctttccagggagaatgtgcttggcaaggtctggagaactaattcagaatcttaggggaaggggagagatggaaatacaaacctgcttactggaaaggtgcaaatatatgggttgagctggaggtaggaatacaggtaattaaggtttctagtttaagggaaaacagatctattgccatttaaataaggtaactgggatttggttaagttcacaaagatagcagaagatttatttacaggcttcacctgtactgtcagggcaagagaaagcctggtaaaccagctacagcagtttaccagtgtgatggctgtgacacagctccactccacgggtggacacagcagagggcaactgggctggcctggttcagtgtgaatcaaaccgttaacccacacatggtacatgtgattttcttttgtgagccttacaccaagccaaactattgtcaaagcatcatttctatagaaataagcttatcttgaactgttctatttaaaaaaaaaaaaaccaaaaaaataaaaacaaacataacaataaataacagccttttataaaaaggggggggggcaaaaattccggggggacaatgccaccctttttaaagggcccaaggggttaaaaagggggggaaacacgggga

SEQ ID NO: 41570 - DNA, 671 bp, Homo Sapiens
tttaaatagccctggttctcattactctgaccacatacatcatagggtgctaaagttgatgaacacattaatccgttaagtaaaatggactttgtaattgtacagcatacctaagaaactcagaaggtgcatttaagagagagacctgaaagaaatagtatggatttttaaaaattctgtctctactattataaccaaaaaatatttcttgtatgtcccataaaaatatttgtgtaattcttatgaaacaggctggtagaggaggtttctgagcctagcccaagggcttattcatcaccatgggtaaattatttaaactcacttaattaaggaaaatattttcccagctagaaaagtatactcattctcatttaaactctctcatttggagggatcatgtgagttggcctacttacaagtagtgaaagttcccttttcagtttcgtttgtttgtttgtttttctctttcactcagccaaatgtgaaagtgtgaatttaggaaaatcacttgtaatgaagtgtgaatcttgttatcaaatttatttctctgatgtttccttccttatccttgtagaccaatcaaaaccattgacatactcacgttgtgatagatgaggtacaccacaccacaacgcaagctacaaccgaaccaagacgctacacacccacac

SEQ ID NO: 41571 - DNA, 869 bp, Homo Sapiens
  misc_feature (11)..(11): n is a, c, g, or t
  misc_feature (717)..(717): n is a, c, g, or t
  misc_feature (769)..(769): n is a, c, g, or t
  misc_feature (836)..(836): n is a, c, g, or t
  misc_feature (838)..(838): n is a, c, g, or t
  misc_feature (847)..(847): n is a, c, g, or t
gtttctcaggnaggctaatgctgggaacttgaaaccattgtttgagtttgtacgggaggccctgaagccagtagacagtggagaggctcggtggacgtacccggtgctgttggtggacgacctcagtgtgctcctgagcctgggcatgggggcggtggctgtgctagacttcattcactactgcagagccaccgtgtgctgggaactaaagggaaacatggtggtccttgtgcacgacagtggagatgcggaggatgaggagaatgacatcctgctgaatggcctcagtcatcagagccatctgatactgtgggctgagggcctggccactggcttctgcagggatgtgcacgggcagctgaggatcctgtggaggagaccatcgcagcccgcagtccaccgggatcagagcttcacttaccagtataagatacaggacaaaagcgtgtcctttttttgccaaaggaatgtctcctgctgttctgtgacctgatttcggagcagctgaagctacataggactgtttttggacgtggaagatagagcaacatagcaagaatgggtctttctcctctgtagtaatatttcaggctggaccggcgactccactgtgaccagaggggtgagtgctgcagtgatggcatgccttggctgccctgggccctgttcagaaaacacaagggaccacaatcctgcctttgctgagagagaggctgnatgctagacccaagtgaaaggggtcctttggagcctttgttaaatatgcttnagcccagctgcccatttttggttgaccagcctttagagccagagtggtattagatgtgccagccagnanaggcaccgnatggccagtgtgcaaggtgaca

SEQ ID NO: 41572 - DNA, 827 bp, Homo Sapiens
accagagccatggtcggcagaagagcactgatcgtactggctcactcagagaggacgtccttcaactatgccatgaaggaggctgctgcagcggctttgaagaagaaaggatgggaggtggtggagtcggacctctatgccatgaacttcaatcccatcatttccagaaaggacatcacaggtaaactgaaggaccctgcgaactttcagtatcctgccgagtctgttctggcttataaagaaggccatctgagcccagatattgtggctgaacaaaagaagctggaagccgcagaccttgtgatattccagttccccctgcagtggtttggagtccctgccattctgaaaggctggtttgagcgagtgttcataggagagtttgcttacacttacgctgccatgtatgacaaaggacccttccggagtaagaaggcagtgctttccatcaccactggtggcagtggctccatgtactctctgcaagggatccacggggacatgaatgtcattctctggccaattcagagtggcattctgcatttctgtggcttccaagtcttagaacctcaactgacatatagcattgggcacactccagcagacgcccgaattcaaatcctggaaggatgggagaaacgcctggagaatatttgggatgagaaccactgtatttgctccagcagcctctttgactaacttccagcggatcttatgaaaaagagtcaggagagagaaacagaattggcttctggggcaccttggcagcctccactgaaccaatcactgaaagaatctaccgatcttaatgttcaacggattcggtc

SEQ ID NO: 41573 - DNA, 575 bp, Homo Sapiens
tatgtgttgaagttttgcgtgccaaaaagaaggaaatatctgcaaaagatgagaaggaattactgcatttcagcattgagcaagaaattaaggatcagaaggaacgatgtgataagtccttaacaacaatcacagagttacaaagaagaatacaagaatctgctaaacaaatagaagcaaaagataataagataactgaactgcttaatgatgtggaaagattaaaacaggcactcaatggcctttcccaactcacctacacaagtgggaaccccaccaagaggcagagccagctgattgacactctgcagcaccaagtgaaatctctggagcaacagctggccgatgctgacagacagcaccaagaagtaattgcaatttatcggacacaccttcttagtgctgcacagggtcacatggatgaagatgttcaggaggctctgctccagatcatacaaatgcggcaggggcttgtgtgctagccgttagcactgactgccagtatctgttttatcttgctggtgctgaacattctttgtgcaactccatggtctttctgggccttactgtgctgg

SEQ ID NO: 41574 - DNA, 752 bp, Homo Sapiens
tagctctcagcttcactctttcagggctgatgtcgcctttgccttttctcacttcactgacctgtctattcctacaactgtctctttctagagaagcctcaatgatcaggattgacaggccacactctcccccaccatttttttctcctccttcaagcctcttgtctgtttcaccctcttccaccttggaggctgaggtcttatttgactcttcacctgaattgaccttcttccttcccaccctcccaggttcggactaaggatcaccgctttgaaagtgtcagtcaccttatcagctaccacatggacaatcacttgcccatcatctctgcgggcagcgaactgtgtctacagcaacctgtggagcggaaactgtgatctgccctagcgctctcttccagaagatgccctccaatcctttccaccctattccctaactctcgggacctcgtttgggagtgttctgtgggcttggccttgtgtcagagctgggagtagcatggactctgggtttcatatccagctgagtgagagggtttgagtcaaaagcctgggtgagaatcctgcctctccccaaacattaatcaccaaagtattaatgtacagagtggcccctcacctgggcctttcctgtgccaacctgatgccccttccccaagaaggtgagtgcttgtcatggaaaatgtcctgtggtgacaggcccagtggaacagtcacccttctgggcaagggggaacaaatcacacctctgg

SEQ ID NO: 41575 - DNA, 877 bp, Homo Sapiens
ccgttgatgggactgagaaaccagagttaaaacctctttggagcttctgaggactcagctggaaccaacgggcacagttggcaacaccatcatgacatcacaacctgttcccaatgagaccatcatagtgctcccatcaaatgtcatcaacttctcccaagcagagaaacccgaacccaccaaccaggggcaggatagcctgaagaaacatctacacgcagaaatcaaagttattgggactatccagatcttgtgtggcatgatggtattgagcttggggatcattttggcatctgcttccttctctccaaattttacccaagtgacttctacactgttgaactctgcttacccattcataggaccctttttttttatcatctctggctctctatcaatcgccacagagaaaaggttaaccaagcttttggtgcatagcagcctggttggaagcattctgagtgctctgtctgccctggtgggtttcattatcctgtctgtcaaacaggccaccttaaatcctgcctcactgcagtgtgagttggacaaaaataatataccaacaagaagttatgtttcttacttttatcatgattcactttataccacggactgctatacagccaaagccagtctggctggaactctctctctgatgctgatttgcactctgctggaattctgcctagctgtgctcactgctgtgctgcggtggaaacaggcttactctgacttccctgggagtgtacttttcctgcctcacagttacattggtaaattctggcatgtcctcaaaaatgactcatgactgtgggatatgaagaactattggacttctttaagaaaaaagggaggaaatattaaatcagaaaagttt

SEQ ID NO: 41576 - DNA, 500 bp, Homo Sapiens
gtaagctttggtacaagctgacctttctatagcgtgctgcattggtaaatgaaaaaaaatggggcaaacgttggagtcctttccttgtaaattgccagcatcagcttaaaaactcctgtatgttacatatcgtaccattttaatctcttcaactttctttgtaccttctggctgtatgctttctcttttaactttttatattgtcattttatattaaatttctgtgtatataatgtaaaaccacaatttttgaataaaatttagttcctgcagcttgatttaaatagaggacttttactggcacctgcatctctccagatgcatgtactcagagggactgtcagacaaaaataaatacataaaaacaaagcaagcaatgcactattaattatacattttgatgttctatcattaatattgtacagtacattttggttcacacaattaaatccactgttttctcagatgtaaaataaacccacatgcagttcttgatttac

SEQ ID NO: 41577 - DNA, 583 bp, Homo Sapiens
acaccaacaaaactctgggcccactgggggccaccgaggaagacttgggctccacattccaatgtaagctctgcaaccggacttttgcgagcaagcacgcagtcaaactgcaccttagtaagacccacggcaagtctcccgaggaccacctgatctatgtgactgagttggagaaacagtagcgtccaggtatgcaagagaccgcggaacattgcactaaacgtcgtcgagctgcactaggcctggcctgagcctctgaaatcagtctttcctttgttgctggcccgcctctctggaccttggttttcttacacatattttgtatatttatatgctctctgtccgatctgtgcatgttatttttctttttccgtgagtcaaagtctgacctttattttcaacatctgttcttggtgttaagctatcttttgtaggaaatagtggggcacactactcagagacattatttagcagtaaagaaagacacaaataacaatgataaaaagacatcctaaaatggtgaagttgccatgacaataaaggtcatagaacctggtagtgtcaaatttaaccctttgaggac

SEQ ID NO: 41578 - DNA, 768 bp, Homo Sapiens
ggaggctgctggccttcgcggaggcccgggctcgggcctgggctgggggcatgggggagccccgggcccggctcgtggtccccgtggctgtggccgcctggggggtgggagggatgctggagggctgtggctaccaggccgaggggggctggggctgcctgggctacacgctggtgagggaattcagcaaagacctgtgaagctacagactgacagccagggcaggggaggagggaggggcgccagcacctgatgatcgcctactgtctgcgggttcttttacctgctctccctcagtgagtcctcaaccaccctgggcccagaaacagaggcctgccgaggggaggagcctggcctctgtccacccgtcagcagtgtgaagtctgttgtgtttgagcttctcagagtggaatgactccttttccttcctggccctcgggggcctctcgaggtcagcctctccaacccctacctcagctcctgtctgcactgagaaacctccccgggtgatgtctgcaaagtctgtgctgtccgtgccccaggctgggagagctatctggggagggggagaggaggccgagcagaatacaccccagagttagggtttgcgactccgcctccctgggacctggattgggtcagatgcctgtccttggaggggacaaggttgactgcttaggaggcgcgacgcacagggctgccaggcctggcccctctctgggaaggttgagagctgagacgggcagccctgtcccttcctccagatcc

SEQ ID NO: 41579 - DNA, 668 bp, Homo Sapiens
  misc_feature (633)..(633): n is a, c, g, or t
  misc_feature (635)..(635): n is a, c, g, or t
  misc_feature (650)..(651): n is a, c, g, or t
  misc_feature (656)..(656): n is a, c, g, or t
  misc_feature (658)..(659): n is a, c, g, or t
agaaagaaggacccagaacggcttgctttcctgcatctctgtgaagcctctctccttggccacagactgaactcgcagggagtgcagcaggaaggaacaaagacaggcaaacggcaacgtagcctgggctcactgtgctggggcatggcgggatcctccacagagaggaggggaccaattctggacagacagatgttgggaggatacagaggagatgccacttctcactcaccactaccagccagcctcagaaggccccagagagaccctgcaagaccacggagggagcgacacttgaatgtagaataggcagggggccctgccccaccccatccagccagaccccacgctgaccatgcgtcaggggcctagaggtggagttcttagctatccttggctttcagagccagcctggctctgccccctcccccatgggctgtgtcctaaggcccatttgagaagctgaggctagttccagaaaacctctcctgacccctgcctgttggcaggcccactccccagccccagccccttccatggtactgtagcaggggaattccctccccctccttgtgccttctttgtatataggcttctcacggcgaccaataaacagctcccagtttgtaaaananaaaaaaaaaaaaaannaaaanannaaaaaaaaa

SEQ ID NO: 41580 - DNA, 612 bp, Homo Sapiens
gcgtccgagcggattaaaggcagtgaggctgacaggcaacgggcaggaacagtgactggcttggcagtgaatatagctgccttgctctctgtcatgcttcagccttacatgcccacggttagtgccacaatccaggcccagctgcagctcccacctccagcctgcagtatcctgctgacaaacttcctgtgtaccttaccagcaggacaccagattggcacagtcagtcccttgttccaaaaattggaaaatgaccagattgaaagtttaaggcagcgctttggagggggccaggcaaaaacgtccccgaagccagcagttgtagagactgttacaacagccaagccacagcagatacaagcgctgatggatgaagtgacaaaacaaggaaacattgtccgagaactgaaagcacaaaaggcagacaagaacgaggttgctgcggaggtggcgaaactcttggatctaaagaaacagttggctgtagctgaggggaaaccccctgaagcccctaaaggcaagaagaaaaagtaaaagaccttggctcatagaaagtcactttaatagatagggacagtaataaataaatgtacaatctctataaaaaaaaaa

SEQ ID NO: 41581 - DNA, 790 bp, Homo Sapiens
ctttacgtcttgtgtattaccccattattaaattcaagtccttgaaaatcaactagagattataaagtctctaaagaaggcaataacaaaatttatcaagatatagtacttttcagtttttgtttagtgtcttcagcatcactgtgtctgtatttcaagtacaaatgtttttaaaaaggattctttatacatatgtgctgaattgattttaagaaagttgcatgatcctgtaggagcaacatttttacctaaaaaatgctaactttatagtatttctaattgttcaaggattttaaaattctatttcagggagtatatcttctgtggttttgaaggaggtgagttctgtatgtgccttgcagtactgtaattcaaaaataggaatctttggctgcaaaattttaatgaaatgttaggaagtaattttcgtgctaacattaaaattataactttttgaaaggtaatagattttccagaagtaaaatctgatggttctaaatcaatcaatgtgatagttcatttttaactcttagaagaattcagaggaaattaacccagctaagtaaaaaatctgtcttgattttgttacttattcctcagaattttacccttgatcccgaaaaaaagaagaaaaagataaacacttttgcgccttggccagagaatcttactcaagcagtatacattggccgaatcgacccagtggcatatgccaaggaggtgttaaccagcgggttaaaacggatgtaacccgtgtccaaaaactaggaaacatcacaggggaataaaa

SEQ ID NO: 41582 - DNA, 711 bp, Homo Sapiens
gctgatgatcaagcagggccttctggacaagcatgggaagcccacagacagcacacctgccacctggaagcaggagtatgttgactacagtgagtctgccaaaaaagaggtggttgctgaagtggtaaaagccccgcaggtagttgccgaagcagcaaaaactgcgaagcggaagcgagagagtgagagtgaaagtgacgagactcctccagcagctcctcagttgatcaagaaggaaaagaagaagagtaagaaggacaagaaggccaaagctggtctggagagcggggccgagcctggagatggggacagtgataccaccaagaagaagaagaagaagaagaaagcaaaagaggtagaattggtttctgagtagtgaaggccacttgaagctggaggagaaactaaagccttattgagaaaacatgttatagatccttttgttgctgagagagtggaacataggtcctagacagggtgaagagttctggcacattttagctgctactttgagacctcggtgatgttacctggtgtggtcatcccatcttgtcctgttttaaggatatgggtggtgaaagatgaaagaggcagagtttatcccaatgacttctctgtttgagttgggaagcctcaccttcagacccagtaactgtccgcagctgtctgctagtggttgtcttaacatcgtagtcctagtttgcatttttt

SEQ ID NO: 41583 - DNA, 810 bp, Homo Sapiens
  misc_feature (711)..(711): n is a, c, g, or t
aaaaaacagcatagtactaatggtttaagtggtaataacccaaccagtggactctggataaatggagacccacctctacagaaagaacttatggatgctataacaaaagacaataaactatatttacaggaacaagagttgaatgctcgagcccgggccctccaagctgcatctgcttcatgttcatttcggcccaatggatttgatgacaacgacccaccaggaagctgtggaccaactggtggagggggtggaggaggatttaatacagttggcagactcgtattttgatcctgagagagtccaaaatgcactggtcacgaaacgtctaatactatgactgttaaaatgtcagactataacaaatatctatcttttatttttcattagacccttatacttcaagagaacacactcagtgcttgtttttattttcttgacacatttattaacaaaatgcatcatggaaaaaaaatctacctcttaaaattccatttgcttttatggttagacatgcttgaccaaaaatgttcagaagaaaatatgtacctggtccctaattaagctgcgttaaatttggtagaagcatttaaatggtctatcttcagttttactgaacaaaaaatgtaatatatttagcattctttataaaagaattgatgctagaggtaaaaaaaaatacttgtttttaaaaaatcctttacgtcttgngtaattaccccattattaaattcaagtccttgaaaatcaactagagattataaagtctctaaagaaggcaataacaaaatttatcaagatatagacctt

SEQ ID NO: 41584 - DNA, 778 bp, Homo Sapiens
ccttttgttgctgagagagtggaacataggtcctagacagggtgaagagttctggcacattttagctgctactttgagacctcggtgatgttacctggtgtggtcatcccatcttgtcctgttttaaggatatgggtggtgaaagatgaaagaggcagagtttatcccaatgacttctctgtttgagttgggaagcctcaccttcagacccagtaactgtccgcagctgtctgctagtggttgtcttaacatcgtagtcctagtttgcattttttaaatcccctctgtttaaaaggtttgtaaaacaaaaacaaaaaactaagtctgctcagtgaaatgctgtagaaccctaaataagtggtagaagagtgtcactgaattttgtctctgaattcagtataactgagttttgtccatgctggtgtctgggttataggcctgatgggcctggtagttttccatcttgttctggcctagaggtcagtcctttgcacttcctcaaagcttgtgtacagtgctcacctaaatccatctgactacttgttcctgtgccctcttgttttaggcctcgtttacttttaaaaaatgaaattgttcattgctgggagaagaatgttgtaatttttacttattaaagtcaacttgttaaagttttttatgtattcctgttgggttttcttgttgatctcatgctagcaaagcaaaaattgtaaaatattttgatttaaaaatctagggacctttatgtccctatttgaaaaaaaaaaaaaaaggggcg

SEQ ID NO: 41585 - DNA, 630 bp, Homo Sapiens
tggagctccctcccctggtggctacaacccacacacgccaggctcaggcatcgagcagaactccagcgactgggtaaccactgacattcaggtgaaggtgcgggacacctacctggatacacaggtggtgggacagacaggtgtcatccgcagtgtcacggggggcatgtgctctgtgtacctgaaggacagtgagaaggttgtcagcatttccagtgagcacctggagcctatcacccccaccaagaacaacaaggtgaaagtgatcctgggcgaggatcgggaagccacgggcgtcctactgagcattgatggtgaggatggcattgtccgtatggaccttgatgagcagctcaagatcctcaacctccgcttcctggggaagctcctggaagcctgaagcaggcagggccggtggacttcgtcggatgaagagtgatcctccttccttccctggcccttggctgtgacacaagatcctcctgcagggctaggcggattgttctggatttccttttgtttttccttttagttttccatcttttccctccctggtgctcattggaatctgagtagagtctgggggagggtccccacctttcctgtacctcctccccacagcttgctttt

SEQ ID NO: 41586 - DNA, 675 bp, Homo Sapiens
cctgcttggtcttgtccctcaactggggcaagtgaagccagaggagggtcccccagctgggtgggctggaatggaactcctcactagctgctggggctccgcccaccctgctcccttccggacaatgaagaagcctttgcaccctgggaggaaggaccaccccgggccctctatgcctggccagcctccagctcctcagacctcctgggtggggtttggcttcagggtggggtttggaagcttctggaagtcgtgctggtctcccaggtgaggcaagccatggttgctgggctgtagggtgagtggcttgcttggtgggacctgacgagttggtggcatgggaaggatgtgggtctctagtgccttgccctggcttagctgcaggagaagatggctgctttcacttccccccattgagctctgctccctctgagcctggtcttttgtccttttttattttggtctccaagatgaatgctcatctttggagggtgccaggtagaagctagggaggggagtgtcttctctctccaggtttcaccttccagtgtgcagaagttagaagggtctggcgggggcagtgccttacacatgcttgattcccacgctaccccctgccttgggaggtgtgtggaataaattatttttgttaaggcaaaaaaaaaaaaaaaaaaa

SEQ ID NO: 41587 - DNA, 528 bp, Homo Sapiens
acgacagccgcctgccgcccgacttcttcggcgtgctggtgcgcgacatgctgcacttctacgctgagcagggcgacgtgcagatggctgtgtctgtgctcatcgtcctgggtgaacgggtgcgcaaggacatcgacgagcagacccaggagcactggtacacttcctacatcgacctgctgcagcgcttccgcctctggaacgtgtccaacgaggtggtcaagctgagcaccagccgcgccgtcagctgcctcaaccaggcctccaccaccctgcacgtcaactgcagccactgcaagcggcccatgagcagccggggctgggtctgcgacaggtgccaccgctgcgccagcatgtgtgccgtctgccaccacgtagtcaagggtctcttcgtgtggtgccagggctgcagccacggcggccacctgcagcacatcatgaagtggctggaaggcagctcccactgtcccgcaggctgcggccacctctgcgagtactcctgacggggcatctgctgggcttgcccgg

SEQ ID NO: 41588 - DNA, 501 bp, Homo Sapiens
tcaagatctacctcccgagagcgacggaaattgtcccggtcccggtcccgagatagacatcggcgccaccgcagccgttcccggagccacagccggggacatcgtcgggcttcccgggaccgaagtgcgaaatacaagttctccagagagcgggcatccagagaggagtcctgggagagcgggcggagcgagcgagggcccccggactggaggcttgagagctccaacgggaagatggcttcacggaggtcagaagagaaggaggccggcgagatctgaacccgtctcccgggtgctgtaaatagtctgataaacgttcacacagtctaaaattaccctttatatttgctgaatacaactcatcttttgtagtttaaaatttctattgttttggagctagctgtgagtttctagaagtgtacagagttgctcctgtgttcccgggtcatgttgagtaggaataaataaatctgatgctgcctcctgaggctgcggggggtt

SEQ ID NO: 41589 - DNA, 708 bp, Homo Sapiens
ccccgcgtccgcacgacctatttctgggcatctttgtggacatgatgtcacccaccccttgtcaagcattgcctgtgattgcccagcccagattcatctgtgccttggacatggtgatggtgatgggttgccatccaagtgaaagtcttttccttgaccaagggggacagtcagttttgcaaaaggactctaatacctgtttaatattgtcttcctaattgggataatttaattaacaagattgactagaagtgaaactgcaacactaacttccccgtgctgtggtgtgacctgagttggtgacacaggccacagaccccagagcttggcttttgaaacacaactcagggcttttgtgaaggttcccccgctgagatctttcctcctggttactgtgaagcctgttggtttgctgctgtcgtttttgaggagggcccatgggggtaggagcagttgaacctgggaacaaacctcacttgagctgtgcctagacaatgtgaattcctgtgttgctaacagaagtggcctgtaagctcctgtgctccggagggaagcatttcctggtaggctttgatttttctgtgtgttaaagaaattcaatctactcatgatgtgttatgcataaaacatttctggaacatggatttgtgttcaccttaaatgtgaaaataaatcctattttctatggaagactggtacctggtttct

SEQ ID NO: 41590 - DNA, 655 bp, Homo Sapiens
gtaaatattcagtgcatttatcaggagagttgtataacaccaggaccatgcaaatagataatttcatgtcacatgataaacaggtgttcactgttggcagaatttgtgccagccgtaccagaatttatcataaactgaaacattttaaattcaaactataccaggaatgttgcaccattgcaatgacagaagaagttgaagatgaacaagttaaagaaacagtggaaagaattttcaggcggtcaaaagaaaatggctggattaaggagaaatatggtcaacttgaagaatatctcaattttgcggattactttcaagaagagaagtttgagttgtaacacatttccatcagagaagattttttaaattcctgtaaatgtgaagatcatgattcttgtttttctgtatcatgtgacatgtttgtacattttatctatatcttcatggcaaaatattttgtttaaaacatgattatcttaattcctgtgaagtggcactctacactctaattaaacttttatctgatgtacataaaagcattatcttaatttttaagtctgtaaatatattttaaagttatataataatggctttataacagatgactgtcaagtgaatgagctgttgatatcctgtcagtttagtcaaagatatt

SEQ ID NO: 41591 - DNA, 1126 bp, Homo Sapiens
ggctggtaccggtccggaattcccgggatcgcgacgtcagtttgagttctgtgttctccccgcccgtgtcccgcccgacccgcgcccgcgatgctggcgctgcgctgcggctcccgctggctcggcctgctctccgtcccgcgctccgtgccgctgcgcctccccgcggcccgcgcctgcagcaagggctccggcgacccgtcctcttcctcctcctccgggaacccgctcgtgtacctggacgtggacgccaacgggaagccgctcggccgcgtggtgctggagctgaaggcagatgtcgtcccaaagacagctgagaacttcagagccctgtgcactggtgagaagggcttcggctacaaaggctccaccttccacagggtgatcccttccttcatgtgccaggcgggcgacttcaccaaccacaatggcacaggcgggaagtccatctacggaagccgctttcctgacgagaactttacactgaagcacgtggggccaggtgtcctgtccatggctaatgctggtcctaacaccaacggctcccagttcttcatctgcaccataaagacagactggttggatggcaagcatgttgtgttcggtcacgtcaaagagggcatggacgtcgtgaagaaaatagaatctttcggctctaagagtgggaggacatccaagaagattgtcatcacagactgtggccagttgagctaatctgtggccagggtgctggcatggtggcagctgcaaatgtccatgcacccaggtggccgcgttgggctgtcagccaaggtgcctgaaacgatacgtgtgcccactccactgtcacagtgtgcctgaggaaggctgctagggatgttagacctcggccaggacccaccacattgcttcctaatacccacccttcctcacgacctcatttctgggcatctttgtggacatgatgtcacccaccccttgtcaagcattgcctgtgattgcccagcccagattcatctgtgccttggrcatggtgatggtgatgggttgcmaycaagtgaaartytttycytkaccaaggggrmagtarttttcaaaagamtytwawacyktttaaattttyttctaatkggaaattaatwaaaaa

SEQ ID NO: 41592 - DNA, 687 bp, Homo Sapiens
  misc_feature (109)..(109): n is a, c, g, or t
aacaaaaagcaatcttataaagtctgtaaaatataaagttattattatgggctttataacagatgactgtcaagtgaatgactgttgatatcctgtcagtttagtcaanatatattgtatcttaaaaatgtatttagactaacgtctacatgtatttttacggaattcctgtccagatctgtttattcttttacagtattaaatgattttcactaatatattttttactgctatcatctaaatcagtgggccatggaagaaacctcatatatcattcagttcaatcccattgcttcagaatcagatcatagcatatctattctaagtagaggaatgcttttttccttttcttgaaagtttatctttcaaatagatttcaggcctctagagtctttcaaccctcacattcaggaataattttatgtaaattttcatgctttataatgttcttacttttttctattcaattttgtctatatattgatgattaagatgtattttatttatttttatccatagctttttccatataagtatgtatcttagggtcagaactgctgaaagagacaaactcagccataaacacttggaaagcatattttggtatctgcattgctttgcatatctaaattttcccataaagtaataaagtaaaatggttgcagagtgaacaaaaaaaaaaaaaaa

SEQ ID NO: 41593 - DNA, 977 bp, Homo Sapiens
  misc_feature (686)..(687): n is a, c, g, or t
  misc_feature (690)..(690): n is a, c, g, or t
  misc_feature (922)..(922): n is a, c, g, or t
cccggattctagtgtgaattcctgcccggccctgagtcatacccaggcaagtgctttctctggagaaacacttgccgtccttacagcaggaatctccaagagatggcccaagtatcggcttcccatcgatattgctcgtccctgctcggaaactccttttccacgattgtgagatattaaaattgactgatggaatagaagctccccaggatgccaccactgtgtaaaatcgcagctcctcaaattacctctgtttaatttcaaatgttagggtccaaggaagccctctgttgcaaccagatatgttttgaacccagttcattcagaaaccatggttggtggtcatcatctacttgtattgtgaaaaaccagaaattccaaattcagctcttcagttatggtcttttcatattattttagaatgtgaaacttatgctgtgtgcccctccttttatgtggcgaacacaacctgccccgtatggtgcctaactctcctgtgaaccctgggcttccctcatgtttaacattctggtttcctccttccttgaagtccctgtggccctcttcaaggtcctaccttcctaccctttattctttgtggttctgtacagattgatgcaattatattgcctttcctgattaagtgttccttactctgtccttgatgggaggggagaagggagggnnaanaaattaaatttatttcagggcatcaaattgaatatctacttaataaccctgtaaactggaaagtgacatacctataattgtaaggtacgggtaattttacctactactcaccaaagcttccaacaccttcacaaaaaaaaaaaaaagcctccagcgccaccttggcccggccggcgagaaacacaggtattccccaggccccatggcctaccaccccgtttcctgtaccccnccttcctttgataaaaacgggacccagatcggccgcggccccccccattatccgc

SEQ ID NO: 41594 - DNA, 740 bp, Homo Sapiens
ggttcaagggcagcaggaaagacgagatcctgggcatcgccaacaaccgactgatccgcatcgacttggccgtgggcgacgtggtcaagacctggcgtttcagcaacatgcgccagtggaatgtcaactgggacatccggcaggtggccatcgagtttgatgaacacatcaatgtggccttcagctgcgtgtctgccagctgccgaattgtacacgagtatatcgggggctacattttcctgtcgacgcgggagcgggcccgtggggaggagctggatgaagacctcttcctgcagctcaccgggggccatgaggccttctgagggctgtctgattgcccctgccctgctcaccaccctgtcacagccactcccaagcccacacccacaggggctcactgccccacacccgctccaggcaggcacccagctgggcatttcacctgctgtcactgactttgtgcaggccaaggacctggcagggccagacgctgtaccatcacccaggccagggatgggggtgggggtccctgagctcatgtggtgccccctttccttgtctgagtggctgaggctgatacccctgacctatctgcagtcccccagcacacaaggaagaccagatgtagctacaggatgatgaaacatggtttcaaacgagttctttcttgttactttttaaaatttcttttttataaattaatattttattgttggatcctcaaaaaaaaaaaaaaaaaa

SEQ ID NO: 41595 - DNA, 884 bp, Homo Sapiens
  misc_feature (825)..(825): n is a, c, g, or t
ttaagcatgattacatattcagatagctctttttgctttctataaatatatgcattgtgtgtgtagtaatagatgtaagtttacactttgaaaggaaatcttgtttcaatgtttattataaaagccttgctaatttagtagtgatgctttccttggttgtacaggtgtacatttgtaaaccttcatgctgtaaatggaatttgttttatctctttgggatacatttgcattttagtgtacatttacgtccctgccctctttgacctggcaatatagtgttgtataatgtaaatttatttctccaaatcgagagtgattttttaaaaattttttatctttatatggtttcagaagtatgaaccagctttctttttattattgtgagatcattttgttttataacatagttgttgactgttaatatggacctgctagaatttggatcactttcaattgaagtcagggtattgtgcataatagaaagtattggactgagatatttggttaccatggaggccaatgcttttttcatcttattaaatgtgatgtgacttttttctttgtacagaagagtactgtatttttgaatagcctactcccaagtaagagcaaatctgtatgataacattttttcctctggacataagacataacagtaacacgatgtacatttacaagcggccttatgtacatttcccaacaatctttttaaggcaaaattgtgaccatatgtgtataattaaaatcgtttttaatcctttgcctatgaaaatattttggaaaaaaacttgctgtgtatattcagtttctgaaaaataagaaagngcttttgaattttgttgaagtcagtattttgtataaacatttatggtgacccacttatg

SEQ ID NO: 41596 - DNA, 638 bp, Homo Sapiens
ggagctcacagagcagcttgagcagttcaagagggccaaggcgaacctagacaagaataagcagacgctggagaaagagaacgcagacctggccggggagctgcgggtcctgggccaggccaagcaggaggtggaacataagaagaagaagctggaggcgcaggtgcaggagctgcagtccaagtgcagcgatggggagcgggcccgggcggagctcaatgacaaagtccacaagctgcagaatgaagttgagagcgtcacagggatgcttaacgaggccgaggggaaggccattaagctggccaaggacgtggcgtccctcagttcccagctccaggacacccaggagctgcttcaagaagaaacccggcagaagctcaacgtgtctacgaagctgcgccagctggaggaggagcggaacagcctgcaagaccagctggacgaggagatggaggccaagcagaacctggagcgccacatctccactctcaacatccagctctccgactcgaagaagaagctgcaggactttgccagcaccgtggaagctctggaagaggggaagaagaggttccagaaggagatcgagaacctcacccagcagtacgaggagaaggcggccgcttatgataaactgg

SEQ ID NO: 41597 - DNA, 638 bp, Homo Sapiens
  misc_feature (638)..(638): n is a, c, g, or t
ggacaagaatttaaaaataagctgggcgtggtggtacacacctgtggtcccagctactagggaggctgagccaggaagaacgctccagcccaggacttcgaggctgcaatgagctataattgcatcattgcactccagcctgggcaacagagaccctgtctcaaccaccaccaccaccaccacccctactacccctgtattcaaggtaaaaattgaagtttgtatgatgtaagagatgagaaaaacccaacaggaaacacagacacatcctccagttctatcaatggattgtgcagacactgagtttttagaaaaacatatccacggtaaccggtccctggcaattctgtttacatgaaatggggagaaagtcaccgaaatgggtgccgccggcccccactcccaattcattccctaacctgcaaacctttccaacttctcacgtcaggcctttgagaattctttccccctctcctggtttccacacctcagacacgcacagttcaccaagtgccttctgtagtcacatgaattgaaaaggagacgctgctcccacggaggggagcaggaatgctgcactgtttacaccctgactgtgcttaaaaacactttcactaataaatggttataaatcctan

SEQ ID NO: 41598 - DNA, 686 bp, Homo Sapiens
gcggccgcggctgtaggctttttaataaacttgtctcacctcgtcagccactactgtctgcagcccctttgcaaagtggatgcactgaatacagtccggacagacattgtgggggtctttttattaaatcaagaacattgttaaattcaattaaggtttactctgctgccttggcagacttacgatctcaacagttcatacgagcaggtgaaaggattataaatagaatttcgttaaagtggaacagacgacaagaaagccttttagcaagagggcatgctcactagtggttagtaagctgtcgactttgtaaaaaagttaaaaatgaaaaaaaaaggaaaaatgaattgtatatttaatgaatgaacatgtacaatttgccactgggaggaggttcctttttgttgggtgagtctgcaagtgaatttcactgatgttgatattcattgtgtgtagttttatttcggtcccagccccgtttccttttattttggagctaatgccagctgcgtgtctagttttgagtgcagtaaaatagaatcagcaaatcactcttatttttcatccttttccggtattttttgggttgtttctgtgggagcagtgtacaccaactcttcctgtatattgcctttttgctggaaaatgttgtatgttgaataaattttctataaaaattataattc

SEQ ID NO: 41599 - DNA, 600 bp, Homo Sapiens
gtaaaaatgagttggagccatgcattttatgacagtcaaacatgggaaaacattcttaaggataggatgggatctgcactgatgattgaaacagcaagaaaccccacatgtcctaaggtagctgctgtaagtaccatagtaaatagagggataacacccaaagcttttgtgttcagaaactatggtcattttcctggaatcaactctcattatttgggaggctgtcagtataaaatgtggcaggccattagagcctcatctgctgctccaggctactttgcagaatatgcattgggaaatgatcttcatcaagatggaggtttgcttctgaataacccttcggcattagctatgcatgagtgtaaatgtctttggccagatgtgccgttagagtgcatagtatccctgggcactggacgttatgagagtgatgtgagaaacacggtaacatacacaagcttgaaaactaaactttctaatgttatcaacagtgctacagatacagaagaagtccatataatgcttgatggcctgttacctcctgacacctattttagattcaatcctgtaatgtgtgaaaacatacctctagatgaaagt

SEQ ID NO: 41600 - DNA, 891 bp, Homo Sapiens
ttcggaatcccgtttttgctgaggatacaccagggcgagcattttcgagaagtgatgaagcgaatccagagcctgctggacatccaggagaaggagtttgagaagtttaaatttgcaattgtaatgatgggccgacaccagtacataaatgaagacgagtatgaagtaaatttgaaagactttgagccacagcccggtaatatgtctcatcctcggccttggctagggctcgaccacttcaacaaagccccaaagaggagtcgctacacttaccttgaaaaggccattaaaatccataactgatttccaagctggtgtgttcaaggcgaggacggtgtgtgggtggccccttaacagcctagaactttggtgcacgtgccctctagccgaagtcttcagcaagaggattcgctgctggtgttaattttattttattgaggctgttcagtttggcttctctgtatctattgactgccctttttgagcaaaatgaagatgtttttataaagcttggatgccaatgagagttattttatggtaaccacagtgcaaggcaactgtcagcgcaatgggggagaagaggttagtggatcgggggtccctggctcaaggtctctgggctgtccctagtgggcacgagtggctcggctgccttcctggggtcccgtgcaccagccctgcagctagcaagtcttgtgtttaggctcgtctgacctatttccttaagttatactttcaatgacctttttgtgcatctgttaaggcaaaacagagaaactcacaacctaataaatagcgctctttcccttcattgtggggcattgttcgggcccttccctcggggttcttcttcctcccaacttggcctggggggctttttttaataaactt

SEQ ID NO: 41601 - DNA, 793 bp, Homo Sapiens
  misc_feature (738)..(738): n is a, c, g, or t
  misc_feature (741)..(762): n is a, c, g, or t
  misc_feature (764)..(767): n is a, c, g, or t
  misc_feature (769)..(770): n is a, c, g, or t
  misc_feature (772)..(778): n is a, c, g, or t
  misc_feature (780)..(780): n is a, c, g, or t
  misc_feature (784)..(787): n is a, c, g, or t
gtccggaattctcgggatgccctgcactctcacatgagtatcgaacacttaaattgggttttcaacagtcccagctttcactgccagggtcccagtcagattccaggaatttgcgccctaactttgcttgctaatcctggtttagagctatcccactaaaatatttaatcctaattcttagtccttgcctgtgagatatgaggtcttacaggagacctcagagctcccagcccttctcctcctgctaacccttctcacaccctcaagaggagttagaaaagaggtccttgtcattctcacctcttatggaaaatggaataagaaataatcatatcctttcttcccacccttctcctgttatttaggatttctgacaaagctggcttgagattggtcacttagagccgactgtctcctctgccttttgtttttcagcttcagagacagatccaatatagtcccagggacctgggtctctgggagaggaaggaagagggagggagcaaagagattggggtatgtcccctgtagtacactcttacctcttacttcctagactttgatttctccggcagcccagatgttcagttctcttggcccctctctaccccttactgggatctggttttcattttccggtccttttgccatacacagttacagagatcagtcaaatccataccaccactgagatctcatttattgccacagatgcacaaaataaataacccaaaatcnccnnnnnnnnnnnnnnnnnnnnnncnnnnannannnnnnnancaannnnaaaaag

SEQ ID NO: 41602 - DNA, 751 bp, Homo Sapiens
  misc_feature (733)..(733): n is a, c, g, or t
gtctttagaaatgttttgcctttctaagccttgtgctaaaggcgtataacggtggtgcctatctacttaagggggcattctagtcttaacttaaaagttgtctaaactgtccctccctggctttttttggtttggggtagacctaagggtgtttgttagtctcaaaactgtgaagtgacatgtcagaacagtccagactggtaagaaaattaatggcttcacttgaatttaaaccagctctagataggaaaaaaatcagtctcctcatttgctttttaaatggagtagtacatcccatattttagaacaagtaggggtgccttgcttaaataaaaatagcatttaatgtataattgtgtgaagggtttatggataaagctgtacttctgtcacaatgtggcagtactttctgctttaatattaaacagcttgttatttaaatattggacaaaatggctggcttcaaaatatagtcattaataaactaactttatgtgcacctgtgtaggagaatcaaaatcctgtatgctttctttgccttgttcctgttctcagggtgacgactgccaccaggagatgcagttctagttcttaaaattaaatttgcccaggtttctgacaggtgatacctgggaagagagactatgtcttctcttacttaatacataaccatctttgattaccagctaagatgcgaaatcactgtactgtagtcaataaatgaagacttgtntcaggctgaaaaaaaaaa

SEQ ID NO: 41603 - DNA, 1071 bp, Homo Sapiens
atcacaaaacaattctaaaacctaactgtttttaccattgaaatttaaattgtgataataggttttaaatgtctagaatgcaactgataggcttttcttgaactgttagtttttttgaagtagttttttcatgtttaatttgtatttgtaaaaaaacaaaaagcaaaaaaattcccaaaacccagataacaaccagagcaaaactgttgtgccttctatttatctttgatttcagtcttggcaattgtttaaaaaaaaaatctagatttgttttattaggttcagagtatgtggggaattatagaatccctctttcatcactttgtgtatgtcttttgttaacatatttgttatgccttattctaaaattgagtctcaaactggaatgcctttgaagacagatgcttctatagaggttctttgacctaaatagttcagcatttgtatttttattctggtatctaatcagattcctaatcatagcccgtaagaaggaatgttactttaatattggactttgctcatgtgctcgtgtccgcatttttttttttcttaaaatcatagccatatggtaaattttctattttgttatggttctcttttattgatgggcatgcagtgggtgttacttggaaatggccaatttttattaaaatatttctggaagaaaatttaaaaaaatgacccccccaacaaattacttccccccagtactccacccctacaccaccgtcacccaccacccccaacacccacaaatccccgattaccatagccccgccagccccccctccccccctcagtcaagccagtaaggtcgagagggggccctccccacaatacctctttcggccgggcgcccttcttccaccccccaccttttctccccgcgccgggggcgcggtcccccccccggccaccggtaattaaaagtcaccgccggcgacccgctcccaccatatatgccgccgcgcttccctcccgataaccccccgccaccctttggatcccccctgcccctgcccccccccctcattcccgcccccgcccccccccctccttcccaacaac

SEQ ID NO: 41604 - DNA, 685 bp, Homo Sapiens
  misc_feature (652)..(678): n is a, c, g, or t
gggactgctgagaaaggagggaggcagcagtggtcccagcacctgaggcatcctgctgtcatgggaaggtctccgcccaaatgtcagatgcatcagcctgtcacccgctggtccagagctttcagctgtactggtagggggtgggtggtggagtgctgaatgaccttcacaggtgggcctttccagctctagggtcttacgggtgtcggtccacagaaccacggtttttaggttgtgtgtccggggctatgggaacctgtcccccatgatggatcttggtagagacacttccctctgtcatcgtgcccaggaggatgctgcaggtgactacctgcagccctgttctcattcatttggatgccctccagaaatctggggagccatacacctttagagccttttttgctccttatcaagttggcaaggcttggccaattcctgttcaaggctgcattaaaggcatgttcaccatcctggctaatacggtgaaaccccttctctactaaaaatacaaaaaaattagccgggcttggtggcgggtgcctgtagtcccagctactccggaggctgaggcaggggaatggtgtgaacccaggaggcgggagcttgcagtgagccgagatcacaccactgcactccagcctgggctctnnnnnnnnnnnnnnnnnnnnnnnnnnnacattgt

SEQ ID NO: 41605 - DNA, 681 bp, Homo Sapiens
cgcgtccgcttggcagcatttgttgtgtatttggaaacagaaacactagtgactcgagaagcagttacagaaattcttggcattgagccagatcgggagaaaggatttcatctggatgtagaagattatctctcaggagttctaattcttgccagtgaactgtcgaggctgtctgtcaacagcgtgactgctggagactactcccgacccctccacatctccaccttcatcaatgagctggattccggttttcgccttctcaacctgaaaaatgactccctgaggaagcgctacgacggattgaaatatgacgtgaagaaagtagaggaagtggtctatgatctctccatccggggctttaataaggagacggcagcagcttgtgttgaaaaataggaggctctccttgctcctggccttgctgacctcagcggttgccaggaaggggtgagcacagagtgcctcttacggtagttaggatgctcagttgctaaacactgcgctttattttcttaaccagttgtggtgtgagtatcagaattgaaacacttttttgggggtaaaaaatatagcctttacatggacagaattttttttgttgtttcagtgaatatgcctgtaattcagtgtatttcagttccgtcagaaagtgtaatgttagtttcttggtaaagtcctttt

SEQ ID NO: 41606 - DNA, 774 bp, Homo Sapiens
gtccggaacgagttgaaagcctttctcaagtagaggttattcttcagcatagtgctgctgacattgccagagctgagatgttgttagaagaagctaaaagagcaagcaaaagtgcaacagatgttaaagtcactgcagatatggtaaaggaagctctggaagaagcagaaaaggcccaggtcgcagcagagaaggcaattaaacaagcagatgaagacattcaaggaacccagaacctgctaacttcgattgagtctgaaacagcagcttctgaggaaaccttgttcaacgcgtcccagcgcatcagcgagttagagaggaatgtggaagaacttaagcggaaagctgcccaaaactccggggaggcagaatatattgaaaaagtagtatatactgtgaagcaaagtgcagaagatgttaagaagactttagatggtgaacttgatgaaaagtataaaaaagtagaaaatttaattgccaaaaaaactgaagagtcagctgatgccagaaggaaagccgaaatgctacaaaatgaagcaaaaactcttttagctcaagcaaatagcaagctgcaactgctcaaagatttagaaagaaaatatgaagacaatcaaagatacttagaagataaagctcaagaattagcaagactggaaggagaagtccgttcactcctaaaggatataagccagaaagttgctgtgtatagcacatgcttgtaacagaggagaataaaaaatggctgaggtgaccaaggtaaaacaactacatttt

SEQ ID NO: 41607 - DNA, 614 bp, Homo Sapiens
cccacgcgtccggcattagcttgaagcactacaggaggaatgcaccacggcagctctccgccaatttctctcagatttccacagagactgtttgaatgttttcaaaaccaagtatcacactttaatgtacatgggccgcaccataatgagatgtgagccttgtgcatgtgggggaggagggagagagatgtactttttaaatcatgttccccctaaacatggctgttaacccactgcatgcagaaacttggatgtcactgcctgacattcacttccagagaggacctatcccaaatgtggaattgactgcctatgccaagtccctggaaaaggagcttcagtattgtggggctcataaaacatgaatcaagcaatccagcctcatgggaagtcctggcacagtttttgtaaagcccttgcacagctggagaaatggcatcattataagctatgagttgaaatgttctgtcaaatgtgtctcacatctacacgtggcttggaggcttttatggggccctgtccaggtagaaaagaaatggtatgtagagcttagatttccctattgtgacagagccatggtgtgtttgtaataataaaaccaaagaaacataaaa

SEQ ID NO: 41608 - DNA, 671 bp, Homo Sapiens
cgccagccagaccaataaaaagcgtctgtcccactctgctaagcctggttttcttgagcagagggatggaacagagggtgagagaggcagtggccgtctccacctcagctcctgctccctctgcatcagagcccttcctttcttgggggatgggccttgccctcttctcttttcccttcctgtacctttgactaacgctcagcttccgggcctgcatgcagtagacagaagaggaagaaagaacagatgttcacagctgaatctcagtgaacagaatagcagtccctggatggcagtctgcctaaagattcctttccctgccttctcccatacattccaaaaggaagttcaacagtaagcagcacctccaagactgtctcctttcggccagtatcataagatggacgccataatcctgaggcctcctagaggctgagggggcaacggtgtgatccagctggctcatcccagcccaggtgggccaattattcaattttcaagaattttgttgcaagccagttgtcaaacacagccattataattatgtaaatttggcaaattatgttaaagaacaaggacaataaatattcaagaatgcatccctaaagaacacaacaacagagcaaaaaaacaaacaaaacacaaacacaaagacaaaaacaaaaacgggg

SEQ ID NO: 41609 - DNA, 1001 bp, Homo Sapiens
  misc_feature (18)..(18): n is a, c, g, or t
cggtccggaattcccggngatcgcgtgtgcacgtgtgcgtgtgcgtkcgtgtgtgtgtgtttgtgagcatgggtgtgcccttggggtaagccagagcctggggtgttctctttggtgttacacagcccaagaggactgagactggcacttagcccaagaggtctgagccctggtgtgtttccagatcgatcctggattcactcactcactcattccttcactcatccagccacctaaaaacatttactgaccatgtactacgtgccagctctagttttcagccttgggaggttttattctgacttcctctgattttggcatgtggagacactcctataaggagagttcaagcctgtgggagtagaaaaatctcattcccagagtcagaggagaagagacatgtaccttgaccatcgtccttcctctcaagctagccagagggtgggagcctaaggaagcgtggggtagcagatggagtaatggtcacgaggtccagacccactcccaaagctcagacttgccaggctccctttctcttcttccccaggtccttcctttaggtctggttgttgcaccatctgcttggttggctggcagctgagagccctgctgtgggagagcgaagggggtcaaaggaagacttgaagcacagagggctagggaggtggggtacatttctctgagcagtcagggtgggaagaaagaatgcaagagtggactgaatgtgcctaatggagaagacccacgtgctaggggatgaggggcttcctgggtcctgttccctaccccatttgtggtcacagccatgaagtcaccgggatgaacctatccttccagtggctcgctccctgtagctctgcctccctctccatatctccttcccctacacctccctccccacacctccctactcccctgggcatcttctggcttgactggatggaaggagacttaggaacctaccagttggccatgatgtcttttcttctttttcttttttt

SEQ ID NO: 41610 - DNA, 867 bp, Homo Sapiens
ctgtaatatgcaacggcacagctagttttcccgatttggataaaagttgatctgtatagtcaacatcttgaactatatttcaaatgaatttaaatatcttttaaagaaaaaaacacctaaaaataaatcttaacagaaaattctgttctgattatatcaaggcaaatttttcctttcttgcaaattgctttgtgtgttcaatgctaggtctgatagcgatagcttttagtagacagcggtaggtgcctgcagaacttgtgtttttctcatctttaaaatacaactacttatgctcttaaatcaaggctgtctgcttatttatactagcgtaggcaacacttggatttcccttcttagtatgcttcataactgctttacagagagcttttgcttgttctttctcatgtatctcgtgtttatgtgcacagtgccaaaagaagactgactgggtggaggctctgccttgcctcaagaaccatcccctgcagagcatccagggaggtttctcgccccaatagcctcacggcacagtactcttgggcagtaactggacaccttttatttgaagaaacaaactgaagaaaaaatgcttccttaagtgctgacagcctttttaaccaatacatttaaaatgtacagaacaaaaaaataaatcaaagactgatcttgtacagatattagttgttaccagcattcatgtgggaatcagagcaagacaaatatgttacacattctgtcctacatttctgtatgatctgaaattatgataaaaaatctgtccttttaaaaaaaacaaaaaaaaaacaaacaaaaaaaaaggggggggcaaaaccccgggcgcacccccctttaaagggcacagggaaa

SEQ ID NO: 41611 - DNA, 500 bp, Homo Sapiens
ttgagtatcactccagcatgatcgcagatgcggtgaagaaggtgatcaaagttggcaaggtgcggactcgagacatgggcggctacagcaccacaaccgacttcatcaagtctgtcatcggtcacctgcagactaaagggagctagagccctttatttcttccaaccttgcaaggaccacactccccatacccttcagtgcagtgtaccagggaagagaccttgtgcctctaagcagtggaccatggtcaccttgctgggtagagcctaggttgtccttgggccggcttccttaggggacagactgttgggtggtgatggggattgttaggatggagcccaggccacatggatgatgatgattctcccccacaggttcgaacctctgacatgggtggctatgctacttgccatgacttcactgaggctgtcattgctgccttgccccacccataggccctgtccatacccatgtaaggtgttcaataaagaacatgaacc

SEQ ID NO: 41612 - DNA, 623 bp, Homo Sapiens
ccaagcttgttcgtgtagcttcagaagttccctctccgacccaggctgagtccatactgcccctgatcccagaaggaatgctgacccctcgtcgtatgaactgtgcatagtctccagagcttcaaaggcaacacaagctcgcaactctaagatttttttaaaccacaaaaaccctggttagccatctcatgctcagccttatcacttccctccctttagaaactctctccctgctgtatattaaagggagcaggtggagagtcattttccttcgtcctgcatgtctctaacattaatagaaggcatggctcctgctgcaaccgctgtgaatgctgctgagaacctccctctatggggatggctattttatttttgagaaggaaaaaaaaagtcatgtatatatacacataaaggcatatagctatatataaagagataagggtgtttatgaaatgagaaaattattggacaattcagactttactaaagcacagttagacccaaggcctatgctgaggtctaaacctctgaaaaaagtatagtatcgagtacccgttccctcccagaggtgggagtaactgctggtagtgccttctttggttgtgttgctcagtgtgtaagtg

SEQ ID NO: 41613 - DNA, 872 bp, Homo Sapiens
  misc_feature (534)..(534): n is a, c, g, or t
tatgttcataaaggtttacttcaacttcagtggaagcaagatctggatagaggtttggaacttatcagcaaggctattgaaattgacaataaatgtgattttgcctatgaaaccatgggaactattgaagtacaaagaggaaacatggagaaagccattgacatgttcaacaaagctattaacctggccaaatcggaaatggagatggcccatctgtattcactttgcgatgccgcccatgcccagacagaagttgcaaagaaatacggattaaaaccaccaacattataaaacagggggaaagcagactgaccctctttttaaaagtttaccccctcttcaactgaaccctaaagacactgtcatgaactgtgttgaatggtggaaatcagtatttctgtttgtggtgttgttatttgttacatctgtttcatgtctaggtgttgtgggtgtggctgttgaaggaagtttgcagtcttgcagcttttattccctgtgcaacaaaagattagaacatgttaaagggatttttanataaagttgcaaagagtacaaatgataattggccatgcaaataaaaactgatttgttgattttttttttaaggggggttggcagttgattatgttctggatgattccgtctatatatgtgtgaataatgtaagtattttacagcatggtgattttttaattaacgtagtaaatgctgtaaaatagatttatattcagttaaccgcctttcagttgattttttgaaaagaacaaaggtttaatggggggattaaaggtaaaattgagaagacccctttaaaaccatttgtcagccatgccacaaatgccctcctgaattctggcagttttttagaaaat

SEQ ID NO: 41614 - DNA, 546 bp, Homo Sapiens
  misc_feature (514)..(535): n is a, c, g, or t
gggggcttcctgtttgtacaaggggccatttggcatacctttcacagcttttatcaggccaagttaaaggctgactacattttttcatcatgaggaaagcagttgaaatgaggcatgagttactgtgcattgggattttagaacaattttcttgtgacagctctttttgtgaagttaggttcttaaaagtgcccatgatggtcacttaaaatgtgcagtaatagcactgccaggatcaagcatgaaaggcttttaaattagatcatcccacagacaatacgtttgataatagttttttcttttaacctctttaagtattgattctgcttgagaatattgaagtacttgccagaagttgtggatttcagttttaacaaatgctattaaagtggagaagcacactctggtcttggaattccatttgaggatttagaagtgtcatgtttataactattcagttgtgtttgttgctggcttgttgtaaagcaataaaatttttttggtctttttgtannnnnnnnnnnnnnnnnnnnnnaaaaaacatgt

SEQ ID NO: 41615 - DNA, 629 bp, Homo Sapiens
ctgtgttcgtcaggtatgctctgacaaccaggtgtcgtccacgggcgggggcatgggcatggtgacagtggtcctgttgatgtcaccgatgatgctgagcgcctccttcagcgcgtggtgcatgtgcagcatctcgtcgtgctgctgtgcctgctctgccaactcctccatcagtgtgttctggttcccacatgagtacatattggccagcggctccgagatgatgaactccggggtctgagagtgggcaaacagggaagaaggttgggacctggtgcctgtgccgccctggctgccttgctgggcccttctgggactgtgcgctggacttggagccccttggagtatggcttttcacacgggcttctataccgcttcgactggaagatccacctccccactgccttttctcactcagatggggacaccgaggtccagaggaaaagacacctgtcaaatgtcacagatctgggaggggacttaagacttatcatgccaagaggacacctgtctactcagtttttttttggtggggcggggggcggtgatagggtctcgctctgtcaccaggcttggagtacagtgatgactgctcactgcagctccacctcctgggctcaaagtgacct

SEQ ID NO: 41616 - DNA, 606 bp, Homo Sapiens
aagggagcttgaagagggaatgtttgacagtcacagaaggttcctgcagcagatgcctcttttagccatttctcatttttttcctcaaattttacctactgaggctcaagccttcacagtgagctgatggtctctacaggggaggggagtctagggaatttatttggtatttgtaaggcaagaggtgatttctctctaatatatctgagttattgctcatttaaaactgttaagtccagtataattttccctgatatgaaaaaatgtgcatttttttcacttagcaacaaagtaccttctaatttccaatagtccgtgaaagttggggctgaagtacctaagtgtgaatgtctctcctgttaaactgagtgtagaaatctgaatttttaaaagagctgtaactagttgtaagtgcttaggaagaaactttgcaaacatttaatgaggatacactgttcatttttaaaattccttcacactgtaatttaatgtgttttatattcttttgtagtaaaacaacataactcagatttctacaggagacagtggttttatttggattgtcttctgtaataggtttcaataaagctggatgaacttatcgtt

SEQ ID NO: 41617 - DNA, 920 bp, Homo Sapiens
  misc_feature (796)..(796): n is a, c, g, or t
  misc_feature (807)..(807): n is a, c, g, or t
  misc_feature (867)..(867): n is a, c, g, or t
ttttgattaacatttggggcctgataggggaaatggtgaagcaatggaaaagaacagacaactaatgatttgcttctatgtccagaatattttacctttaaaaaaatgtcattggcaccataaataaggactgtgagagactgtttaaaagctgtgaaagtctgaaacctataagccaaggtgttccctgcctaaacttattgctgttcccacaaaggactaagcctgttcataagttaccaaagttgccattttggagatggaaattgacgaggagggaaggtcttttattggagagtatacagtacaagcagatcattctgccttagaggtgctaattcccgaaattagaagaccctttcttttccagtaatgaagttataaatatcagcttgttcatccaagccactggctgaggtgttaggaagaggaagagggtggtagaggaggtaagacagtagggaaagacaagggcccatgctcttagtggggaaaactcttggagccgtttactttgagctttgaacactgaaaccattgttggcagggttcagtcactgacagcacaagtttcactgaattgatccaagagtttagtgatttcaaaagccttggtctcaggagaagattaaactttcatattgggcagtggttcactttaaaacacacacatacacacacaaaacaattttttaagaaatcctaataagtaacatacccaaaatgctctgtcttgagtcatgagaaccatcagttcttgatattgtctagacttgcatctagagctacgttgtanaattcttttangcatgtgttagatttctgtgtaaactttgttaaatgtaaacttcatactacattgtcagntttttgttcttaataaaactataggatttattaaaaaaaaaaaaaaaaaaaac

SEQ ID NO: 41618 - DNA, 591 bp, Homo Sapiens
  misc_feature (555)..(555): n is a, c, g, or t
  misc_feature (557)..(560): n is a, c, g, or t
  misc_feature (562)..(565): n is a, c, g, or t
  misc_feature (567)..(577): n is a, c, g, or t
  misc_feature (579)..(581): n is a, c, g, or t
  misc_feature (583)..(585): n is a, c, g, or t
tgatcaagaatgttcagaagaatgatgtaaatgtggaattttcagaaaaagagttgtctgctttggttaaacttccttctggagaggattacaatttgaaactggaacttcttcatcctataataccagaacagagcacgtttaaagtactttcaacaaagattgaaattaaactgaaaaagccagaggctgtgagatgggaaaagctagaggggcaaggagatgtgcctacgccaaaacaattcgtagcagatgtaaagaacctatatccatcatcatctccttatacaagaaattgggataaattggttggtgagatcaaagaagaagaaaagaatgaaaagttggagggagatgcagctttaaacagattatttcagcagatctattcagatggttctgatgaagtgaaacgtgccatgaacaaatcctttatggagtcgggtggtacagttttgagtaccaactggtctgatgtaggtaaaaggaaagttgaaatcaatcctcctgatgatatggaatggaaaaagtactaaataaattaatttgctctcntnnnnannnnannnnnnnnnnnannnannnaaaaaa

SEQ ID NO: 41619 - DNA, 900 bp, Homo Sapiens
ttgacttacttttgtgatggactatagagggaggcgaaaaacaggggaagcctatgtgcaatttgaagaaccagaaatggccaaccaagccctgttgaaacacagggaagaaattggtaatcgatacatcgagatatttccaagcagaaggaatgaagttcgaacacatgtcggttcttataagggaaagaaaatcgcatcttttcctactgctaagtatataactgagccagaaatggtctttgaagaacatgaagtaaatgaggatattcaacccatgacagcttttgaaagtgagaaggaaatagaattgcctaaggaggtgccagaaaagcttccagaggctgctgattttggaactacgtcttctctgcattttgtccacatgagaggattacctttccaagccaatgcccaagacattataaacttttttgctccactcaagcctgttagaatcaccatggaatacagctccagtgggaaggccactggagaagctgatgtgcactttgagacccatgaggatgctgttgcagcgatgctcaaggatcggtcccacgttcatcataggtatattgaactgttcctgaattcatgtccaaaaggaaaataagactctaggggctccagataataagggtgaagcaagaagcatttcatttgcacatctttcttggacttgggatatacagttccagtttattagcagcaactgctagggaaatgattttggtgttttgggttaattgcttctaagaaaagtttcatagtggactgtttagaagaagaaatgaaagatccagtttgggattatgaaataaaccacaaattaaaatttttgtttaaactgtccaggatctgatttaaaaatatggtctttgttttatatgattaaat

SEQ ID NO: 41620 - DNA, 818 bp, Homo Sapiens
  misc_feature (809)..(815): n is a, c, g, or t
gctgaaagactctgaatctacgcctgtggatgatcgtatttctttggaacaaccaccaaatggaagtgacacccccaatccagagaaatatcaagaatcacctggaatccagatgaagacaagacttaaagagggggctagccagagagctaagcagagccggagaaacctacccaggcggtcttccttcagattgcagactgaagcccaggaagatgattggtatgactgtcatagggaaatacgtctgagtttttctgatacctatcaggattatgaggagtactggagagcttactacagggcatggcaagaatattatgctgccgcttctcattcatattattggaatgctcagagacatccaagttggatggcagcttatcacatgaataccatttatctacaagaaatgatgcatagtaaccagtgattataggatatacctgagaccatcaggaactgtcaacaaatgatacctttggatatccatcctcctcgacttatagtacagtggtgtatagtggcatttctgataaacttgaaaagacttgagtctttccactgggacacatccatttttcagattgttttgatttaggccaggtatattatcttcatttttaagagtttctttaagaaacttcatcagattgttgaaagataatttttgggacatagagctgaaagtttcagggtgccatttttctataagatcttcccaaaagaaacatttaaaaagatgacatataccaccacttacttaaaaaccataaaagcaatagatttgattagtaaaaaaaaaaaannnnnnnaag

SEQ ID NO: 41621 - DNA, 700 bp, Homo Sapiens
tggtccgcttctctgcactatgtcgggtggcctcctgaaggcgctgcgcagcgactcctacgtggagctgagccagtaccgggaccagcacttccggggtgacaatgaagaacaagaaaaattactgaagaaaagctgtacgttatatgttggaaatctttctttttacacaactgaagaacaaatctatgaactcttcagcaaaagtggtgacataaagaaaatcattatgggtctggataaaatgaagaaaacagcatgtggattctgttttgtggaatattactcacgcgcagatgcggaaaacgccatgcggtacataaatgggacgcgtctggatgaccgaatcattcgcacagactgggacgcaggctttaaggagggcaggcaatacggccgtgggcgatctgggggccaggttcgggatgagtatcggcaggactacgatgctgggagaggaggctatggaaaactggcacagaaccagtgagtggtgagagctctgtcagtgacaaacactcctttggcctgttgaatttgctgaagaacatcacctaaagtctgcacacgagcccatttttaccaagatttgatcagtgtctttactgagctggaagcctctgaaagttattaaaggacagaatccaaaagaatgcctttaattcttgtctgagaatcttggccatgtgtcagattatca

SEQ ID NO: 41622 - DNA, 706 bp, Homo Sapiens
aaaaaaaagtagaaaatgcagcaaaacaagcagaaaaaagaagtgaagaggaagaagcccctccagatggtgctgttgccgaatacagaagagaaaagcaaaagtatgaagctttgaggaagcaacagtcaaagaagggaacttcccgggaagatcagacccttgcactgctgaaccagtttaaatctaaactcactcaagcaattgctgaaacgcctgaaaatgacattcctgaaacagaagtagaagatgatgaaggatggatgtcacatgtacttcagtttgaggataaaagcagaaaagtgaaagatgcaagcatgcaagactcagatacatttgaaatctatgatcctcggaatccagtgaataaaagaaggagggaagaaagcaaaaagctgatgagagagaaaaaagaaagaagataaaatgagaataatgataaccagaacttgctggaaatgtgcctacaatggccttgtaacagccattgttcccaacagcatcacttaggggtgtgaaaagaagtatttttgaacctgttgtctggttttgaaaaacaattatcttgttttgcaaattgtggaatgatgtaagcaaatgcttttggttactggtacatgtgttttttcctagctgaccttttatattgctaaatctgaaataaaataactttccttccacattacatgttaaaaaaaaaaaaaaa

SEQ ID NO: 41623 - DNA, 535 bp, Homo Sapiens
tgcagctccagcagcaatggcagtgacggcgttggcggcgcggacgtggcttggcgtgtggggcgtgaggaccatgcaagcccgaggcttcggctcggatcagtccgagaatgtcgaccggggcgcgggctccatccgggaagccggtggggccttcggaaagagagagcaggctgaagaggaacgatatttccgacattacaggttatgctttgagatctctttggggtgaaggattgaaattaaaccctgagccaccgtgtccttgtagagcacagagtagagaacaactggcagctttgaaaaaacaccatgaagaagaaatcgttcatcataagaaggagattgagcgtctgcagaaagaaattgagcgccataagcagaagatcaaaatgctaaaacatgatgattaagtgcacaccgtgtgccatagaatggcacatgtcattgcccacttctgtgtagacatggttctggtttaactaatatttgtctgtgtgctactaacagattataataaattgtcatcagtgaa

SEQ ID NO: 41624 - DNA, 1017 bp, Homo Sapiens
  misc_feature (935)..(935): n is a, c, g, or t
  misc_feature (940)..(940): n is a, c, g, or t
  misc_feature (948)..(948): n is a, c, g, or t
ggaattcccgggattctgccttctgttgagaattatcaccatgacacctgccataccgtatagagagccaaggtacagccgttagagactatctaattgagcccctacattttgtagttaaggaaaactgaggcctaaatgtgaccaaaccaacattgtaatccagtcccttcttggaacctaaattgaactgccaagtactgcgcatgcaagagaccctttattggccttacagtgggccattcatttctataggcaaagaaagctctagacagattggaataggaaatggatatttgccttttagctacacccctttgtctgtcttcctcattttgttcctttttttttccctaaaggggagtcaagttccctgggttgttcccctcataaggtattagggacttgtgtcacatctctctggagttttctattttaaagaggaatctgaaagcaataagctctttggtcttcttaagatggctacacctcaatttaagatggggtattctttcactagttgaggagtagaagaggatgaccagctagactcccatggaattggaactcctattccttgcttagacattacaggttatgctttgagatctctttggggtgaaggattgaaattaaaccctgagccaccgtgtccttgtagagcacagagtagagaacaactggcagctttgaaaaaacaccatgaagaagaaatcgttcatcataagaaggagattgagcgtctgcagaaagaaattgagcgcccataagcagaagatcaaaatgctaaaacatgatgattaagtgcacaccgtgtgccatagaatggcacatgtcattgccccacttctgtgtagaacatggttctgggttaactaataatttggctgtgtggctactaaccgattataataaatttggcctccctggaaacnacaancaacccanaccacaaaacaccacacacaatacacaccctatcccttattttcctctcacacaaccacataactgggg

SEQ ID NO: 41625 - DNA, 543 bp, Homo Sapiens
ttttttttttttttttttaagaattaaaagtttaattctgaaccattttttaaaaccgcattttcccttgaagcatcgtatcacagcaggttacaacaactttgggaaaaaaggcaactggtaaactgtccaaaacaaggttccaaataacaccccttacggatttaccctacccaaacatatcccaaatagtttttgatcaaaaacatgaaatagatccacctgcttattttaagcatattaaaaaggaaactaattgggccattttccatttgtccattttaaacaaaaaggctacacaattgttacactttattcagattacaattaattagagtgattatgaattagggttctacaccattacccaattcttaaaaattaaaaattgctgtagcagtattcactataacttaacactacgagagacttaaaaaacagttactgcaaaaaaaaaaaaaaaaaaaaaaaaaggagctacttcaaagcaagcaaggtcagtaccattacagatattcttaaaaaaaaaaaaaaaaaaatttt

SEQ ID NO: 41626 - DNA, 550 bp, Homo Sapiens
gcctactggtacaatcccaaaccatgggggtttctcacagctttacaccaaagggcatcactatccctcaaagagagaaacctggacacatgtaccaaaacgaagattacctgcagaacgggctgccaacagaaaccaccgttcttgggtttggcattactggatccctctcaattatctctggaaaacaatcaactaagccctttgacctgagcagcttgacctcaaatgcagtgagttctgttactgcaggagcaggcctcttcctccttgctgacagcatggtagccctgaggactgcctctcaacattgtggctcagaaatggattatctatcctcattgccttattcggagtactattatccaatatatgaaatcaaagattgtctcctgaccagtgtcagtttaacaggtgtcctagtggtgatgctcatcttcactgtgctggagctcttattagctgcatacagttctgtcttttggtggaaacagctctactccaacaaccctgggagttcattttcctcgacccagtcacaagatcatat

SEQ ID NO: 41627 - DNA, 592 bp, Homo Sapiens
ccactttttcttttatttcataccaataatttaaagattgatatgctaaaaacaatttgcacagcactaaagcatgagctactttcatctaaacctgtaaaaatatgaaagatttttatattttttcactgggaagaaattcttcctggatgaaattacaaatatgtgtagaatatatttaataaaagacttataaaatacctaactacaggacttaaaatatagattggcgcgtagtatatagaacaatattccatataaataagtttagcctttataaaaatgaagttgcaggctgacattacattctgtacttactaagtgtcaacagcccttacaaacattaaatgtaaatggtttcaaatggtcagcgttgtttaaatgtaatcatgttattttattcattgttaatgctttgatgaaaaggctttatatgcagtagatctacgaaaatattgttcatactgatcagaattaaatttgtatagagcagagttttaaaatgaatgtaaatagcactaaacgttttctttctgcaacctgtacttacagattcttcctgtaaactaaaaaaaaaaaaaaaacctcgtgc

SEQ ID NO: 41628 - DNA, 646 bp, Homo Sapiens
caatatgaaaaaaaagaataaaaagtagcagtaaaattatatactgaaaacaccaaaaatttagatgccttaatagtatatacgtgaaatactcagctgtccctttaaaaataattccttggactgcctggtggttaaaatacgattcctcatatccaaggctacttttgaagatccctctgccaaaaatatagctcacttatctaaaggtgagagctgcatagatccagtaatgtacataaagcctgaatgatgagcctatgtccctgcctaacgctggtgtctcactcatctcttttacctaaattgtcctgaactttgttaagtgttctggacaaggccaagcttttctttattaaaacctcagcatgtctccctgatctgaactatttgctttctcttcaagataagttgtattttaccatggaaaaatacagtatctaacattaccattcacgttaaatgaagtttcctcataacatttatctttagttttatgaagtcatcgtgaccaatgttacagtaatttctgttagctgattgtggtaaacaatgtttaatgtgaaaagaaattaaaactttcttcatctgttgtagaatatttctcttctttaaaatggcttctattcataaaaaaaaaaaaaaa

SEQ ID NO: 41629 - DNA, 828 bp, Homo Sapiens
cacgagggagaaggctgcctcctaggctctgctcagtcatcttgcaattgccacactgtgaccacgttgacgggagtagagtagcgctgttggccaggaggtgtcaggtgtgagtgtattctgccagcttttcatgctgttcttcagagctgcagttatgccagaccatcagcctgcctcccagtagaggcccttcacctggagaagtcagaaatctgacccaattccaccccctgcctctagcacctcttctgtccctgtcattccccacacacgtcctgttcacctcgagagagagagagagagagcacctttcttccgtctgttcactctgcggcctctggaatcccagctcttctctctcagaagaagccttctcttcctcctgcctgtaggtgtcccagaagtgagaaggcagccttcgaagtcctgggcattgggtgagaaagtgatgctagttggggcatgcttttgtgcacactctctggggctccagtgtgaagggtgccctggggctgagggccttgtggaggatggtcggtggtggtgatggaggtggagagcattaaactgtctgctctgctaaataatataataaatataaatattaatattggcctatctcggcctctcgcttcttaggaccgttaatttagtcctttattgggttaatattattaaaatgaaaattaatatcaaatttcgtgtccctatttcttttgtgattttcctttgttttgtctataaccgggtaataatttctaaaatctgtcctttggacaaatgatcacagtaaatctcatttccaaattttcataactaatttta

SEQ ID NO: 41630 - DNA, 748 bp, Homo Sapiens
cggagagccacctgcgggccatcctaaagagcaggaagccatctcgctggctgcagaccttcctgagctccagccagtacgtgacctgtgtggagacctacctggaggatgaggggcggctggacctggtggtgaagtacctgcagggcgtctaccaggaggtgggggccaaggtgctccagcgcaccaacggcgaccggatccggttcattctggacgtgcttctgcccgaggccatcatctgtgcgatctctgcggtggacgaggtggactacaagacggctgaggagaagtacatcaaggggccttcgctgagctaccgggaaaaagaaatatttgacaaccagctccttgaagagcggaaccggcgccgtcggtgagggagcagccggctgtgctgtcagcggggcctggcggtggaagcgcctccagtgtgcatgagcgtgtctgaagatggggggctcagggggcacgtttgcgtttggacctgtctgtgcgttctcctgcgtggcagtcctgatttccatgcttctggagaatccatttcgttaacactgaaagccagttctcttttcctggcagtttttttcattttatttttggcattttttacaagataccgttcgggaaaggcttttgaaaggacggaaagcgtattcactgtgcgccagtactcctggctgtgctgtggtttctcccgacgtgcacatcgatctcgtatgtgtggcatctgatattaaacgggagg

SEQ ID NO: 41631 - DNA, 631 bp, Homo Sapiens
aggagcgaggcctgggtggcgtttcggacgaggcacccacttgtgatggggtccttgtgcggtggggaccggggccggcgggctccaggccagcacacctaacccatggatgtggaacctacggccgagaaggaatgttgcatgagtcggatcccagtccattgtcagtggagggtgagggtgaccccatctgctatttttgtgctcatcctcatacaaccatttggggatgtgcctattagggctccgtaagaactcagatgcctgggaagcccagcccctcaggtgcccccacacacagccttcccttgacgcctacatttctaggcacatgtgaggcatctttcctggagccccgagccagccctgtccctccccagtgcagcatggcactcaggagatacaggctggacatggggcagtcgttctggggaggcctggcctagcagccacccacctgagccctcccggccaggcttcgtgctggggtgggccatgtgccaggacaggagggtcccggcggaaagccagccccggactcatcgtgacattgagatcccactggagggtaggggtggtaataaacttctccaaacgaaaaaaaaaaaaaacaaaaaaaaaaaaaaaaaaa

SEQ ID NO: 41632 - DNA, 849 bp, Homo Sapiens
caccatatccagcctttgccgaatacatcctatctgccacacatccagcgtgaggtccctccagctacaaggtgggcaccatggcggagaagtttgactgccactactgcagggatcccttgcaggggaagaagtatgtgcaaaaggatggccaccactgctgcctgaaatgctttgacaagttctgtgccaacacctgtgtggaatgccgcaagcccatcggtgcggactccaaggaggtgcactataagaaccgcttctggcatgacacctgcttccgctgtgccaagtgccttcaccccttggccaatgagacctttgtggccaaggacaacaagatcctgtgcaacaagtgcaccactcgggaggactcccccaagtgcaaggggtgcttcaaggccattgtggcaggagatcaaaacgtggagtacaaggggaccgtctggcacaaagactgcttcacctgtagtaactgcaagcaagtcatcgggactggaagcttcttccctaaaggggaggacttctactgcgtgacttgccatgagaccaagtttgccaagcattgcgtgaagtgcaacaaggccatcacatctggaggaatcacttaccaggatcagccctggcatgccgattgctttgtgtgtgttacctgctctaagaagctggctgggcagcgtttcaccgctgtggaggaccagtattactgcgtggattgctacaagaactttgtggccaagaagtgtgctggatgcaagaaccccatcactgggtttggtaaaggctccagtgtggtggcctatgaaggacaatcctggcacgactactgcttccactgcaaaaaatgctccg

SEQ ID NO: 41633 - DNA, 660 bp, Homo Sapiens
cccacgcgtccggctctgttgcccaggctggcgtgcagtggtgtgatctcggctcacttcagcctccgccacctcaaggcagttcaagcaattctcctgcctcagcctcccgagtagctaggactacaggcgtgtgccacctctcccggctaatttttttgtatttttagtagagacggggtttcaccgtgttagccaggatgatctcgatctcctgacctcgtgattcacccccctcggcctcccaaagtgctggaattactggcgtgagccaccatgcccagcctcaaatatgtttttagaaaatatcattgtcctcctcctcttaagatttttttaagttattttgctcaagtacttaagtagtctggctcaagtactttgtttacaattaaaatggatattatagcatttaatagaagaaatggttatggcttatccaaaaagaatgtcagcatgacctggtgtagacttaaaaaactacatgtttgtgaatattttataatgtggaatgatcattgaaatatcaaggattctagtaattgtatttcctgaataaatgtatgtttatgaattttctaacttacattttgttgtgtcctctgccaacaatctggttttataattgttgtctaaagtttgctagtagtgtttcttcaa

SEQ ID NO: 41634 - DNA, 698 bp, Homo Sapiens
cgcagctgcatggggctggagtggtttccagagctctatcctggttaccttggactaggggtgttgccaggaagcctcagtgttggaatgcaatgacccagaagccacaacttatcagtccccaggggaaagactctcgcaaggctggatcaggtgcaacaccaccataaggaagagtggattcggtggcatcacgatgctcttcacaggatacttcgtcctgtgttgtagctggagtttcagacgtctgaaaaaattgtgccgacccctgccctggaagagcacagtacctccatgcattggtgtggcgaagacgactggggattgccgctctaaaacatgtttggattaggaagcacgtttaagtaggagaagccttcgtgacttctctctagtgccttcgtgccctgtgttgcccactgaattgccctgtaacacctaagtgtagtggtagcattaagggatagcttttcagccctcaaggttatcaggagcatttgtatcactgctataaataaagtagtatcacttgtcataatcagggtgctgaaacataatgaaaaggtttaacttagtcacagtaaatattttatatccctgaaaataagttatttaatgagaatagaactatttaatgatccatgagtcctaaaaggatatctgccttgtattgccaagtttaaggcaaaggtgagatc

SEQ ID NO: 41635 - DNA, 616 bp, Homo Sapiens
atgtctttcatctttgagtggatctacaatggcttcagcagtgtgctccagttcctaggactgtacaagaaatctggaaaacttgtattcttaggtttggataatgcaggcaaaaccactcttcttcacatgctcaaagatgacagattgggccaacatgttccaacactacatccgacatcagaagagctaacaattgctggaatgacctttacaacttttgatcttggtgggcacgagcaagcacgtcgcgtttggaaaaattatctcccagcaattaatgggattgtctttctggtggactgtgcagatcattctcgcctcgtggaatccaaagttgagcttaatgctttaatgactgatgaaacaatatccaatgtgccaatccttatcttgggtaacaaaattgacagaacagatgcaatcagtgaagaaaaactccgtgagatatttgggctttatggacagaccacaggaaaggggaatgtgaccctgaaggagctgaatgctcgccccatggaagtgttcatgtgcagtgtgctcaagaggcaaggttacggcgagggtttccgctggctctcccagtatattgactgcccaactttcttgtacaaag

SEQ ID NO: 41636 - DNA, 667 bp, Homo Sapiens
tgggcctggttcgggagcccccggcagcctagaggaggaggaggagccgggactggtcgagggtgacccgggggacggcgccattgaggacccggagctggaagctatcaaagctcgagtcagggagatggaggaagaagctgagaagctaaaggagctacagaacgaggtagagaagcagatgaatatgagtccacctccaggcaatgctggcccggtgatcatgtccattgaggagaagatggaggctgatgcccgttccatctatgttggcaatgtggactatggtgcaacagcagaagagctggaagctcactttcatggctgtggttcagtcaaccgtgttaccatactgtgtgacaaatttagtggccatcccaaagggtttgcgtatatagagttctcagacaaagagtcagtgaggacttccttggccttagatgagtccctatttagaggaaggcaaatcaaggtgatcccaaaacgaaccaacagaccaggcatcagcacaacagaccggggttttccacgagcccgctaccgcgcccggaccaccaactacaacagctcccgctctcgattctacagtggttttaacagcaggccccggggtcgcgtctacaggggccgggctagagcgacatcatggtattccccttactaaaaa

SEQ ID NO: 41637 - DNA, 733 bp, Homo Sapiens
tttttttttttattttttaaaaaaaagatatactgtggaaggggggagaatcccataactaactgctgaggagggacctgctttggggagtaggggaaggcccagggagtggggcagggggctgcttattcactctggggattcgccatggacacgtctcaactgcgcaagctgctgcccatgtttccctgccccacttcacccccttgggggctgctcaagggtaggtgggcgtgggtggtaggaggttttttttttacccagggctctggaaggacaccaaactgttctgcttgttaccttccctccgtcttctcctcgcctttcacagtcccctcctgcctgctcctgtccagccaggtctaccacccaccccacccctcttctccggcaccctgcccctccagattgcctggtgatctattttgtttccttttgtgtttctttttctgttttgagtgtctttctttgcaggtttctgtagccggaagatctccgttccgctcccagcggctccagtgtaaattccccttccccctggggaaatgcactaccttgttttggggggtttaggggtgtttttgtttttcagttgttttgtttttttgttttttttttttcctttgccttttttcccttttatttggagggaatgggaggaagtgggaacagggaggtgggaggtggattttgtttacttttttagctcatttccacgggtgggaattttttt

SEQ ID NO: 41638 - DNA, 683 bp, Homo Sapiens
  misc_feature (623)..(623): n is a, c, g, or t
ggaactggatcagctcctttgtggcagtaaagcagacacttgggatgcaaagacactgatggaatgctgtaggcctgatcatggttatactcatgacagtcgggctgtgaagtttttgtttgagattctcagtagttttgataatgagcagcagaggttatttctccagtttgtgactggtagcccaagattgcctgttggaggattccggagtttgaatccacctttgacaattgtccgaaagacgtttgaatcaacagaaaacccagatgacttcttgccctctgtaatgacttgtgtgaactatcttaagttgccggactattcaagcattgagataatgcgtgaaaaactgttgatagcagcaagagaagggcagcagtcgttccatctttcctgatcatagcaagaaatgcagtgtctgcctgttacagcaaaagaaacaaatcatgatttcttttctaatgttatcacctgagtcaaggaaacatgttacgccttcttgttgtaggaaaaacggcttgcagattataaagagacatttggttgatattcattaatggccccatggacttaaagtgatcaggccctaaaacgttgttgtgatgaggtttctttagcangttcttgtttacattatcatttatttgatgagtgaagtttttaacatgctttgctgtgtg

SEQ ID NO: 41639 - DNA, 601 bp, Homo Sapiens
cgcgtccgatctgtgtgcgctgtactgtgaaggacgcaccaagccgaaagtaaaaacacaaaaacagatacccccctacttaatgtaattcaggactccaaccaagaggatttcttcaaatctcagcaaagctacaggactggtactcaagccagcctgtaaacggtgctatttctattccttatgggatcatttttccaggactctttgaagaaaagaaaaaacaactaaaaaaatttttgacactttttgtattttttccttaagagctatttgtggttgttgaggtttgaaaagctgactgttttttttgcaggggttcccaccaatttggaaggcattgaagcttgcaccttttcatgtacagcattaaaattttacctctctctgggatttaccagcttaagagtccaactcacttccagtgcccaaaagggcacccaccagaaattccagtaaatcctcatttgaggaagctctcccttgtttactctgttaccacattggggaaatttttaagtttttcactttgggagtttttgtttgtttcttcttttcctttatccacttttcttcttcctggtagactaggtttatttat

SEQ ID NO: 41640 - DNA, 574 bp, Homo Sapiens
gtgccgctgtctctgaggggtgggggtgccgctgtctctgaggggtgggggtgccgctctctctgagggggtgggggtgccgctttctctgagggggtgggggtgccgctctctctgagggggtgggggtgctgctctctccgaggggtggaatgccgctgtctctgaggggtgggggtgccgctctaaattggctccatatcatttgagtttagggttctggtgtttggtttcttcattctttactgcactcagatttaagccttacaaagggaaagcctctggccgtcacacgtaggacgcatgaaggtcactcgtggtgaggctgacatgctcacacattacaacagtagagagggaaaatcctaagacagaggaactccagagatgagtgtctggagcgcttcagttcagctttaaaggccaggacgggccacacgtggctggcggcctcgttccagtggcggcacgtccttgggcgtctctaatgtctgcagctcaagggctggcacttttttaaatataaaaatgggtgttatttttatttttttttgtaaagtgatttttggtcttc

SEQ ID NO: 41641 - DNA, 691 bp, Homo Sapiens
cgcgtccgggtgtgcggggtccccacccaggtggtgtgtacggccttcagcagtcacatcctggtggtggtgacccagtttgggaagatgggcaccctggtctccctggagcccagcagcgtggccagtgacgtcagcaagcctgtgctcaccacaaaagtccttctggggcaggatgagcctctcatccatgtctttgcaaagaacctggtagcgtttgtgtctcaagaagctggaaacagagcagtcctcctcgccgtggccgtgaaggacaaaagcatggaggggctgaaggcgctgagggaggtgatccgggtgtgccaggtgtggtgacctggaggcagccgccccgcgctgctcagcaggacacgtgaacacccagacacccactcagggactcaagtctcacctccctccccggtggagggaggaactttggcactagcccttggagccaggaaaaaagactcgtgtctcaggcagactcttactctggttactaagatcatctgtgcatgacggggagggtggaacaggtcccggaggagtcgtgaatggttctcaccaggacctgaatcgttgcttgtgtttgagaattggaggaatgagtcagcaggcgtggctcatggcccccccgtgtgcaggatcaattgtaggaggaaatttctttttttattaaaagcgaatgtgt

SEQ ID NO: 41642 - DNA, 499 bp, Homo Sapiens
ggtttcttcattctttactgcactcagatttaagccttacaaagggaaagcctctggccgtcacacgtaggacgcatgaaggtcactcgtggtgaggctgacatgctcacacattacaacagtagagagggaaaatcctaagacagaggaactccagagatgagtgtctggagcgcttcagttcagctttaaaggccaggacgggccacacgtggctggcggcctcgttccagtggcggcacgtccttgggcgtctctaatgtctgcagctcaagggctggcactttttttaaatataaaaatgggtgttatttttatttttttttgtaaagtgatttttggtcttctgttgacattcggggtgatcctgttctgcgctgtgtacaatgtgagatcggtgcgttctcctgatgttttgccgtggcttggggattgtacacgggaccagctcacgtaatgcattgcctgtaacaatgtaataaaaagcctctttcttttt

SEQ ID NO: 41643 - DNA, 716 bp, Homo Sapiens
  misc_feature (499)..(499): n is a, c, g, or t
  misc_feature (510)..(510): n is a, c, g, or t
  misc_feature (539)..(539): n is a, c, g, or t
  misc_feature (550)..(551): n is a, c, g, or t
  misc_feature (563)..(563): n is a, c, g, or t
ggaggcgggggcctcccagtttgaaacaagcgcagccaagctcaagcgcaaatactggtggaaaaacctcaagatgatgatcatcttgggagtgatttgcgccatcatcctcatcatcatcatagtttacttcagcacttaaatccccgaggagtctgccctgcctagagaagggcctctcccccaaccctcagccgttcctccacctctcagccatatctttcagccccccctcccctggatccgtgtgtgtgtgtgtccgtgtgtgtgtccccctgtaaatagccagctgttatttatacatatataatattatatatatttggtctgtttgtagttttattactagatgatttttccggttgtccttaacaccccttcctgaggttcccttcacccctctctcttgccttccttccctttccctttcttcctgactagccccaagtcccttcatttgcatctgctatgcaatagtccctctcctttccttcttctntcctcagattnagctgatccttccctccaccctggccttncctttctcttnntctctcactctncccgtcatgctccctctgcccccgccaaaaaaaaaaaaaaaaaaaaaaaaaaaaaacatgtcgccgcctcgccctcgagagcttctagaccatcgtttgcgcgcgggcaagtaggtagtgacatggtctagctgtttctaagaatctggtcag

SEQ ID NO: 41644 - DNA, 445 bp, Homo Sapiens
gcacgagtgactgccccccctgaatttagggtgggggtactagtcactgccaatgtgtgtatgggacttgctggaaaacggggatgcttgcccctctccaggactattgagcccagagagagctgtcctctcattgggtgaactgattgaggaagggtctattgtctttttaaatggcacaattttaagggtttgagggtacagtcccttaacctgccacgggagggggcccccaaactttcttccccccacacttctggttttctgtgtggagggggagcagggatatctaagctgtggtgtgaaagggtaggagagatgctggaggtgggggtgctgtgttctagaccccccatattatcccagtgtcccctgcccccctcttcccccaccccatgcccccaattctgtggcgcatccagattgtgaaaatgtacaataaatg

SEQ ID NO: 41645 - DNA, 583 bp, Homo Sapiens
gacgagaagcaattctattccaaggccaagacctactggaaacaaatcccacccacggtggacggcatgcttggggggtatggccacatctccagcatcgacatcaacagctcccggaagtttctgcagaggtttttgagggaaggcccgaacaagacaggaacgtcctgtgccctggactgtggagctggcattgggaggatcaccaagcggctgctcctgccgctgttcagagaggtggatatggtcgacataacggaggacttcctggttcaagccaagacctacctgggggaggagggcaagagggtgaggaactacttctgttgtgggctccaggacttcaccccggagccggactcttacgacgtgatctggatccagtgggtgataggccacctcaccgatcagcacctggccgagttcctgcggcgctgcaagggcagcctccgccccaacggcatcatcgtcatcaaagacaacatggcccaggagggcgtgattctggacgacgtggacagcagcgtgtgccgggaccttgacgtggtccgcaggatcatctgcagtgcaggcctcagcctcc

SEQ ID NO: 41646 - DNA, 582 bp, Homo Sapiens
ctctttaatttggagacactccaccacaaacttttcactttagaggtagcttgccatctctcaggagccctcaccattgtgtccattcactgtgtatagatggcagaacttttgaggtgcaatgtttaattgttaaaaatagtagccacgactttatcaggcagccccaaactggtgcataatgcatggtacaagaaatatttatgtattttttggaattttgtaatatttagtaagagtatatgaaaggattgctactgtatcagaaatattgtttcaatttagtctatcctggatatgtactaacgaatattaccaccagagaagagagctttctacaaaagtcactacagattttgctatattgctttgtagatagatttttacttttgcctaaaagcatttatccttcataccaattgtaacatctgacaccatgtagaagctaaaagtttagagggagtgagcgttttctcaagaccttcctcaagcattttatctttagaagagaaactgatgggcacctgatactctgtctaaatacgtttgttatatgtgttttgccctgtgccattcatttgg

SEQ ID NO: 41647 - DNA, 582 bp, Homo Sapiens
ggcttgagcaatctgtatacaattaagagatttctgacatttattcttacactaaatggatcaactctaggatttaggcatgttaacttctgttgtgttttgaatctctccagagttgcatgtagatagcatttatttctgtgcccttaaacccatttagaaaataactacaaagtaaaaatgtagaggaaatagaaatgtattttttcatgaacattttgatacaaatttcatcatttaatgattcaccaatttcttgcattaatttgaatttaagcatttaattcaaagagaggggagcatccattattgatacatgtgggcttttaaaaactccatcctttataaatagtcaaggtttgggccacacaaagtatatttttatcatggaaaaatttcaactcctcaagccgtaatgttgaacagaattggagtattttctttataatttcttgaacaggcaaatgaaagcttattatagaatgcatgtattttcttttatctttggaacatcagcaccagtatattgctggcagctattgtattaaaaaataaagtatattttcactatcaaaaaaaaaa

SEQ ID NO: 41648 - DNA, 583 bp, Homo Sapiens
tatgcttaaatgtacattttcctgctggtaaaaggagaaactgagaggtgtcctgcagaccggctgaccactccttttggagacggcaggaggcctgagcgatccgtactcagaacgtccaggagagacgcatggcccgaagtcaaagtgctggaattttccaaaacagcctgttctctcctctctcctccccagagcaccccctgccatcaggggggttgaaatccctctcccccaggagccctgctgctttgcttggtggtagggcaggagagcaaacaaacagtcatggtctaaaacccacatagcactttgctcttagttacatgtaaaattttagatttctaaaacaggtgggcaatcattttgaatactgttctgtgaccctgactgctagttctgaggacactggtggctgtgctatgtgtggccatcctccatgtcccgtccctgtagctgctctgtttagacagcggacagacgctcacgcccaggggatgtcctcacgctgtcgccgcgcggtttcccttcgcagatgtgtatactcatgataggtcagaaagtgtatccgctacgataaagt

SEQ ID NO: 41649 - DNA, 612 bp, Homo Sapiens
atggccctgctctcgcgccccgcgctcaccctcctgctcctcctcatggccgctgttgtcaggtgccaggagcaggcccagaccaccgactggagagccaccctgaagaccatccggaacggcgttcataagatagacacgtacctgaacgccgccttggacctcctgggaggcgaggacggtctctgccagtataaatgcagtgacggatctaagcctttcccacgttatggttataaaccctccccaccgaatggatgtggctctccactgtttggtgttcatcttaacattggtatcccttccctgacaaagtgttgcaaccaacacgacaggtgctatgagacctgtggcaaaagcaagaatgactgtgatgaagaattccagtattgcctctccaagatctgccgagatgtacagaaaacactaggactaactcagcatgttcaggcatgtgaaacaacagtggagctcttgtttgacagtgttatacatttaggttgtaaaccatatctggacagccaacgagccgcatgcaggtgtcattatgaagaaaaaactgatctttacccaactttcttgtacaaagttggcattataagaaagcattgc

SEQ ID NO: 41650 - DNA, 526 bp, Homo Sapiens
aattcggcactaggaggaaactgctacttgtggacctcaccagagaccaggagggtttggttagctcacaggacttcccccaccccagaagattagcatcccatactagactcatactcaactcaactaggctcatactcaattgatggttattagacaattccatttctttctggttattataaacagaaaatctttcctcttctcattaccagtaaaggctcttggtatctttctgttggaatgatttctatgaacttgtcttattttaatggtgggttttttttctggtaagatttagacctaaatcgcatcatgccaacttgtgactttgagactattcatcaagaatgaggatatagtagccatgacatagcttgagctatagcctttaattccttactttggctatgggtcgagggtgagtttgaagaggttctgattttcttgtaacctgggaaagccatgaccttgtgcccgattctttcagattgctttgggtaataaatattggtggtggtatctg

SEQ ID NO: 41651 - DNA, 762 bp, Homo Sapiens
aagtgagtagctgagcagctggagccatcccaagcatcagtgtctcagagtcctcctcgcccctttcttcaccccgccccccaacccccagactttcctggagcatctgccctttgctcctagcagcctccccaggaagggactgcagaggcgggcaagccctctctatgtgtttttatctccaccttccccggaatctggggagggcttttgtttttacgttttcaagttcagcattgtattcggacagaagctgtgactgaagactcagtgccaaggaaaggggcttcttgtgtgtccctcgggtttggggctcttctcagagagcagcactccatatcccttactgtcaccttcactccccacacagctcatgagatgtgtgacccctgtttgagttttggtatttggtagtggagggtggggggatgggggccagcagctgtcatcctcctgggaagccgagcagtgtccctggtgggtaacaccctcaagtctctttgccagtgaggccccaccacatcggtgtgagttaggtttctcatctggagctgtttctcaggcattcttcccaaccctcttccttttccccttcggtgtgcctcagtggtctccttcatagagtgagagggcttgagaacctcctcaccggactaattaacgaaagacacttgtgttcgcaagtggtggtatattcaagttaagtcgtctgggaactgcggttcccgtgaacgatgtactaatggtgtattctctcaaaaa

SEQ ID NO: 41652 - DNA, 675 bp, Homo Sapiens
ccccgcgtccgcccacgcgtccgcatggctccgatcttcatcttgaagaagagtgacattgggtgactgcttcttggaaaactgtccacacttgctactctttgagaatgaagttgtcattcagggcccctcatgtagccaaaagaccaagaaaaatctggcccacagataagttgcagactgcctttaaaatagattttatcagtggagaaatggtgatagttttttcttcagttttctcttgggaagagttttatgttgtttaaaagatattttgataacttaacctgctttatgggcttacataatattcctttcatccattctttttaaagaacggcttacctttcctatttatttttagggtgattttttaaaaagacttgtgcaatacattttgaggtgaaacttagtggattttttctgataaattagagcatttaattgactattttattcaggttgatctgttgaatatttgctaaagaccagttctttaagctaagacatgtaaaaaatcccaaatggcagtacctcattgtttacttagcttttgtacttatatttttcagaggaaaaaacactactgtaaattgtgaatagccaatacataactgtattgtatgcaaatctgtgattgttggcagtgtcatctctgagaaacagataaataaa

SEQ ID NO: 41653 - DNA, 500 bp, Homo Sapiens
agatttagaaagctctgatctggtggatcagactgaaggctgccagcctgtgtacgtgtagatgggggccaggcacccccaccactcgctgcctcccaggtcagggtcccggagccggtgccctcacaggccaatagggaagccgagggctgttttgttttaaattagtccgtcgattacttcacttgaaattctgctcttcaccaagaaaacccaaacaggacacttttgaaaacaggactcagcatcgctttcaataggcttttcaggaccttcactgcattaaaacaatatttttgaaaatttagtacagtttagaaagagcacttattttgtttatatccattttttcttactaaattatagggattaactttgacaaatcatgctgctgttattttctacatttgtattttatccatagcacttattcacatttaggaaaagacataaaaactgaagaacattgatgagaaatctctgtgcaataatgtaaaaaa

SEQ ID NO: 41654 - DNA, 745 bp, Homo Sapiens
ggacgagcaccggcctgcgcgcggagccggcaccggatgacccaacatgagtgaagtttcctgcaagaaacgggacgactatttggaatggccagagtattttatggctgtggccttcttatcagcacagagaagcaaagatccaaattcccaggtcggcgcctgcatcgtgaattcagaaaacaagattgtcgggattgggtacaatgggatgccaaatgggtgcagtgatgacgtgttgccttggagaaggacagcagagaataagctggacaccaaatacccgtacgtgtgccatgcggagctgaatgccatcatgaacaaaaattcgaccgatgtgaaaggctgtagtatgtatgttgccttgttcccttgtaatgaatgcgctaagctcatcatccaggcaggtataaaagaagtgattttcatgtctgataaataccatgatagtgacgaggcaactgctgcgaggctcctgtttaatatggccggggtgacattccggaaattcataccgaagtgcagcaagattgtcattgactttgattcaattaacagcagaccgagtcaaaagcttcagtgagttacatctcattcaatctccagaagattgggattatcgtcttctaagaggttgctaatgcctttcatcttgaagttacacataacttcttactagccagtatggcaaaagtaggcatctaaagaatataaagcctcaaatcttccttactgtctctcttgt

SEQ ID NO: 41655 - DNA, 629 bp, Homo Sapiens
ccgatcccgcagtataggcttaagtcacttttgtgaaatttgacaaaggcatagaatctttttctatccagtcaggcattgcctattctttccagtaactactgattcccccacttttctgtcttagaaaattgtgggaatcccccctcactctgcctatgttgcactctctctcttcccaaccataactctgccctcagctattaactgtgctgtgtatttatcaagttggtatgttgtatgtacagtgttattcatgtcatcatgagaatgttgaacgcttgttaaataccttttgctagcctcttcatatgctgttgcatatgactctcatcacaactcagtgagatggaaagacaaatcctatttgtacaaatgagaaaactgaactctttagagtaactagctcagtattggccagctggtaaatggcagtgttgggattaaaatccagttcttatctactctccctttattcagaagcatttattggatgttgatctttgtttcaggttttgattttgttacttttttatactgtgtatattttcctcagtctacccttctgctctagattgtctggactcaggagattgtggcagttactggatagttatttttaagataat

SEQ ID NO: 41656 - DNA, 568 bp, Homo Sapiens
accctcagatagcagccgccccaaggaacacgagcatgaaggcaagaagaggaggaaggaataggcacaggtctctccaaagtgaatgaactcttacccataaccctaatgatgcaagtcatatgggggaacactttgtaaatggtcaggataaaaaccaaatctgggtgccagatcccagcactactttttattactggagaaatgggggggatagaaaattctactttgaattatttagttttttttaaagagtgggttgtgtttgtgcttctcccacctttcagcatttatagaacatgctgccccacatacaaagtcaagaccacttacttttatgtgacactagtagtttggggttaatgttttgtgtaagaacagctgcatatgagtaaagttaccccaaccacagtgaggaggaagatgttcacatactggaactgtcctgccaaataaattttgcccctattgtgctctgttttaatttggagtgggcaaagtaacctcttgcttggtgcaactatttgtttcaaataaaaacatttagacaaaaaaaaaaaaaaaaaaa

SEQ ID NO: 41657 - DNA, 726 bp, Homo Sapiens
acgcctgcagttgttttccggagtctgtcccacggcccacacgctcacttgactcatgctgctaagatgcacaaccgcacacccatacacaactacaagggccacaaagcaactgctgggttagctttccacagacataaatatagtccatctgcaatcacaagcacatagccaggtaacccaccaactcccctggatctgcagcccacacgtgggagtctggctgtcaccttcacaagccacagaaacggccacacatgttcacagctcacacgccctctccattcatcgaacttctcagtgtccctgtccctggtgcctggcacagggaacagcatgccccctccggggtcatgccacccagagactgtcgctgtctatggccccaactcatgctccctctcttggctacaccactctcccagcctgtgaccaccgatgtccacacacccccaaccacttgtccacacagctacccacgtacgacatcgtcctggctccccagagtatcttcccactgagacacgccgcccccacagaggcacagtccccagccacctctgcaactgcagccctcagtcacccctttttaagcaccctgattctaccaaatgcaaacacatctgggtctgcgattatgcacagagactttggacatacgaggaccctcagaccggaggaacacctgcccaaccccacacgtgcttatgtaaccacgtggaaagc

SEQ ID NO: 41658 - DNA, 859 bp, Homo Sapiens
cgggatggcggctgcagccggagttcaaacctaagcagctggaaggaaccatggccaactgtgagcgtaccttcattgcgatcaaaccagatggggtccagcggggtcttgtgggagagattatcaagcgttttgagcagaaaggattccgccttgttggtctgaaattcatgcaagcttccgaagatcttctcaaggaacactacgttgacctgaaggaccgtccattctttgccggcctggtgaaatacatgcactcagggccggtagttgccatggtctgggaggggctgaatgtggtgaagacgggccgagtcatgctcggggagaccaaccctgcagactccaagcctgggaccatccgtggagacttctgcatacaagttggcaggaacattatacatggcagtgattctgtggagagtgcagagaaggagatcggcttgtggtttcaccctgaggaactggtagattacacgagctgtgctcagaactggatctatgaatgacaggagggcagaccacattgcttttcacatccatttcccctccttcccatgggcagaggaccaggctgtaggaaatctagttatttacaggaacttcatcataatttggagggaagctcttggagctgtgagttctccctgtacagtgttaccatccccgaccatctgattaaaatgcttcctcccagcataggattcattgagttggttacttcatattgttgtattgcttttttttccttcttttcatgtacactgaataacctgacctaatagagagtgtaaatactataaaaatgatttattttgaggtctcacatacacacaggcattctttgcctgcccttctt

SEQ ID NO: 41659 - DNA, 501 bp, Homo Sapiens
cctttgttcccagacacacaacccctctagctctcggaggggcgatcatgagaaaccttccagggaaactgagcacaggatgaactgttagttgtttttaaaagtctatataaatatttcaacagatcgtaaagaaaaaatttatctctttggtccttgcaagagaagtcaaaggaacttttgtttctcctcaagagcctggacatctctgtctgtcatgactggaaagggcccgttgtgctgaaatcctatcatcatggtggatttgatcttcagtggccaaacacgaattaaagtataattcttaactgaactggtgggtgggttgagctttagggaagtatatggcggtcattcctggtgcgcctatcggtgtgacatgagccctggagtgtgtcgtccctctcagccctgctcctcctgcctcctggggtccagtgactgggaccctactctagaactgtgtaccatccaattcgccatcataaaggaatcttcctc

SEQ ID NO: 41660 - DNA, 638 bp, Homo Sapiens
aaaagataatctgaagctcacaaagatgaagtgacttcctcaaaatcacatggttcaggacagaaacaagattaaaacctggatccacagactgtgcgcctcagaaggaataatcggtaaattaagaattgctactcgaaggtgccagaatgacacaaaggacagaattcctttcccagttgttaccctagcaaggctagggagggcatgaacacaaacataagaactggtcttctacactttctctgaatcatttaggtttaagatgtaagtgaacaattctttctttctgccaagaaacaaagttttggatgagcttttatatatggaacttactccaacaggactgagggaccaaggaaacatgatgggggaggcagagagggcaagagtaaaactgtagcatagcttttgtcacggtcactagctgatccctcaggtctgctgcaaacacagcatggaggacacagatgactctttggtgttggtctttttgtctgcagtgaatgttcaacagtttgcccaggaactgggggatcatatatgtcttagtggacaggggtctgaagtacactggaatttactgagaaacttgtttgtaaaaactatagttaataattattgcattttcttacaaa

SEQ ID NO: 41661 - DNA, 530 bp, Homo Sapiens
gcccaactcccagattctgagctgcaacaagtgtgcgacgtcctttaaagataacgacactaagcatcactgccgagcctgtggggagggcttctgtgacagctgttcatcaaagactcggccagtgcctgagcggggctggggccctgcgccagtgcgggtctgtgacaactgctacgaagccaggaacgtccagttagctgttaccgaggcacaagtggacgatgaaggtggaacactcattgctcggaaggtgggcgaggccgtgcagaacactctgggagccgtggtgacagccattgacataccactaggtctggtaaaggacgcggccaggcctgcgtactgggtgcctgaccacgaaatcctccactgccacaactgccggaaggagttcagcatcaagctctccaagcaccactgccgggcctgcggacagggcttctgtgatgagtgctcccatgaccgccgggctgttccttctcgtggctgggaccatcccgtccgagtctgcttcaactgcaataaaa

SEQ ID NO: 41662 - DNA, 522 bp, Homo Sapiens
ccctcgccgctttatggagcagaacacactgcagaaacacacgcggtggaagcatccatgagccgggctgccgggtgccccaggtaccacaggactttgcagggagcctggactcctgtccagacacctggtgagagcctgaggctggtgttcagggccctggacacagacacagagcagccgcatctcaaaggcagagccctgcctgaaggaggaatccgtgagtaatcttcaggtcctccgtgttctggagctgagatgggaatgagcccctacacagaatggagtcctctagcctaaagatatcagctgttccatggcagagccttgactggatggaggtggggagtgtggtgtgtaaagtctctggcctcataaaaggtggctgtgggtcgtcaggaatctgcgccatcttcctggggcttctgcgctgttgttggggaagggaccccagtcctgccttccaccccccaaccaggcctgagactgatcaaacaataaacacgtttcccactctgaaaa

SEQ ID NO: 41663 - DNA, 536 bp, Homo Sapiens
gggaaaagttatttacttaggggtcagagagtctcgaccagaggaggccattcccagtcctaatcagcaccttccagagacaaggctgcaggccctgtgaaatgaaagccaagcaggagccttggctcctgagcatccccaaagtgtaacgtagaagccttgcatccttttcttgtgtaaagtatttatttttgtcaaattgcaggaaacatcaggcaccacagtgcatgaaaaatctttcacagctagaaattgaaagggccttgggtatagagagcagctcagaagtcatcccagccctctgaatctcctgtgctatgttttatttcttacctttaatttttccagcatttccaccatgggcattcaggctctccacactcttcactattatctcttggtcagaggactccaataacagccaggtttacatgaactgtgtttgttcattctgacctaaggggtttagataatcagtaaccataacccctgaagctgtgactgccagacatctcaaatgaaatgttgtgggcatc

SEQ ID NO: 41664 - DNA, 571 bp, Homo Sapiens
ccgtttttctgtctacctttatattttgaagtgtggttgtacttacgttaatagtaagtgtatttgtagaaagtttttcataaagaagagattaactttccatataaataaataccaggtatgaaattactgattttagtgcaatatctgtatgattatccagaactatcacttcagatgtttctattttgggcaccataactatttgagctcatatttttataattctgattgagaatttaggggcatggtaatttttaccaaaactgaagctggtaattttaagtaaagcaactaaatttaccctttacttattagttaaaaggaaaccaaggcatgtaggaaaatattggtacgttggaaaatgtgaaaagagctttactttcaaaatgtatgtttaatgaattgaattttagggaccgtttcccataatttgggcctatgctatcctgttgatttttatgtctagcttaaaaggtatttgaaaatgttccatttgtgttttattattttctgtcctatgacagttctatgctaaatgtattttaaaataaaagccaaattgaagatt

SEQ ID NO: 41665 - DNA, 854 bp, Homo Sapiens
gggaaaaaatggtgacgtcctcccccgaggaagacctggggacttcctatcagtgcaaactttgcaatcggacctttgccagcaagcacgctgttaaacttcaccttagcaaaacacacgggaaatctccggaagaccaccttctgtatgtctctgagttagagaagcagtagcatttgcttttgatagaaaggactgcagtttgctttgagggaaactgtggaaggcaccttcaggccccctctgacttgttgttcttggcacatgttcttattttaactgcagagaatcactctgggctggactgttttgtataactgtacagtgtttaatagaggtgcataatcagctgttgttactggtaaaatatgaaggttaaaatgcagtggtaagtgtttggaactttgtgtaaacgggatttagttgtgagcatcctcccgatgcttcaagctgcatgcattaacagacagtttaattaagcatttataacggaatcaggcacaccttttccacgagactcgagtgtgctggcatttctcaccctttcatctttacccctctgagtactttgaagcacttttgcattaatttggttaaaaaattaaattaaaataataattattgttttggaagctctgttttttaaaactcccttacaagctttagtttttaaggaataataatggaaccttcccttttatggcaagtcttgccgggggtttaaacaccccccttgaaatttttaaaaaaaatttttattttccccaatttggaacactaaggatggataaaaattgggaaaaaaattttccgaactctcccttttatggaaaaaagaaattgtgtggattggt

SEQ ID NO: 41666 - DNA, 460 bp, Homo Sapiens
tactgtaatacttgcttaaaagtcatgaggcattctgtgatccaacctctttcacttatttataagccctctggtgctattccatatgtaggatgcctttctatttcaatgggtaactttctgtttggttcttcctaattattctcccaagatcccacactgcagctttatctttaggcttatgaaaggtaacccgtgttaccggctctccaagtgattctgttcttctccattttggcggttaattgcagaagtaactgacagctgacaccatatgagaacctttgtataaaatattggcatgtaaacagcacagacaccgtaacacactctgtgccctgtttggttgttgacaatgaagcaccattatgtgactcttcatataacccttttttctacggcagcattaaaatggtcttttgctatcaaaaaagcacaaaacacagacgacacagaaaac

SEQ ID NO: 41667 - DNA, 627 bp, Homo Sapiens
agtccggaattcccgggattggacctgctgggcccagccactggctgtctactggacgatgggcttgagggcctgtttgaggatattgacacctctatgtatgacaatgaactttgggcaccagcctctgagggcctcaaaccaggccctgaggatgggccgggcaaggaggaagctccggagctggacgaggccgaattggactacctcatggatgtgctggtgggcacacaggcactggagcgaccgccggggccagggcgctgagccctcgtgctggaatggttgtctggtatctgaactgagcctgctggctggaccaactgtcctcgaaaagacacagctggcttccctagtacagagaacagggcttgggccactttggagagacagaatctagtcctgggcaacttcacatccgtcctcctgtctcagggctggcagggggagcctggaattaccccctagtgatggaatgacagggtctggtggggactgaattccctggccctggggtcatagcttgggctgttccttctctgatacgggaagagaccccaatcagatttttcaaattaaagccagtcctgggaaatctcaaaaaaaaaaaaaaaaaaaaaaaaaaag

SEQ ID NO: 41668 - DNA, 500 bp, Homo Sapiens
tatcctccctttggtaccttaatttgactgtcctcgcagagaatgtgaacatgtgtgtgtgttgtgttaattctttctcatgttgggagtgagaatgccgggcccctcagggctgtcggtgtgctgtcagcctcccacaggtggtacagccgtgcacaccagtgtcgtgtctgctgttgtgggaccgttgttaacacgtgacactgtgggtctgactttctcttctacacgtcctttcctgaagtgtcgagtccagtcctttgttgctgttgctgttgctgttgctgttgctgttggcatcttgctgctaatcctgaggctggtagcagaatgcacattggaagctcccaccccatattgttcttcaaagtggaggtctcccctgatccagacaagtgggagagcccgtgggggcaggggacctggagctgccagcaccaagcgtgattcctgctgcctgtattctctattccaataaagcagagtttgacaccgtctgc

SEQ ID NO: 41669 - DNA, 612 bp, Homo Sapiens
attcctttgagctgagaatctaatagattgtctttaaattcttcagctaccttttattcagcaggaagatggacaattaaggactttctgagccccagtttgtccagtttaatggaggattcagccaagaacagctaaactggttgaatgaagtgctaacattctctgacacaaaccaagaaaaggtggtgattgtgagccatcttcccatttacccggacgcctctgacaatgtgtgcctggcctggaactacagagatgccctggcagtcatttggtctcatgagtgtgtggtgtgtttctttgctggtcacacccatgatggtggctactctgaggatccttttggtgtataccacgtcaacctagaaggagttattgaaacagctccagacagccaagcctttggcacagttcatgtctatcctgacaaaatgatgttgaaagggagaggcagagttccagatagaattatgaattacaagaaagaaagagccttccattgttagtctaatttattttaacttgatagaaaatgagctttgtgtttgtccctcctaaacaaaaaaataaaaatcctctgtctcattgtttagtaaaaaaaaaaaaaaa

SEQ ID NO: 41670 - DNA, 588 bp, Homo Sapiens
aagccatcttttacaattcttaatcacatctctgcctaaactgattcatgatgtttatgttttcctgtttgtagtgtacaaaatgaagctgaaggctcacatgttaaaatgaccctgaatagaataggaagaacaatgttcttacaggtcataatgtatttcacaattaaaaaactaaaatatgtacccatttttaagaaatcatacttctctccacattgatcttttcatttcttactagcttttaagaaattaaatacttgcctgagatagaaatactttatttttgtaactttaaggtctaaatgactaaacttcaaagtaagattttgtcagaataaattgagaccattaatctaatataatacttgttcatgagcactgaaatcctgaagaggagagatttggttataaattaaaaaggttgggtgatcttaagtgcctcagttaatgcacgtacagtattcatttggttggttgtactacctctcagaagtaaaatttgtcaccttatggaatgagagtttttgggtttggggggttgtttttttgttgttgcttggtttgggatttttggttttgtgtgta

SEQ ID NO: 41671 - DNA, 844 bp, Homo Sapiens
gagattcccagagacctgcattgctttctcctggttttatttaacaatcgacaaatgaaattcttacagcctgaaggcagacgtgtgcccagatgtgaaagagaccttcagtatcagccctaactcttctctcccaggaaggacttgctgggctctgtggccagctgtccagcccagccctgtgtgtgaatcgtttgtgacgtgtgcaaatgggaaaggaggggtttttacatctcctaaaggacctgatgccaacacaagtaggattgacttaaactcttaagcgcagcatattgctgtacacatttacagaatggttgctgagtgtctgtgtctgattttttcatgctggtcatgacctgaaggaaatttattagacgtataatgtatgtctggtgtttttaacttgatcatgatcagctctgaggtgcaacttcttcacatactgtacatacctgtgaccactcttgggagtgctgcagtctttaatcatgctgtttaaactgttgtggcacaagttctcttgtccaaataaaatttattaataagatctaaaaaaaaaaaaaaaaaaaaagaaaaacaagcaaacaaccagcccacagtaccgagaaacacaagaggcacaacacacaagaccaagaacacaaaggagggcgggcgccacaaagtagacaccaagcaggaggcgacaagaacacaggaccacagagtgtacaaaaaagaggccctacatagcgacagaaatacacgagagcagacgggcccgagatcacacgcagacggcgaaaagcagagtggggcctgagaagacacatcccgcgggagatcacagaccaccaccgcg

SEQ ID NO: 41672 - DNA, 582 bp, Homo Sapiens
ctgggtgccagaatccacgctgtggcccgaatcgtgtttggttcctctttctactccactgcagatgaccaaacctgtcccgctgccactttcctcactgatattgggaggagggcaaggcccagccgaagttccactaaaaatgccccaggagaataggcaccggctggcttgccaaagggtttgggttttattgctttctgttttttcttttcccgacagcacaaagaagtaagggcagttattggacaggtgttatttaaacattctattgtaaatgaatgtgttgtttggttctactgcattgtggagcatgcgggggaagagaactgacccaggtaatgaaatggagcccttccctggaactaaccagtccttgatgttgtgtgactaagtaaagatgataaaccccatctgctgggggtgtcacttcacactcggcatgcattgtgaaagctttccatacccttggccattccctctctcctctctctccaaccccatttatgcaggaagggactgctaacaagaacgcttccatctcaaaccttttctctgcctgggaaattattttatgtttgt

SEQ ID NO: 41673 - DNA, 648 bp, Homo Sapiens
acccacgcgtccgcccacgcgtcggcatcctgcccctcgccttttaggctcaggacggaaggtcagttgccatggttaccgaggaccctggttactctggtgctgtcctgttttactggaccccgcctcccagccccaggggtgcctgtgggggtccatttgggtacgtctgggcccccactttcaccagtttctgcggccttccaccgggcctgaaccacagcggaggagctccgctaagacctccccacccccgctgggggtgggggcgggtgtccgtccggaaatgaaggaatagcccgaggaccgggctggggtttatttaaactgttctgtgtgggtctggggagggagagcaccttaatattattggggttggttggggtggggcaggatctcagccataaagtgccagtttgcttagttctcactgtctcctggtctgtgctgccctgctctggggatgcacggcggcagggtgggggagggaggttcctcgcaggtctcagcccgggacagggtcttgcaagcagcctcctgggcagtcgtaagggttgcggcgtgatgtcttcaataaattaacgttttattctggattgaacacacaaacacaaaaaaaaaaaaaaaaaaaaaaaaaaaaaaaaaggg

SEQ ID NO: 41674 - DNA, 700 bp, Homo Sapiens
  misc_feature (67)..(67): n is a, c, g, or t
  misc_feature (99)..(100): n is a, c, g, or t
  misc_feature (592)..(592): n is a, c, g, or t
  misc_feature (627)..(636): n is a, c, g, or t
  misc_feature (676)..(676): n is a, c, g, or t
  misc_feature (692)..(692): n is a, c, g, or t
actggtttgatgtttctactgctacggaatgtattttaaacacatatcgtttctttttcttggaaantaagttgattaggaccacagatttggtttagnnagggtaatattttgaaatactacaaggtttagacagtccatgaaatcgacctgtttaataatttaccatcctgaaagtccagaattaaaatatggaagcaagaactatataattgattaggatgcttggtaggtttttttcattgttcaaatattcattgcacagtggattgttttgattagttagtatgctttttttttaattaattcagtcttctgttaatttttaagttttggttagtgccacaaggaatttaactttttgatttgtataatagaaaactgaactaggaattgttagcggggttttgaaggatgtgtactttccttcaaaataaagtggtagattttcaaaattttacactagtcagttctttatattctaagttaaatgtaagtttgtaaaattattttgggtttcttctacaaaggaaaaaattggatttatatatataagggtactgcataatgatttcattttgataatgtgcanaatggcctcataagctcacagaaggtaaaaaaaannnnnnnnnnaggaaaaatcaggatttcactggtttaaaagaaatctcanttttaattttggaatntaaaaggg

SEQ ID NO: 41675 - DNA, 713 bp, Homo Sapiens
cgtccgggcacataactgtctccttaaccactgaacagttcagccatttgaataaattgtacattgtaaagcttatagtagctgattgtattattgattgtattgtatactatattaaatgtgaatttgtaccccttcattttaaaaggtcattgtgttctactgcctattttagattactttggggttggggaagggtgttttggtaagcaggattttaagtcctctctctctcgattggttttatgaagatataaggttatgctcttactaccaagctcaggattcttgattttaaaggtacaaggatagttgtgggagttttatttttggttatatttgaactgtatgaatggtaggtctgaatattgagaatttccatggtcttatgtggaggtaaaatatacagataactgatcagtttgagtgactgcaacatgttctggttgcacaacagttaggcatgctatggtttatatttgtgaagtttggatgcctgtgaagaatgattaaatacatgtttctaatattttagtgttttgtatttaggttatttattctttgtatctaaaactgaacagctactgtgctatattgattttattggtagtattgagcagaccttgtttctgcatgaaactagttgcaaaacccactattttggaaataaaaatgtattttgacatataccaataaaatgaataaaactaaaa

SEQ ID NO: 41676 - DNA, 769 bp, Homo Sapiens
  misc_feature (25)..(25): n is a, c, g, or t
  misc_feature (71)..(71): n is a, c, g, or t
  misc_feature (702)..(702): n is a, c, g, or t
aaaagcagaaagaaaggaagaacgngcagaagaaaaggaaaagagaaaagaaagaactaaagttagaaaanccaccaggaaaactcaaggaatcagaagcctaagaagcgcaaaaagggacaggaggctgaccttgaggctggtggggaggaagtccctgaggccaatggctctgcagggaagaggagcaagaagaagaagcagcgcaaggacagcgccagtgaggaagaggcacgcgtgggcgcagggaagaggaagcggaggcactcggaagttgaaacagattctaagaagaaaaagatgaagctcccagagcatcctgagggcggagaaccagaagacgatgaggctcctgcaaaaggtaaattcaactggaagggaactattaaagcaattctgaaacaggccccagacaatgaaataaccatcaaaaagctaaggaaaaaggttttagctcagtactacacagtgacagatgagcatcacagatccgaagaggaactcctggtcatctttaacaagaaaatcagcaagaaccctacctttaagttattaaaggacaaagtcaagcttgtgaaatgaacatttgtgtatttaaaaattgaatccattctgctgacttcttcctttcactgctgtttataaaatgtgtaatgaattctaacaactcaaattttgctttttgaagctgtatttttaagntaagaaaatatatttttggtataacttttatgagaaaaataaatatattctggtccaaacttctaaa

SEQ ID NO: 41677 - DNA, 631 bp, Homo Sapiens
ccaccacatggcatgcttgactatttcttatttcaaatgtctgctaatgcagagtaggctactccatgatagtgttaaaaaacaaaatttgctaacaatgtgatataaagactttaaaagttacacattatgtggagccctatctttacaaaagtttcctactgtaaagtgcttttattttcagttttcacttgatagtactcaaccataattaaagttgcataagataattgctttacatttcacatacctatatttatctgagtgctgtctaaaactgttgtgctagccaaagtaatgctatgaaatcatttgcagaattaacccgtgagttaatgttaaatgcactgttattgccatgtgaagaggcatcgactttgataccaccatcatgttcagaccattttatacatttcagtggccttttttttttttaaggaaaaaaaagcgcaaaaccaagtacatagtgacgatggcttttatttggacaaatagcttttatattttcattaaaccatgcaaaaaatactacatctttctggcacataactgtctccttaaccactgaacagttcagccatttgaataaattgtacattgtaaagcttatagcagctgattgtattattga

SEQ ID NO: 41678 - DNA, 786 bp, Homo Sapiens
  misc_feature (734)..(734): n is a, c, g, or t
agaaaaatacattttttcccccagggggtggggcaaggacagtggagagagtgctaggaaatgagtccctgggaaaggggaccgggccgtgatgttaaatatctccggctcccaagtgactggatttgcctaggaccttcagatcaacagacttcagaccctcagacctgccccggggccaggtggagaaagtgagggccgtacaaggaagtgaaattctgagttgttggggctaagcctgaccccctctccatgctccccgccccaactcactctggcctcagtagatttttttttcagttgtggttgttgcccaggctggagtgcagtggcgccatcttggctcactgcacctccaccttccgggctcaagcgattctccagcctcagcctcctgagtagctaggactgcaggtgctccaccacgcccggctaatttttgtatttttagtagagatggggtttccccatgttggccaggctggtctcgaactcctggcctcaggtgtgatccgcccgcctccgcctccccaagcgctgagattacaggtgtgagccaccgtgcccaggccctcagtaggttttaaggagtccccagccctcctcccttctgggcccgaccagcttatactgctccatcttccccggccacatgccccgccaagtactgcacagggaccccccacccaggggccctgctccgtgagataatgtgaaatacgactgtggaccanacgcaataaacctctgtttgtacgaagaaaaaaaaaaaaaaaaatggcttat

SEQ ID NO: 41679 - DNA, 663 bp, Homo Sapiens
ccccgcgtccggatgttgatgtcctgcatctaacgcggtgtaacccccgaagccgagcgagctccggaggaatttcagtatctgctacggtaacttcatcagcccgccaagatggcgatgcaagcggccaagagggcgaacattcgacttccacctgaagtaaatcggatattgtatataagaaatttgccatacaaaatcacagctgaagaaatgtatgatatatttgggaaatatggacctattcgtcaaatcagagtggggaacacacctgaaactagaggaacagcttatgtggtctatgaggacatctttgatgccaagaatgcatgtgatcacctatcgggattcaatgtttgtaacagataccttgtggttttgtactataatgccaacagggcatttcagaagatggacacaaagaagaaggaggaacagttgaagcttctcaaggagaaatatggcatcaacacagatccaccaaaataaatgttttctacattttcatttggactaaatcccacgaatgacaactaccacctttttttcctttttaattaatactaaatattgtgatttcttatttgaggttcaaaatgacctgcttgaaactttgatacatattggaatacattatgttaataaacttgtagctttttgtga

SEQ ID NO: 41680 - DNA, 687 bp, Homo Sapiens
tattttttcacttgggtcaatcaaatctgtaacactgaatccaagctattaaacaaaaagtatgcaatgaatgaatttgtaaatgaatagagagtatcagtttacaataatgttcttaaaacagtatcctctggatagttgagtatgggttagaaatcattgaaatggatggtcagaaatgctatctgtgtaaaatgtctaccagtagccagatgcttccagagttcttaatgcctctctggcatttcagagccagcatcccccaactcccacccctctgccatcacccaacccaaacacatcagctttcaaatgagatgatagtaaatgcggcaatgttaagacaagaaatttatgatttgccagattcaacatttatgacctccccttccaaagactgtctccgttgaccttgtcttttggtatgccttggggtttctgataatgtgtggagtctcattatggctgagagtttagtgttttcacagtgaagtgcagacatttgatttctttatgagttccctgtgttagaaatggctatagaaaaatttgtcataataatttcatttgcatgaaatcctgaggggtgcattaaggaaactaaaagcaccacttaccaaatctatcggagaactgatgtgaggtaagtgagcatgtcaaacaaaataggagctcacatggatatat

SEQ ID NO: 41681 - DNA, 1033 bp, Homo Sapiens
  misc_feature (740)..(740): n is a, c, g, or t
tatggagtcttaatgaagatcatctaatttcctgcttaccttaactgggaattttaaaaagttggcctaaaaatgttccatgcgtggcagcaaccatgcagagtgactgaaacacaattcatttctgactgacattcctttctgcaactgcggtggcaccacaaatatccggtctttgtgcttgctcttcagatggatggtttgtaaggctcttgttgcatttcttaaaaaagagtaataaaaaggatttttaaaaagtaattccttaaacataccatctgtcacagttaatctagatttgtaaataggtagtaatttatagaatttttaaagcgtaaaatccggtaatattaaaagataggtaaacctaggcctggaaaggctgttatttggctaaaattgcacaggaggccatgaacagaggcaagtgccccagagactccactttcattcctaactgttctcaaattaatgctcatgattgagtattctcagtgcaactcgtagagtttgataagtaaaagttacatgcccctgttttcctagcatgatattcactgttatcaaagacaagaggcagaccattcattcattctcaaaacactgaatgccattctgtgcctagtgctatacaaggcatgggagattcagtgtgaataagtctttgctctccacctaacaagggacagttttaattatagattgtcttcctattaagtatgagttttagtaggcattanaaatcgtaattagtttgataatatgagacccaaccctaactttgcagaagagtaatcagttcatgaaccattgatatttcctgtatatttcatgaatgtgacttcagtcattctagtggtaatactgtggaaatgtcattgggtgtagcaacgtgggttcacccaaaacaccttttttataccaaaagacagaatgtgttggattttaaagaggattaaaaggataaaaaaaaaaaaaaaaaaaaaagggccgggcccgcctctagaaataaatcccctccgaaaggggggcc

SEQ ID NO: 41682 - DNA, 873 bp, Homo Sapiens
gggaacctctattttttttttttctaaacttgagtttgagtccttgttatggtcatcataaggtaatggttagcatgtttaaagatattcctcttccaaatctcagcactttaaaaaaaaatccaaatttttaaacttgcttcctaataagtacacatcggtctgattattttgtttgtttttagtagaatatggatgcattggtgtcagttttaaaaaacaatacacatattttggacaaccctacatatttaatcctttcaaaataagataaaaacattttatatgctaacagaatatatttgttacaagttaaagtccagaagtatacacaagattgattactcctattattttttttaaatcacaggaaaatattgatttcattgtctccaaagtgataaaatcatgtattactcatttttgcacttaaaatttttcttatttattccaaggtggtttgaaggtccaagtatgaaaataaattagggggattaatgtataacagttataaagtatcatgttgtattaaagagcttacttagattgatgtttttaaaatgtatcctgatgaatgtctcaagaatgcatctgtcaagttttttagactgaccagtagcttaaacttttttcaggattttaggtaaatttgaaaggaggtttagagaccccttattgaaaaatatgatttataaaatcccaaagcattaaacccgtaaaaaaaaattttataaataaaacattcttttaaaagcctgccatctttccaatacctgaaaaacatggccaattggccgttatggtttgaacatcttaaaataccctttttttataaatgggaacgaacaaaaataaatctcctaaagtaaagac

SEQ ID NO: 41683 - DNA, 596 bp, Homo Sapiens
ggcacgaggtcgccaaccgcaacggctgcttccagcttatccggtcctttgatgtgggccacagctttcccatcactgggatccagtactccgtgggagccttgtacaccacatccactgacaagaccatccgggtgcacgtgcccacagacccaccaaggaccatttgcacccgaaggcatgacaatgggctcaatagggtctgtgctgagggcaacctggtggtggccggctctggagacctgtcgctagaggtctggaggctgcaggcctgagcaggtgggcgtggatgtggatactgcctgccggaggctgggcttcctcctctgttcttgggggaccatccccaatgttggtgctgcctccgccccgtgggcctagggcacaaggagtcccagccacattcgggtgagcgtcctggcctgggccctatgcccgggggaagggtgaaattggggttcaggcccacccagggggccgcttcccactcttgggccctggttttgttatgatttggatgccccgctctcagttgagagcgaaggagaaataaacctgacatgttggtgcttggaaaaaaaaaaaaaaaaaaaaaa

SEQ ID NO: 41684 - DNA, 562 bp, Homo Sapiens
gggagaagtgctgctctcgcgtttatttgggatttgattctcattttaccatagcttatattctcaatttcaatgccagtctcagaactcttgttttctgtgttctgttctcaaaattacattgtccctcatgtcatttcaaactgttttccaaagggatttgagcatatacaactacaaatccaagcagattgactctcaaaaataatcttaaatactgcaaatagtcccaactaagattcagtcagtatgtttgttttgcaagtttgggagagtaagttggctttgagtcacacatcgaagctttaagaggtgagacgctggcttcattctggactagacaggaacttggcctcagcgtgagatcctgccatgcagtgttgcggtggcactgaagaagtgtgaatgtgaaggcggcgtcggcgcggggccagagcaccactctgctgccccaccacgcggcctgtgaggagccactaaacctttccgtgcctagacctccccatctgtggaatggggtcaataccacctacctcacaggggtgttgtgaggactgagaag

SEQ ID NO: 41685 - DNA, 617 bp, Homo Sapiens
ggccaccgtcatcggccttccccttctggccttcgatttccactgggtgaatggggaccgctcctctgccaacctgctcctgggaggaggcatggtgctggcagtggctggcggccacctcggccctgagggccgctctgtggctggtcaggcaatgctgttggtggtcgcagtgaccatcctcattgtagctgtcttcacggccaacacttatgggatgtgggggggggcgatgctgggtgtggcaggcctcctgagccggctggaggaggacaggctgctgctgctaccgaaggaggatgtctgtcgctgggccttggctgtaggcagctgggcttactgccgggccctgcatacacagcgcctccagtgggagtgacagttggatacagccaggcagggtttctgccctgccgaacactttccctcccacctgcctgctcctggcgccttctccctaggggtagactcttctgcctactgaagtgggtttgctgcacattgactggtcaggggcagagtctgggtgctgtcctttggccacgtgtggggacttgtctagaccagaatgaaagggacagggtcccagacacgtttgggggtcctgattctgggct

SEQ ID NO: 41686 - DNA, 506 bp, Homo Sapiens
aaatggagcagtttttttccacgtttggagaactgacagtggaacccaggagaaccgagagaggaaacacaatatggattcagtgagcctgctttcgcctgctgtctctgatggctctggcaaggactccagggattctggtgggatatgacttagaaccaggtggctggtcacctggatgtacagaagtctaactggtgaaggaatatcatttacagacattaaacatccatatctgcaatgtgtaccaaagttatatcatgccccataatgctactgtcaagtgttacaactggatatgtgtatatagagtagtttttcaaaagtaaactaaaaatgagaagcatatttcaagaattattttattgcaagtcttgtatttaaatgttaaatcaatatgttgttgcaatttagcttgctttcaagcttcaccccttgcacttaacataagctatttttggcattgtgttatcatcggcttattttatagatcaatatttttattt

SEQ ID NO: 41687 - DNA, 695 bp, Homo Sapiens
gcttcctcactgaaaatgtgcattaagtgcctgtagatacaaaaatacgctttgaggagaatcacagcgtatttttgtgaaatcttttaagagccagtaacatacttctagagaacaggaaaagagactaggataatacatcttccacacatttggcccactgataatgttaattctctggcgtatttcaaagaacttgttcctggctgatccaagtgcagtggtatttacaactaattgatcacaaccagtttgtagatttctttgttccttctccattcccactgcttcacttgcctagtcttgaagaaaaaaaacaaaaaacaaaaaaaaaccttgttcctttataggttcctggtagaatcagtagagatgatttcagctcattgacattttttaagctatatccccttgtcattccattgagaaagctgacaactgggatagggaggggattagataatagatggggtcaaattctgtgtgaatgtgaacttgcctagtaagcactttgtctctgttcactactgcgatagaggaaatctatctccctatcttgggtccttgaactacagcctgctgtcttacaccagtggagctaccctttaaatgtacaaattatttgtatgcttaatgttaatattgggtgacaattacaataaattcacccttgtctaacacagacacaaaaaaaa

SEQ ID NO: 41688 - DNA, 457 bp, Homo Sapiens
  misc_feature (1)..(1): n is a, c, g, or t
ngtcctttctatgtcagcattcagagttactggctgtcatttttcatggtgatgattttatttgtagctttcataacctgttgggaagaagttactactttggtacaggctatcaggataacttcctatatgaatgaaactatcttatattttcctttttcatcccactccagttatactgtgagatctaaaaaaatattcttatccaagctcattgtctgttttctcagtacctggttaccatttgtactacttcaggtaatcattgttttacttaaagttcagattccagcatatattgagatgaatattccctggttatactttgtcaatagttttctcattgctacagtgtattggtttaattgtcacaagcttaatttaaaagacattggattacctttggatccatttgtcaactggaagtgctgcttcattccacttacaattcctaatc

SEQ ID NO: 41689 - DNA, 531 bp, Homo Sapiens
ggggatgtccagcatcctccccatctggacccctccccagaggtgccctggtacacctgcttgaccttccctgtgtacctccacccccagctcccatcccagatctcaaagtgtttgagcgtgagggagtacagctgaatctgtctttcattcgaccccctgaaaaccctgctttgctgttaatcaccatcactgccaccaacttctcagagggtgatgtcacccatttcatctgccaggctgctgtgcccaagagtctccagctgcagctgcaggcccccagtgggaacacagttccagctcggggtggccttcctatcacccagctcttcagaatcctcaatcctaacaaggcccccctgcggctaaagctgcgcctcacctacgaccactttcaccagtcggtgcaggagatctttgaggtgaacaacttgcctgtggaatcgtggcagtaactgtctccactcacagcctgaaattctcctgtgtcccaaaccccagggggccccagcagcttcgaacctacacctg

SEQ ID NO: 41690 - DNA, 514 bp, Homo Sapiens
ctcttgaccttctggaccgagtgatgataatccggaccatgctgtatactccacaggaaatgaaacagatcattaaaatccgtgcccagacggaaggaatcaacatcagtgaggaggcactgaaccacctgggggagattggcaccaagaccacactgaggtactcagtgcagctgctgaccccggccaacttgcttgctaaaatcaacgggaaggacagcattgagaaagagcatgtcgaagagatcagtgaacttttctatgatgccaagtcctccgccaaaatcctggctgaccagcaggataagtacatgaagtgagatggctgaggttttcagcagcaagagactccccaggtgtgcctggcctgggtccagcctgtgggcgcttgcccctgggcttggggctgccgtccccactcaggcgtgggctgcagcgctgtcagttcagtgtggaaagcatttctttttaagttatcgtaactgttcctgtggttgctttgaaagaacccttc

SEQ ID NO: 41691 - DNA, 651 bp, Homo Sapiens
gcctataccccagccgtggggcccggggtccctgccgcagccccctccccttctgatgccttaaaagctgggccccaggccctgctggccagagccacagatgccaagctctgggagcttgactatggaccaaacagctctggcctagggattgggccaccctacccaggatctccaccctggggacagtagaaggggaaagccttcatcttggcgaaccggccccaccaccccctcctacccgggcctccgtgcagagatgggctttctctgccagtcccctgctgtctgtctgtgggagtcggacattgtgcccatctcccggagcctctgctgtcactcgcttgttgaagatgaattcttgaattctgcctgcccacccccggccagatccctggagctggcctccttccagcccagtgccagaaaccagcactccatgaagataaactctgggcccgcccaccagcaggacctgtcgacctgaggtgaccctgggccttgcccccagccaactgggccaccagcttccctcccttgactctgggggtccacatccactccaaggggactattcccccgaccccaccccagtttccccacacggacctttgctgaattaaagtttgtaagtaaatggttttaaagaaa

SEQ ID NO: 41692 - DNA, 555 bp, Homo Sapiens
  misc_feature (8)..(8): n is a, c, g, or t
gccgctgntgtgctggattccagatggtaacaagtcacctagctcccaaaccttctgacttgagaccaggagacgtatccagcaagcggaacctctgggaaaagcaatctgtggataaggtcacttcccccactaaggtttgagacagttccagaaagaacccaagctcaagacgcaggacgagctcagttgtagagggctaattcgctctgttttgtatttatgttgatttactaaattgggttcattatcttttatttttcaatatcccagtaaacccatgtatattatcactatatttaataatcacagtctagagatgttcatggtaaaagtactgcctttgcacaggagcctgtttctaaagaaacccatgctgtgaaatagagacttttctactgatcatcataactctgtatctgagcagtgataccaaccacatctgaagtcaacagaagatccaagtttaaaattgcctgcggaatgtgtgcagtatctagaaaaatgaaccgtagtttttgtttttttaaatacagaagtcatgttgtttctgca

SEQ ID NO: 41693 - DNA, 639 bp, Homo Sapiens
ttcagattcagtgggcggacagaatatcaagctacacatggctccaggttacgaagaaccagcacctttgagaggaagcctagtaaacgttatccatcccggagacattcaacgttcaaagcaagcaacccagtgatagcagcccagctctgctctaaaacaaatccagaagtccataattaccagcctcaatatcatcctaatatccatcccagccagccccggtggcatcctcactctccaaatgtcaggccatcctttcaggatgacaggtcgcattggaaagcatcggccagtggagatgacagccattttgattatgtccacgaccagaaccagaagaacttaggagggatgcaaagtatgatgtatcgagataaactcatgactgcactttgagagactgaagcatctctcttccattcaccttcatagtttcattgcattccatgaaaagtgtcttggcctcagatggatggatgtgtttggacgagtgtctttaaggagtagtcctgaaaggtgtttttggtgtccatgtaaatatttgaagataaaaccactatagcttgtcataatttactgttgactgcattctcattaaaatgaaggtaaaggctcaggaatcatattgatgttctg

SEQ ID NO: 41694 - DNA, 702 bp, Homo Sapiens
  misc_feature (662)..(666): n is a, c, g, or t
  misc_feature (668)..(669): n is a, c, g, or t
  misc_feature (671)..(673): n is a, c, g, or t
  misc_feature (679)..(681): n is a, c, g, or t
  misc_feature (694)..(694): n is a, c, g, or t
gatctcacaggccatgggactggccctctatgtcctgccagtgctgggccaacacgttgccacccagcacttcccagtggcagaggctgaggctgtggtgctgacactgctggcgatttatgcagctggcctggccctgccccacaatacccaccgggtggtaagcacacaggccccagacaggggctggatggcactgaagctggtagccctgatctacctagcactgcagctgggctgcatcgccctcaccaacttctcactgggcttcctgctggccaccaccatggtgcccactgctgcgcttgccaagcctcatgggccccggaccctctatgctgccctgctggtgctgaccagcccggcagccacgctccttggcagcctgttcctgtggcgggagctgcaggaggcgccactgtcactggccgagggctggcagctcttcctggcagcgctagcccagggtgtgctggagcaccacacctacggcgccctgctcttcccactgctgtccctgggcctctacccctgctggctgcttttctggaatgtgctcttctggaagtgagatctgcctgtccgggctgggacagagactccccaggaccccattctgcctccttctggggaaataaatgagtgtctgtttcaccaccttnnnnnannannncccccnnncttcccccccccnccaaaaaa

SEQ ID NO: 41695 - DNA, 693 bp, Homo Sapiens
cccacgcgtccgattagatgctacagctagctaactgtatccctagaaatgatgaataatttgccatttggacagttaacatccaggtgttacaaagtcagtgttaattctaaagatgatcatttctgccctttagaatggcttgtcccatcagcagatgaatgtgttaagcacaaagcatcttccttaaagcacaaagagagggactaactgatgctgcatctagaaaacacctttaagttgcctttcctctttgtagttagcgttcaggcaggggacgtgtggaaagtctagggggttccattctggccatgcgagcccagctcctaccaacgtcggtaacttgagcagtccctgttgctggccagagactgcctggtcgccagcgctcaccatgggtgccaggatgcttcgcagaggcactgtgctcacggttggacttggtgtcagtgggaaagggcagtgtggggactgtcatttttgtgatttaataacacacagtgaaaatccaggaagaatgaattaagcttcttctgggagttgtttattcctgctcgtgcttaagattgatgatttcgtgaaataaagaacatcatttcatttaagagatcatttcattaagatctctaatctgttttgagtctttacaaaatagccagttataaaatggggcttggtttgtttagactgaag

SEQ ID NO: 41696 - DNA, 567 bp, Homo Sapiens
gtccggggtgagccgagctgtggtggcggctggtttaaaagggatccagtttccagctgcaggtttgttagagtctgttctacatgggcctgccctcctgtgatgggcagaggctcctggtacatcgagaagattcctgtggatcccgtcaggagggacttagtggctctgccgccagtgagacttcccgccggcagctgtgcgcaccaaagactcgggagaactggaaaggctgtctggggtcttctgactgcaggggaaggatgtactttccaaacaaatgatacaaccctgaccaagctaaaagacgcttgttaaaggctattttctatatttattgttgggaaaagtcactttaaagacttgtgctatttggaagcaaagctattttttttgtcagtggaatgcagtttttttactattccatcatgaggaacaacatagattccatgatctttttaatgacagtacagactgagatttgaaggaaacatgcacaaatctgtaaaacatagaccttcgctttatttttgtaagtatcacctgccaccatgttttgtaatttga

SEQ ID NO: 41697 - DNA, 584 bp, Homo Sapiens
gcacgagattcagtctacagccatttaaatgatcattgctgctacagaagtgctttaagagaattgcctgaaacatctgtattatatcggccacctgccaatcacagctttactctttcaggtcactctggggctgcctcttgcatgtattactaaataaaatgatctctctttctctctctctctctcttttctaagaaacaattatgtgcactttgatacacaaccttctctaaccaactatatatcaagacccaaaaattgaagaaaaatattgttttctcatacagtgagcagatttttcaatctactaattctgtgacttgtcttggtgtgctagcctacaccttctctttggtttagttttccttttctataacactctgaattgctaatcttactaacacctatgatgttacctgaaatcaatctcccatatgtatgctgtatgctatgctaagactcctgaaatatacttactctgtgcttgtgtatgtgaatgttaatgcaactattacctagagtgaactttaagctttattgttgaatgtaattccattatatttccttttgtacacctgtga

SEQ ID NO: 41698 - DNA, 784 bp, Homo Sapiens
  misc_feature (397)..(397): n is a, c, g, or t
ccctgctgcgggacagcagctgctgttgttggcctactgtacccctgtatcgacagtcacctcggagaaccccacaaatttaagagagaatgggccagtgtcatgcgctgcatagcagtttttgttggcattaaccacgccagtgctaaattggattttgccaataatgtccagctgtccttgactttagcagccctatctttgggcctttggtggacatttgatcgttccagaagtggccttgggctggggatcaccatagcttttctagctacgctgatcacgcagtttctcgtgtataatggtgtctatcagtatacatccccagatttcctctatattcgttcttggctcccttgtatatttttctcaggaggcgtcacggtggggaacatangacgacagttagctatgggtgttcctgaaaagccccatagtgattgagtcttcaaaaccaccgattctgagagcaaggaagattttggaagaaaatctgactgtggattatgacaaagattatcttttttcttaagtaatctatttagatcgggctgactgtacaaatgactcctggaaaaaactcttcacctagtctagaatagggaggtggagaatgatgacttaccctgaagtcttcccttgactgcccgcactggcgcctgtctgtgccctggagcattctgcccaggctacgtgggttcaggcaggtggcagcttcccaagtattcgatttcattcatgtgattaaaacaagttgccatatttcaaaaaaaaaaaaaaaaaa

SEQ ID NO: 41699 - DNA, 780 bp, Homo Sapiens
  misc_feature (683)..(683): n is a, c, g, or t
  misc_feature (780)..(780): n is a, c, g, or t
gggtttggtttgttttaaattctgtgaaagtggcttgattaaaagactccttttaaatggaagccaccagtcagcagaatggaagcttagaggaacttgcctgtgagcgctggtctttgtgtttggttttgtgatgtaacgatctttgctggggttttttgctttgttttgagggaaatgtcttggagtaaattttaagttcctggagttaatttgttttacaggaattttgttttttaaaaaaataggatcattctgaactttggaatgacccccttatatattttctgaaaatgaaaacagttacatgaaaaaaatttccaatgaagatgtcagcattttatgaaaaaccagaagttattagatgaaagcagcgagtgaatctttaaaacagacttgatcacgcacacacaataagtctttctctccgaaaccggaagtaaatctatatctgttagaaataatgtagccaaaagaatgtaaatttgaggatttttttgccaatagtttatagaaaatatatgaaccaaagtgatttgagtttgtaaaaatgtaaaatagtatgaacaaaatttgcactctaccagatttgaacatctagtgaggttcacattcatactaagttttcaacattgtgttctttttgcattcattttttacttttattaaagggtcaaaacccnttaaaataaaatataaaaaaaaaagaacatgtcgggccgcctcggcccctcgaagaagctttcctagaccatttcttttgggcgcggcggggcccan

SEQ ID NO: 41700 - DNA, 695 bp, Homo Sapiens
gaaaacggttatgaccccatagactagggtaagaataaaggcaataaattggtctgactcagaatataggagatccatatatttctctggaaaccacagtgtacactaaaatgtgaaattgaaggtttgttaaaaagaaaaagataatgagcttcatgctttgtttaattacataatgatttccattacgctatttctgtgaaatgcagcaggttcttaaacgttatttcagtggcatgggctggaagcttatcacaaaaagccatgtgtgtggccttatcagaacagaaggagacaggctggtgcccaaggctgctgcctgctccaccttttgccagctctggacatctgaggacgtcccggcagatctggaatggggccctcaactgaccatttgcttctcagaatttcagtttgagacatgagaggtataatcagttacttttctccccccagagaaacccttttgtgaggggagaggagctatggtatgtggttcagctgaaacacatacaactgcatccttttggagtcctttgccaacaaaaacagaccaacagaccagatggtgtccatgttcaatatcatgtcttgatggacgcagctgatgacctcaaatacttgagtggtctcatggctgttagatggatcatttgacaaaaacagggacaaaattttggttacctcgaagaata

SEQ ID NO: 41701 - DNA, 882 bp, Homo Sapiens
  misc_feature (748)..(748): n is a, c, g, or t
  misc_feature (758)..(758): n is a, c, g, or t
gaagagccaagaaaagcactacttcagcttctacttcagaagaagaaaaaaagaagaagtctagccgttcaaaagaaaggtccaagaaaaggagaaagaaaaaatcatcgaaaagaaaacataagaagtattctgaagatagcgacagtgactctgattctgaaacagactccagtgatgaagataacaaaaggagagcaaagaaagccaagaaaaaggaaaagaagaagaaacacagatcgaagaaatataagaaaaagaggtctaagaagagcagaaaagagtccagtgattcaagctctaaagaatcccaagaagagtttctggaaaatccctggaaggatcgaacaaaggctgaagaaccatcagatttaattggcccagaggctccaaaaacacttacctctcaagatgataaacctttgaactatggccatgctctgttacctggtgaaggtgcagctatggctgaatatgtaaaagctggaaaacgtatcccacgaagaggtgaaattggcttgacaagtgaagaaattgcatcatttgaatgctcaggttatgtaatgagtggtagcaggcatcgccgaatggaggctgtgcgactgcgaaaagagaaccagatctacagtgctgatgagaagagagcccttgcatcctttaaccaagaagagagacgaaagagagagaacaagattctggccagttttcgagaaatggtttacagaaagaccaaagggaaggatgacanataaagattntctgattgtccagaagacatttttaacaacaaaaaaagaagtctgggttccacacatacatagaaaaagattattatgttctgagaaagctttacagtgctactgtgcctttctatttattctt

SEQ ID NO: 41702 - DNA, 548 bp, Homo Sapiens
tctggtttaaatctactctcacatggatcacagtataaatttctatgtgctgtgttttgttcgtttgtattttgtagagatggggtctcgttttgtcgcccaggctggttttgaactcctggcttcaagcgatcctcctgtctcggcctcacagggtgttgagactacaggcatgagccactgtgcccagcctgttctatgtttttaagctacacgagaattttttttttaattaattctcactgtttgttcagtctgtcttcatctaagtttgtgttgcagtttaaagttaaagtgacttttaaaggccacatcacctgagactagggtaatcatctttacttctggttcctgaaatcatatttttccagtggaccatcctccagtggctgtggttgttgagcatgctttcagaacacctatgtggcttaaaacttagtttatgttttgtgttcaacactacgtgtaatattttaaaactgtttaatgtgatgtgaatacctttatgtacatttatttttaaatttgtaaatagctttaaattgcta

SEQ ID NO: 41703 - DNA, 731 bp, Homo Sapiens
  misc_feature (8)..(9): n is a, c, g, or t
gccatggnncacttgggacacttgaggaagaaacagaaaccttatttcttcctgtgtgtcccctagtggttttctttccatttgtgttatgccacagagagaaatttcctgtctgaactcttctgctgcctgccttggccttccaaagtgctgggattacaggcatgagccaccgcgcccggcctgcccctttccaagagatatgctcagcataatgagagatcaaccgtggtggggagtgggtccaagtaagggttctcattgttgccttttaagaggcctaagtcctgcattaactcagtccaaccattaagtgatgcaggctgctcttccctcatgtgagaaaaacctgtttccctctggttcttcctggctttgcacctggtggctattacaaagcagtactgcagtatgtcttggacctggaaagttggacatgtgtgtggctcaacagttttctcgggggagttcagtgaccttttggtggccaccctctgttctcacctgtgagttcttgcaggtggcgacttcatctgcaaggtcacttacatagccccactcagctgcttcggaaagcgtgacgaagcagtagtcctcagtgtgtgtgtaagtgaagaggaccttgtggtagcagggaccatgcttcattcgtggctgtgtccccatctgagggcctggtatgcagtaagatcaataaatacttgtggaatgcaaaaaaaaaaaaaaaaaaa

SEQ ID NO: 41704 - DNA, 843 bp, Homo Sapiens
gatgcaaatagtacggtattccgaacagacactaaaaatagctgtcatctcaaagaatccagtgcttgtgtcacagtatgagaaagtagatgctggggaacagcgtttaatgaatgaagcattccagccagccagtgatctctttggaccttgcattctccatcagattggatcacctcccaccctgaggccccccaagactttgaacagttcttcagtcatccttacagaaagataccctctccagacaaacgcagtatttatatacggtccattggatctctatgaagcaccagaattatcagtgaagaatatattaaatggctcacgggctactgtaaagcatatttctatcgcttgagagtaaaactgctagaaccagttcctgtttctacaacaaggtgttcctttagagtcaatgagaacacacaaaacctacaaattcatgcaggggacatcctgaagttcttgaaaaagaagaaacctgaagatgccttctgtgttgtgggaataacaatgattgatctttacccaagagacttgtggaattttgtctttggacaggcctctttgacagatggcactggtgaggtggattgatgatgaatcttctggcacacctggagcaactccagaacacagtcgtgaggataatgggaatttactgaaacccgtggaaggaagcctttaaggaatggaaagagtggataataaaatgcctgactgttctccaaaaataaggaccttcaaataggagtgattgaaataaatgactacttgcatgttatgctttcatttgggtggaatacttcatcagaataaactattgatcttgtgctgtgt

SEQ ID NO: 41705 - DNA, 931 bp, Homo Sapiens
gtggggtgggatccctaacgtaatattctttatgaaagcattagctgcttttgttacatttttaatatgcaaccacttcttcacctgaggaaaactagaatgaaatgcagtctaaaatattttgcactgaattgtaatttcttcattagtttagtctggaaactggtctgttttaatgtgttttttaaatgctgtatgtagaggaaaatctgcagaccactggaatacatttgttaaactctcatctgcagggacactgggcgatacttggcagtgactgttctaccttgaggctttgtttggtttatttattaaagtgtacagtatttaaaaatcaaacatagctttagttaaaacactaagctgaattagtcatgtccattcagacataacctgaactactgaaaagatcaatttccagaaggtttattctgtataaactacatgttagtcttcagtagagtatcttttttttttccttttttttttttttatttcggttgtttgatgtgcaatatgtttttgtatgcaggtagtaaataaactttgatcttccaaaaaaacccggaggcatgtcgcgaacaaaaagggcggccccgctctaagaatatccccctcgaagggggccccaagctttaccctaccacagcttttcttggaccaaaggggggccccctaagggggggcccgaattaattaacttaggggccttggccctccgtttttaacacaccccccgaacttgggaaaaaactggcccaaccttggggagaatttttggggaagggaaccctttacctttcgggggggggggggagaatattttgggggaaaaaactccctttccagagagtttttttggggcttctagggcggaaaaaatacaaaaaattttctcgagggggcgtaaaataggcgggcgcaaccaaac

SEQ ID NO: 41706 - DNA, 617 bp, Homo Sapiens
cgcgtccgtgactgaatctgatacagcttcagttaatgaaaatgggctagtcacagttgcagattatatttctagagctgagtctcagagcagacaaagaaacctcccaagggaaactttggctaaaaacaagaaagaaatggcaaaagatgtgattgaagagcatggtccttcagaaaaggcaataaacggcccaactagtgcttctggcgatgacatttctaagctacagcgtactccaggagaagaaaagattaataccttaaaagaagaaaacactcaagaagcagcagtcctgaatggtgtttcataaactgaagaagttcctagtttacagttcttttacattacatttacaatagtgcttgtacaagcttgccaaagatagaatatggatcgccagtctttacatcgcactttcagttcctccatttggaattcaaaaaggggagggatcctgaagaaatcatatgttaaacatactttgacacctactgtgttataaaatatatcatcagatgtgccttgagaatagtatatgtaacattaaaaaaaagttgctggctataggaaatgttattttgttttcaaaatatggcaaagatggggggtgtggg

SEQ ID NO: 41707 - DNA, 475 bp, Homo Sapiens
ctagaaatgcagaaattaggaaggtgatgggtctgtatccccctgcccccttctttcccatgcttgactcccgagagtactggcagtgcagcacccatcattgacgtaagcggctgtcttgtccagtgtttgtaggcatcactgcctcagctgttaaggagacctgtgtcaaaacttacatccacattcctacacccccacaacccatcacttctggtgttaacctaaaatacccacatgtattgagctggtcttctgcatttaagtatttctccccagtttttttccccactgtgtgtggggggtagggtccataaacccgagtgtgcctttgctttccacccttgctagacactggtagatgcaacaaactcagatttatatttgttgtaaagttgtaaaaatattgtgatgtcaccaattttccttccatctccacatcccctaacatctgattcacgacttaatgtatgtt

SEQ ID NO: 41708 - DNA, 591 bp, Homo Sapiens
accattttaagaagaccaagaagatgggtgggaaggatttcagctttcgttaccagcaggagctggaggaggaaatcaaggaattatatgagaacttctgcaagcacaatggtagcaagaacgtcttcagcaccttccgaacccctgcagtgctgttcacgggcattgtagctttgtacatagcctcaggcctcactggcttcataggtcttgaggttgtagcccagttgttcaactgtatggttggactactgttaatagcactcctcacctggggctacatcaggtattctggtcaatatcgtgagctgggcggagctattgattttggtgccgcatatgtgttggagcaggcttcttctcatatcggtaattccactcaggccactgtgagggatgcagttgttggaagaccatccatggataaaaaagctcaatagcatcttaacgtgaagatcaaacaagaacacaacaagcccctactgatttctgggtttctgccacggccacaggttcatatccagaggaatggcagatctgagacgatccaggaagagctaaaacatggccctgtaataaatgagcagacct

SEQ ID NO: 41709 - DNA, 519 bp, Homo Sapiens
tttttttttttttttctccccctcccatcttagtcttaccttgagggaacagtcatatgagaaggaactttgtcacatctaagctgtggtgtgttccccatgtgtgtgtacaacactggtgactccaggagccattttcacctattaccagtgttccctggggactcctcttaatgtttccaaatgggaaggacagttgatttccaacatgaggttttttgttttttatccagaaatattttcagcaaaactttccaactgagtggagtctgattaaggatttatttgaaaatggtgggattcattggcccataggtacattggaaaatgtatatctctccagctgtactgtagtgccctgcaggctgtttatatgttcacagttacttttttttttttttaaataaaagtcatttaatgtagaatacttttaatttcactttctgtattttaattttgttgaagggctgattgggatttccatgttcttattaaaaatctaacaaatcacctcgttcc

SEQ ID NO: 41710 - DNA, 701 bp, Homo Sapiens
ggcacgaggcaatccagtttgctgagatgaagctgagaccaagcaacttcagaaatcttgaaggcaggcgcaaacgggcataaattccagggaccactgggtgagagaggaataaggcccagagcgaggaaaggattttaccaaagcatcaatacaaccagcccaaccatcggtccacacctgggcatttggtgagagtcaaagctgaccatggatccctggggccaacggcaacagcatgggcctcacctcctctgtgatttctttctttgcaccaaagacatcagtctccaacatgtttctgttttgttgtttgattcagcaaaaatctcccagtgacaacatcgcaatagttttttacttctcttaggtggctctgggaatgggagaggggtaggatgtacaggggtagtttgttttagaaccagccgtattttacatgaagctgtataattaattgtcattatttttgttagcaaagattaaatgtgtcattggaagccatcccttttttttacatttcatacaacagaaaccagaaaagcaatactgtttccattttaaggatatgattaatattattaatataataatgatgatgatgatgatgaaaactaaggatttttcaagagatctttctttccaaaacatttctggacagtacctgattgtattttttttttaataaaagcacaagtact

SEQ ID NO: 41711 - DNA, 587 bp, Homo Sapiens
gaatatgggaaatccatctatctacagcctaagttacacataagtttcagaaagtctgattagactaaagagatatttcttctgggacagccttcttcttggtaattttgaagttctttttacaagttccttcctcagtttcagttctttccagtgttttgtagctcactgtcactcactgaatagagaaacgtgtgccctatacttcctgtgacaatcattttgctgacagaatgatggatgtttaaaatattgcacaaagtactttaaagaaaggtctgttaggaccagaagcagagacaccacttttcaaaggacttcttggtttcagcataacctaagacagggaattgggagccatcatatgtcacagtgttcagaattcaagcatatttaagggcattttctttgattctcaaagttcagcattcattttgaattgagaagcctatacatttagctgacaaagtgcttatagaatttcttaacaactgaaccattcaaaaggattttttttgtttaaaactggatttcaatgtaagcaaatgaagaaaaaaatatagatttcattttcatagcttcttatc

SEQ ID NO: 41712 - DNA, 1052 bp, Homo Sapiens
  misc_feature (610)..(610): n is a, c, g, or t
atatcgtcgaccacgcgtccgcaatcacatcgtgttccagtttgactgcaccaacactctcaatgaccagctgctggaaaaagtgacagtgcagatggagccatcagattcctatgaagtgctgtcttgtatcccagcccccagccttccttataaccaaccaggaatatgttacactcttgttcgtttgcctgatgatgaccctacagcagttgcaggctcctttagctgcaccatgaagtttacagtccgggactgtgaccctaacactggagttccagatgaggatgggtatgatgatgagtatgttctggaagatctcgaagtgactgtgtctgaccatattcagaaagtactgaagcctaactttgctgctgcttgggaagaggtgggagatacctttgagaaagaggaaacctttgccctcagttctaccaaaacccttgaagaggctgtcaacaatatcatcacatttctgggcatgcagccatgtgagaggtccgataaagtacctgagaacaagaattcccattcgctctatctggcaggtatattcagaggtggctatgatttattggtgaggtccaggctggccttagccgatggagtnaccatgcaggtgactgtyagaagtaaagagagaacacctgtagatgttatcttagcttctgttggataaatgcttactggacaagaggaaactgatgcacactacatggtcagtgggcttttaggctagtggcatcagtttcccagaatcagacttttgaagatgaatgactttggagaagcaaattaaacatttggccctgagccagcagatcaagcaaatgtctatctttgcgcatgggttgtttttttttttttctttttattctacttggtcagccttgggacgatagtccagctttgggtgatcttgaaatcaaatactatcctatactccagctgcttaacttcattttattctttaatgtgtacctgaaagctcctggcaattctgggaaaatttttatcccagaagggtgggggggaggggggaggggaagcca

SEQ ID NO: 41713 - DNA, 528 bp, Homo Sapiens
gctggctgggggagaaacccggatcccgctgcatctccgcgcctgtgggtgcatgtcgcgtgctcatctgttgcacacagctcactcgtatgtcctgcactggtacatgcatctgtaatacagtttctacgtctatttaaggctaggagccgaatgtgccccattgtcagtgggtccacgtttctccccggctcctctgggctaaggcagtgtggcccgaagcttaaaaagttactcggtactgtttttaagaacacttttatagagttagtggaaggcaagttaagagccaatcactgatccccaagtgtttcttgagcatctggtctggggggaccactttgatcggacccacccttggaaagctcaggggtgggcccaggtgggatgctcaccctgtcactgagggttttggttggcatcgttgtttttgaatgtagcacaagcgatgagcaaactctataagagtgttttaaaaattaacttcccaggaagtgagttaaaaacaataaaagccctttcttgagt

SEQ ID NO: 41714 - DNA, 335 bp, Homo Sapiens
cgcacctattttttttttttttttttaaacataattgcaatattttaggtgggctgcgagctgcagtcagccttcacgtctggcctcagtccccgtgtcagtgccgctctgcgtgtgcgtgtgcgcgtgtgtgagcctctacacatatatatacgtacagagccttaaaccacatcgtggcggtgccgtctgagctgtagcgggtggctttgtttccagtttttgtacccgtgtccttgtctcccctcctcccccatctggggatgtgtctgtgttccacaccttgaaataaacagacacatacgtgtaaaaaaaaaaaaaaaaaaaaaacgccg

SEQ ID NO: 41715 - DNA, 548 bp, Homo Sapiens
cacagccagtggcctcctgctctggcagggtgtggaggtgggagaggccggccaaggcaaggacttcatcagcctcgggcttcaagacgggcaccttgtcttcaggtaccagctgggtagtggggaggcccgcctggtctctgaggaccccatcaatgacggcgagtggcaccgggtgacagcactgcgggagggccgcagaggttccatccaagtcgacggtgaggagctggtcagcggccggtccccaggtcccaacgtggcagtcaacgccaagggcagcgtctacatcggcggagcccctgacgtggccacgctgaccgggggcagattctcctcgggcatcacaggctgtgtcaagaacctggtgctgcactcggcccgacccggcgccccgcccccacagcccctggacctgcagcaccgcgcccaggccggggccaacacacgcccctgcccctcgtaggcacctgcctgccccacacggactcccgggccacgccccagcccgacaatgtcgagtatattattattaatattattatgaa

SEQ ID NO: 41716 - DNA, 576 bp, Homo Sapiens
aggaatagtactcactgaagttgaaatgactgcccacttcaaaatcttcattgtgtttacacaccagtgtatttatacaaatcagaggcattttgtagatgctttgctgacttgttcagctctgtaaaaacacagaaatcagacccattttgtaaagcggaaaatcatgttacatggaacatgtcctgtatatatcacatacatggtaatggagtcttaatgataagtgcaagataataatttaatgatgggattagtctgatcgcttaatatgcacaatcctggaagtgaattacttgcatcagatatagtgatatttattattctgtacagagagaaaaatacatataaaacatatgcttacattacatgcacgcggatttcatgctccataatcttttctattttttaatttacctttctgtaaatgatgtgcatggaatatgccttatagaaaaatgctgttcataatttgactacgtggaaaagtgcctatatggtggtaatgctagtaaggcaaataagacaaattatcatgttggtttactacatcaccagttaacattttatattgtg

SEQ ID NO: 41717 - DNA, 849 bp, Homo Sapiens
ttgtttgtataaatactaaaaaatatcttaacagatttttttccccttaaaatgaattatctttccaaagattagactcagtatgagagtaggtgaggaacatagtttgtgtaatataatctttatttgcttacctgaccactttttattaagctgttttgtttaaaagcttttggttataggcatgaatattgttttgatggttaacttcactgacttatctgtaagtgtcattttatagtactttacagttgtcaaaaaaaatcttacatatattgatctagttgatcggtagaggaagcttgtgaagtaggtaggacaggttatgatgtcttcactgtatggacgtgaacccagggttctaataggttggcttgcccaaggtcacctgctagcttgtaaggtaggaatagggctcaaagtaaaacttttggttcagaagcttgactcataaactatactatatattcccaaaaatgtcagtattgacaacacagtctaactcttaaataaaattatgctaattagttacattcaaaataatgtttataaatttatttgtctatactagtagaagtgatcagtgacatactataaataatcctaaatggttatatttgatagaattcataacacattaaagagaaaatttcacattaaaaaaacaaaaaaaagggcgggccgctctaaagtatcccttcgagggggccaaggcttaccgcgtaccccagcttttcttgtaccaaagggggtccctattaggtgaagtccgtatttattaaggcctagggcactggggccccgcccgttttttaccaaaaagttacgctgaaacctgggggcaaaaac

SEQ ID NO: 41718 - DNA, 614 bp, Homo Sapiens
ggacgcgtgggctggtggccacctccatttatttccccactgctcctccactgacatccttcttagcagaaacttcatgaaaaagtttttgctgacacagaacaaacctgaaagtagtatctactttctaaatactactttgcttttcagtagtggatttgatatttataatgttctctaaagcttgcaactttttcagcaacgtttaaaaatagattaacctggaataacttacttgtttgctgctaaaatactcaagattttgccatttttaaacaaccagtccctgtgatacaactttgaaaaaacttttaaaaatctctgatgtatgggctctttttttcccataagaattatgtacatctgtgatgttttacagggggatccgcttttaaacagtgtacatattggaccacactgaaatgtcatatatcctttctctacttaaaattggttatttactgtgagttcatttccgatgtgttcttggttgttgctgttttctgcctgaagacgtgtatcataaagagctacatggtatggactatttatttgtaatttgacataaagtttgaagaataaagatctataaaagttgaaaaaaaaaaaaaaag

SEQ ID NO: 41719 - DNA, 577 bp, Homo Sapiens
caacctatccggtttgtgaaagcttctgcagttgaatgcggaggaccaaaaaaatgtgctctcactggccagagtaagtcctgtaaacacagaattaaattaggggactcaagcaactattattatatttctcctttttgcagatacaggatcacttctgtatgtaacttttttacatacattcgatacattcagcagggactcgtgaaacagcaggatgttgatcagatgttttgggaggttatgcagttgagaaaagagatgtcattggcaaagctgggttatttcaaagaggaactctgatgctctgcgtgggaccatgcctgaactccccgaataactgaaaaatggctgaatatttttatggttacttgatatttatttccaaggagtgagcctaagacttttttccccttttgcaaattgctctaagaagtaccatgatttcttttaaactgatctatgctgtgtttgcttattctttagttgaacacactatgaagaattccaggtgtactagtgaatgtaatttatagttgccaaaaaaaaaaaaacctgaaataaataaatgttagat

SEQ ID NO: 41720 - DNA, 921 bp, Homo Sapiens
attcccgggatgtctggcctccgaggcttcccaaatgtcctcaagaaggtcctcgtggatcagctggtagcctctccattgctgggcgtctggtacttcttgggccttggctgcctggagggtcagacagtgggtgagagctgccaggagctgcgggagaagttctgggaattctacaaggcagactggtgcgtgtggcctgctgcgcagttcgtgaacttcctcttcgtgcccccccaatttcgagtcacctacatcaacggcctgacgctgggctgggacacgtacctgtcctacttgaagtaccggagcccagttcctctgacacccccaggctgtgtggccctggacacccgagcagactgaactgtctgcttcctggaccagatgcaagactgtctcctggcggaccaccccctctgacagaaggggaatgggctcctgcagcaagctcgggtcttgagccacgtcccagcaccacttcagctccggagcattgggctgagccgccctttccaagctcacttctgggactgagtttcctcaaccggaacacacccatgaagatggatgatcatcccctagcccttctcagcaggaacctcatgcgacctgtgaccaagatgtcccatcctcagcacagggcccactctgccaaccagtctcaagcaccagcccctcaacactgccatccacctggctctgggccaagccaccaatccagagctccctcaggtcctgggactaaggcggggacatgactgatcccctcagagcaggctcaggcctggagtcggcccccaaaagtttcacatagggccaggcagcctctgtgtttctttccctggtcctgaactgtggaaatgccattaaactctctctataatgtaactgaaactgctggctgggsgcgtggctccc

SEQ ID NO: 41721 - DNA, 764 bp, Homo Sapiens
tttatataataacaaataaattaaaggaaaattaccaaatgcttactttgggaggggacgccgaactcgagcttgtagacagcttggatcctttctctgaaggaatcatgttcagtgttcgaccacctaagaaaagttggaaaaagatcttcaacctttcgggaggagagaaaacacttagttcattggctttagtatttgctcttcaccactacaagcccactcccctttacttcatggatgagattgatgcagcccttgattttaaaaatgtgtccattgttgcattttatatatatgaacaaacaaaaaatgcacagttcataataatttctcttcgaaataatatgtttgagatttcggatagacttattggaatttacaagacatacaacataacaaaaagtgttgctgtaaatccaaaagaaattgcatctaagggactttgttgaactttatgctgaagattcttcaagttgattcagtgtattactgatttttttctatttgtaaaggattatgagttgtataaaatacatactccctaaactagatcatgaaactggtttctgttttatgcagttgtcatttgtaaagtctaataaaatattctctataattgcttctagattacaaaaatatgacaatcttgtaagtagcagactatggagaaaaatgagttacctggagggtcaggtaacttgccaaactaaaaagtatgttagttgaggcaaagtcctaagcaaggttgtgctatcaaggct

SEQ ID NO: 41722 - DNA, 576 bp, Homo Sapiens
ttgatatttgaccatttaggacttaatctccagagagccagtaaattaggacagtgtttcaacaagcctaggctatctcgtaagttgaaaaatatcccactatagttgcttcatgagtatgaagtaagatggcctctgatttacactggttcaatttacaaattttcaactttatgattggtttatccgggtactaaatgcatttcaacttgatagtttcaacttatgataggtttaccaggatgtagtcccactgttgaggagcatctatttaggggttaattactttagtaataagtggaaagtaagataccttgagtaatgtttgcctataaaattgtcagcgtatttttacactattggctcaagaatgttataatgctaagggacataagttggcaaccacttggtttttggaaggactttcggtattgtattagaagtctgccctagctgttaaatttctgggtatttatcctaaggaattaattaaagagttaattgttcctttcttcagtgggccattgttttagatatttaaaaaatccaacagtttctatcataatgtaactgtaa

SEQ ID NO: 41723 - DNA, 580 bp, Homo Sapiens
aattaaattctgatattgcacttcttattttatataaaataatcctttaatatccaaatgaatctgttaaaatgtttgattccttgggaatggccttaaaaataaatgtaataaagtcagagtggtggtatgaaaacattcctagtgatcatgtagtaaatgtagggttaagcatggacagccagagctttctatgtactgttaaaattgaggtcacatattttcttttgtatcctggcaaatactcctgcaggccaggaagtataatagcaaaaagttgaacaaagatgaactaatgtattacattaccattgccactgatttttttttaaatggtaaatgaccttgtatataaatattgccatatcatggtacctataatggtgatatatttgtttctatgaaaaatgtattgtgctttgatactaaaaatctgtaaaatgttagctttggtaattttttttctgctggtggatttacatattaaattttttctgctggtggataaacattaaaattaatcatgtttcaaagtcttattttcagttccttttgcatgcctattttgatttagaaatca

SEQ ID NO: 41724 - DNA, 581 bp, Homo Sapiens
gattgcgaatcctccgctgaggtgatttggatatccctagaacgttgagggcacgagtcgggtcctgagaccaggtcctcagccagcagagccacgttccttatgagcaccgtgggtttatttcattttcctacaccactgacccgaatatgcccggcgccatggggactccggctttgggagaagctgacgttgttatccccaggaatagctgtcactccggtccagatggcaggcaagaaggactaccctgcactgctttccttggatgagaatgaactcgaagagcagtttgtgaaaggacacggtccagggggccaggcaaccaacaaaaccagcaactgcgtggtgctgaagcacatcccctcaggcatcgttgtaaagtgccatcagacaagatcagttgatcagaacagaaagctagctcggaaaatcctacaagagaaagtagatgttttctacaatggtgaaaacagtcctgttcacaaagaaaaacgagaagcggcgaagaaaaaacaagaaaggaaaaaaagagcaaaggaaaccctggaaaaaaagaagctacttaaagaactgtggga

SEQ ID NO: 41725 - DNA, 499 bp, Homo Sapiens
aatgcttagagtggactattaaatgtgcctaaatgaattttgcagtaactggtattcttgggttttcctacttaatacacagtaattcagaacttgtattctattatgagtttagcagtcttttggagtgaccagcaactttgatgtttgcactaagattttatttggaatgcaagagaggttgaaagaggattcagtagtacacatacaactaatttatttgaactatatgttgaagacatctaccagtttctccaaatgccttttttaaaactcatcacagaagattggtgaaaatgctgagtatgacacttttcttcttgcatgcatgtcagctacataaacagttttgtacaatgaaaattactaatttgtttgacattccatgttaaactacggtcatgttcagcttcattgcatgtaatgtagacctagtccatcagatcatgtgttctggagagtgttctttattcaataaagttttaatttagtataaaaa

SEQ ID NO: 41726 - DNA, 798 bp, Homo Sapiens
tctagcgaggtgacagcgtagaaccagacttgggcgttggaccccgcatcttattagcaaccagggagatttctccattttcctcttgtctacagtgcggctacaaatctgggatttttttattacttctttttttttcgaactacacttgggctcctttttttgtgctcgacttttccaccctttttccctccctcctgtgctgctgctttttgatctcttcgactaaaatttttttatccggagtgtatttaatcggttctgttctgtcctctccaccacccccacccccctccctccggtgtgtgtgccgctgccgctgttgccgccgccgctgctgctgctgctcgccccgtcgttacaccaacccgaggctctttgtttcccctcttggatctgttgagtttctttgttgaagaagccagcatgggtgcccagttctccaagaccgcagcgaagggagaagccgccgcggagaggcctggggaggcggctgtggcctcgtcgccttccaaagcgaacggacaggagaaatggccacgtgaaggtaaacggcgacgcttcacccgcggccgccgagtcgggcgccaaggaggagctgcaggccaacggcagcgtcccggcccgccgaacaaagaggaagcccgcgggccgccgggaagcggggggcggccttcacccctccctcgggcccgaaaaaagggtgaagtcgggtcccgccgaaccgccatgccctccctaaagggaccggggggggcctaagccccccgggtttacgaaaaaaaggggaaggggcct

SEQ ID NO: 41727 - DNA, 629 bp, Homo Sapiens
  misc_feature (475)..(475): n is a, c, g, or t
  misc_feature (531)..(531): n is a, c, g, or t
  misc_feature (585)..(585): n is a, c, g, or t
gaaagaggaaaaaagaaaaaacaccaatacccagatttaaaaaaaaaaaaacgatcatagtcttaggagttcatttaaaccataggaacttttcacttatctcatgttagctgtaccagtcagtgattaagtagaactacaagttgtataggctttattgtttattgctggtttatgaccttaataaagtgtaattatgtattaccagcagggtgtttttaactgtgactattgtataaaaacaaatcttgatatccagaagcacatgaagtttgcaactttccaccctgcccatttttgtaaaactgcagtcatcttggaccttttaaaacacaaattttaaactcaaccaagctgtgataagtggaatggttactgtttatactgtggtatgtttttgattacagcagataatgctttcttttccagtcgtctttgagaataaaggaaaaaaaatcttcagatgcaatggttntgtgtagcatcttggctatcatgttttggaaatactggagaagctttgaccaattngacttagagatggaatgtactttgctttacaaaatgctataactctgcttaggngtctattttcttgagccactaaagcgaaaataatgtgaatatga

SEQ ID NO: 41728 - DNA, 765 bp, Homo Sapiens
tggctgcggccggtttggcccttctttgtaggagagtttcatccgccctgaaatcttcccgatcgttaataactcctcaggtccctgcctgcacagggtttttttcttagtttgttgcctaagagtacaccaaatgtgacatcctttcaccaatatagattacttcataccacattgtcaaggaaaggactagaagaattttttgatgacccaaaaaactgggggcaagaaaaagtaaaatctggagcagcatggacctgtcagcaactaaggaacaaaagtaatgaagatttacacaaactttggtatgtcttactgaaagaaagaaacatgcttctaaccctagagcaggaggccaagcggcagagattgccaatgccaagtccagagcggttagataaggtagtagattccatggatgcattagataaagttgtccaggaaagagaagatgccctaaggcttcttcagactggtcaagaaagagctagacctggtgcttggagaagagacatctttggaagaatcatctggcacaagttcaagcagtgggttataccttggcacctaaataaaagatacaataggaaacgattctttgccttgccttatgtggaccattttctcagactggaacgtgagaaacgagcccgcatcaaagcacggaaggaaaatttagagagaaagaaagcaaaaattcttttaaaaaagtttccacatcttgctgaagcccaaaagtcaagtcttgtctaagatgtctgaact

SEQ ID NO: 41729 - DNA, 880 bp, Homo Sapiens
  misc_feature (742)..(742): n is a, c, g, or t
  misc_feature (817)..(817): n is a, c, g, or t
  misc_feature (831)..(831): n is a, c, g, or t
aagaggaaagtgaacagtaatcttcattttagtatttatgcttagatgtgaaaataaatgttatttgttgatcatttctataatccagagctttagaggaagacacataggtgggtttatgtttcacctcatttggaacaaaagaggacagaagcagaccactctgtgcaccaacctaaaaaattacagagaagagaaaattatctttggattgtgctgccctatataaaggtggcagaaagacatttttaaaaagcttattatttcttgcattattttaaaaagttcagagttgaaatgcctttcaaccatttccttctgtggtcatttttcttgctgcctttttcacccaagattcagcagtcagatgtttactgcacacctattacctattatttgctgttcttgcatggttcaaaccaccattctgtagccacccatcctttgccttatctaacaaacatttttccaggaaggtggaaaaggaagtgttgctctcattgtgtgactcagtgctgctgtccatcccatggaaacatgggcacaatcaagtatttgtccagcctattgcaggcttttcctgactttaaaataaattgtgatcaataatagtacctttgattatacatttattattgtgtctctctctgatgtactgtggattgtacatttaactttggaatggctttgtaataatcagtcttaagaaaatgttgacaagctctggttgcttatttttagnaaatgaggacattttataataataaaaaaaaagggattaatagcttttgacctcaagtctttgggtcttctgagntgttggagcttggnctgaagacatggtttaatactgtacaaatttctgaagatggttatttaa

SEQ ID NO: 41730 - DNA, 529 bp, Homo Sapiens
gggatgttctagccctccctggcatgtcagagccaggctctgcctggaggatccctccatccggctcctgtcatcccctacactttggccaagcaagaggtggtagaaccacttggctgctcattccttctggaggacacacagtctcagtccagatgccttcctgtctttctggccctttctggaccagatcctactcttcctttctaaatctgagatctccctccagggaatccgcctgcagaggacagagctggctgtcttcccccacccctaacctggcttattcccaactgctctgcccactgtgaaaccactaggttctaggtcctggcttctagatctggaaccttaccacgttactgcatactgatccctttcccatgatccagaactgaggtcactgggttctagaacccccacatttacctcgaggctcttccatccccaaactgtgccctgccttcagctttggtgaaagggagggcccctcatgtgtgctgtgctgtgtctgcaccgcttggtttgc

SEQ ID NO: 41731 - DNA, 706 bp, Homo Sapiens
  misc_feature (665)..(671): n is a, c, g, or t
  misc_feature (673)..(676): n is a, c, g, or t
  misc_feature (678)..(687): n is a, c, g, or t
  misc_feature (695)..(695): n is a, c, g, or t
gtccggaattcccgggatggccgagctgggtaccctgccccccgagacgaaggtgttctgcggccacgagcacacacttagcaacctggagtttgcccagaaagtggagccctgcaacgaccacgtgagagccaagctgtcctgggctaagaagagggatgaggatgacgtgcccactgtgccgtcgactctgggcgaggagcgcctctacaaccccttcctgcgggtggcagaggagccggtgcgcaagttcacgggcaaggcggtccccgccgacgtcctggaggcgctatgcaaggagcgggcgcgcttcgaacaggcgggcgagccgcggcagccacaggcgcgggccctccttgcgctgcagtgggggctcctgagtgcagccccacacgactgagccacccagaccctcacagggctggggcctgcgtccctcctcgtgacctcggccagctggacccacatgagggccacctctggaaccttcttcgaggccctggccagccatctgcccagcctcggagggtgggcaacctggtgcttcccgggtggacacacaggaccactcagtggggcctgtgtgggcgccgagacctgggtgtctgggaagtggggcacacggggcctccgaactatgaataaagctttgaaaggccaaaaannnnnnnannnncnnnnnnnnnnaacacaanaccaaggggcg

SEQ ID NO: 41732 - DNA, 662 bp, Homo Sapiens
tggcagacaggccagggatgtatgttgcttgcttgagagggtttcttttacttcaaaatctttcttcagggagcaagacatgaactgactaattggtatccactacttgtacagcttacataaatgagttgatgatatttaaccagtttttataaacttcatttaggtctctaaacacagactttttaaattgcaactgtaaatatgaaatggtcatcacatctgaccttggtcagtggggaggggaactggtatcctgccaagcctggttgtaatttgtaaccattttctatttgtgcaaactctgtaaatatgtgtttaaacaaatgtaatattttgtacaagatacactggagaacaaagggaactcaagattcttccagccacatgtcacctgtaggtagaagtaaactctgcagtgcagcttctgctcttggcccctctggccagggcccctgtggcttcctgcacactggacaggtgactgtatggtagagactgtgatctgggaactttttgctgtacaaatctgtttaaaaaaaaaaaaaagtaactcattgaattaacttgcagtggtgtgtttgattcttttttagactggcttcagcattgtgcagtttaaaaataagtaagtaacttacataaatcttcaattgtatgaa

SEQ ID NO: 41733 - DNA, 992 bp, Homo Sapiens
  misc_feature (629)..(629): n is a, c, g, or t
gtttgagtgcttgccgtagcagaaactatccttaccacaggtgggaaggaaaggaccagtttctagcagtgtcgggccactcctctttcgaacatccctaagggaggcattcacaaaagctgtcccaagcagctggaagaaaacagcttccgagatgaccaggaggactgggcggcgccgagcccagaacgctcctggcgcagcaccgttggcgttggccgattgctgctggtggggggcgggggtgcaggccccagtctctatgcaaatcagggatcagaagatcggaatttccaccaatcagcgggaagcctcggccctgtaactgctaatgggagacagcagcgccacgccacaggcttttcccctggtttcgggaggggtggggagccaggtggggctcccgcccagaccctttcccgaggtccgccctctccgccttttctctaaattcctcttttgagtgccctcccttccggttgagaggcgggggttggcccgtagttgtacactcagtcaccctgcactgtggaggcgggggcctcccttgtggactgatttgcgtgggattcggttgtcttattacgagatttaaaacaattcagatgacttactagtatgactgtttngtcatatttgcttccaggttaactaaatgaccaaaaatgaccacaaacacaaaaacaacaaacaaaaaacaacaaacacacaagaaaagaaaagcgaaaatagaatgagaagaacaagagacgacaacaagcagcatgaccaacaaataagagcgaggaggcagaagtaagcacaggaggcagaaataagcagcaaccaccttgtgtcgaaaaggaggagccgccaggagagacgaaagtacgacacgacagccagagcgcggaacacacgagtagaggagaagagagcggagaaaacgaaccaaccaccagtgggggtgagcagagaggagacaactaggagagtaagccggcgagacaaat

SEQ ID NO: 41734 - DNA, 522 bp, Homo Sapiens
gcgtccggtgatgagtctttctttgagtcctgacatgaggacttttgtttctggtgcttgtgatgcctcttccaaattatgggatattcgagatggaatgtgtagacagtctttcacgggacatgtctcagatatcaatgctgtcagttttttcccaaatggatatgccttcgccactggctctgatgatgccacttgccggctctttgaccttcgtgcagatcaagagttattattgtattctcatgacaatatcatctgtggaatcacttctgtagccttctcaaaaagtgggcgtctcttgttggctggttacgatgactttaattgtaatgtatgggacacgctaaaaggagatcgtgcaggtgtccttgctggtcatgacaaccgtgtgagctgcttaggtgtaactgatgatggcatggctgtggcaacaggctcttgggacagttttcttagaatctggaattaacagtgtcatacatatttgttctccattgatatatctgggagaaatcaatg

SEQ ID NO: 41735 - DNA, 611 bp, Homo Sapiens
gataagtggctgtgtcctctcagtggcaagaaattcaagggtcctgagtttgtgcgcaaacatatcttcaacaagcatgcagagaaaattgaggaagtgaaaaaggaagtcgcgttttttaacaacttcctcactgatgctaagcgcccagctctgcctgagatcaagccagcccagccacctggccccgcccagagtttgaccccaggactcccctacccacaccagactccccagggcctgatgccctatggtcagccccggcccccgatcttgggctatggagctggtgctgtccgccctgcagtccccacaggaggccctccatacccccatgccccgtatggtgctggtcgagggaactatgatgccttccgaggccagggaggttatcctgggaaacctcgcaacaggatggttcgtggagacccaagggccattgtggaatatcgggacctggatgccccagacgatgttgatttcttttgagccgtcccccgttcctcagtcctgtatcatccatacttgtactaccttgtcctatgaagctctgagaattttttgtacgatcagccttactgctaataaaagcacttccacagggaaaaaaa

SEQ ID NO: 41736 - DNA, 683 bp, Homo Sapiens
agtaatcagaagctaaagtaaagttcctttcctggtgctaactgtggtcttcttgacacattaagatgtattttgtattttaagagtctcatgctctaccgttggaactagccagatggccattattttgtattttaaatacataaataggattgaatcaactagaaatgaatctatatgttctgtatatatgaatgactatcttgtttttgctacttcttttgactgcttaattttattattttcatctttattgatcaaatttgaaaataaaattcacaatgtaatactactactatgcagaattttctaaacagttcagtatttttgacttttaaaaacaccccacagtgttaatagccacagaatattgaacatcaataggatttttaatgctatattgttataggcagtttattcatttttctttgtatatgaagatgataagtatcatattgcctaagtttgagtgatcatggttaattaattggcttaaatagtactcaaatttgtgtgggcgtatattgtattttatcaaggactaattcttccaccatacccaaagcatctaggagacactctgtcatttacatttacaaataatggatgcagagaaatataatcaattcttgattggcctggatacaaattatagtcactttttataatttgaataaactatg

SEQ ID NO: 41737 - DNA, 659 bp, Homo Sapiens
  misc_feature (626)..(626): n is a, c, g, or t
ggaatcttgattacagcactcacggcatgcaccctactcagtgtgggtgtcttcgtttgggggctttttttttttttgcacttctgaggctagatatgtctggctgaagatttgatgtggttcctccttaagctatgcgtcctgttaataataggtactgtactgggctctgtgtaagtgtcgttggggtaggacctatattttaatactgttcctaacatttcattttactagcgagaaatctttgatttcattttattctttgtaattctagacactagattgtagtttagccataactgatgttttttaaaaagggatatattttcttgcacagttgttcaaaaaagagacaagtttcagtcctcaatgctgtcctttgttttacaggtacaagttttctagctcagacaaactatgaaaaactgtagactattctcaaggtattaactcgcagaccctctgggggtaggggctgttttctaagttacaggcagagtgggactgagatggtacagtgtgcacagacaggtactgagctgacagactgggattttctgtactaaaatgttactttgtatcaaaagttaaacaggctttagtacaacaaataaaggtcaatttcntgtaaaaaaaaaaaaaaaaaaaaaaaaaaaaaa

SEQ ID NO: 41738 - DNA, 808 bp, Homo Sapiens
tctgagacggtgggagcggttgtgtgaagatggagtttcccggaggaaatgacaattacctgacgatcacagggccttcgcaccccttcctgtcaggggccgagacattccatacaccaagcttgggtgatgaggaatttgaaatcccacctatctccttggattctgatccctcattggctgtctcagatgtggttggccactttgatgacctggcagacccttcctcttcacaggatggcagtttttcagcccagtatggggtccagacattggacatgcctgtgggcatgacccatggcttgatggagcagggcggggggctcctgagtgggggcttgaccatggacttggaccactctataggaactcagtatagtgccaacccacctgttacaattgatgtaccaatgacagacatgacatctggcttgatggggcatagccagttgaccaccattgatcagtcagaactgagttcccagctgggtttgagcctagggggtggcaccatcctgccacctgcccagtcacctgaagatcgtctttcaaccaccccttcacctactagttcacttcacgaggatggtgttgaggatttccggaggcaacttcccagccagaagacagtcgtggtggaagcagggaaaaagcagaaggccccaaagaagagaaaaaagaaagatcctaatgaacctcagaaaccagtttcagcatatgctttattctttcgtgatacacaggctgccatcaagggacagaatcctaatgccacttttggtgaggtttcaaaaattgtggcctccat

SEQ ID NO: 41739 - DNA, 736 bp, Homo Sapiens
  misc_feature (734)..(734): n is a, c, g, or t
  misc_feature (736)..(736): n is a, c, g, or t
gggggagaaaaacatttagggaattggcacatttccaagtctcttcaattcgttgcctaggtttctttcaaaaataggcattattgaagacttgagatgcaagtcttagtaaatacatcaagcacattaatttttctcccttgggctaattcagcataagtatcttaaaagtatgttagaaagtactgactttaacttgctctgactgaatgctttctggatggaaccctgtataccacttttatctgatttggagatgagacactatgaaatgtgactccacaagctttctgctgcttgctgtgtcttgataacattaatgctatgtttaacagaacaattgctgaaatgacctaaagggcctggcaagaggaagccatcctcccagccctgtgcgcatgcgagctttagtgtaaggctattctggtgctattcagtattatttcacgtggctttttctttatccttctaccaagtattggttttaccaggggatagaaattgtaatcccctaaacatctctgctacattaaatggacttttgtatgtctcctttgaacactgattttttttttttaaattgtcaaacttggtaaaaagcaccagcatggccaagtttctctagggacttcatttcattttcaggttttcaatccagctataaggaatatgtaatggacttatatacagcacacagcaggcagcaaggctgactgacatgtcatagtttttcnan

SEQ ID NO: 41740 - DNA, 734 bp, Homo Sapiens
gaaaatgcagactaccttagtcccaccaactgtggaaagtagtcctgagcggcctatgaacaacagccctgaggcccatgcagtggaggcaccttctcctgagactatctgtgagatgatcacagatgtagttcctgaggttgagtctccttctcagatggatgttgaattggtgagtgggtctcctgtggcactctcaccccagcctcgatgtgtgaggtctggttgtgagaaccctcccattgtgagtaaggactgggacaatgaatactgcagcaatgagtgtgtggtgaagcactgcagggatgtattcttggcctgggtagcctctagaaattcaaacacagtggtgtttgtgaaatagtccttcctgttctccaagccagtgaagagttatctgctgggaaagtgtccaagagcctgtttttgaaacacaagctgggcttctggtagtgcctcatcacaacccatgatggctgttcatgtttcaccccttttcttccttcagcagaggccaggctatggagcagggccactgaatttgctgtaatctggagatgctttttactttcaaccataagcggtaatagcagaggaaagggtgaagggagtctgggcaagcaaagcatagagatggtggggtggtggtggggttgaagaaaacttgttggtataattgtcataggacttgcctaaaatattattaaaattacgggagtgtatcttaaaaaaag

SEQ ID NO: 41741 - DNA, 497 bp, Homo Sapiens
ccttgtagcaacccaaaaaatgtaaagaaagaattcgacacaatggggttgcgtcacctatagttttcatttcctcaaatgcaactcaaggtgctcagcttgataaagggagagagggagggcaggggagaaactgactcctttttccatctcttttttgcctgcacacttaatgtggactgcctccttggacttaaaaagagggcttgagccaacatgcaaatcaaaaaacatttatgaactgatttcttagctttggacttgacaactgacgaatgctctgggggttacctggcccttgctgtccgttccactcccatccttgatgatggagacacctgtgtttatgttgtcactttgcttgccatcctcatgccccgggctctgctggtttggaggggacagggcccttggtttgcacacctcacccgatcttggttataaggtacagtaaaagcgtctgaaaaatgcaaaaaaaaaaaaaaaaaaaaataggt

SEQ ID NO: 41742 - DNA, 889 bp, Homo Sapiens
  misc_feature (791)..(791): n is a, c, g, or t
  misc_feature (839)..(839): n is a, c, g, or t
  misc_feature (879)..(879): n is a, c, g, or t
ataagttattggaatacatgcccctccctccagaagaggcagaaaatggagagaatgctggtaatgaagaacccaagctacagttcagttatgtggaatgtttgttgtacagttttcaccagttgggccgaaaacttccagatttcctaacagccaaactgaatgcagaaaagctcaaagatttcaaaatcaggctgcagtactttgcacggggcctgcaagtttatatcagacaacttcgcttagctctccagggtaaaacgggtgaggccttaaaaacagaagagaacaagattaaagtcgttgcattgaaaataacaaacaatatcaatgttttaatcaaggatctcttccacattcctccttcttataagagcacagtaacactatcctggaaacctgtacaaaaggttgagattgggcaaaagagagccagtgaagatacaacttcaggttcaccacccaagaaatcttcagcaggaccaaaaagagatgccaggcagatttataaccctcccagtgggaaatatagcagcaatttgggcaactttaattatgagaggagccttcaggggaagtagaggtggccgaggttggggcacacgaggaaatcgtagtcggggaagactctactgaataagacatcagcattcttcagcattgtcatgagcttaatatacttaaattctactactcattggattgccggggatgtccctttaaacagactgctgccttcagctaaaaacttaatggtctttatacctttggatgtatgacctacttttggnaccagaccatgggtgtgtccaaggtaaaaaccccagtggatatttttnggatgccttgggctgcaatcttggcttggtttttgcagtntcattattca

SEQ ID NO: 41743 - DNA, 679 bp, Homo Sapiens
atttctcatactgacttttattactggaaatgttcctgtacatgttggcagcagataaagatttttgaatgtttgaatgccctctgccttgatttggttggaatttttgctaaattggtaatgttgcttgaactttatgactacattttcttttaacttttttcatggacttccttatatgtacataataattaaatgttgaaatttatgaaatacttttatgaatttagataatttttaaatattgttaaaatttattgaactaaaaagtaatgtaaataaaataattcatgttaaagatggaacaaaataattaactttacatgtttggtgatacagatgcaaatgtttttgatatatggagatgttgagtcttttgactttactaaaggtgctgaatagcattaaattcactattttccttttctgttttacttgtgaaaataaaaatgcactaaggttgggtagaagttctgtttgcactcactaattgtgacagacagaggtttttgtaagtatttattgtacaattgatgcatgtttatttttagcgttgttattgcctctggtgttaataaaatgaacaaatggctatctggaggaacagctacaacccttgtaatcctttgcttattctctgaatactagaggtatatatatttatttataacatagacca

SEQ ID NO: 41744 - DNA, 462 bp, Homo Sapiens
caaaagaccatgagctgaacctaaactcccttggaatctgaacaaaggaatataaaattgccatttgaaaactgaccagctaatctggacctcagagatagatcagccagtggcccaaagccatttcaagtacagaaattatagagactacagctaaataaatttgaacattaaatataattttaccactttttgtctttataagcatatttgtaaactcagaactgagcagaagtgactttactttctcaagtttgatactgagttgactgttcccttatccctcacccttccccttccctttcctaaggcaatagtgcacaacttaggttatttttgcttccgaatttgaatgaaaaacttaatgccatggatttttttcttttgcaagacacctgtttatcatcttgtttaaatgtaaatgtccccttatgcttttgaaataaatttccttttgtaaaa

SEQ ID NO: 41745 - DNA, 806 bp, Homo Sapiens
  misc_feature (543)..(543): n is a, c, g, or t
  misc_feature (725)..(725): n is a, c, g, or t
gggcaggcaagatcctgcctacactgctgcctctccctcgcctcagctgtctttctaataacttgaagtttttctgttcatagatctttgaaccaccagctccaggagaaggcaactccagtcagaacagcagaaataagcgtgccgttcagggtccagaagaaacagtcactcaagactgcttgcaactgattgcagacagtgaaacaccaactatacaaaaaggatcttacacatttgttccatggcttctcagctttaaaaggggaagtgccctagaagaaaaagagaataaaatattggtcaaagaaactggttacttttttatatatggtcaggttttatatactgataagacctacgccatgggacatctaattcagaggaagaaggtccatgtctttggggatgaattgagtctggtgactttgtttcgatgtattcaaaatatgcctgaaacactacccaataattcctgctattcagctggcattgcaaaactggaagaaggagatgaactccaacttgcaataccaagagaanatgcacaaatatcactggatggagatgtcacattttttggtgcattgaaactgctgtgacctacttacaccatgtctgtagctattttcctccctttctctgtacctctaagaagaaagaatctaactgaaaataccaaaaaaaaaaaaaaaaaaagtaattaccatttgcccttttctgtngagctattttggttttggttttggctgaaactagtcccaaaacaggaaattttacaagacgccacaggccaaaggaatgct

SEQ ID NO: 41746 - DNA, 549 bp, Homo Sapiens
ttttttttttttttttttgaaagtgttttttcttcgtccttttggtttaaaaagtttcacgtcttggtgccttttgtgtgatgcgccttgctgatggcttgacatgtgcaattgtgagggacatgctcacctctagccttaaggggggcagggagtgatgatttgggggaggctttgggagcaaaataaggaagagggctgagctgagcttcggttctccagaatgtaagaaaacaaaatctaaaacaaaatctgaactctcaaaagtctatttttttaactgaaaatgtaaatttataaatatattcaggagttggaatgttgtagttacctactgagtaggcggcgatttttgtatgttatgaacatgcagttcattattttgtggttctattttactttgtacttgtgtttgcttaaacaaagtgactgtttggcttataaacacattgaatgcgctttattgcccatgggatatgtggtgtatatccttccaaaaaattaaaacgaaaataaagtaaaaaaaaaaaaaaaaaaagcacctcgtgc

SEQ ID NO: 41747 - DNA, 552 bp, Homo Sapiens
  misc_feature (552)..(552): n is a, c, g, or t
ttcaagactgttcaagactggtgatttggagtagtttacaagattcctcattcagagtgccctcttgtgtgactggggtaatgtgcagcttccataatggatgggacagagagctgggatctaatgtacaagtgaagggcttggtcttccctgagacattccagccattggaataggagaggagcatatatggcagaggtgatggctggtgggtaaatgtgatagtaaattgtagaaacctcttctgattgattggatttccttaataaaatcggaagcaaggttaggctgagtgagggtgagtaaagaggtagaggaggtttgaggagagagaactgctcggaagacattggtagatggaccataaaaacagagttagttctctttatgacattaaatagttttacaacatatttttaatggttcacaatttcattttagggcttaaaatagattatggttctatgatttttttaaaccagtttcctattgttagacatttgtttccagtttcttactattataaataaagtgaaacaatatctcttactn

SEQ ID NO: 41748 - DNA, 601 bp, Homo Sapiens
  misc_feature (552)..(552): n is a, c, g, or t
  misc_feature (574)..(577): n is a, c, g, or t
cacgaggagggccgcgtgctccacccagagcagcaccgtgtggtgagcgtgcgggagtgtgcccgctcccagggcttccctgacacctaccggctcttcggcaacatcctggacaagcaccggcaggtgggcaatgccgtgccaccgcccctggccaaagccattggcttggagatcaagctttgtatgttggccaaagcccgagagagtgcctcagctaaaataaaggaggaggaagctgctaaggactagttctgccctcccgtcacccctgtttctggcaccaggaatccccaacatgcactgatgttgtgtttttaacatgtcaatctgtccgttcacatgtgtggtacatggtgtttgtggccttggctgacatgaagctgttgtgtgaggttcgcttatcaactaatgatttagtgatcaaattgtgcagtactttgtgcattctggattttaaaagttttttattatgcattatatcaaatctaccactgtatgagtggaaattaagactttatgtagtttttatatgttgtaatatttcttcanataaatctctcctataaaccannnnaaaaaaaaaaaaaaaaagtcatat

SEQ ID NO: 41749 - DNA, 589 bp, Homo Sapiens
gcacgagggacagcaccccgagggccacaggtgagggacactaccactggatcgtgtcagaaggtgctgctgaggatagactgactttggccattggattgagcaaaggcagaaatgggggctagtgtaacagcatgcaggttgaattgccaaggatgctcgccatgccagcctttctgttttcctcaccttgctgctcccctgccctaagtccccaaccctcaacttgaaaccccattcccttaagccaggactcagaggatccctttgccctctggtttacctgggactccatccccaaacccactaatcacatcccactgactgaccctctgtgatcaaagaccctctctctggctgaggttggctcttagctcattgctggggatgggaaggagaagcagtggcttttgtgggcattgctctaacctacttctcaagcttccctccaaagaaactgattggccctggaacctccatcccactcttgttatgactccacagtgtccagactaatttgtgcatgaactgaaataaaaccatcctacggtatccagggaacagaaagcaggatgcaggatgggaggac

SEQ ID NO: 41750 - DNA, 958 bp, Homo Sapiens
  misc_feature (596)..(600): n is a, c, g, or t
  misc_feature (607)..(611): n is a, c, g, or t
  misc_feature (630)..(630): n is a, c, g, or t
  misc_feature (649)..(649): n is a, c, g, or t
  misc_feature (651)..(655): n is a, c, g, or t
  misc_feature (679)..(679): n is a, c, g, or t
  misc_feature (700)..(700): n is a, c, g, or t
  misc_feature (706)..(707): n is a, c, g, or t
tagggttattgcatttggattggggtccctctaaaatttaatgcatgatagacacatatgagggggaatagtctagatggctcctctcagtactttggaggcccctatgtagtccgtgctgacagctgctcctagagggaggggcctaggcctcagccagagaagctataaattcctctttgctttgctttctgctcagcttctcctgtgtgattgacagctttgctgctgaaggctcattttaatttattaattgctttgagcacaactttaagaggacataatggggtcctggccatcccacaagtggtggtaaccctggtggttgctgttttcctcccttctgctactggcaaaaggatctttgtggccaaggagctgctatagcctggggtggggtcatgccctcctctcccattgtccctctgccccatcctccagcagggaaaatgcagcagggatgccctggaggtggctgagcccctgtctagagagggaggcaagccctgttgacacaggtctttcctaaggctgcaaggtttaggctggtggcccaggaccatcatcctactgtaataaagatgattgtgaaaatnnnnnaaaaaannnnnaaaaaaaaaaaaaaaaaanaaaaaaaacaaaaacaaanannnnnaaaaaaaaaaacaacaacaaccanaaacaccacccacaccccccnaaaaannaaaaagggggggggcccccccccaaaaaaaccccccccggggggcccccaaatataagccgaaccccacctttttttttgaaaaaaggggggccccaatatgggagggccttttttataaaccttgggccctctgggccccccttttttttaacacccgccgggggtggggggaaaaaaccccccctcccttggggggatttcttgtgggaagaagagcaccctcttcttctcgtggggggggggaaaaat

SEQ ID NO: 41751 - DNA, 542 bp, Homo Sapiens
ggggaatcctgtcaggtgtttggttatattgactatttattaatagtattagaactcattccctgaactgatgtaaatcttcatagtgtcagacatactgaccaaaaccacaatctagactacaaagtatattgttttagagtactcaaattgtattatttattaatttttttgtttgcaaaatcttaacaggaactgtattttctatattttaaagaattttatttgtcccacttttactaaacagtggcagcagattttaagttaaagaatatggaatatagtaaaataagtaaatttcttttggaatatttttagtaacaaatagccactataattctgtaggccaaattttatattgagtttagctgttttctcaaaatttagcagagtggttaaaattctgtgctgataagtaactgatacatataacataaacataacaaagttgcctagttgatgtaacagtggaaagttatctggaaatagtattttgaactttaagccaagtttaaaacattataataaaaggaataccattt

SEQ ID NO: 41752 - DNA, 827 bp, Homo Sapiens
  misc_feature (6)..(6): n is a, c, g, or t
aaaagnaaatatctttataaagaaatctttggaaattaggagaaggaatttcaggtgggtttaagtcagagctagttccccaacagaaagatcatttgaaaccagtttttatcccttctctttccttccctttccctaaatcaaatcaatattaattgtgccttatttcacttaacatagacttgaattatttttagggaaagcccctataatgaattcagaaatcactacaagcagcattaagactgaagttggaatattctgttgaccataaaaccttgatatcattctgtgtatatagaatgtaaaaggaatattacagtgttaactgccatatatgtaatatacacaaactcaattagcattgtaatggccaaatgcattcccccatgcttttctgttttcaaaaaaattgaaaaacaaatcaactcttatccccaacagctgcctaattttaggagtctgaccctccacatctcactggtgtgggtgcatggggctgtggagtgggtgtcagtatggatgtgtctgaatgtgtgaggccttggaagggactctttctgcagatactgtaaatacaagtaccattttaataaagcatgtacaataaaccaaaataagcttgagttggactttatatacagaactgtaagccagtgcattatgatacagttgtaagattgtgcatttgattcaagataaggaaaaatcttggaaatgaaaagcaggcactggttaaccaagttgtacacattgtaccacattcagcataactttaggaagaaattccactttgtggaacattctccagaaatccaagattattc

SEQ ID NO: 41753 - DNA, 961 bp, Homo Sapiens
  misc_feature (825)..(825): n is a, c, g, or t
  misc_feature (917)..(917): n is a, c, g, or t
attcccctcctccgcaaattctactgaccctgcagcatctaccgctcactgtagaccatctcaagcagaacaacacagctaaactggtgaagcagctgagcaagtcaagtgaggatgaagagctccggaaattggcctcagtccttgtcagcgactggatggctgtcatccgctctcagagcagtacccagcctgctgagaaagataagaagaaacgtaaagatgaaggaaaaagtcgaactacccttcctgagcgacctttgacagaggtgaaggctgagacccgggctgaggaggccccagagaagaagagggagaagcccaagtctcttcgcaccacagcacccagtcatgccaagttccgttccactggactagagctggagacaccatccttggtgcctgtgaagaagaatgccagcacagtggtggtttctgacaagtacaaccttaaacccatccccctcaaacgtcagagcaacgtagctgctccaggagatgccactccccctgcagagaagaaatacaagccactcaacacaacacctaatgccaccaaagagatcaaagtgaagatcatcccgccacagcctatggagggcctgggctttctggatgctcttaattcagcccctgttccaggcatcaaaattaagaagaaaaaaaaagtactgtcacctacggctgccaagccaagccccttttgagggaaaacgagcacagaaccaagcacagccaaaccttcttccccagaaccagcaccaccttctgaggcaatggacgcagaccgtccaggcacccccgttccccctgttgaagttcggnagctcatggatacagcctctttggagccagaagctctggattcaaagccagggagagtcctgggagatctaaccaactgacccggaaagcangaggaagaaaaggtggacatgcctgtggaaggcaaactgagaga

SEQ ID NO: 41754 - DNA, 649 bp, Homo Sapiens
aatcagtcatcctgatggaaaggcggaaaagttttataagaatgggtgccgcgttatacgtggtcccattggaactcgaaaggacctgagtgcagatgggaagaccatcactgtcactttctttaatggtgacgtgaagcaggtcatgccagaccaaagagtgatctactactatgcagctgcccagaccactcacacgacatacccggagggactggaagtcttacatttctcaagtggacaaatagaaaaacattacccagatggaagaaaagaaatcacgtttcctgaccagactgttaaaaacttatttcctgatggacaagaagaaagcattttcccagatggtacaattgtcagagtacaacgtgatggcaacaaactcatagagtttaataatggccaaagagaactacatactgcccagttcaagagacgggaatacccagatggcactgttaaaaccgtatatgcaaacggtcatcaagaaacgaagtacagatccggtcggataagagttaaggacaaggagggtaatgtgctaatggacacggagctgtgacgatcctcatgtgatcatgaagtaacagtaactgactttttatgttaaaaaaatgtacatttacttgtggatctgttaatttattgg

SEQ ID NO: 41755 - DNA, 593 bp, Homo Sapiens
cagctggatttgagttctggaacacacatcatccccacccctcccccagcgtgggctcaccattcttagtcctttctcaagtgggaccttcaactttctgtgaacacccagtctgcgtcctgggtctgctaggttcgatgatggcgaactcgtatctgcatccggtgcaagttttagctggcagaggtgagaccggtggtgctggtctgcctttgccaactatagccagtctggagacttgataaaatacttcagtgagaccagcttctcatcaacttgggcccggcgtgctgggcctgaaagtcacactacatgcactgcctttgggagtcagctcactccctgctcccacctggaaccttgccagcgtgaaggaggcttccaggtacttcaccctgtcaaccacctctgaatccccaccaggcgccttcctgggtggattcaacaagatgattttgccctttcccagttctctccttcactttggcatcagttgttttctatgaaaacagtggattggttgggttttgtgcagggtcttgggttagagccaaaatggatttgaggatgagtattttcttttttggttttgt

SEQ ID NO: 41756 - DNA, 540 bp, Homo Sapiens
tgagttcacccagaggcctgctctcctcacacattgtgtggtttggggttaatgatggagggagacacctcctcatagacggcaggtgcccacctttcagggagtctcccagcatgggcggatgccgggcatgagctgctgtaaactatttgtggctgtgctgcttgagtgacgtctctgtcgtgtgggtgccaagtgcttgtgtagaaactgtgttctgagcccccttttctggacaccaactgtgtcctgtgaatgtatcgctactgtgagccgttcccgcctagccagggccatgtcttaggtgcagctgtgccacgggtcagctgagccacagtcccagaaccaagctctcggtgtctcgggccaccatccgcccacctcgggctgaccccacctcctccatggacagtgtgagccccgggccgtgcatcctgctcagtgtggcgtcagtgtcggggctgagccccttgagctgcttcagtgaatgtacagtgcccggcacgagctgaacctcatgtgttccactcccaataaaag

SEQ ID NO: 41757 - DNA, 697 bp, Homo Sapiens
  misc_feature (13)..(13): n is a, c, g, or t
  misc_feature (21)..(21): n is a, c, g, or t
  misc_feature (49)..(49): n is a, c, g, or t
gaccggaacgaangatagaanaagagatagtacacagagtgtgttcccntggaagagattgtggaagagactgcagaaacatttgatgctgttgtagcttctgaagttgtagaacatgtgattgatctagaaacatttttacagtgctgctgtcaagtgttaaaacccggtggttctttattcattactacaatcaacaaaacacaactttcctatgccttgggaattgttttttcagagcaaattgcaggtattgtaccaagaggtactcatacatgggagaagtttgtttcacctgaaacactagagagcattctggaatcaaatggtctgtcagttcaaacagtggtaggaatgctctataaccccttctcaggttactggcattggagtgaaaataccagccttaactatgcagctcatgctgtgaaatccagggtccaggaacacccagcctctgctgagtttgttttaaagggagaaacagaagagctccaagctaatgcctgcaccaatccagctgtgcatgaaaagctgaagaaatgaattgtttctgagaactatagtaatatggcttggatatctgatgttttcaaatacaagaaatgtacaatttatcctttgagagagaatcatgaagaaaagaaggtcaataaaaaagggctaaaacctttggaaaaaaaaaaaaaaaaaaccc

SEQ ID NO: 41758 - DNA, 848 bp, Homo Sapiens
  misc_feature (842)..(842): n is a, c, g, or t
  misc_feature (848)..(848): n is a, c, g, or t
tccaaagctgcctttggtgaggatgtggatgcagtagacacgggtatcagcagagagacctcctcggacgttgcgctggcgagccacatccttactgcactgagggagaagcaggctccagagctgagcttatctagtcaggatttggaggtgggcggaaaccagggtcactgagctacagaggaggacatgccctgggatgtagtagtatcatgcagaggtgtgtgggcccttttgttcacctctgcagactgtgaatcctagctgccagtttgcctattatatgccaaggcatttgcaaaaatctcattaatctaaatcaaaatagctttaaagaaaaatgcatacacttcctcagatcatcaaacagactctggtccaaggttggtaatgaaatgactgttcctgacagggaggaatagcagggcccaatcttctgagatggcttctgggtctttccatggtcagagaagatctatagtccgtcctgaggtctgtcaatgtcacaggaaaaggcaaacttgaggggatcgtcgcctgctggctaagaccagggagctaaaaacttgaggaagggaacctgcctgggtgggtgctacttctgattcattgtccttgtccctgtcataagtacctccctattgtagatagaagggaaggaaactgttgacttgagcttggctaaatttcctgaaggtggaggaccttagagttgctccaagtaaactttccaaagacttcttcctgttggtgttgtaagaaaaggcccatgcttgtcccgggcacagtgggctttacgcctggttaatgccagttaactttggggaggcccgagggcaggngggatn

SEQ ID NO: 41759 - DNA, 891 bp, Homo Sapiens
gcctataagtaccgcagtctcgggaggagactcgaacgctgcctggaggaagatggctgggatgaaaatgtctactatacagtccccctggtgcgacacatggagtctaggatcatgatccccttgaagatctcgcctctgcagtgatgctgcctacacctccacctccttccccttctccctcaggcaaccccgacagacagtggcactcctggtcctgctgtcttggttttgtcttggctctgggaggactctgaggggcagtgctcagttcagacaagggggaactgaaggctgacaagttctgaggattacagctctgcccaggccctttctactttccctgcctgcctccctccccctgctagaagtagtttctgatttccctgaatgaaagatagagatcttttaggccttcatatatcttctaaaattcctcatctcaaggccaccagtccccagttatcacccttggaaatcctctgtttagcttagttgcacaaaaggtagtatgtccagtggctagaggtggggtgggaagagaggaggccaggccaggccctcaggaattccctggtttccactgggccacccacttgctggacagtctgagccaagtccctcctgctggagaaaagcctggaactgccaaacaaaaaacaatacatacaacctcgtaccacggcaggaggaggtcagacattctgccagaggggctgggaaagggtgggagccaggtagattaagggcagagacagaccgtacaggactcggaagtagactagaatcagaactgggttaattgagatttgaatctggatacagatggaagagaaagagagcaaagaccctgagagggtcctaacaaaagaggaagggcggcctgttccc

SEQ ID NO: 41760 - DNA, 888 bp, Homo Sapiens
  misc_feature (651)..(654): n is a, c, g, or t
  misc_feature (656)..(657): n is a, c, g, or t
  misc_feature (661)..(661): n is a, c, g, or t
  misc_feature (664)..(664): n is a, c, g, or t
  misc_feature (675)..(675): n is a, c, g, or t
ctcgtcaccacggtcaggaggaggttcagacattctgcccagaggggctggggaaagggatgggagccaggaaagatttaggggcaggagacagacacgtaacaggaactcggaaggtagaacttagaattcagaacttgggtttcaattgtagaatttggaatctggaatacagaattgggaagaagaacagagatgacaaaagaccacttgaagagaggttcctaatactagacagatggagagtggcttggctgtttccccctgcatattggggttgaaaacttaaatgtgtagttccagtccttctatgcagagtctctcctgccctccctccttcctgcaggcaaatatacaagctagaccctgttccctcaccctgtatcctgtctcccctaattgacattctatcagcccaaccctcattctgcagggccacctggtgtgtggaggtggcgggaggggtcagtgactctgggggtctcctcagtgacccccatacctcatcatgaacccttgggtagcttgattctgcctaccatccaggaaaacttgtgctggaattgctgatggaaacaattaaatatttactataaaaaaaaaaaacccacgcgtccggactagttctagatcgcgagcggccgccctttnnnntnntttncgncgtcttttgtntttcttttccccaaggaactctgaactttttattggcctcctgctccccaagggggaccctggtttctggtgggttaaaggcctcaaaaactttgggggcccttgggcctccaaacccccattttggccattccactattccgggggggggggggggcttttgggagggtttgcaatggaatttttcttggttgtcccggggattccccaaaa

SEQ ID NO: 41761 - DNA, 542 bp, Homo Sapiens
cctgcccctatgtccagtgcctggaagacggtggcctgcggggggaccagggaccagcttttcatgcaggagaaagcccggcagctcctgggccgcctgaagcccagccacacatctcggaccctcatcttgtcctgaggtgttgagggtgtcacgagcccattctcatgtttacaggggttgtgggggcagagggggtctgtgaatctgagagtcattcaggtgacctcctgcagggagccttctgccaccagcccctccccagactctcaggtggaggcaacagggccatgtgctgccctgttgccgagcccagctgtgggcggctcctggtgctaacaacaaagttccacttccaggtctgcctggttccctccccaaggccacagggagctccgtcagcttctcccaagcccacgtcaggcctggcctcatctcagaccctgcttaggatgggggatgtggccaggggtgctcctgtgctcaccctctcttggtgcatttttttggaagaataaaattgcctctctcttaaaaaaaaa

SEQ ID NO: 41762 - DNA, 807 bp, Homo Sapiens
ttcgtatagtgatgagaagggaccaagtattaaaacttgtgccaatcacagaataactccagacatgactttgcaaaatatgaaagggacagaaagagtatggttgtggactgcatgtgattttgcagatggagaaagaaaagtagagcatttagctgttcgttttaaactacaggatgttgcagactcgtttaagaaaatttttgatgaagcaaaaacagcccaggaaaaagattctttgataacacctcatgtttctcggtcaagcactcccagagagtcaccatgtggcaaaattgctgtagctgtattagaagaaaccacaagagagaggacagatgttattcagggtgatgatgtagcagatgcaacttcagaagttgaagtgtctagcacatctgaaacaacaccaaaagcagtggtttctcctccaaagtttgtatttggttcagagtctgttaaaagcatttttagtagtgaaaaatcaaaaccatttgcattcggcaacagttcagccactgggtcttgtttggatttagttttaatgcacctttgaaaagtaacaatagtgaaactagttcagtagcccagagtggatctgaaagcaaagtggaacctaaaaaatgtgaactgtcaaagaactctgatatcgaacagtcttcagatagcaaagtcaaaaatctctttgcttcctttccaacggaagaatcttcaatcaactacacatttaaaacaccagaaaaggcaaaagagaagaaaaaacctgaagattctccctcagatgatgatgttctcattgtatatgac

SEQ ID NO: 41763 - DNA, 561 bp, Homo Sapiens
gtttctatccacggttacacacatggcatgggactcctggctgtagctcactcgggtctactgaagaccaagttggtttttagaaatctatttaaaatatctatcatgtatctatttactgtgtttttctgaatacgcaagtgtaaatagtataatttgcagtgcaaaatccttggcaataactttgtgtattatgtttaaaaacactggaaaccgtgaccaccatggactgcccttcccctctgaggcaattattacatgtaggactctgaactttaaaccttcagcgtgactgaagcagcagcctgcacatgtggatggtcatcagtgcctcgcccagagatacctggccttcatccaaagggaccctgctgccacaagtcctccaggcagcacccgcactgtggctccttcgcactgagtatgttggactctgccatagactgaccctcttgtctggctgctgcagtttgtctgtaatgccctgacatgttgcattctccccatttggataaataaaaacaaacaaatgcttctgtcacacacaaaaaaaaaaaaaaa

SEQ ID NO: 41764 - DNA, 779 bp, Homo Sapiens
cggactgctgagaacttcagagcactatgcactggagagaaaggctttggtttcaagaattccatttttcacagagtaattccagattttgtttgccaaggaggagatatcaccaaacatgatggaacaggcggacagtccatttatggagacaaatttgaagatgaaaattttgatgtgaaacatactggtcctggtttactatccatggccaatcaaggccagaataccaataattctcaatttgttataacactgaagaaagcagaacatttggactttaagcatgtagtatttgggtttgttaaggatggcatggatactgtgaaaaagattgaatcatttggttctcccaaagggtctgtttgtcgaagaataactatcacagaatgtggacagatataaaatcattgttgttcatagaaaatttcatctgtataagcagttggattgaagcttagctattacaatttgatagttatgttcagcttttgaaaatggacgtttccgatttacaaatgtaaaattgcagcttatagctgttgtcactttttaatgtgttataattgaccttgcatggtgtgaaataaaagtttaaacactggtgtatttcaggtgtacttgtgtttatgtactcctgacgtattaaaatggaataatactaatcttgttaaaagcaatagacctcaaactattgaaggaatatgatatatgcaatttaattttaattccttttaagatatttggacttcctgcatggatatacttaccatttgaat

SEQ ID NO: 41765 - DNA, 611 bp, Homo Sapiens
ggcacgaggccgagaacgaggcagggaaagggatcgcagggacaccaagcgccacagcagaagccggagtcggagcacacctgtgcgggaccggggtgggcgccgctagctgggaaaacactagagctgcaggtaccagccactcggccccagggggttatggccacagagggataggcacagtctccaccaccctggagccaagggtctttcacatcacctatccctacatacataccaaatggaaaagtggccatccttttccccccaaacacacccccttaacctatctcttgggacttagcccgaccctccctctcatttcccattaagtctgagaggcaagagctaggttaggcaaggaggtggttggccagagatggggaacagccaggtgccccagtcctctgatttttcctccatcctgcttaccacctccctgggtacttacagccttctcttgggaacagccggggccaggactgggtcacctatgagctgaatcagcatctcctcctgagtcccagggcccctgcagttcccagtctcttctgtcctgcagcccttgcctctttcccacaggttccactttatatccaccttttcctttt

SEQ ID NO: 41766 - DNA, 582 bp, Homo Sapiens
ggctgcgcctagtgggccgttgccttacagttgctgagaggaggcgagaggcgggggcgctagggccgagatcatgtctgactgggagaggtttccttggcagcagaggacgctaggtttgggatgaaagaagctgggcagatgcaaaatctggagagcgcgagggccgggcggtcagtcagcacccagactggcagcatgaccggtcagataccaaggctttctaaagtcaaccttttcactctgctcagcctctggatggagctctttccagcagaagcccagcggcaaaaatctcagaaaaatgaagagggaaagcatggacccttaggagataatgaagagaggaccagagtatctactgacaaaagacaggtaaagagaactggtcttgtggtggtgaaaaacatgaaaattgttggtctccactgttctagtgaagatttacatgccgggcagattgctcttattaaacatgggtcaaggctgaaaaactgtgatctttatttttccagaaaaccatgttctgcttgtttgaaaatgattgtaaatgctggagttaaccgaatttcatactggcct

SEQ ID NO: 41767 - DNA, 717 bp, Homo Sapiens
ctccaccaggaagtccccattgtccaaactgagaccaaaaccatcacatatgagtctccacagattgatggcggggctggtggtgattcgggcacgttactgaccgcacaaaccatcacatctgagtccgtgtcaacaacgacaaccacacacatcaccaagactgtaaaaggtggaatttctgaaacaagaattgagaaacgcattgtgatcacaggagatggagatattgatcatgaccaggcactggctcaggcgatcagggaagccagagagcagcaccctgacatgtcggtcacaagagtggtggtacacaaagaaacagagttggctgaggaaggggaagattaagtaagaaagtcattttttaaacaacactcaactttgtgaacccctgaagattttttgaccgttccaagtcttaatgccacaccactattccagcgaatttatgctacaactggtaacaatgaccagaagcctgaagaattaaaatgccaacaccaaacctttccttaccagctctggtctatattgctcccatgcatttaatatattattttgttttataaccacttctaaatattctcggttctttctttttgttgttgttaattaaggggttttggttttgttttctgtttactttgtgtgcaactacctgcttttaatgactcactttgatcaaatgacagtgaacaaagccagcccaagctg

SEQ ID NO: 41768 - DNA, 697 bp, Homo Sapiens
agcaacatgaaatgaactgtagtaggtgtgtagtttggggaagtcaaatggccattttatgtatgtgcatttggtatcatgggccgtggaacagaatatatgttggacctctgaaaagttgtaaggggccaattctaagtattcttcacggcagccagaagttaatggtggtagcagctgaggtatggttgttggacgaggccgattttttttttttaacatggaacaatgaaaccaacaacaaacatttttaaaattaaaatggataattgtaaatagtttttagcttttaaaatttaaagtgtttttgagtgtgaaaagttgagtaaaactatttgcaactggttttcagaaaagagaaaagaaacaacaaaggaatttgaaacaggcagggagatcttaatacctaatttcatcatttctgaaaatgtactgttttagaatgtattacaatatcaatgtgaatatcttgaatcctgttacaaatcctgcactgtattaaacatgtaaattaatgtgttggtctgattagccaatctcaccacccaaatggggaggtatacatgtttgaagaactgtgtaactcagtaattgattggttctgatgttgtaactcaatagaagtgtttcggaaggaagcatggtgtgtgagacagtgtctgttctttgtgccagctctgtatgatgtttgtagaca

SEQ ID NO: 41769 - DNA, 653 bp, Homo Sapiens
ttttttttttttttttttattggacccttttgactttccagtcctgtgactttctacttttagtagagagtcagaatctctggactggagaataatgaagaagttcactgactgtgcactgtgcttagagaccctgccgcaccacagtgccaatgcttgtcagacacatgcccttcggcagcattccagaacaggagggaagagaaagagaaaactttcttcccttctactaaaagattcaggcagcttaaaaccttagtgctttctttcttaacatacccaaatttcaattctttccattatttgaacacttgggtagaactcttgctttgtattaaacctctttgtctacacatgtaaaacttaccttttgttattgagcaggcctatctctttcagatagttttatgattcacacaggtttgaggatgctggggagagggggagggggctgtggtggtgttctgttggttacaagaaagttataccatttaaagctggcaccagagacccgatagggacttattaactatattgaacattttttcctttgcctttgaccctatgtatagttacgatgccagattagatttatagcagcctcaagttgtattaaatgatattttgcttcctgtaatactattataaaataa

SEQ ID NO: 41770 - DNA, 639 bp, Homo Sapiens
gccgcaatgggcactacgctgtgtgccagttcctgctggaaagcggagctaagtgtgatgcccagacccacgggggtgccactgctctgcaccgagccagctactgcgggcacactgaaatcgcgcggctcctgctatcacatgggtccaaccccagggtggtggatgacgacggcatgaccagtctgcataaggctgctgagaggggtcacggggacatctgctccctcctcctgcaacacagcccagccctgaaggccatccgggaccgaaaggcacggctagcatgtgacctgctgccttgcaacagtgacctgcgggacctgctatccagctgagccgccaccctatctccagctgcctttaaagggtacacagaccagttctccaagcccctgccttggtcagcatccatgctgctgggcagggaactgaggccagaccacccaggaagagccccagtctggtcactgtggaagcgagggagtagatttggtgtggctaaaagtgtttaagactggacagatgatcatattctaaattagttcatatgagacatctatttatttggaaaaaaataaagttatatccttacctcatcccacacccaaagataaattgcaagattaaagatctaaa

SEQ ID NO: 41771 - DNA, 870 bp, Homo Sapiens
ccggattttccgaatcgtcgaccacgcgtccggatgtgcatacataatgatggcaccaagctggtgatgctcaacaacttaaagaagatgaccaatctgacagagctggagctggtccactgtgacctggagcgtattcctcatgctgtgttcagcctactcagcctccaggaattggacctgaaggaaaacaatctgaaatctatagaagaaatcgttagctttcagcacttaagaaagttgacagtgctaaaactgtggcataacagcatcacctacatcccagagcatataaagaaactcaccagcctggaacgcctgtcctttagtcacaataaaatagaggtgctgccttcccacctcttcctatgcaacaagatccgatacttggacttatcgtacaatgacattcgatttatcccccctgaaattggagttctacaaagtttacagtatttttccatcacatgtaacaaagtggaaagccttccagatgaactctacttctgcaagaaacttaaaactctgaagattggaaaaaacagcctatctgtactttcaccgaaaattggaaatttgctatttctttcctacttagatgtaaaaggtaatcactttgaaatcctccctcctgaactgggtgactgtcgggctctgaagcgagctggtttagttgtagaagatgctctgtttgaaactctgccttctgacgtccgggagcaaatgaaaacagaataacttatttttcgttaaagtttgactgaaacacgcttctaccaaatacagtataaataattaggtagtcttaatggccttcctatttttttttcctttttccccaaaatggacccaaagatcggcgtaggagta

SEQ ID NO: 41772 - DNA, 662 bp, Homo Sapiens
ggctaaatcagttttatttttctctgattttttttaataccacagaatcacctgagtgtcaattgaaagttgtcaattaaaaggtaaccttttaatctcgtaggaggaatctcattaagacatttttcctgatatgtagagcagtctgttggcaaaaatgcatatattttctttcatatttgtaaaattatatttaatggaattcttttctttgattatcaaggactttcactgcaggcagtgctatttcttgtgcctaagaatgtttccaaaagtcgcatcgctaatgatatttgccaagttgagtgtacacaaagtttctcatatcctgttcaagttaatcaacatcaagcacatggggatgctttagggtgagtctatagtacaaaatgcataaaccatgtccccaggaaatttgaaaggaagcaggtgctgaatggaatttttttccttttccatgagctgtgttaattctatctccagtaggcctaatgcttgaataagcaagatgtctaatcaataaattattttcatgctcagaatttcaggtttttgtactccagcatagcttggtcttatttcttactgtatgaaagcttaacagcaatgtgatttaaggttttgttttaaatgggagatgtaagtgatttaattcatgggta

SEQ ID NO: 41773 - DNA, 592 bp, Homo Sapiens
aacatttatttaacttaaataaaagataactgtcagataaaactttattttactaatgagcagtgattttcttaggaattgatgaaggcttattggtatcaagaatttaaaccaaattaaaactgacagaggacatttagatacataataaaattcgagctacataagtatatggaaactaatgtaccttgattattatgaaatagagcatcttgaaattcagttttactctaaatgtacttttaatacttgcagattctaagattacattgtaaaattccaggttttcataatgttaaaataggaaagtagaatataaagtatcaacaagtgtagttatacattttgttttggatatttaatccttacttgggaaaaaatcagcatctaggtaaattattattttaataagaactcttaaattgccaacctctgagaggtgaaaagctatgtaaatagaaggaatggccagttcaaaagaatagtagatgtgatagtgccgtgaatgtattctactggaaatgaatgtaataatacattacatttttaaaatcctgaaaaagaaacagacacacaagacaaacaacaaaaa

SEQ ID NO: 41774 - DNA, 585 bp, Homo Sapiens
tccagagaaggacacaaacgtgtttcgtaagcccaggcaccaatgggaatggaccaaagagtttcagggaaactccagtatattccagagtcagatctaagctccaggcacgcctgaagatgtgttgctactctgacatcccgagtttctgtccacacattgcatgcacagcgccccacacattggatactgttgttcacgataatttctcccgttttccagagcatttaacatagcttggaggcgtaaaatggctctgtattttaataacacagaaacatttgagcattgtatttctcgcatcccttctcgtgagcgcttagacctttttctattttagtcggattttgttttggaattttgcttttgtatgaacactcagcagaaaagtacttacttcttgccagttatctattaaccaaaacctttgatttgtagttttaaagattaaccctcaaagttctcttcataactgccttgacattttgggttgttctgttctgttaattttcttttgcttttttgtgttttttgtttgtttttacttttgcatttaagaccattaaatttgattttgttttgctc

SEQ ID NO: 41775 - DNA, 732 bp, Homo Sapiens
ctgacacgcggcgggacatgcaggtaaccctactctggaaactgtcagtcccaggcactggggagggctgaggccgaccatgcccagcctgctgctgctgttcacggctgctctgctgtccagctgggctcagcttctgacagacgccaactcctggtggtcattagctttgaacccggtgcagagacccgagatgtttatcatcggtgcccagcccgtgtgcagtcagcttcccgggctctcccctggccagaggaagctgtgccaattgtaccaggagcacatggcctacataggggagggagccaagactggcatcaaggaatgccagcaccagttccggcagcggcggtggaattgcagcacagcggacaacgcatctgtctttgggagagtcatgcagataggcagccgagagaccgccttcacccacgcggtgagcgccgcgggcgtggtcaacgccatcagccgggcctgccgcgagggcgagctctccacctgcggctgcagccggacgggcggcccaaggacctgccccgggactggctgtggggcggctgtggggacaacgtggagtacggctaccgcttcgccaaggagttgtcggatgcccgggagcgagagaagaactttgccaaaggatcagaggagcagggccgggtgctcatgaacctgcaaaacaagaggccggtcgcagggctgtgtataagatggcagaacgtaactgcaaat

SEQ ID NO: 41776 - DNA, 854 bp, Homo Sapiens
gcagaagaggcaattaccagtttcaatggtcataaacccccaggttcctctgagcccatcacagtgaagtttgcagccaaccccaaccagaacaaaaacgtggcactcctctcgcagctgtaccactcgccagcgcgacggttcggaggccccgttcaccaccaggcgcagagattcaggttctcccccatgggcgtcgatcacatgagcgggctctctggcgtcaacgtgccaggaaacgcctcctccggctggtgcattttcatctacaacctggggcaggatgccgacgaggggatcctctggcagatgtttgggccgtttggtgccgtcaccaatgtgaaagtgatccgcgacttcaacaccaacaagtgcaaagggtttggctttgtgaccatgacaaactatgaagaagccgcgatggccatagccagcctgaacggctaccgcctgggggacaaaatcttacaggtttccttcaaaaccaacaagtcccacaaataactcgctcatgcttttttttgtacggaatagataattaagagtgaaggagttgaaacttttcttgttagtgtacaactcattttgcgccaattttcacaagtgtttgtctttgtctgaatgagaagtgagaaggtttttatactctgggatgcaccgacatgttcaaatgttgaatcccacatgttagaccatctaagttcgtagttattccttagattaataaacgaatctagtagactgctgactacgtctctgatgtggactgagctgctactcaatgtcacccgtctcatgtccgatggacaaatccttagtatttactaaggacaggaggctcactcatgacaggt

SEQ ID NO: 41777 - DNA, 455 bp, Homo Sapiens
aggaaattagcaagggaaagaggaaagaggatagcttgactgcctctcagagaaagcagagggactctgagatcatgcaagaaaagcagaaggcagctaatgagaagaagtctatgcagacaagagaaaagtgatgactggctatttggaaaacctgggtgctactgccaactgggtgtatcataagctctaagatcaagattttgtagagtggacagtcattacatatgttataacttatcctttaaaaactattttaaactttatcctttcagctttacttagtgcgatgttttagaagcagtcttcaaagaataaaacactaaccatgcatgtgacatattggtgaacattatttttattattgaacattcatatataatttattaggtaatatgatcagataataggatctcttatataataaagaatctttgtcctccacaaaaaaaaaa

SEQ ID NO: 41778 - DNA, 707 bp, Homo Sapiens
ggaggacacctgcctagtggagctttactggccctggacctgtgtctaaaggtgggcattagcagtcggcatctcactgctatcactgtggatgtgtggacactccatgctgaactgcatgagggcctcttccagagccaactgctgtgccagggcccaagcctagcatctaagcctgttccctgttcagaggtgacagaaaacttagttgagccaactctgcctggcctattccttctccagcagctgccagaccaggtcaaggttaagatggagaacacaagcgtggtattgtccatgaatagtcaaaagaggcacctgacttggactctgaagctgctgcagttcctgtaccaccgtgatgaggatcagctgccccttcgaagcttcacagcaaactctgatatggcacagatgagcactgaactgctgctggaagatgggttgttgttgtcccaaagtcgccaacgcattgtctgcctcaactccctcaaggctagtgtgcaggtgaccaccattgacctctcagcctccctagttctgaacacttgcatcattcactaccggcaccagggaattctctcactggctgcacctgctagcactggaaacccaagggtctagttcacctgttctaaagcaaaggaaaaaaagaaccttccccccaaatcctggctcccatcatctttagcacctccatctccaat

SEQ ID NO: 41779 - DNA, 948 bp, Homo Sapiens
gtggtgacggtatcccagagtgccagagaaccgttgcttttccgagttgctcttcttccaggctccgttggtggtcggcatggcccgtggaaatcaacgagaacttgcccgccagaaaaacatgaagaaaacccaggaaattagcaagggaaagaggaaagaggatagcttgactgcctctcagagaaagcagagttctggaggccagaaatctgagagcaagatgtcagctgggccacacctccctctgaaggctccaagggagaatccttgctttcctcttccagctgctggtggctccaggttccattctaacctaggatgatctcatttggaaatccttaatttcatctacaaaaactgttttcccaaataggtcacattcacgcatatcagatggacagatgtatcattttggggtccaccattcaacccactacaaggagttttttaaacaaaaataggaaacttagatgtaacttagcacttytkttttttttttttgagatggagtctcactctgtcaccagactggagtgcagtggcgccatctcagctccatgcaacctctgcctcctgggttcaagcagttctcttgcctcagcctcctgggtagctgggattacaggcacgcgctgccacacccaggtaatttatttattttttttttgagacagagtctcgcactgttgcccaggctggactgcagtggcgtgatctctgctcactgcaacctccgcctcccgggttcaagcgattctccagcctcagcttcctgagtagatgggattacaggcgcctgccaccacgcccagctaattttttgtattcttagtagagatggggtttcacatgttggccaggctggtctccatctcctgacctcgtgattcaccgcctcggctcccaartgskgggatwmaggskgaktamagccccggcatwatt

SEQ ID NO: 41780 - DNA, 596 bp, Homo Sapiens
gtcagctacaagggtgagaagaacagtgtggactggggtgaccttaacctggtgctgccctgtctggagtaccacaacaacacatggacatggctagactttgccatggctgtcaaaagggacagccgcaaagccctggttgcccaggtaatcaaagagaagctaaggctgaagtctgcaacaggctctgaggtccggggaaagctagaaactaaatcggacctgaacatgcaacagcaggaagaggaggagaaagcccggctcctcattggtttaagtgtgggcgacaagaaccctggcaagaagtccatctttggcaggcgcaaatgatttggcgattcgagtggctgcagtacaggatctgactctggctcaggctccagggacttgtggggtgggaggggcttcccgttatccacgaggatttgtgggtgtcagagcccataggcatcactcttcagcacctggtctgttcgctgcagggcatggtggacagtaatgctgagttctgtctcacactgatcaggctcagggccagagaggcaacaagagagcaagacccagggaatgggcccagggcaggaccctattccctt

SEQ ID NO: 41781 - DNA, 937 bp, Homo Sapiens
  misc_feature (568)..(568): n is a, c, g, or t
  misc_feature (764)..(764): n is a, c, g, or t
tgcctgtgtgagtgttgactgactgtgtgtgtgtggaggggtgactgtccgtggaggggtgactgtgtccgtggtgtgtattatgctgtcatatcagagtcaagtgaactgtggtgtatgtgccacgggatttgagtggttgcgtgggcaacactgtcagggtttggcttgtgtgtcatgtggctgtgtgtgacctctgcctgaaaaagcaggtattttctcagaccccagagcagtattaatgatgcagaggttggaggagagaggtggagactgtggctcagacccaggtgtgcgggcatagctggagctggaatctgcctccggtgtgagggaacctgtctcctaccacttcggagccatgggggcaagtgtgaagcagccagtccctgggtcagccagaggcttgaactgttacagaagccctctgccctctggtggcctctgggcctgctgcatgtacatattttctgtaaatatacatgcgccgggagcttcttgcaggaatactgctccgaatcacttttaatttttttcttttttttttcttgccctttccattagttgnattttttatttatttttatttttatttttttttagagatggagtctcactatgttgctcaggctggccttgaactcctgggctcaagcaatcctcctgcctcagcctccctagtagctgggactttaagtgtacaccactgtgccctgcttttgatcctttacgaagaaaaaaaaaaaattaaagaaagcctttanatttatccaatgttaactactggggatgccttaaagtgaggcccctccaacaccaagggggttaatttccttggggattggggaaagggggctacctttccaggggatctttcttgcaggggagccccccttggggagggcaccctgaaaaaaacttggtaaaaacctttaaa

SEQ ID NO: 41782 - DNA, 938 bp, Homo Sapiens
  misc_feature (708)..(708): n is a, c, g, or t
  misc_feature (867)..(867): n is a, c, g, or t
aacaacaaaatcaacgtctcttagtggcccttagagagcttggggaaaccagagaaagagaagaacaagaaacaacttcatccaaaatcactgagcttcagctcaaacttgagagtgcccttactgaactagaacaactccgcaaatcacgacagcatcaaatgcagcttgttgattccatagttcgtcagcgtgatatgtaccgtattttattgtcacaaacaacaggagttgccattccattacatgcttcaagcttagatgatgtttctcttgcatcaactccaaaacgtccaagtacatcacagactgtttccactcctgctccagtacctgttattgaatcaacagaggctatagaggctaaggctgcccttaaacagttgcaggaaatttttgagaactacaaaaaagaaaaagcagaaaatgaaaaaatacaaaatgagcagcttgagaaacttcaagaacaagttacagatttgcgatcacaaaataccaaaatttctacccagctagattttgcttctaaacgttatgaaatgctgcaagataatgttgaaggatatcgtcgagaaataacatcacttcatgagagaaatcagaaactcactgccacaactcaaaagcaagaacagattatcaatacgatgactcaagatttgagaggagcaaatgagaagctagctgtcgcagaaataagagcagaanatttgaagaaggaaaaggaaatgcttaaattggtctggaagttcgtctttctcagcaaagaagagtctttgttagctgaacaaagggggcaaaacttactgctaactaatctgcaaaccattcagggaaatactgggagcgatctgaaacagaaaccanacaaaggcttagtagccagatagaaaacttgggacatgagatctctcattctaaagaaggagttggggaaa

SEQ ID NO: 41783 - DNA, 716 bp, Homo Sapiens
ggggtttgggccacctgaagatatgccacaaacaagttctagtcactctgatcttggccagcttgcttctcaaggaggtttaggaatgtatgaaacacccctgttcctagctcatgaagaagagtcaggtggccgaagtgttcccactactccactacaagtagcagccccagtgactgtatttactgagagcaccacctctgatgcttcggaacatgcctctcaatctgttccaatggtgactacatccactggcactttatctacaacaaatgaaacagcaacaggtgatgatggagatgaagtatttgtggaggcagaatctgaaggtattagttcagaagcaggcctagaaattgatagccagcaggaagaagagccggttcaagcatctgatgagtcagatctcccctccaccagccaggatcctccttctagctcatctgtagatactagtagtagtcaaccaaagcctttcagacgagtaagacttcagacaacattgagacaaggtgtccgtggtcgtcagtttaacagacagagaggtgtgagccatgcaatgggagggagaggaggaataaacagaggaaatattaattaaatggtctgtaaacaataacaactgtgaataagattatcaaatctgttttagtgtaatgattgtcaagtttaaaaacatttttatatataaactggtatactcatgtcaatattct

SEQ ID NO: 41784 - DNA, 899 bp, Homo Sapiens
ggcccagtgcttttacaacagaggaatgctaagggagaattgcccttggattatgtggtttcacctcaaatcaaagaagaactgtttgctattacaaaaatagaagatacagtggagaactttcatgcacaagcagagaaacattttcattaccagcaacttgaatttggctcctttttacttagtaggatgttgctaaatttttgttcaatttttgatttatcttcagagttcattttagcttccaaagggttaactcatctaaatgaactgcttatggcttgtaaaagtcataaagaaaccaccagtgttcatactgactggttactggatctttatgctggaaatataaagacattgcagaaactcccacacattcttaaggaactgcctgagaatttgaaagtgtgtcctggggtacacactgaggccttgatgataacattggaaatgatgtgtcggtcagtcatggagttttcatgatgatgctagaaagtatggattgactttctaaatctgttcagtttgcattggtacttactgtggacttcatagcttactgacagatagtaatttgatttatttattgacagactttgcagccttgctaaattttaaaagcatttttaaaaaaacttctacaaaactctagtatgggcttctgactttttccagggtgtagaatttgactcaaaagtaaaaataattttgttttagtatattctactttcattaatgtttttttgttctgaaagtgatattatattgtacatgtaaaattaatttaaatattttttcaaataaaaatgtaatgtcctgtattctagatgttctaggtcttagaatcatggcaagcatattcatacaaatgcgtacctataaacttgtagctcctgact

SEQ ID NO: 41785 - DNA, 708 bp, Homo Sapiens
tcattgttaggaggtaagtctcgaaggaagcgagaacgaatctctcattgtgtgccgtgtggctcaaaaccgaaaacaatgaagcttggttttaaaggataaagttttcttttttgttttcctctcagactttatggactatgtgaccgggtcttatgcaaattttctatttctaaaactactactatgatatacaagtgctgttgagcataattaaataaaatgctgctgctttgacagtaaagagaaggaagtattctgattagctatatctggtattaattgcatgttaaaacactggaatttttaaaattgaaattagatcagtcattcttttcttttctcaagatgtctcatggctgacactgaagaagaaatgtaattcataacttgcactaaatgtatattttttttcttaaaaatttaccattcttatttatatttttatggattaaaatttataaaatacagatcagttaatattgcacttaagtaattttacctttttaatgtgatttttatagaataattcagacttacaaatacagagatatgaacaaagtttacagtgggaacaaaggtttaaaaaaaggttgtggttctctctctgtgatccagtgtgcacataaacctttctctgatctttcactgccatcctctggattatgtcttctgacctgtccatttggaccttaacatggaagacgg

SEQ ID NO: 41786 - DNA, 560 bp, Homo Sapiens
tttcccttttttatttctgctcctcctttaattgcccatcttgcttcagagactgacatttcagggtggatattaattaaagcattaattttgttttttggtatatttctatccctagtatttctatcttactgctaaaatacaggaaaagtgccgtatttttaatgcatttagtggttttctttggtgttatctgttccatttttctttttcatacattgaagtgtgtctccttttcaaccaaaataatgaaatagtggagaccatgaaattgttgtgcctggctaattggcaaattaatttaccaatataataagtgtagcgccttgtttgaataccctttttgagaaggtatgatgagaatgggcaagggtgtcagcatctcttcttcttaataattaattgttttcagttttggttcacgaagaatgcttagttaatctgtaatgttgcctagagctgtatttatctgtttttatttatactagtgtagtaaagctgcatatcattacagtaaaaacgactactgtgatgagttaatcagaaaatctattaaaatc

SEQ ID NO: 41787 - DNA, 648 bp, Homo Sapiens
cgcgtccgggctgaactagagaagacggtgaaaaaaattgagcctggcacagcagcagactcgcagcagattcatgaagagaaactcctctactggaacatggctgttcgagacttcagtatcctcatcaacttgataaaggtatttgatagtcatcctgttctgcatgtatgtttgaagtatgggcgtctctttgtggaagcatttctgaagcaatgtatgccgctcctagacttcagttttagaaaacaccgggaagatgttctgagcttactggaaaccttccagttggacacaaggctgcttcatcacctgtgtgggcattccaagattcaccaggacacgagactcacccaacatgtgcctctgctcaaaaagaccctggaacttttagtttgcagagtcaaagctatgctcactctcaacaattgtagagaggctttctggctgggcaatctaaaaaaccgggacttgcagggtgaagagattaagtcccaaaattcccaggagagcacagcagatgagagtgaggatgacatgtcatcccaggcctccaagagcaaagccactgaggatggtgaagaagacgaagtaagtgctgggagaaaaggagcaagatagtgatgaaagttatgatgactctgatta

SEQ ID NO: 41788 - DNA, 576 bp, Homo Sapiens
cgcgtccgctttgaattgagccatctataaaactgcaaggtcttgcccttttttttaatcaaaactgttctgtttaattcatgaattgtatagttaagcattacctttctacattccagaagagcctttatttctctctctctctctctctctctctctctctctactgagctgtaacaaagcctctttaaatcggtgtatccttttgaagcagtcctttctcatattgagatgtactgtgattttactgaggtttcatcacaagaagggagtgtttcttgtgccattaaccatgtagtttgtaccatcactaaatgcttggaacagtacacatgcaccacaacaaaggctcatcaaacaggtaaagtctcgaaggaagcgagaacgaaatctctcattgtgtgccgtgtggctcaaaaccgaaaacaatgaagcttggttttaaaggataaagttttcttttttgttttcctctcacactttatggataatgtgaccgggtcttatgcaaattttctatttctaaaactactactatgatatacaagtgctgttgagcataattaaataaaatgc

SEQ ID NO: 41789 - DNA, 661 bp, Homo Sapiens
tcagtggtggttgaaaactgtaattgaacaggtttacgcaaatggcatccggaacattgaccttcactatattgttcgtaaactggcagctcccgtgatctctgtgctgttgctttccctgtgtgtaccttatgtcatagcttctggtgttgttcctttactaggtgttactgcggaaatgcaaaacttagtccatcggcggatttatccatttttactgatggtcgtggtattgatggcaattttgtccttccaagtccgccagtttaagcgcctttatgaacatattaaaaatgacaagtaccttgtgggtcaacgactcgtgaactacgaacggaaatctggcaaacaaggctcatctccaccacctccacagtcatcccaagaataaagtagttgtctcaacaacttgaccttcccctttacatgtccttttttgtggacttctctctttggagatttttcccagtgatctctcagcgttgtttttaagttaaatgtatttgacttgtgttctcagcattcagagagcagcggtgtaagattctgctgttctccctggatcttctgacattactgctgtctgagatttgtatatgtgtaaatacaagttccttgataccctaaaaccttggattaaacagaatgtgcattgtacatc

SEQ ID NO: 41790 - DNA, 527 bp, Homo Sapiens
gcacgaggaagattccagtcctgaatgtttgttttaaagtggagctcaagaatagcttttaaaagttcttatttacatctagtgatttccctgtattgggtttgaaatactgattgtccacttcaccttttttattatatcagttgacatgtaactagtaccatgcgtacttaaatagatggtaattttctgagccttaccaagaacaaagaagtatccatattaagtttagattttcagttaatttttgagactgagtagtattcttggatacaggctgatgtgtacttaaccacttccagatttatacagtcttcctgtggaagtttagtaaatgtctttttccctcctttcttctagtaatgcagttcatgggctttaggtacttcagttatgaagtaggcttttcatggggagagattgggattatgctctctgttgtttaagaaactgtttgattttagagtctatttctatgagatagtttaccaaataaatgttccttataaaaaaaaaaaaaaaaaaaa

SEQ ID NO: 41791 - DNA, 641 bp, Homo Sapiens
gggcagctggttaggtagagggagttgtcaagtctctgctggcccagccaaaccctgtctgacaacctcttggtgaaccttagtacctaaaaggaaatctcaccccatcccacaccctggaggatttcatctcttgtatatgatgatctggatccaccaagacttgttttatgctcagggtcaatttcttttttcttttttttttttttttctttttctttgagactgggtctcgctttgttgcccaggctggagtggagtggcgtgatcttggcttactgcagcctttgcctccccggctcgagcagtcctgcctcagcctccggagtagctgggaccacaggttcatgccaccatggccagccaacttttgcatgttttgtagagatggggtctcacagtgttgcccaggctggtctcaaactcctgggctcaggcgatccacctgtctcagcctcccagagtgctgggattacaattgtgagccaccacgtccagctggaagggtcaacatcttttacattctgcaagcacatctgcattttcaccccacccttcccctccttctccctttttatatcccatttttatatcgatctcttattttacaataaaactttgctgccaaaaaaaaaaaaaaa

SEQ ID NO: 41792 - DNA, 714 bp, Homo Sapiens
acaaaagagacagtgacgggaaaaaggagaagtcgagcaacagtgacagatctacaaaccttaagagggatgataaatgtgacagaaaagatgatgctaagaagggtgacgacggaagtggagaaaagagtaaggaccaagatgatcagaaacctggcccctcagagcgatctcgagccacaaagtcaggaagtcgagggaccgaacggactgtagtaatggataaatccaaaggggtgcctgtgattagtgtaaaaacgtccgggtccaaagagagagcttccaaaagccaggatcgcaaatcagccagcagagagaagcggtccgtcgtgtcctttgataaggtcaaggagcctcggaagtcaagagactcagagtcccatagggtgcgtgaacgcagtgaacgcgaacaacgcatgcaggcgcagtgggagcgcgaggagcgtgagcggctggagattgcccgagagaggctggccttccagcgccagcggctggagcgggagcgcatggagcgggaacggctggagcgcgaacgcatgcacgtggagcacgagcgcaggcgcgagcaggagcgcatccaccgtgagcgcgaggagctgaggcgccagcaggaactgcgctatgagcaggagcggcggcccgcggtgcggcggccctacgacctggaccggcgagatgatgcctattggccggaagccaagcgggccgccc

SEQ ID NO: 41793 - DNA, 839 bp, Homo Sapiens
  misc_feature (711)..(711): n is a, c, g, or t
aaatgatattttacactgtatcacagatacagtattttatataacttttgtaactgaccttatcttggcctgagtcccatcctctctggtggtagcgtaaaactgaaaattccagttgggtcaatatttagtgaaagttctactttcttttcagagagttgttcccccctttcttccttagatgttttcaaacacacagccccatcctactcaaaccaagtgaagcagagtggacaattctagaattggctgtgccatgtaggttttttttagaatttgaactgatttccttcatttgatgaggtggcaactgtccccattgtaatggtcaccattgcagcgaggatagccttacttctgcggcgcagagctcctcagggggcctctggctcctgtccttcctcaggtccatccaactactccttgggcctccttatggtagccctcattgtcttgagttgatttcactaggtttctgttctctgtcatctgcaacataactgacatggttctaaatctgtctctaaggagataacacattagtatattttctacactattgaagcctctacctaatgtatgactttggtagctcaggtaaagagatctttttaccagtgttatcgtttctagtctcgtgtagtcttcttttaaatagatatgggcctaaatcctgtattctggtaggaagcacttctctccaccctctgntttgagtacaattcaattcattcctatgtatttattatactaaagataagtacgggcttgggggaccacagggacggactgcccttaggagtcccgggaggaccattcgggaccatagtttagagccc

SEQ ID NO: 41794 - DNA, 488 bp, Homo Sapiens
cgcgtccggggaccatggccgaagagaggatgaccggtcatggcagggcacggccgacgggggcatgatggacagggatcacaagaggtggcaaggtggcgagagaagcatgtccggtcactccgggcctggccacatgatgaaccgaggaggaatgtcagggcgcggcagctttgccccaggcggggcctcccggggccaccccatcccacacggtggcatgcagggcgggtttggaggccagagccgggggagcaggcccagcgatgcccgcttcactcgccgctactgagtacttggaatcctgtgtcctgtctcgtggcaacaaggctatgttctgttaggagttaccttaaactgtgtaaaaatatttttttttaatctgctgccatattgtagctcaatacaatgtgaatttgtttttcgttttggggttttttttttttgtaataaatgtgtttccgttcacataccctttaaaaaaaaaa

SEQ ID NO: 41795 - DNA, 973 bp, Homo Sapiens
aggttttcaaaacaaaaatagagttgcaatcttggcagaactggacaaagagaaaagaaaactacttatgcagaaccagtcttcaacaaatcatcctggagctagcattgcactctcgagaccctctcttaataaggacttccgggatcacgctgagcagcagcatattgcagcccaacagaaggcagctttgcagcatgctcatgcacattcatctggatacttcatcactcaagactctgcatttgggaaccttattcttcctgttttacctcgccttgacccagaatgaagaaaacatttgcgatggaaaagtgactttgtaatatcaaatgccaaagctactatcattcagtgctacatgaactgtgactttaagaattttggtgaactttgatattttttgtttgtctgamagaaaggaatgtgtaagtgaaagctgaaagaagaataaccaggatgatgagagctgtggaagctgtatcgtccaaggaattgattatgtaccgtgactgtcacttttttgtaatgctgtttaactctcaatcagactgtgaactggatggtcacgaagtcattccccaactcctagcaagtttgactgaatatatcatgtccacagtagattttcaagaatcatttatagtacttaactttaaagaaacaaggctgcttttaaaaaatgaactaataggcttaaatcaattgcatccatatttgctgtttataggattgctatcagtataccttttgcgtttatagtcaacatgtatcatcctgaaatattctttctggacttataactacttcccccttttttcactttaaaamaaacctcaagaataaattactaaccagtcttaacmatcttttataaaaatatgmtmttataaatgttgtgactagatgcaattaaaaataataggggatgtggtaggtttttaatttgtacmtccycttatttagtgttacc

SEQ ID NO: 41796 - DNA, 536 bp, Homo Sapiens
  misc_feature (531)..(531): n is a, c, g, or t
  misc_feature (536)..(536): n is a, c, g, or t
tgcagaggagacaggaacccgagaagtagctgaagcagaagccagccgcagtccccttgccacatagaggcgggcttctcccagccatggtgtcccctctgcctcccctcccccgaccctcctgccttccgcgtggagggtggtggtcctgtagtgtcagcaccagcaccatgggcttggaccccctccctggacacaggcaggtgtcctagggctgggggtgcagcccgagggaatggagaccacactcatggctcaggtctgccggggccggcagggggttggggaagaagagggctcaggcccagcaggggtggaagcccctgccactgccactacccgctccagagctttaaggaaaatgaagtgagacccctccccttaggcctggggagccatagggctggcttctctgtgggtgcgtggacgtggggttgggagctgggaatctattttttgtattatgttttgagctactgtagttttggcgtggcactattgtaatggaaataaaatacttgtacggaaaanaaaan

SEQ ID NO: 41797 - DNA, 775 bp, Homo Sapiens
ccgtcgaccccgcgtccggtggatgtggttgcctcaaggcaggtggcaggcaggggtgacctgctggccctcagatcaatggtcgtggcaggtctgagagctgtcccactggccagacttctctccagcagcaaagccagcctggggcttgcatgttgatcctgagcaagcttaacggggtgaagctgggctttctcccccctgtgactggagtgcatgttgacaccagcactttttctgcacatgtatcttcaatccaacaaggccgtttttttaatgctgagtaacaggccaccaagcggctactgcgttatatcttctcagcaaccggccgcagtctcttctgcaccattttctacaccagacctgcttggcaccacagggagctcttttcctgccctgcacaatgacattccaaccaccaccagccagacattacagccaaccttgctgattgtcacaagcaggaccttggggccactggcactgtcagatagtaagccatttcttgggtagaggaggaaactcctctccacaaatccacttgggcctgtgcaaatggcacttgaaagagtccccatgcacttggagtccatgagccaatgggatatgcaaagacgcttaaacatttcagggctggtttctctgttcatatccaattctggtgcttaggaacagggacccatgctgatgcccaagggcaaaaagccccacttcctttaaggaagtgaacaggcctgaccctgatgcccaataacgggcaaccctaggcttt

SEQ ID NO: 41798 - DNA, 870 bp, Homo Sapiens
  misc_feature (761)..(761): n is a, c, g, or t
  misc_feature (806)..(806): n is a, c, g, or t
  misc_feature (844)..(844): n is a, c, g, or t
tatgacttgaaaacagcaggaccacaatctcagttgcttgctggaattgttgtggataagccaccttctactatgcaatttgaagatgatgatcatggcccaccagctcctcctaacccatttagtcatctcacagaaggagaacttgaagagtataagaggacaatcgaacgtaaacaacaaggcctagaagaaaaccatgagctgttttccaagagcttcatctccatggaagtgcctgtcatggtagtaaatggcaaggatgatatgcatgatgttgaagatgagcttgctaagcgagtgagtaggttaagcacaagtacaaccatagaaaacatcgagattactattaagtctccagagaaaatcgaagaagtcctgtcacctgaaggctccccttcaaaatcgccatccaagaaaaagaagaaattccgcactccttcttttctgaaaaagaacaaaaaaaaggagaaagttgaggcctaaataaagtctttttataattattattataacaatgtgacattgcacatctaaataccacatttaagttgatcattaatatgcaatggtagatcagattgggggatgtagcaaactggattttaagaactggaaagaggttttacaaaagaaaaactttcagattcatctctcattttatatgtccagaaatggctttgaattttaagcaattactagttttaattagctctggcctcatgaagtattattataattcaccataaacaggtatctgnctgaattactttaggccttcttcataatatctggtagaaagaaantggcagtgaccagtgagaattttattcttaatacctgnttcacttgatatcatattataatttt

SEQ ID NO: 41799 - DNA, 736 bp, Homo Sapiens
  misc_feature (608)..(608): n is a, c, g, or t
  misc_feature (718)..(718): n is a, c, g, or t
  misc_feature (730)..(730): n is a, c, g, or t
caaaagaaaaactttcagattcatctctcattttatatgtccagaaatggctttgaattttaagcaattactagttttaattagctctgccctcatgaagtattattataattcaccataaacagctatctgtctgaattacttcaggccttctccataatatctgttagaaagaaattgccagtgagcaagtgagaatttttatttctcaatacctgcttcacttgataatcatattataattttttatcatgattattgactatatttttggagtcccattgtttcagtgggcattaacagaatgctttaaaaacttctaagacaagaatctatagcattagtatacactggcacataattttttaaaaagttttaagaaaagattcatttggaattttattcacagtataaaatttcctcacctgaagtaactttgtttgccaaaaaagttgttttaataaactataatttttgaaaacttccttttttattagtttagaaagccccttatttttcaacaaaggggattttgtacacataacatgggttatttagtttaactctggcaaaaaaaaaaaaaaaaaattttgtatgttgatgtttgnataccgttcagtataaaagtgtcctaagcatattagccaatcttttcacagtagagcatacttaaggctgcttggtactgagtatacttaaatataactccagaatccanggacttgggtgntaaaac

SEQ ID NO: 41800 - DNA, 672 bp, Homo Sapiens
ggacagtgaccgccgctccagcatccccatcactgtgcggcagctggaggccattgtgcgcatcgcggaagccctcagcaagatgaagctgcagcccttcgccacagaggcagatgtggaggaggccctgcggctcttccaagtgtccacgttggatgctgccttgtccggtaccctgtcaggggtggagggcttcaccagccaggaggaccaggagatgctgagccgcatcgagaagcagctcaagcgccgctttgccattggctcccaggtgtctgagcacagcatcatcaaggacttcaccaagcagaaatacccggagcacgccatccacaaggtgctgcagctcatgctgcggcgcggcgagatccagcatcgcatgcagcgcaaggttctctaccgcctcaagtgagtcgcgccgcctcactggactcatggactcgcccacgcctcgcccctcctgccgctgcctgccattgacaatgttgctgggacctctgcctccccactgcagccctcgaacttcccaggcaccctcctttctgccccagaggaaggagctgtagtgtcctgctgcctctgggcgcccgcctctagcgcggttctgggaagtgtgcttttggcatccgttaaaataaagccacggtgtgttcaaaaaaaaaaaaaaaaaaa

SEQ ID NO: 41801 - DNA, 772 bp, Homo Sapiens
tttgattaaggcttgtccaagacctgaagggttgaactttcaggatctcaagaaccagctgaaacacatgtctgtatcctcaatcaagcaagctgtggattttctgagcaatgaggggcacatctattctactgtggatgatgaccattttaaatccacagatgcagaataactggatctaactgggtacctgagatattttacagctggacctagtttcacaatctgttgtctccagctctgcatatgtctggccagggggcttctaggaagtaggtttcatctatcaaatgtctcctctgacttccttttgaaacttactgctcttctgttttattttgttttgtttgaagctcagagggagatgggcaattgacagggatgcaatccagggtgggatttcttgaggaagttacaaataagcttgttacaacatcaagatagatggaattggaaggatgctaccaggagagtacttacatagtgctcaggagtttctcttcttaaaatgtttactgctgaaagatgagcaggaccagggcgttataggcagagccctagccgagaaacctgctggcctctgcctgttttcatttcccactttggttgtgtggcattactttcagaattgcactttcctgcttgtcatgactttttgacacacttgccatgacgtgtgtttctgtgaacatgaagttctgcggtagtgcctccaggggcagaggaaaagaagaagtgttactgcattttgtacaaaataaatacagtcata

SEQ ID NO: 41802 - DNA, 645 bp, Homo Sapiens
tggagacggacatttcctcttccaggaagcaatcagaggagcccttcaccactgtcttagagaatggagcaggcatggtctcttctacttccttcaatggaggcgtctctcctcacaactggggagattctggtcccccctgcaaaaaatctcggaaggagaagaagcaaacaggatcagggccattaggaaacagctatgtggaaaggcaaaggtcagtgcatgagaagaatgggaaaaagatatgtaccctgcccagcccaccttcccccttggcttccttggccccagttgctgattcctccacgagggtggactctcccagccatggcctggtgaccagctccctctgcatcccttctccagcccggctgtcccaaaccccccattcacagcctcctcggcctggtacttgcaagacaagtgtggccacacaatgcgatccagaagagatcatcgtgctctcagactctgattagctgcctccccttctccctgcctccagaatgttctgggataacatttggaggaaggtgggaagcagatgactgaggaagggatggactaagctaatccccttttggtggtgtttctttaaaaaaaaaaaaaaagcttaagttttacacagaaacattaataaacaat

SEQ ID NO: 41803 - DNA, 783 bp, Homo Sapiens
cgcttcctgtggaagcaagaccaaaggaaatcaactgagtgggtgtttggaagaggaaggagcaactctcgggcagcctgcccaagggagggagcaagttgcaatttagaagatgccatacgtcgtgtgacagctcatgagcctttcactgggctggcaattgtctgaacacttgggttcagttgaaatatatgtattttggccaaaagccagcagcacttcacaaaaacaaaacacaaacctaagctaacaaaatgactgcattcgtctcttttttaaaggtagagattaaactgtatagacagcatagggatgaaaggaaccaagcgtttctgtgggattgagactggtacgtgtacgatgaacctgctgctttgttttctgagaagaggtttgaagacattttattaacagcttaatttttctcttttactccataggaacttattttaatagtaacattaacaacaagaatactaagactgtttgggaattttaaaaagctactagtgagaaaccaaatgataggttgtagagcctgatgactccaaacaaagccatcacccgcattcttcctccttcttctggtgctacagctccaagggcccttcacttcatgtctgaaatggaactttggtttttcagtggaagaatatgttgacaggtctcatttggttctagaaaaaaaaaaattccttcccaaagtggcgcaaaaagctttatatttattcgattatcccaaataccgatcccaagtttgatcttccccacaacaaaacaagg

SEQ ID NO: 41804 - DNA, 643 bp, Homo Sapiens
  misc_feature (620)..(620): n is a, c, g, or t
cacaatcatacaggtgtggcgagaggatattccagtgaactatatgaaggagctggaactggtcaccaaggccggcttccgggcccttctctctgccccctggtacctgaaccgtatatcctatggccctgactggaaggatttctacgtagtggaacccctggcatttgaaggtacccctgagcagaaggctctggtgattggtggagaggcttgtatgtggggagaatatgtggacaacacaaacctggtccccaggctctggcccagagcaggggctgttgccgaaaggctgtggagcaacaagttgacatctgacctgacatttgcctatgaacgtttgtcacacttccgctgtgagttgctgaggcgaggtgtccaggcccaacccctcaatgtaggcttctgtgagcaggagtttgaacagacctgagccccaggcaccgaggagggtgctggctgtaggtgaatggtagtggagccaggcttccactgcatcctggccaggggacggagccccttgccttcgtgccccttgcctgcgtgcccctgtgcttggagagaaaggggccggtgctggcgctcgcattcaataaagagtaatgtggcatttttctatnaataacatggattacctgtgttt

SEQ ID NO: 41805 - DNA, 581 bp, Homo Sapiens
gtaagcatcctaaccagcaatactgcagatgacaagttaaacttatctgttaacagctgcctgctgttttctgctcccagatgaaatgaagcaactcttctgataacgaagagatacctgtctgaggcaaacgaaacattggcacacagcacagcctcctcaatccacttgatcccaactcatctctcatttatttcggcttcttttattccaggattaatgtagtgtaacattttcatttcttttcgcttttattctgcttttgtaaaagcagtattttgagatggacattgcctcttcattgtatttctcatcaattcattatttttgtggttatagcttgacaagcaattaactttaaaatggtagattccgtaactttaaattggtagctttcatttgcttaaaattttttggcatatgcagataatgttctcatcagtagtaagaatctcagggttatgcttattccccaatggaggtatgacatataatcttttctgcctttacttatcacttcaccaaggagctgttttctctgcatctagggcatcatactgccaagctggttatgaccccca

SEQ ID NO: 41806 - DNA, 664 bp, Homo Sapiens
gagcgaggcctgggtggcgccctccctgattcccccactgaaagccctgtttgctggcgacatcgaggagatggaggagcgcagggagaagcgggagctgcggcaggtgcgggcggccctcctgtccagggagctggcaggcggcctggaggatggggagcctcagcagaagcgggcccacacagaggagccacaggccaagaaggtcagagcccagtgaagatctgggagaccctgaactcagaaggctgtgtgtcttctgccccacgcacgcacccgtatctgccctccttgctggtagaagctgaagagcacggtcccccaggaggcagctcaggataggtggtatggagctgtgccgaggcttggggtcccacataagcactagtctatagatgcctcttaggactggtgcctggcacagctgcgggccaggaggctgccacacggaagcaagcagatgaactaatttcatttcaaggcagtttttaaagaagtcatggaaacagacggcggcacctttcctctaatccagcaaaatgattccctgcacaccagagacaagcagagtaacaggatcagtgggtctaagtgtccgagacttaacgaaaatagtatttcagctgcaataaagattgagtttgcaaaaaaaaaaaaaaaaaaa

SEQ ID NO: 41807 - DNA, 595 bp, Homo Sapiens
ggctgcaaaggtaaaaatccattaaaaccttaagttaaatataaatgttacaacttgcagtgattaacttggcaaggcttccttccgtgtttatccctgtagccatcatttaagtcaggaacagtcagaaaaatatttattttattttttttttgggtgtctgcaaaggtaaaaatccattaaaaccttaagttaaatataaatgttacaactcaatgtttgcttttagattttatacagtatttgttttgttttggttttgagtgtatataatgcagcattagcaatatggttccaatagaggagttaaatatatattgttaaaggagacctgtagcagtcaaagattttattgatttaatgacaaaggaaattaatgaaaatgtttttgtttttctgctgtaattctgcattaagctcacatgaaaatcatgattctagagtttggaatgcaaaattaattgttttaccctcaagctgggaatatttttcaaaataaatactataatatagatatcaaattattacctccccatgttatgttgaaaatttttttattaaattgataaaactttatttccattatattcataat

SEQ ID NO: 41808 - DNA, 581 bp, Homo Sapiens
cctctgtgaaagattggtcagatgtctttgagaagtgttaaactaattcacatggtagtgtagggccaacatacaagctaccagtctaatgtgtatagtagactttgggaaaagcgattttttttcatgtattcattctgaatagttgaaatgtatatttgtacagtcttttagacctattcaagtgatgctcatgatcctgttactgtgtgcccatcatagatttctttttttagtgttgcccttgctgtgtaataaacgctctatctagtttacctagcaaaagctcaaaactgcgctagtatggactttttggacagacttagtttttgcacataaccttgtacaatcttgcaacagaggccagccacgtaagatatatatctggactctcttgtattataggatttttcttgttctgaatatccttgacattacagctgtcaaaaacaaaaactggtatttcagatctgttttctgaaatcttttaagctaaaatcacatgcaagaattgactttgcagctactaattttgacaccttttagatctgtataaaagtgtgttgtgttgaagcagcaaa

SEQ ID NO: 41809 - DNA, 904 bp, Homo Sapiens
  misc_feature (833)..(833): n is a, c, g, or t
ggccaccggctggagcggatcccacacctccggaccgagggacgcggttactccacaggatccgctgaacataggatgttgccacaaaatctacctcgtgtatttttctctttcactcatgagctgcacaattgcagatttgagcacaatgtctgcagactgtgttgaaaaactctgaagaacctaattaacacaggatgacctaggagtgattctaagtctgtgtaacaagatattactcattagtgaatgtgtcagtcttggtactgaatgctgcagataacagcaagtaggttctcctttatttctgaagtattcacttgaccttccatcagtaagacggacttttctaatctgttcctggagatattaatggaatacagtcatgtccactcaagacgagaggcagatcaatactgaatatgctgtgtcattgttggaacagttgaaactgttttatgaacagcagttgtttactgacatagtgttaattgttgagggcactgaattcccttgtcataagatggttcttgcaacatgtagctcttatttcagggccatgtttatgagtggactaagtgaaagcaaacaaacccatgtacacctgaggaatgtcgatgctgccaccttacagataataataacttatgcatacacgggtaacttggcaatgaatgacagcactgtagaacagctttatgaaacagcttgcttcctacaggtagaagatgtgttacaacgttgtcgagaatatttaattaaaaaaataaatgcagagaaatgtgtacgattgttgaagttttgctgatcctcttcagttgtgaggaattaanaccagagtgcctaaaagaatgctcggagcaccaagttcacctgctggtgtatccatcaggaacgcggttcc

SEQ ID NO: 41810 - DNA, 768 bp, Homo Sapiens
cagacagagagcctggtggaaaagctgtgtcagcggttccgcacatcccgaactgagcggcagcagcgagacctggcctactgtgtgtcacagctgcccctcacagagcgaggcctccgtaagatgcttgacaattttgactgttttggagacaaactgtcagatgagtccatcttcagtgcttttttgtcagttgtgggcaagctgcgacgtggggccaagcctgagggcaaggctataatagatgaatttgagcagaagcttcgggcctgtcataccagaggtttggatggaatcaaggagcttgagattggccaagcaggtagccagagagcgccatcagccaagaaaccatccactggttctaggtaccagcctctggcttctacagcctcagacaatgactttgtcacaccagagccccgccgtactacccgtcggcatccaaacacccagcagcgagcttccaaaaagaaacccaaagttgtcttctcaagtgatgagtccagtgaggaagatctttcagcagagatgacagaagacgagacacccaagaaaacaactcccattctcagagcatcggctcgcaggcacagatcctaggaagtctgttcctgtcctccctgtgcagggtatcctgtagggtgacctggaattcgaattctgtttcccttgtaaaatatttgtctgtctcttttttaaaaaaaaaaaaaaaggccgggcactgtggctcacgcctgtaatcccagcactttgcgataccaaggc

SEQ ID NO: 41811 - DNA, 885 bp, Homo Sapiens
  misc_feature (742)..(742): n is a, c, g, or t
taaaaagttatccattgggggagctccattttccctgctgagtgagctagattgccttccccacccacccacttaagtctgtcttaaagccgtagctggctcccaccaccagtaccatctccatttgaatggcagggctaaattcccccagccattatctcacactgaccacccagagctttagaagagagctgtgcttctaattttgacccagaaaaccataccccttgagattttacctagaggctaaccaagagcctaatatgtttctctgggggatgactaaagccaaaaaggctgtgagatgaaacatgtgaaataatattcagtttccttaccattaccagctcagaagtagctagaggctttctacccaaaggatgccaaagtatagcagggcaggcctggagctagggccttcacatggtggtagcaagtttttcaaatctaatacaatcaagtacaatacttcctttaaatgcttctgtggacctggcatgaaagatccctagattgaaaggaataatacctccatgtctcctgtatgttgagtctagaattgctgtgttgttcttagaagcagtctttgggcaacaacttgaaaggggaaaaaaaaactacaaaaacttaactttggtataggccaagtcagggagaaagtagagaaagctgtcatgccacagacttctttagtggagatcatttcctttttaactttgttcaggttgcccttcaccatggnatacagtcccggtacccttaaacattttaaggggctggttttttttttttccttatatggagggttcagctttgggtattaacccaaactttaaaattttttttttccggaaagtttttaaaaattttagtttaaaagccaat

SEQ ID NO: 41812 - DNA, 750 bp, Homo Sapiens
tcttgttgtcatagtctttgagggatctccgtaaaatctggggcacaggtacaagaaatagccaatatttagttcccagaccatgtttagtagtgtccagtttcagatcatgctgccaagaggtatctccccctcaggtgggtcatcactgagccctggaattggagactcatacttgcccagcacaatgttacgggcagacaggccgacatctatgattagctagaagccataaagaaaagctgctaagtggccactaggtgccacttttctgtttttgtaatgctttcattagcagatcttttttttccaagctccatggggcctatgagaggcatttatgatttttgtgcctacaataagtcagcctgtctggtgtgagttgtttatgagaaatgctttccaagggaggtctaggaagatcctgacacataagaactttggcttagagagctttccaggtgtagtgccaataaaaactgacctggaaagaaaacctgcccagcacggaacatgctttctgaactcacttgagagtgtatggtgtatgtcacttctcatatattcttgagtttagattgtcttttataaccaatttctagctcttttccagttcactggtgcctcgtctgtatatggtatttcaaaattttcgtgcgtaatatctgaaacaacgagtgacattatattgataaatactcattttgtacgttttaatcacaactctcacaaattcctccaaaaaagtga

SEQ ID NO: 41813 - DNA, 871 bp, Homo Sapiens
aacagatgggtgatagatctgccactctgaaaagacagtctttggatcaagtcaccaacagaacagatacagtaaaaatccaaagcataaagaaagaagatagttcaaattctcaggtatccaagctaagagagaaactccagctgatcagtgctcttacaaacaaacctgagagcaacaggcctccagagaccgccgatgaagagcaagtagagagtttcacatcaaagccatcagcattgccaaaattttcacagtttcttggagacccagttgagaaagctgcccaactaagacctatctccctaccaggagtttctagcactgaagatcttcaggatttattccgcaagactggccaggacgtggatgggaagctgacctaccaggaaatctggacctccctaggttctgctatgccagaaccagagagcttgagagcatttgattccgatggagatggaagatactcattcctggagctaagggtagctttaggtatctagcttcatcaggcatattttagaaatggactgcctaatatctatttacctaacaacaaaacaacccttacttacccatcagtcctctagtcctccaaactactgtagcagatactttgccaccttttaacttgtttgaagaagctatataaaagttatttttttaaagaagaagaccattttacttatgatgttcagaaatctatgatttcctacaaccagtaagatcttacattttaaaattgccagaaaaaaattaaagccctccttttttttctccttcctttttttttgaggggaggagaccttaatcttttaaaagctggggaaatgtattttgggggagagaataaggccacctttttata

SEQ ID NO: 41814 - DNA, 627 bp, Homo Sapiens
  misc_feature (551)..(551): n is a, c, g, or t
  misc_feature (608)..(608): n is a, c, g, or t
gagaaaacctgacttctagatgactgtggtgtcatctaaaaggcagaggtgcctgaccctcaggaatgtgtatgatgcaacagagctgaagaatgggttcccttcacctactgctggccattgtcccttctgttggagattcctttctttatggttgctgttcataaccccttcaacacccccccttgctggtcctgccggtcacagttgaggattttggctgtgatgggctcatactcataatggcctgttgagttgtttttagtgacaggttttgtttgctgcacacctcattggcttgcttaccaacaccagctagaagtggtccctctttcatatccaaaccagaacacatttgggtattcctgagactttatagagcgtgtattgtttgttatacgaacctaacctaccttgttgttttctcatattaagaaatttaaatctactttgttttagtgaagctattttggtaatgtataagcaattttggttctgtttagggagaattcagggtttccatgacttgatttgagctttgcatatttcanataagtaacacagccattttaatttagctaaataaaaaaatttcttttttctctcanaaaaaaaaaaaaaaaatgg

SEQ ID NO: 41815 - DNA, 835 bp, Homo Sapiens
cgctagctcggaagctgccgaggtgctaggagttgccgaagcaagtccggaagctaccgagcgagtccggaagttgccgaaagggagcagcggggaaggaggatggcggatatcatcgcaagactccgggaggacgggatccaaaaacgtgtgatacaggaaggccgaggagagctcccggactttcaagatgggaccaaggccacgttccactaccggacgctgcacagtgacgacgagggcaccgtgctggacgacagccgggctcgtggcaagcccatggagctcatcattggcaagaagttcaagctgcctgtgtgggagaccatcgtgtgcaccatgcgagaaggggagattgcccagttcctctgtgacatcaagcatgtggtcctgtacccgctggtggccaagagtctccgcaacatcgcggtgggcaaggaccccctggagggccagcggcactgctgcggtgttgcacagatgcgtgaacacagctccctgggccatgctgacctggacgccctgcagcagaacccccagcccctcatcttccacatggagatgctgaaggtggagagccctggcacgtaccagcaggacccatgggccatgacagacgaagagaaggcaaaggcagtgccacttatccaccaggagggcaaccggttgtaccgcgaggggcatgtgaaggaggctgctgccaagtactacgatgccattgcctgcctcaagaacctgcagatgaaggaacagcctgggtcccctgaatggatccagctggacaagcagatcacgccgctgctgctcaactactgccagtgcaagctggtggtcg

SEQ ID NO: 41816 - DNA, 710 bp, Homo Sapiens
tcccgggatgccatgctgacctggacgccctgcagcagaacccccagcccctcatcttccacatggagatgctgaaggtggagagccctggcacgtaccagcaggacccatgggccatgacagatgaagagaaggcaaaggcagtgccacttatccaccaggagggcaaccggttgtaccgcgaggggcatgtgaaggaggctgctgccaagtactacgatgccattgcctgcctcaagaacctgcagatgaaggaacagcctgggtcccctgaatggatccagctggacaagcagatcacgccgctgctgctcaactactgccagtgcaagctggtggtcgaggagtactacgaggtgctggaccactgctcttccatcctcaacaagtacgacgacaacgtcaaggcctacttcaagcggggcaaggcccacgcggccgtgtggaatgcccaggaggcccaggctgactttgccaaagtgctggagctggacccagccctggcgcctgtggtgagccgagagctgcgggccctggaggcacggatccggcagaaggacgaagaggacaaagcccggttccgggggatcttctcccattgacaggagcacttggccctgccttacctgccaagcccactgctgcagctgccagcccccctgcccgtgctgcgtcatgcttctgtgtatataaaggcctttatttatctc

SEQ ID NO: 41817 - DNA, 902 bp, Homo Sapiens
cccgacccagctcctgctccactgggggccccggggctccccaatggcctcctttcaggagatgaagacttctcctccattgcggacatggacttctcagccctgctgagtcagatcagctcctaagggggtgacgcctgccctccccagagcactgggttgcaggggattgaagccctccaaaagcacttacggattctggtggggtgtgttccaactgcccccaactttgtggatgtcttccttggaggggggagccatattttattcttttattgtcagtatctgtatctctctctctttttggaggtgcttaagcagaagcattaacttctctggaaaggggggagctggggaaactcaaacttttcccctgtcctgatggtcagctcccttctctgtagggaactctggggtcccccatccccatcctccagcttctggtactctcctagagacagaagcaggctggaggtaaggcctttgagcccacaaagccttatcaagtgtcttccatcatggattcattacagcttaatcaaaataacgccccagataccagcccctgtatggcactggcattgtccctgtgcctaacaccagcgtttgaggggctggccttcctgccctacagaggtctctgccggctctttccttgctcaaccatggctgaaggaaaccagtgcaacagcactggctctctccaggatccagaaggggtttggtctgggacttccttgctctccctcttctcaagtgccttaatagtagggtaagttgttaagagtgggggagagcaggctggcagctctccagtcaggaggcatagtttttactgaacaatcaaagcacttggactcttgctctttctactctgaactaataaatctgttgccaagctg

SEQ ID NO: 41818 - DNA, 825 bp, Homo Sapiens
  misc_feature (20)..(20): n is a, c, g, or t
  misc_feature (773)..(773): n is a, c, g, or t
  misc_feature (822)..(822): n is a, c, g, or t
tgaaggtgtcaaaacctccnagtaggataacccctttctcccctttggaccatctgccatctttcatgagtgtttcccatggtgtttttgcatccagagttgacaacaactcaattttgccttgaatttactcagtcttataaattaaaaatgtgcattttatataaagatgcattttatataaaaatgcacacctttaatctctatatggcagcatatacatatatatatataaaatgcacacttttaatctctatatggcagcatttttgaggctttatatctgcccgtgtaccctcaactgcctcctttttgcagagaacgatccccacaggaactggtctaagaacactgtctgcacatgattgatgcttaaaatccaatataccaccacatatcaaaggttgggattttcagagtccttcttgatttctgagctgaaaccttaacaaatagggaatttggcagggaagacacctgggtttttaattcagaaccctatttatatactgttaaaatttgaggtactatagtttatataaaagtcggatgttaagatattatatttcagtactaggagcttctttgcagtcattaacatgacaaattaagtaataaatataaaagtgattgtccataaattatcattgaattttttgtttattttgtagtgttctgtatttatctgcactttgtgtatatatacacacatacatatgccaacatgtaaataacctcatgtttattcctaatctaaaatgccacaatatttntaatgtatggctacactgtgttttaaattactttaaaaataactttgtnggc

SEQ ID NO: 41819 - DNA, 623 bp, Homo Sapiens
gcagcaactggccttccatctctctcagacaccaagctgcagatccaggcttttctgggaaagtgaggccaccatggctctggagaagtctcttgtccggctccttctgcttgtcctgatactgctggtgctgggctgggtccagccttccctgggcaaggaatcccgggccaagaaattccagcggcagcatatggactcagacagttcccccagcagcagctccacctactgtaaccaaatgatgaggcgccggaatatgacacaggggcggtgcaaaccagtgaacacctttgtgcacgagcccctggtagatgtccagaatgtctgtttccaggaaaaggtcacctgcaagaacgggcagggcaactgctacaagagcaactccagcatgcacatcacagactgccgcctgacaaacggctccaggtaccccaactgtgcataccggaccagcccgaaggagagacacatcattgtggcctgtgaagggagcccatatgtgccagtccactttgatgcttctgtggaggactctacctaaggtcagagcagcgagataccccacctccctcaacctcatcctctccacagctgcctcttccctcttccttccctgctgt

SEQ ID NO: 41820 - DNA, 779 bp, Homo Sapiens
  misc_feature (724)..(724): n is a, c, g, or t
  misc_feature (762)..(763): n is a, c, g, or t
  misc_feature (765)..(768): n is a, c, g, or t
  misc_feature (770)..(770): n is a, c, g, or t
  misc_feature (772)..(772): n is a, c, g, or t
  misc_feature (774)..(777): n is a, c, g, or t
gagcttctaaaactggaatgacaggaatggcctcctcccttagctccctgttcttggctacagggttgtcacctgctgagtcctcaggttgtttggcctctctggtccatcttgggcattaggttctccagcagagctctggccagctgcctcttctttaactgggaacacaggctctcacaagatcagaacccccactcacccccaagatcttatctagcaagcctgtagtattcagtttctgttgtaggaagagagcgaggcatccctgaattccacgcatctgctggaaacgagccgtgtcagatcgcacatccctgcgcccccatgcccccatgcccctctgagtcacacaggacagaggaggcagagcttctgcccactgttatcttcactttctttgtccagtcttttgtttttaataagcagtgaccctccctactcttctttttaatgatttttgtagttgatttgtctgaactgtggctactgtgcattccttgaataatcacttgtaaaaattgtcagtgcttgaagctgtttcctttactcacattgaagggacttcgttggttttttggagtcttggttgtgactccaagagcagagtgaggaagacccccaagcatagactcgggtactgtgatgatggctgcagtccagttttatgattctgcttttatgtgtcccttgataacagtgacttaacaatatacattcctcntaaataaaaaaaaaccaagaatctgaattcttaaaaannannnnananannnnaa

SEQ ID NO: 41821 - DNA, 927 bp, Homo Sapiens
  misc_feature (631)..(631): n is a, c, g, or t
  misc_feature (635)..(635): n is a, c, g, or t
  misc_feature (640)..(640): n is a, c, g, or t
  misc_feature (666)..(666): n is a, c, g, or t
  misc_feature (737)..(738): n is a, c, g, or t
  misc_feature (823)..(823): n is a, c, g, or t
ggtatacgttcatctttcaagtcagagcaatgagttgggaaaagaggtggcatttctgatcggataatggaatactctcatttattttatgacattctctgtctactcagatcatagtgaaaactggaaacaaaaaaaaaaaacagcctcttcttggaaagtgacagcagaaggtggcatggagcttgtgtccttggacaacaaatctggatatactaggattaattatcagaagacagctcaggccaagttttgatcgttccatacagtaccttgtttatctgctacttaaagaatcagccgagacactataaaagaaataggctttttgtgccttttgctgttaatgtttaatttacaaactgttttggtaaatctcttaatgtaagtagctatttgactttggaattttgcattcgaggtatactgtcatttcttgaaatctttttctcgtttagttgctctgtgggaaatgtgaggaagcctaagtttgtatttgtaaatttcttatgccatcctctagtcaaattttttttcattgtttaaaaatacggaagtgttccaatataattttttcctgtactggatggctaggattctagagaattgattataaaatattttcaatacncccnacccnccacccaccccacccacccccaaacnacacaaccaaccacacccaaccaaccccccccccaaaacgcgaaaaaaccacacgacacaaccaacccccnnacccttttgtggggcccccctcggcccccccaaaaaagatttttcataacccccatttctctttgggcgcccgcgggcccccctntagggtgacagggaacaccggggccccataagcggtttttcctccaagggaaaaatcctggggccccaaaaaaaaaagggggttggggaattccccccccccca

SEQ ID NO: 41822 - DNA, 860 bp, Homo Sapiens
aaggacctgttccgccgcacggatgggcgctgcctcatctggggcaggaagcccaaggccatcgagtgctcctacacatccgccgacgggcagaggcaccacagcaagctgctggtgtcgggcttctggggcgtggcccgccacttcaactacgtcggcgacctgatgggcagcctggcctactgcctggcctgtggcggtggccacctgctgccctacttctacatcatctacatggccatcctgctgacccaccgctgcctccgggacgagcaccgctgcgccagcaagtacggccgggactgggagcgctacaccgccgcagtgccttaccgcctgctgcctggaatcttctaagggcacgccctagggagaagccctgtggggctgtcaagagcgtgttctgccaggtccatgggggctggcatcccagctccaactcgaggagcctcagtttcctcatctgtaaactggagagagcccagcacttggcaggtgtccagtacctaatcacgctctgttccttgcttttgccttcaagggaattccgagtgtccagcactgccgtattgccagcacagacggattttctctaatcagtgtccctggggcaggaggatgacccagtcacctttactagtcctttggagacaatttacctgtattaggagcccaggccacgctacactctgcccacactggtgagcaggaggtcttcccacgccctgtcattaggctgcatttactcttgctaaataaagtgggagtggggcgtgcgcgttatccatgtaattgctttcaactctagatccccctcccctgcctgctctgcagtcgtgggtggggccccgcgcccgttt

SEQ ID NO: 41823 - DNA, 513 bp, Homo Sapiens
gcctgctctgcagtcgtgggtggggcccgtgcgccgtttctccttggtagcgtgcacggtgttgaactgggacactggggagaaaggggctttcatgtcgtttccttcctgctcctgctgcacagctgccaggagtgctctgcctggagtctgcagacctcagagaggtcccagcactggctgtggcctttcaggtgtaggcaggtgggctctgcttcccgattccctgtgagcgcccaccctctcgaaagaattttctgcttgccctgtgactgtgcagactctggctcgagcaacccggggaacttcaccctcaggggcctcccacaccttctccagcgaggaggtctcagtcccagcctcgggagggcacctccttttctgtgctttcttccctgaggcattcttcctcatccctagggtgttgtgtagaactctttttaaactctatgctccgagtagagttcatctttatattaaacttcccctgttcaaaaaaaaaaaaaaaaaaaa

SEQ ID NO: 41824 - DNA, 862 bp, Homo Sapiens
tctagcgaggtgacagcgtagaaccaggggcaaccccagcaatgaaaaggggtgagataacgctcattgctcttcagagagagtggttggagccccccccgccccgtatgcttacattattgctcttttagtttgacatggtgtttgggttttgtttttttgaaaggtctgaaaaggtgaagccccctacccaatggcaatatgaaaccttttgtgcttctcttcagccccttccctgtgtccacctttctctcctcttcccaagcctttttcctactacctttacccagtttgtgtgtttgagctctgcattcaggcagctgcaacattccagtgtttgaactgtcactgattcttgcgccctagacaagctaaccaggtttaccgtctcactcccagtaatacccagctcctatctaaagccccattctgcatgagaatttggtgtttggaatgttttctgactcttggggcgggattcctcgccttatcatcctcactgtggagtaatgagggggaggagaatctttatcagaaactggttttgtgtagtaaactttcttttgtggttttttgttttgttttctggggtttgttttttgtttttgtctgtgcaaaacctgcagctgcttgaaatcagctttgcctttaattaaaccatgttctctccaaaaaaaaaaaaaaaactctcccaccgctgaatccggcccttaagggcctggatcctttccaaggggggggcccgggtaaccagcttttttgtttcccttgtaaggggaaggggtttaaattttccgaagccttggggcggtaaaaccactggggcccattaagccctgttttttccccgggggggggaaaa

SEQ ID NO: 41825 - DNA, 648 bp, Homo Sapiens
  misc_feature (630)..(631): n is a, c, g, or t
  misc_feature (646)..(646): n is a, c, g, or t
ccgctttttttttttttttaatagatgtgcataaggtagctttagcaattaaattctagtgaagttgatatagtctcatttttaattgtcctgtaatggaacagtagcaaattcactaaacttttgtgttcagagttaaattgttctcagtactttcaatgtaggggaatgtaataaacatagtgtgtatgtttgggttttaattacacattttatatatgagccatttagatatgcagtgttaattctatactgcatttgaagtgtatgtaacttagcttatgttaatgcagtcatgaagttggtttgctccagcatccggtagtctttaaacattcttttagtgaaattgtcattgttttatcagtgctaatgtgtgcaagcagtttttttattttgcttttctcctggcatcagaaagtggtggcgttttctgtactggattgcaccaaggaagcttttggggaggaaggaaggacattaaattctttccctggtaatgaaaagagccctttatcaatacagtgctgcaatttctggatatcagctacactttgtttttaagtttgtttttgacatgtttatttggcaaattttataatgaagttttaagttgaaaataaaatgttnncaacattttggatcncc

SEQ ID NO: 41826 - DNA, 934 bp, Homo Sapiens
  misc_feature (673)..(673): n is a, c, g, or t
  misc_feature (803)..(804): n is a, c, g, or t
  misc_feature (832)..(833): n is a, c, g, or t
caccctcaactccgccatctctgacattgaggtggataagaaggagctgacaggtcgcaccctgctctccgtgcctggctacaaggagaaggtggagttcggggtcctcgtgtcctttgcctataaggtccaaggctcagatagcgacgaggaggtggtggtggcaacaactcggatcgagacaatgctgggagatgtggctgtagctgtgcaccccaaagataccagataccagcacctgaaggggaagaacgtgatccacccattcctgtctcggagccttcccattgtcttcgatgaatttgtggacatggactttggcacaggtgctgtgaagatcacccccgcacatgaccaaaatgactatgaagttgggcagcggcacgggctggaggccatcagcatcatggactcccggggggccctcatcaatgtgcctccgcctttcctgggcctgcccaggtttgaggccaggaaagcggtgctggtggcgctgaaggagcggggactgttccgtggcattgaggacaaccccatggtggtgccactttgcaaccggtcgaaggacgtggtagagcctctgctgcggccgcagtggtacgttcgctgcggggagatggcccaggctgccagcgccgctgtgactcggggtgacctccgcatcctgcctgangcccatcagcgcacatggcatgcctggatggacaacatccgggagtggtgcatttccaggcagctgtggtggggccatcgcatcccagcctactttgtcactgtcagtgaccccagcggtgcccccctgnnggaagaccctgatgggcgggtactgggnntgagtggacgcaaatgaagccggaggccctcgggagaaaggcaggccaagggaatttcggaagttgtccccctggacaaggaatccagtcttccaagccaa

SEQ ID NO: 41827 - DNA, 569 bp, Homo Sapiens
  misc_feature (519)..(519): n is a, c, g, or t
  misc_feature (540)..(552): n is a, c, g, or t
  misc_feature (554)..(554): n is a, c, g, or t
  misc_feature (561)..(561): n is a, c, g, or t
ggaacaaaggcaaaggcttcatttcaagagtcatccagcaatgagagaatcctgcctctgtagaccaacatccagtgtgattttgtgtctgagaccacaccccagtagcaggttacgccatgtcaccgagccccattgattcccagagggtcttagtcctggaaagtcaggccaacaagcaacgtttgcatcatgttatctcttaagtattaaaagttttattttctaaagtttaaatcatgtttttcaaaatatttttcaaggtggctggttccatttaaaaatcatctttttatatgtgtcttcggttctagacttcagcttttggaaattgctaaatagaattcaaaaatctctgcatcctgaggtgatatacttcatatttgtaatcaactgaaagagctgtgcattataaaatcagttagaatagttagaacaattcttatttatgcccacaaccattgctatattttgtatggatgtcataaaagtctatttaacctctgtaatgaaactaanataaaatgtttcacccaaaannnnnnnnnnnnnanaaaaaanaaacatgt

SEQ ID NO: 41828 - DNA, 750 bp, Homo Sapiens
ttttctttctcttttcaggaagagtgtgggtagaaagtccggagggcaacttccaatttaattctgctctgtccggcgcataggctgaattccaaaagaactttcttcctaggatgtggggcttaaagcaccgtcatgtggggtggatcagataattgctcctgtggggccctggcttccttctctgtttgtgcagtatttgtttttgttgtcttgttgagaaatatcccctgtgcaacccacccttggttgaggatcacaaattgaggtgccttccttgtatgctttttgttagtattttttgtttttgttccttaactgctgagcctcagccagcgtgggtcctgggggaaataccattccaaaggaagccatccctatggggaaattggttttactgggtaaattaatacttttatttcttcccctatcccttccttcctagttgtgataaacatgggagaggagtgactttgactgctggggaatttcctcctaagaaccttattcccaaaataagccagggattatgtcaaggcttctttcaaggaggctcataaaagcagtgacctcatccggggctttggatagagtgagaattccccaactaaattggacttctctgctttatccccttctcttccttcaccatctgcactacatttctggctgatcccaatcagattcccgctaatggaagaagtttagaatctttcaggtggaataaagtyacatgaaaacaaaaaaaaa

SEQ ID NO: 41829 - DNA, 754 bp, Homo Sapiens
ccacgcgtccgcggctaacaagggtgaaattggtgatgccactccatttaatgatgctgttaacgtgcagaagatttctaatcttttatctgattatggctatcatctcagaggaaatgaggtcctgtacaatgggttcactggtcgaaaaatcacatcacaaatatttattggccccacttattaccagcgtttgaagcatatggtggatgataagattcactctcgtgctaggggacctattcagatcctcaatagacagcccatggagggtagatctcgtgatggtggcctgcgttttggagaaatggaacgagattgtcagattgcccatggagcagcccagtttttaagggaaagattgtttgaggcatcagatccatatcaggttcatgtttgcaatctttgtggaataatggcgattgccaacaccaggacccatacatatgaatgcaggggctgccgcaataaaacccagatttctttggtgcgaatgccttacgcatgcaaactattgtttcaggaacttatgtctatgagtattgcaccgcgaatgatgagtgtttagctattttacaggagtcaacaagataattaaatatcttggtgtcttgtttctattgtgtggctttttaaaaatgacaaatatgtactgtgttgtgataaaaagtattttatttgtttaatgatatgcatgcttttcttctgtaaatatataataaatttttgtagatagtaaaaaaaaaaaaaaaag

SEQ ID NO: 41830 - DNA, 748 bp, Homo Sapiens
aaaccatacgggtgcagtgaatgtgggaaagccttccccaggaaatctgagcttactgaacatcaaaggattcacacgggaattaagccccatcaatgcagcgaatgtgggagagctttctccagaaaatcactactcgttgtacatcagcgaactcatacaggagagaagcctcatacatgcagtgaatgtggaaaaggcttcattcagaagggcaatctcaacatacatcaacgaactcacactggagagaaaccttatggatgcattgactgtggcaaggccttcagccagaagtcttgccttgtagcacatcagagatatcatacaggaaagactccctttgtatgtcctgaatgtgggcaaccctgttcacagaagtcaggactcattagacatcagaaaattcactcaggagagaaaccctataaatgcagtgactgtgggaaagccttccttacaaagacaatgctcattgtacatcacagaactcacacgggagagagaccctatggctgtgatgagtgtgagaaagcttacttctatatgtcttgccttgttaaacataagagaatacactcaagggagaaacggggggattcagtgaaggtggaaaatccttccacagcaagtcacagcttaagtcctagtgaacatgtgcaggggaaaagccctgttaatatggtaactgtggcaatggtgcaagggcagtgtgagtttgcccacatcctgcattcatgataaacag

SEQ ID NO: 41831 - DNA, 598 bp, Homo Sapiens
ggagtccaaggcgagaccctcacctcatggagcctggccacggacccctcctacccctgccttgccggcccctgcacatttaggatatgctcctggatggggactgggctgtgcccagggcctctgtcccccaggatgtcttgtggtggcggtcggccgttctgccccccaggcaccccctgttgtaggcactggctagggaggggcaggcctccttcctgcccctcgagacactcttgggagatgcattttccgtctggctcacagggggagggtgaggctttgtaccccagcccctgcccaggccactgtgagggtgggtgctggctgagcccctggggcagaaggagtggggcaggcggggtctttgttctcggctcccacagcagagccaggtgagggggggcctgccaggactagacagaagtggggcggcctgaaccctgcttccagccatggccaggggccacggaacccggcaggggtgtctgaggccgccctgtcagctggccggtccaagcctgtggctggagctggtgtgtgtttatctaataaagtcccacaggtgcctcaccaaaaaaaacaaaaaagcaaaaag

SEQ ID NO: 41832 - DNA, 806 bp, Homo Sapiens
ggcattttcttttcaggggaaaattttgggatgggggactcaggaggacctgtgaagcatgtagttatctagatctgggtaatttcatgtttattaaactcgaactttggctagttaaactcatattgaaacttcatctagtctcttaattttttaacactaaattcaagtcatttgttttaagtctctaaaaaagaagattgcagtcatccattcatatgcatggggtctgatcgcaaatacactaaatgtggagtgtaggaaccaaaatgaaacctgctgtatggaaactactttcacttatggttcattggtttttgtaccaatattttttatgcacttcagtgcaagtcttgtcagttaaccttactttatgagtaagctaaataacccaaattacatttctttaaacctgttttactactatggcactttgataaaatggtcaggaaccaactttactggcaaaagggtccatgtaccaccatgtgctggagcatctgttctacatgtggatatctatgaatggtaatgttttccttcatgtaagtgcctattcaaagtttcagaattttaaaatgccaaatattttcatggtcatttgcatgcagtaagccagaaaaatattccaagaaatttttaaaaaccaattgcaatttacccacccctccatttgtgccaccatgatggataatccagcaatttgaaaccgcaccaaattttcccccgttgaataaaaaaactttgtcggcccgcctcggcccttgcaaaactttttaaaaacatttcttttgggccccccggcc

SEQ ID NO: 41833 - DNA, 823 bp, Homo Sapiens
tatgcataacgcaaaaggagaagccatttttaacttcattcttgtggtaatgttctggctaattttcttactaataatcctttcatatattaagattgggaagaatctattgaggatttctaaaaggaggtcaaaatttcctaattctggtaaatatgccactacagctcgtaactcctttattgtacttatcatttttactatatgtttgttccctatcatgcctttcgattcatctacatttcttcacagctaaatgtatcatcttgctactggaaagaaattgttcacaaaaccaatgagatcatgctggttctctcatctttcaatagttgcttagatccagtcatgtatttcctgatgtccagtaacattcgcaaaataatgtgccaacttctttttagacgatttcaaggtgaaccaagtaggagtgaaagcacttcagaatttaaaccaggatactccctgcatgatacatctgtggcagtgaaaaatacagtctagtcctaaaagtacttgaggtaaacatactaaaatgaattatataatgcagcctcttaattctttgaagaactaaaacaattaggaaacaaagttctagcatttacaaaactcagatctcaaagctctgcttgtattcgtgatatctcatgttgcttaactgtaaaccatttcaaaggtactatcttttaaatctgtatgtaacaaatcttttcaaaatacatttttaagctaatactcttaacatagattattgaagttacgtgaaatttcatggctctaacagcaaaatacttaagtgccatagtttctcagtgactaa

SEQ ID NO: 41834 - DNA, 677 bp, Homo Sapiens
cgtatcggccattatggccggggtgaagtagaacgaggagacagggcagaaggggcagagaataaaacaagtgacaaagccaacaacaaccggggcctcagcagtagcagtggcagtggtggcagcagtaagagccaaagcagcacctcccctgagggccaggccttggagaaccggatgaagcagctctccctacagtgctcaaagggaagagatggaattattgctgacataaaaatggtgcagattggctgattcatcctgggccctggccgatgtgcatatcaacatttatacatggaactggagaacattgtgccaataatcatttaatatatgccaaatcttacacgtctactctaaactgctctaatgaagtttcagtgaccttgagggctaaagattgttcttctgggtaagagctcttgggctggtttttcagagcagagttcttgttgtgggtagactgtgactaggttcacagcctttgtggaacattccgtataacggcattgtggaagcaataactagttcctatgaaagaaccagagctgggaagatggctgggaagccaggccaaagtgggggcaacagcttgcttctctttctcttctcaccctcagtttgtatgggaaaatggagatgtcctctccactttatcccacgatatctaaatg

SEQ ID NO: 41835 - DNA, 633 bp, Homo Sapiens
gaggctgcactttttggggtgtgacaggtgaatgccagtggggatgctgggggatgagggtaggagggacttatagaaggggatttgtggctgtgggggagaaggttctacagcataagccttatcctgccagccaaggggatttattctaagagaagtgcatgtgaagaatggttgccactgttattagattgacaagatgttaatttctctgtaggttgtaactttaaaaataaatgaaattatttaagggttatgctgcactagtattccttagaggaaacagttctttaaagttaggaaagggagtaggcaggcatgtgttggcaaaggctgttaatagtagttaagtgttaagactgcttttctttaacgttttcatggtaatgcatatttagagcactgtatttttgtcttgttaagaaaatttagcatttctaaaagaaaaaagcaaccctctttcaaactgttaattctgtcacagcctgtatattttagtcatttgtaaatctcttcatacaatagtgacttcttttttgactgatacagtatcttaattacaaggttattttgtacttgtcttaatacactaagtgtaataaaaaaccgcttgagaaaaaaaaaaaaaaaagg

SEQ ID NO: 41836 - DNA, 647 bp, Homo Sapiens
ccctcgcagcacctcgaagtgcgcccctcgccctcctgctcgcgccccgccgccatggccgcctccccggcgcggcctgctgtcctggccctgaccgggctggcgctgctcctgctcctgtgctggggcccaggtggcataagtggaaataaactcaagctgatgcttcaaaaacgagaagcacctgttccaactaagactaaagtggccgttgatgagaataaagccaaagaattccttggcagcctgaagcgccagaagcggcagctgtgggaccggactcggcccgaggtgcagcagtggtaccagcagtttctctacatgggctttgacgaagcgaaatttgaagatgacatcacctattggcttaacagagatcgaaatggacatgaatactatggcgattactaccaacgtcactatgatgaagactctgcaattggtccccggagcccctacggctttaggcatggagccagcgtcaactacgatgactactaaccatgacttgccacacgctgtacaagaagcaaatagcgattctcttcatgtatctcctaatgccttacactacttggtttctgatttgctctatttcagcagatcttttctacctactttgtgtgatcaaaaaagaagagttaaaa

SEQ ID NO: 41837 - DNA, 874 bp, Homo Sapiens
cctcagcttcctccagcaaccccagctccagtcctgatgacgacagcagcaaggactctggcttcaccattgtgagtcccctggacatctgaccacagtgcccagtcctgccccacagggatctagccacccttcagtggccccaaggccagactgaggctcatccagtggagaaccttcttaaaccactgcttccttcccggcatgcatttggcattggtccagccctttgaaaccccttagagagaagcatatatggccacaaagcacagaggcttaggtttgccacatgcagacagggctttctgggcccttacctaatccccacccgactcttgctctgagttagagctgagttacgtacccagtatcacactcacagttagaaaagaccgaatcacaatttagaatcacttttcctctgtccccttctccccagctaagaatgtgtggcacctccatcagttatacttagaaggagcagaaatagttattttcgtatcttctatccctcaaagcatcagacatgggaaaattggtttataccaagaaagcttcctctgtggaaatctgtctcagcctactttattcctgcattgggaagccatatcgcagagctaaatgcaatagaatgaaccagaactagtggattcccaggctggggggaaaaaaaaaagaaaaaaacctcattactgaacctctcaaagttattaaggatctctgccaaacaggattcttaactttaggaaaaaatattttaggtggtggaaaatagggtttaaaatttttttttgaggtatttaaaaaattgcattcccccaatccctttaggcccattataaacttttggggcccaatcaatatcctcctccct

SEQ ID NO: 41838 - DNA, 730 bp, Homo Sapiens
caggttgtctgaccttcaccactgggttattgcctggcagatgcacacagtagctccctggcttctggctctgagtgttcctctcagcacctctgagtaagctgctgccaagcacatatccctatgacaacactttgtaaaagccgcggggcccccatacagcgagtgaccttgcaactgtgcagggttgccattggtcactttctcaccttgggaaggtgtcagtgttttcagttctaaggtaagaggtgtagagctgttcccaccagggctctgggacagactggaaaggaccacagacctggccatccctgggcagcagggccagtgtcacctgctgacctctactatttcctttgccctagagctagagtcatgatagctgagggtcactcgccctgcaagagtcactaggcacccaccatgccaataaggctctccgctggctccctgcagttggctgggtgtttaatagtcactgaaaactcccagccctgctgcacactagaggcaggtcctctcggtcctctccatcctgtgcttctgtggcccccagcaagctcaccgcctccttggaggagagagacatacaaggacagtgggtcatgggtagtaccagcctcaaattcccacaggctcagactcagacaattgtattactgccttatgttttttaagtgtttttttaaattcttcaaagttgagtattatttgcaatttattagttaca

SEQ ID NO: 41839 - DNA, 850 bp, Homo Sapiens
  misc_feature (815)..(815): n is a, c, g, or t
ggggacttcattcattgtcctatttctatctccactttgtgcctggagagctttcaggggaggtggaggaggagggtctgccaagctactgcaacatctgtcacccactatacccagttacttgggggaggacagacactgtggtgtcattaaagttgtttgaaccaaagtggcggctgcatctttgtcccgatgctagccgtgccggtctcccatcatccgctcgccctcctttcccctgggctgcgcccacttgtcttcctggatatttgggggtgactcgccatgcttggcaccctctgcttcctggtgctgctctgactcgaagacgggacagtccctggtgcacatccagggaagaggagcgtcggtagttcttgcagtaggcactttatcaggacctgacctgttgctgggtgattttagtctctacaaacagaaagcgtttcaaagcgtcagctgtgggagcagagtgaccctttgctgatgctggggggaggggatctaaatcctcatttatctcttctatgtctagtattttactgtcactggaggctctgtgggctgtcatagttaattgaccataattagcaatatacttttaaagtgggaaagctgaatgacacttttaagacaatgaacattatcaaaacaaaatgtataatttcttaatttgaataataaattaagcgtttaaatgctatttgtagtcttgatatacagaaataaaataattaggggtggtcttttttattttaggttgttttatgttgaatgttctatatcttattagttaatttgtatattttattagnattttggaaatagcatatctggagactgaagagaa

SEQ ID NO: 41840 - DNA, 636 bp, Homo Sapiens
aagactggaggaggcggagcgccacaaggaggacttggaccctgtccgcaggagcagcacagcaggcagctgcagggcagtgggaggagctgtcgagtcagaagcccggtaaaccccgtccttacgagccccgcccctagctcttctactacggaggggaactgcagagccagaagagcacggagcagcaactcgcagcccaattggtgacgctgcagaatgaactggagctggcggagaccaaatgcgccttgcaggaggagaagctgcagcaggacgcgctgcagacagcggaggcctgggccatattccaggagcagaccgtagtcctgcaggtgtgacgggcagcttcgcagagtgcagtacagcaccgagtcgctcatggaggagatggccagggcggaccgagagacgcggctgttcggcggtcctcgcgcgctggccatcaggcgctgctgacgctgccgctcctcttcctggggctgtcgctgctctggacggtgctgttggaccccggcgccgtctccgcgtggctctggagcctcacctcggagacgacgctgcgccgcctgcgctacacgctgtccccgctgctggagctgcgcgctaacgggctgctgccaacctaagtgcagc

SEQ ID NO: 41841 - DNA, 603 bp, Homo Sapiens
ccgctgccggaggcggccccggcccaggcccaggccgactcgctcactgtctacctggtggtggcattggcctcggtgtcgtcgctcttcctcttttcggtgctcctgttcgtggcagtgcggctgtgcaggaggagcagggcggccccggtcggtcgctgctcggtgcccgagggcccctttccagggcatctggtggacgtgagcggcaccgggaccctatcccagagctaccactacgaggtgtgtttgaccggagactcaggggccggcgagttcaagttcctgaagccgattattcctaaccttttgccccagggcgctggtgaagaaatagggaaaactgctgccttccggaatagctttggattaaattagagatctcgtgatgacgcgttgttttctgccatttatcccaaactttttcagatctagaattcgagagtgtcatggacaaaaatttcaccttgagattgagcttttatttccctttttaatggatttgtctgttgaacttcatgctgtccaagtgttgaaaagtcaattttatttcattgcatttatttacatagtgtcattccaaatccatgcatgctgttgatt

SEQ ID NO: 41842 - DNA, 900 bp, Homo Sapiens
  misc_feature (674)..(674): n is a, c, g, or t
agtaattttttttaaacttccctgaaagcagggtctaaagaaattaccaaccaacttagactggatctagaagaaaaggaagggtctttgcagtcttaggactcttccgttccgcgacgtaggtgttaggataacagccataaatggttgtaagacttgggctcagataagtagacttaagttcaaatttgacttattttacaagtgtgtgatttttggcaagctcatcttcctaaaccatgagctccttatttgtaaaggggacattagccactctccagcaacagccctggtacttcttcagtcctgggatgggacgtatgattagcctaagcgaaccagaaaatccaggcccgtgaccagtgacttgatcagggctggcgatatatctaggtaggccaaccaggtggactcagtatttttgtgggtgctactggaaaatttatttaattctaactgaatgtagaaacagcaacagacatgaaatggcagttgtattgctgtcttatcatgaggtgagggcctgaagctatggtagccaccctgtgaaccttggaaggagggttctacaggaactggcagagctgagactgggacgcaacccatgtcctggtgacgtatttgagtcctgaggctggccctcctgttagtcttttcttcttactggcttcagncaagactggggtctggttttcttgttacttgcaacggacacatggcgactgtatctattgcctgctattaccggcttatgggtgtggggagattaccttgttccgggggtgaaccgttagtacaggccggatcctttagtgggtcaagggtttcctgacttaagtttgcaattccgtttaatctcccccgttctgttacttccgaagtccgcgcgagttctcaacg

SEQ ID NO: 41843 - DNA, 695 bp, Homo Sapiens
tcggcacagggtatcctgtgggtaggtctaagggtacactgttccctgatcttactgtcatcatctgcaatctaagtaatgcagataataatggtgccccttggacttgacgccaatctcttggtcctattagaaccatgtaggcagagctattccaataggtgggggaatacctgacaggatatggaaatacctgggagagggaattcccaggcccctggcagtgctaggaaggaatgcaatagtggtaaccgaattccagctaatagttactgatgtctacctgagccagttctcctaaatgcttcctgtggataacctcaactgtgagaaaaagattgtttatgttttgctcattacaccgatgaggaacccgaggttcagagaagtcaactaactaccccaaggtcacagagcaaggagccgagttgggattccagccgaaatgggcactccgaccaccccctagagcggctctgatcggctgtcctgccggactacagtaaggtgtccccagaagggttgctggccgctgctcctggagctgcctgtgcgtgggggcacggaggcaaggactgatccggaacgctaccgcctgcctgggacaaggtcggaaatctcggcggccgcgctgggacaggagcgcgcagcagggaagatgcgaggaccgaggggtgctgatcagactgcgacag

SEQ ID NO: 41844 - DNA, 843 bp, Homo Sapiens
  misc_feature (687)..(687): n is a, c, g, or t
  misc_feature (722)..(722): n is a, c, g, or t
  misc_feature (805)..(805): n is a, c, g, or t
ggggacctgatggcagatgtggtgtactgcccccggccgtgctgccagctgcctgtgatgcaggaacctggctgcaccatgggtatctgctccagctgcaattttgccttctgtactttgtgcaggttgacctaccatggggtctccccatgtaaggtgactgcagagaaattaatggacttacgaaatgaatacctgcaagcggatgaggctaataaaagacttttggatcaaaggtatggtaagagagtgattcagaaggcactggaagagatggaaagtaaggagtggctagagaagaactcaaagagctgcccatgttgtggaactcccatagagaaattagacggatgtaacaagatgacatgtactggctgtatgcaatatttctgttggatttgcatgggttctctctctagagcaaacccttacaaacatttcaatgaccctggttcaccatgttttaaccggctgttttatgctgtggatgttgacgacgatatttgggaagatgaggtagaagactagttaactactgctcaagatatggaagtggattgtttttccctaatcttccgtcaagtacacaaagtaactttgcgggatatttagggtactattcattcactcttcctgcgtagaagatatggaagaacgaggtttatattttcatgtggtactactgangaaagtgcattgatacatttttaaatggtagttgnagaaaaatttattagcccaaggttcaggaaaattaactacagaatattaaaatatttatatgttgcccaaagctctggatagntaaaaattaaatatattattttctttcccaagcctttg

SEQ ID NO: 41845 - DNA, 599 bp, Homo Sapiens
aagtacctcattgcccgtggcaagttggactgggctgagggccctgcagcaggacctgccccacgccgttctgatcccctagtgaagagccggaggccatccttgggggagttactcctgcggcatgcacacagtccaaccagggcccggcaggcggcacaattggtccttcagcctgggcgagacggagcaggacttggcctaagtgggggctcccctggggcttcaactccagttctactcacccggggcggggcccctgaacgccaaggtgaggctcttcgagtcaagaatgctgtctactgtgcagtcattttccctgaatttctcaaggagttggctgccatctcccaggctcatgccgtcacctcgcctttcttgttggagacttcagaggaaggatctggccctctcatctcaggctgtgggcccctcaatccttaactttcttccatggacaatcagggccatgggtggcccgggctggggctagggcacaggctcctttttatgtttggaggcagtggcaaaaggactttttaatttatttcagatgaatgttttatggagaacttgttgcaatatgtataaaagggaaa

SEQ ID NO: 41846 - DNA, 660 bp, Homo Sapiens
gatgcctcctctgcccccctgcaggcaggcccaagtaggactgctggaggctgtgctttgacattgtaagacatttccgaaccaaaggctgctgggtttgcatgtttacagactccccctggggcgagggtcagagctggctctggggagctgggctaggaagaggaggtgcagcccagactcttcctagcctttctaaaccaaagttctttgccattcctacaagcccagccttgctgctggttttttcctttcctttgggtatttgcactattttgggagcaagttttctatgtgggagccactttttttgtacaggggtaagttgggggttttcagggagcctgttaggtgcctccttcttttctttcctcaatctatgcaagcggctctggccgccatcatctcctgggatgccagagggctgcctctccagcggcttgggccggggaggggacactccagttctctagcatggcctgaggtatggggtatgtgcatgtggaggccagggtaaggtgaatggggaggctgggaggactggtgttgccctttggagcttggtgaggagggtgggcctagggcttggcgagtgccacatctggcaggtttggaaattccaaataaatccttttgtctattgaaaaaaaaaaaaaaaaa

SEQ ID NO: 41847 - DNA, 586 bp, Homo Sapiens
atttcctcatctttttgttgttgtcattgattttggtgacatggacttgtttgtagaggacaggtcagctgtctggctcaatggtctacattctgaagttgtctgaaaatgtcttcatgattaaattcagcctaaacgtttcatcaagaacactacagagtcgatactgtgagtttccaacctcagcccatctgtgggcagagaaggtctagtttgtccatcagcattatcatgatatcaggactggttacttggttaaggaggggtctaggagatctgtcccttttagagacaccttacttatgatgaagtatttgggagagtggtttttcaaagtagaaatgtcctgtattccagtgatcatcctctaaacgttttatcatttattaatcatccctgcctgtgtctattattatattcatatctctacgctggaaatttgctgcctcaatgtttactgtgcctttgtttttgctagtgtgtgttgttgaaaaaaaaacattctctgcctgagttttaatttttgtccaaagttattttaatctatacaattaaaaacttttgcctatcaaaaaaaaaaaaaaag

SEQ ID NO: 41848 - DNA, 447 bp, Homo Sapiens
  misc_feature (7)..(7): n is a, c, g, or t
ctctggnccacagtcctctgccagacccctgccagaccccagtccaccatgatccatctgggtcacatcctcttcctgcttttgctcccagtggctgcagctcagacgactccaggagagagatcatcactccctgccttttaccctggcacttcaggctcttgttccggatgtgggtccctctctctgccgctcctggcaggcctcgtggctgctgatgcggtggcatcgctgctcatcgtgggggcggtgttcctgtgcgcacgcccacgccgcagccccgcccaagaagatggcaaagtctacatcaacatgccaggcaggggctgaccctcctgcagcttggacctttgacttctgaccctctcatcctggatggtgtgtggtggcacaggaacccccgccccaacttttggattgtaataaaacaattgaagcaccaaaaaa

SEQ ID NO: 41849 - DNA, 524 bp, Homo Sapiens
  misc_feature (14)..(14): n is a, c, g, or t
gcacgagatttttntggaagaaataataaattgtggacagatcagggttcaagtcttatctggaaagcaacattaaaaatgggtctcccaatatttatgaagggaaatcacttacaatttatgcacggacttaaagaattaaaataagaactgccttgcactgaaagaacaataaaccctgcacattaatggctctggttctatacttcaagctacagacttacatgtacagtattctacatggtgatttttgttcagtgtatatgtaatctgacttccgtatcttactgagtattatagacatatttaggattcaaaatagactcaacagcgtttcatactatatagtaatgacaagtggaaacatgtatgccgcataaacgataaagttattaaggctacttttataatacagttgactcgaacaatgcaggggttaggtgtgctgatcccctgcgcagtcaaaaatccacgtgtaacttttgactccccaaaacctacctactagtaaatagcctactatt

SEQ ID NO: 41850 - DNA, 833 bp, Homo Sapiens
  misc_feature (791)..(791): n is a, c, g, or t
ttttttttttttttttttaataataatctaggcatgaagagcaaaaatatcccttccggagtctttgaagctgaaaatataaaacaaataaaaaataaaaaaataaaaacccacaaaaatgttgaaccaaacctccctgctaatctccatgcccacgttctttcccaccctgttcccagtcttctgacaaactgtgtacatagcggactcctcctttctcctccgaggtggttttaaaggctttttggtgtatagaagtttgtccatttgtaaaactccggattgcgttcctccccgccttccgccccttcccttccctaaagtgatgggctttctcttttctctttttagtttacccggtttctttttaagtaatgtggaagaaaatggtttattttgtattgtggtattgaatattgtgttcctttttatgaggcaacctgattgtaaacttcatgtaactatagactggaaaaaatgagccgtgccaaagtctcccttctgtttcttcagcacattgacccatagcacacacatacacaccaccaccaacaacgcttgtgaatgtatttttctgttagctgggtttacatgtgatgttttagtgcttttgcaagttcaatttgttagttcctgtatgaaagattgtgggggaaaaataaacgtcgtgccgttagctttttccgtaataaacccttccttctgtaaatacccgttaccatatttatccatttgtaattaaattatggtattaacttgctacagaggaaacaatatttataaagaatgtntcttaaactataatatgtacaatttgtgggcataaactgttt

SEQ ID NO: 41851 - DNA, 921 bp, Homo Sapiens
gatgaggttttaaattgtttcttacagtcatgtgcactaagtactctttttgtaagcagaggtggctggctctgcagccttaaggccattttttaagtcaccacgtctagaagtcacatgaactctgctcagcaataatctgttctcagaacagacttttcaacctgctgccggatttctccattcagctggatgatcctcaggactgaccagttagctggcaggttgtccagctttttattccagtcataataggtgacagtgttaaccgtgaaaacttgagaggcactctgccctcttccctataaaatcacacagcgtgattttacaaggtcccgtggcaccttgctcaggacctctgcccctagttagcaagactgcagcagttgctgttgcttattctgaaaggaatgtagaacttgacagcagccttctgagtctgggtcaggaagatgtcctttggaccaaagcagacttctttatacgcagctcagtttcccgggagtcgccacagatgtacccactagcccaggttgctgtgagtcagcggaagctcccgttatgccctttgctcctggtgggagagggaggagtgaactccctgggttccagtatttacttggtatacctgagtttggggggaccccttttttgtggacttttcaaaacaggggaattactggtcacccttgatggaccaagttttcaaaaaaaactttggtaagaggttaggaaaaagggcagcggctggagcctttcggcggggcgagaaaaagcgcctgctgggccccgcgggcaggcgcgctggcaggcctcctcggggggcacgccttaggccgggatgcggagaaacaagaggcggacaacaaaagtcgcggcagggcgggaggaagcgcgggtgtgccggggcgccccagatat

SEQ ID NO: 41852 - DNA, 544 bp, Homo Sapiens
cccacgcgtccgcccacgcgtccgcatattttcaatgtttctttccttttctccttgtgagcaaagcaaacaagtactgtccaaggacagccttgtgcatatttcatttgttgcattgcttggtcatcagaggacagcagtccattaagcacacttgctgcttctactgtaaaggcagcctttaaaacatagcaatatgcacctttcaactttacatcatgtcctgaacaacatcactgtggttactcatccatcagactatctgtatatataagtactgaatcagtatttattaagtaaatgatgtagcactgtagtgattaggaatcattagcaaatgtgttgcttcatgccttggtgatggatgccagcatgttaaactgctgaagtttgattttctgatgcaaaatatatcttgtaaaatttagaccactcctttaatgcagaccaaaataaggcacagctttaattcattattgaatgccttaaatgtcccaggtatgagaataaatgaatatgatacaaatgaaaaaaaaaaaaaaag

SEQ ID NO: 41853 - DNA, 858 bp, Homo Sapiens
gtgagcgacatcacttttcctgtcagtgaggagctggaggctgaccttgcttctggagaccagtcactgcctatgggagtgcttggggctcagagcgaacgcttcccatctaacctggaggttgaagcttcaccacaggcttcaagtgcagaggtaaatgcttctcctctttggaatctggcccatgtgaaaatggagcctcaagaaagtgaagaaggcaatgtctctgggcatggtgtgctgggcagtgatgtcttcgaggagcctatgtcaggcatgagtgaagctgggattcctcagagccctgatgactcagatagcagctatggttcccactccactgacagcctcatggggtcctcccctgttttcaaccagcgctgcaagaagaggatgaggaaaatataaaaggaaaagagggagatgttttgtccagacctactagacccaacagaaaaggtttttgtattagaatctgtttccttaaaaattgatttgactcctgttcttaaacacaagtggtttttcctaattccagaggaactggacgtcaccaaacaaggttgcattttacttttgcatccagtttttatagttttccacaaccaagccacccttcacagataaaatatgatgctggcatggcaatcagaccaaagcactgtccccaattgttgtcttaactatgactagacatgttatacagccatttatcttgtacaactgagaagaatcatactttgacctaccttgtagagatgtgaggatttagatgtttgctaacttcaaaactgtgcttgaatagactaataatatatgctcatatcagatgtcagttttcaaaaaaaaaaaaaaaaa

SEQ ID NO: 41854 - DNA, 1016 bp, Homo Sapiens
aaactgcaaacavgcccagaaggtcaagacgagggaaatatgagamggcaaatgatgtgaggsttagtatcttgagattcacctggbctggaattatgtcataggctactatgcatcagaatcacatggagggctttctaaaacagactgctcagcccacccccagggtttctgagttcataggttataagaggtaagttgaacaattccccagatgatgctgatgctcctggtccacaatgtgagaaccactaagttggagtactgactcatagagataaaattctttgaaagaaatgtactgttttaagatactgtaaaatgtggaggcagggcaaacgtttataagggctgttatgtatgaratgtgcctctgacccaaatccacggactttgcgaaaatcaccaaggagactttgcattaagttcagagtacaatacaaactgggcctagctctgtatttagtcagtatgtgcacgtgggaaactttagtaaaatatcacctccttattgagacaagtttggacatctggccttaagcctctgttgaacaggagaagtgaagctgtttgcmattatataattttctaatttgamatcatgacaagcagtcttagaacaaagttaaaattaaaaagtctttatccaagtcaccaatgaaacaggattctgattcattaatcatgtcttgcccacttttttcaacaaacctgacgtcctataatgagctatacagtgtgaggcatatttcatagcaacgttggttgattgccaaggagactctgccaccgttctggataagctcatgtttcccttttccttggctgctaatagaagggcaaacttacagtgcagggtcaagagcaagaagctgggggagtagaggctatacatctagcctaataatagagatctgaggtggtcacaaggagactacgttcttttgattccatyctcagcagcmaaagtacttgagttcaaatgataaacttgaagttgtagsytggacagtatc

SEQ ID NO: 41855 - DNA, 775 bp, Homo Sapiens
catccgatctgataggtctgtgccatcagacatcttccagatacaggccacaactatttatgccaacaccatcaatacttttcggataaatctgggaatgaaaatggagagttctacctacgacaaacaagtcctgtaagtgcaatgcttgtgctcgtgaagtcattatcaggaccaagagaacatatcgtggacctggagatgctgacagtcagcagtatagggaccttccgcacaagctctgtgttaagattgacaataatagtggggccattttcattttagtcttttctaagagtcaaccacaggcatttaagtcagccaaagaatattgttaccttaaagcactattttatttatagatatatctagtgcatctacatctctatactgtacactcacccataattcaaacaattacaccatggtataaagtgggcatttaatatgtaaagattcaaagtttgtctttattactatatgtaaattagacattaatccactaaactggtcttcttcaagagagctaagtatacactatctggtgaaacttggattctttcctataaaagtgggaccaagcaatgatgatcttctgtggtgcttaaggaaacttactagagctccactaacagtctcataaggaggcagccatcataaccattgaatagcatgcaagggtaagaatgagtttttaacctgctttgtaagaaaatggaaaaggtcaataaagatatatttctttaggaaaatggggatcctgaaaaaaaaaaaa

SEQ ID NO: 41856 - DNA, 595 bp, Homo Sapiens
gggggggacagagtgactgtggacacaaggaagatgctggcgtgaggtgctctggacagtcgctgaaatcactgaatgcctcctcaggtcatttagcacttattttatccagtatctttgggctccttctcctggttctgtttattctatttctcacgtggtgccgagttcagaaacaaaaacatctgcccctcagagtttcaaccagaaggaggggttctctcgaggagaatttattccatgagatggagacctgcctcaagagagaggacccacatgggacaagaacctcagatgacacccccaaccatggttgtgaagatgctagcgacacatcgctgttgggagttcttcctgcctctgaagccacaaaatgactttagacttccagggctcaccagatcaacctctaaatatctttgaaggagacaacaacttttaaatgaataaagaggaagtcaagttgccctatggaaaacttgtccaaataacatttcttgaacaataggagaacagctaaattgataaagactggtgataataaaaattgaattatgtatatcactgcaaaaaaaaaaaaaaaaaaaaacatgtc

SEQ ID NO: 41857 - DNA, 635 bp, Homo Sapiens
  misc_feature (597)..(597): n is a, c, g, or t
ttgctgaatatataataacctatgcttgtatgtaaccgaaaatggtttaagagccaacatttagagtatgacaatggagctgaacagtttttaatgcgcaagcagttctgttcttgtgtatgacttgtaaccttaatttactgtgtaaagatggttacattatttccttagctttgtttgttggagacaaatagagaatgcttgttaagtatgtcaaaacaatcttatcttgtgaatttttgttaatgtattatacgagctatatttttcatttgcccagaaagacagcttgtataacgcttttggaagtttctgctctgtaatgtctttagagctgacagtctgttaggtttgtttttttcttcatgctaaagtgtcagttggtggttttgtgaactggtcaaaaattcacaggtcttaaatgttttgggggaaatttatattggacactgctctttgtctagcaaataaaagatgttaatatattcctgttactggcatgtgcacgactatgttattagaagccactttatcattttcctgctttaaatagaaatgtctatttatgaattctgcttgtagttttttcacacatanaatagtaaaatttaaaaaaaaaaaaaaaaaaaacgcgg

SEQ ID NO: 41858 - DNA, 460 bp, Homo Sapiens
  misc_feature (443)..(443): n is a, c, g, or t
ctggccttagcttcctcctctcttatggggataacagctacctcatggatcacaataagagaacaagagtgaaagagttttgtaaccttcaagtgctgttcagctgcggggatttagcacaggagactctacgctcaccctcagcaacctttctgccccagcagctctcttcctgctaacatctcaggctcccagcccagccaccattactgtggcctgatctggactatcatggtggcaggttccatggactgcagaactccagctgcatggaaagggccagctgcagactttgagccagaaatgcaaacgggaggcctctgggactcagtcagagcgctttggctgaatgaggggtggaaccgagggaagaaggtgcgtcggagtggcagatgcaggaaatgagctgtctattagccttgcctgccccacccatgaggtangcagaaatcctcactgc

SEQ ID NO: 41859 - DNA, 650 bp, Homo Sapiens
  misc_feature (543)..(543): n is a, c, g, or t
agaaaaccaaaccaaagtctgacattctgaaagatcctcctagtgaagcaaacagcatacagtctgcaaatgctacaacaaagaccagcgaaacaaatcacacctcaaggccccggctgaaaaacgtggacaggagcactgcacagcagttggcagtaactgtgggcaacgtcaccgtcattatcacagactttaaggaaaagactcgctcctcatcgacatcctcatccacagtgacctccagtgcagggtcagaacagcagaaccagagcagctcggggtcagagagcacagacaagggctcctcccgttcctccacgccaaagggcgacatgtcagcagtcaatgatgaatctttctgaaattgcacatggaattgtgaaaactatgaatcagggtatgaaattcaaaacctccacctgcccatgctgcttgcatccctggagaatcttctgtggacatcgacctcttagtgatgctgccaggataatttctgcttgccatgggcatctggccaccaaggaatttcgcaccctgacgatnactcttgacacctttatgtattccattgttttatatgattttcctaacaatcatttataattggatgtgctcctgaatctacttttttataaaaaaaaaaaaaaaaa

SEQ ID NO: 41860 - DNA, 676 bp, Homo Sapiens
  misc_feature (640)..(640): n is a, c, g, or t
  misc_feature (655)..(675): n is a, c, g, or t
gcctcaccgcctcccgggcctgctgtcagcttgcagcccggggacagaggccagctgggatctgcctgaggacagagaacatggtctcctgcagggccctgcctcccaagccccgccctcagaaagccaagtaccttttcagctttttaactgcccccatcccaacccagggaggcctgtgtcactctggcacaagctgccaccaccagccacccacacccaccccagcacacctcacacgggaccacagccgcgctgccgagggccaagcacaaaggttccagtgagcgcatgtcccagcccctggtggccaggctccccttgctgagccgctgccacttcaccctgtgggaagtggccccagccatctcctctagaccaaggcaggcagccccgacatctgcttcctctatcgcccaatgcaaaatcgatgaaatggggagttctctgggccaggccacattcacattcccctccctctgtggtccagtgaagcctccggaccccaggctctgctctgccctgccctgcacccccctcgtcagaagtacatgaggggcgcagagatgagcacacagctttgggcacggtccagggcaaactgaaatgtacgcctgaattttgtaaacagaagtattanatgtctctttctccnnnnnnnnnnnnnnnnnnnnna

SEQ ID NO: 41861 - DNA, 602 bp, Homo Sapiens
ttccgacagcgccatccaggcccctgggggcgccgtctcccacagcaaaggacctggtgtgggatgggagaactccgctgagaccctgcaggaacacgaaacagatgccaaccgagagggccctgaggtacaggaaccggagaaacgtcccctcaccccatccctcagccagtgacaccgtgggaacagcaggcttgggagtgcagccttctcggcactggagtgtcagcggaggccccaggcagcccaagagctcagggagccagggaccccaaggggagtccttggacaaggaggcctgggccctgagatcctccacggtcagcgccggggcccggagatggagctgggacgagtgtgtggacaggggggatggctggcccccacgagcagctccaggctggagttctggttcttccaggtggctcccgctgaggcagcggtctctgggggatcccccagctgaaggaggctggcaggagttggcaagagaaccccctgccctgtccaggtgggaagctgagtcccagtgctgggggactgtggcctgggctgatcttgagccttaactggacatgaggggcatgagaataaagctgaat

SEQ ID NO: 41862 - DNA, 687 bp, Homo Sapiens
ggatccgtggtatgtctgccatgttgcccctttctcttttcccctttcctgtcccaccatacgagcacctccagcctgaacagaagctcttactctttcctatttcagtgttacctgtgtgcttggtctgtttgactttacgcccatctcaggacacttccgtagactgtttaggttcccctgtcaaatatcagttacccactcggtcccagttttgttgccccagaaagggatgttattatccttgggggctcccagggcaagggttaaggcctgaatcatgagcctgctggaagcccagcccctactgctgtgaaccctggggcctgactgctcagaacttgctgctgtcttgttgcggatggatggaaggttggatggatgggtggatggccgtggatggccgtggatgcgcagtgccttgcatacccaaaccaggtgggagcgttttgttgagcatgacagcctgcagcaggaatatatgtgtgcctatttgtgtggacaaaaatatttacacttagggtttggagctattcaagaggaaatgtcacagaagcagctaaaccaaggactgagcaccctctggattctgaatctcaagatgggggcagggctgtgcttgaaggccctgctgagtcatctgttagggccttggttcaataaagcactgagcaagttgagaaacca

SEQ ID NO: 41863 - DNA, 576 bp, Homo Sapiens
gcacgaggtcatatgggtgtaggggaaattctaacttcttaggccttgagatgtttgacacacagacacagacagacttaaactttttcttagacagtagccctcatctgcctctgggaagtattctgaaacactccagcttttccgtgagtactgattcatctgacacagagacccaaactgaaggagtctccactgctaaaaatatacctgctctagaaagcaaagttcagttgaacagtacagaaacacagaccatgagttctgggtttgaaaccctggggagcttgttcttcaccagcaacgaaactcagacagcaatggatgactttcttctggctgatctggcctggaacacgatggagtctcagttcagctctgtagaaacccagacttctgcggaaccacacacagtctccaacttctaaaactaacggtggagtccatgtgtgaaatggcatctaccatttcctctggattaaaactacggactggggacaacagtattaattcgattgaatgtggctgatgatgcagttgcttagcttctttgtgtttctttgccttttgtacttg

SEQ ID NO: 41864 - DNA, 673 bp, Homo Sapiens
aggggaccaatgattcattaaagtaaattgatggttttgctactaattcctatcccatacatttgacacaaaagaagtgttggtaatggataaataacatatcccgggcagatgagctcaacctagtaggtaagagtttggtttggtcacagttgcctatgagtgtgggtttcaaaagaaacataaagccttaacttagaatttcattatgttttagaatcatcactgccttaatattcaagcatctatttaagtcctaataaaggagaaatgcatgtttatggcttttttgtaaatataaatgcagtgatctatggcttaaaaaatttgtttctgtgacaatgtttgtaaatctagccaatagagtcatttacagaagaaaaatgagcatgtaataatacaagaactgtttccccctcaaaactgaacctgaattatttgtaaaaactgaaatttaatgattaaagagaagccagaattgtacccttttttgtgaattcttgaacgtactcataaatatgacttattgtattgcttagttttcactcattgtcttttgaagccatatgataaaatgattttttttattattcaaccagcaacagccgatcgattgataagcaacgacaacagtaaacaagcagagaagaacgtagcggcagcaaccatcaca

SEQ ID NO: 41865 - DNA, 623 bp, Homo Sapiens
gaccggtccggattccttcgaatcgtcgaccacgcgtccggctaaataactttctgaatatttttttcttgtgtataagtggaaagggcatttttcacatataagtgggctaaccaatattttcaaaagaacttcatcattgtacaactaacaacagtaactagcccttaattatggtgacagttccttattggtgtgtgtgagattactctagcaactattacagtataacacagatgatcttctccacacaccccatcacccagataatttacagttctgttaacagtgaggttgataaagtattactgataaaaaattatctaaggaaaaaaacagaaaattatttggtgtggccatcttacctgcttatgtctcctacacaaagctaaatattctagcagtgatgtaatgaaaaattacatcttactgttgatatatgtatgctctggtacacagatgtcattttgttgtcacagcactacagtgaaatacacaaaaaatgaaattcatataatgacttaaatgtattatatgttagaattgacaacataaactacttttgctttgaaatgatgtatgcttcagtaaaatcatattcaaatttaaaaaaaaaaaaaaag

SEQ ID NO: 41866 - DNA, 697 bp, Homo Sapiens
ctggtgagaataccgaggaccagaaatcctctgaagacactgccccattcctaggaaccttagcaggtgctacctatgaggaacaggttcaaagccaaattcttgagagcagttctctccctgaaaacacagtacaggttgagtcaaatgaggtcatgggtgcaccagatgacaggaccagaactccccttgagccatccaactgttggagtgacttagatggtgggaaccacacagagaatgtgggagaggcagcagtgactcaggttgaagagcaggcaggcacagtggcctcgtgtcctttagggcatagtgatgacacagtttatcatgatgacaaatgtatggtagaggtcccccaagagttagagacaagcacagggcatagtttagagaaagaattcaccaaccaggaagcagctgagcccaaggaggttccagcgcacagtacagaagtaggtagggatcacaacgaagaagagggtgaagaaacaggattaagggacgagaaaccaatcaagacagaagttcctggttctccagcaggaactgagggcaactgtcaggaagcgacaggtccaagtacagtagacactcaaaatgaacccttagatatgaaaagagcccgatgaagaaaagagtgaccaacagggagaggcatggactcatcgcagaagaagacaagaccaaaaaaaaa

SEQ ID NO: 41867 - DNA, 520 bp, Homo Sapiens
cctgccatatgaacatttagaaagacaaacttcttcgggagtctcagttgtaaaaccttccctcattaatatctgaaaatgttagtcttcctttaagtcatagaacttatttaaacataaaccaatttctattacaggttatgctattaaatagctgtaattattaagttattatttttataattagttgttaaatttcattttacacccactcaaatttaacaaagaatctttagcccctttaaattttagaattaaattaaatttttaaagttttacttctaaaatgagattgtgactggcaattgtttatagtgaaactttttaaattaatctttgtactcctctatcagtgcttgctaccaagagaatgtccaaaatgatttgttttaccatgggaaaattcttactattcaacaaactctcagttggccccctacagcagtctggtgttgaagtttctttgaacgaactaaatatactcattttatgtaaaggtatccaatttgattttgaaacc

SEQ ID NO: 41868 - DNA, 603 bp, Homo Sapiens
aaaggagataaacagccaaatagcaaataggtcactgaatgataagatttgcaccttagaacaataatcattttaaggataacaagtaaatgtctgaaagcatgaggggctttatttgcctttacctcatatgagtctttgatcttgaaccgatacttttggatctcattgttgatatacctgaatttactttgtaagagattttaacttcacttcatgctgatgatgtatcaaattcattttatagaaagatttaaagtttttttctggaagtgatatatgtcaaattacatttcctactgcagtatttgagcagggacagtcattttttaaatgtttttggccgggcgtggtggctcatgcctgtaatctcagtacattgggaggccaaggcaggtggatcacctgaggtcaagagttcgaggccagcctggccaacatggtgaaaccctgtctctactaaaaatacaaaaaattggccgggcgtgatggtgggcgcctgtaatcccagccactccagaggctgaggcaggagaatcgcttgaacctgcgaggcagagattgcagtgagccaagatcaagccattgtactccagcctggac

SEQ ID NO: 41869 - DNA, 584 bp, Homo Sapiens
ggcaacagaagcagttgagtcgtcatcacttttcagtgatgggagagtagatggtgaaatttattagttaatatatcccagaaattagaaaccttaatatgtggacgtaatctccacagtcaaagaaggatggcacctaaaccaccagtgcccaaagtctgtgtgatgaactttctcttcatactttttttcacagttggctggatgaaattttctagactttctgttggtgtatcccccccctgtatagttaggatagcatttttgatttatgcatggaaacctgaaaaaaagtttacaagtgtatatcagaaaagggaagttgtgccttttatagctattactgtctggttttaacaatttcctttatatttagtgaactacgcttgctcattttttcttacataattttttattcaagttattgtacagctgtttaagatgggcagctagttcgtagctttcccaaataaactctaaacattaatcaatcatctgtgtgaaaatgggttggtgcttctaacctgatggcacttagctatcagaagaccacaaaaattgactcaaatctccagtattcttgt

SEQ ID NO: 41870 - DNA, 871 bp, Homo Sapiens
  misc_feature (861)..(861): n is a, c, g, or t
atagaaaactgaaaatctaatattaaaaatatggaacttctaatatatttttatatttagttatagtttcagatatatatcatattggtattcactaatctgggaagggaagggctactgcagctttacatgcaatttattaaaatgattgtaaaatagcttgtatagtgtaaaataagaatgatttttagatgagattgttttatcatgacatgttatatattttttgtaggggtcaaagaaatgctgatggataacctatatgatttatagtttgtacatgcattcatacaggcagcgatggtctcagaaaccaaacagtttgctctaggggaagagggagatggagactggtcctgtgtgcagtgaaggttgctgaggctctgacccagtgagattacagaggaagttatcctctgcctcccattctgaccacccttctcattccaacagtgagtctgtcagcgcaggtttagtttactcaatctccccttgcactaaagtatgtaaagtatgtaaacaggagacaggaaggtggtgcttacatccttaaaggcaccatctaatagcgggttactttcacatacagccctcccccagcagttgaatgacaacagaagcttcagaagtttggcaatagtttgcatagaggtaccagcaatatgtaaatagtgcagaatctcataggttgccaataatacactaattcctttctatcctacaacaagagtttatttccaaataaaatgaggacatgtttttgttttctttgaatgggcttttgaatgttatttgttattttcagaattttggagaaattatttaataaaaaaacaatcatttggctttttgaatgctctnctaaaaggga

SEQ ID NO: 41871 - DNA, 624 bp, Homo Sapiens
acgacctttgcctcctgtagcacagacatgtgtatccatgtgtgcaggctcggctgtgaccgcccagtcaaaaccttccagggacacacaaacgaggtcaacgccatcaaatgggatccgtctggaatgttgctggcatcctgctcggatgacatgacattgaagatctggagcatgaaacaggaggtgtgcatccatgatcttcaggctcacaataaagagatctacaccatcaagtggagccccactgggcccgccaccagcaacccaaactccaacatcatgttggcaagtgcttcgtttgattctacggtgcgactgtgggacatagaacgaggcgtctgcacccacacgctcacgaagcatcaggagcctgtctatagcgtagctttcagccctgatgggaagtacttggccagtggatccttcgacaagtgcgtccatatctggaatactcagagtggaaatcttgtccacagctaccgaggcactggcggcatcttcgaggtgtgctggaacgcccgaggagacaaagtgggtgccagcgcgtccgacggctctgtgtgtgttttggatctgcggaagtaaccacaaaatattatcgaaaaaaaaaaaaaaaagggg

SEQ ID NO: 41872 - DNA, 728 bp, Homo Sapiens
caaacacagacatggttgttgcaccagaaaggtccccactagagctaagcgtgaagctgaagctctgtccctattcccccagcccagctagctgatcacaccaacagatcctcatcagcaaagcatttggctttgtcctgcccaagtgggctgcagactgagtgctgcccttgtagcttccccagaccccaactcactgcagttcatctgaacaacctgagctcctgggccggggtggaaggagggggataaacctaaggccctgatccaaagcagcctgttgagctggttctccagggctgcagtctctccaggtgtacagctgctgtccctgccctgtcctgtccttgcacagtctcctatgtctgagccccagtgccttctgttcgggccctcctttggtgggaaggcagagccctgacccttgaatggttgtccttgactctgtgctgctgccttctgcagagaggcacctaagctgtttaaagagcccagtgattgtggctgctcctcctagaggtgggagggggcaagaggcctccttggtcagtgtccatgctttctgggcagggacttggttttttgttccaacagtggccttctccgggcttcatagttctttgtaatatgttgaagttaatttgaattgactgattttgttgaactgtgtgtttaagctgttgcattaaaaagctttcttctacatcaaaaaaaaaaaaaaaaaaaag

SEQ ID NO: 41873 - DNA, 599 bp, Homo Sapiens
gcggccactccagcctgggtgacagagcaagactctgtctcgaaaaagaaaaaaaccatgaaggatgagtactagagtcagtaatagaagtagttcagcattatttaactacaacacaatgctgcaaatatttcacagtaattatcaaaatttaatgggctctaatttaaaatgttatttaataagtatagattttaattgagaattatctttgagtagatgtaatcacaaagtgcattaactcttgttggaatattttatggctattccaaagtatagagtgcctaaattttgtgttgaaaatgtctttcatgacggtattaagttttctgaaattacacatggcttttaaaatttctaatgtatccaagatgtgcaatgttgttaggatctcattcttcagtgcatgaaaagctactaccctcagaacattttgtgttaattgtacctgcaagaacacctcaggcaagccaagaagaaatgaaacccaaataaaacttgaaaatgcaccttaaaaatatatatacatataatagttttgaaatgggattctgctttattttgatggaatggccattaaatacacattttgagataaa

SEQ ID NO: 41874 - DNA, 824 bp, Homo Sapiens
  misc_feature (596)..(656): n is a, c, g, or t
ttgtcagcagcacgacagcggctacaggaagatgagatgcgccgggctgctgaggagaggcggagggaaaaggccgaggagttagcagccagacaaagagttagagaaaagatcgagagggacaaagcagagagagccaagaagtatggtggcagtgtgggctctcagccacccccagtggcaccagagccaggtcctgttccctcttctcccagccaggagcctcccaccaagcgggagtatgaccagtgtcgcatacaggtcaggctgccagatgggacctcactgacccagacgttccgggcccgggaacagctggcagctgtgaggctctatgtggagctccaccgtggggaggaactaggtgggggccaggaccctgtgcaattgctcagtggcttccccagacgggccttctcagaagctgacatggagcggcctctgcaggagctgggactcgtgccttctgctgttctcattgtggccaagaaatgtcccagctgagggcctttgtcccattgtccctctgtgaccccttcatctttgataaagcactgacatctcccttctaataaatagaccctgagttctgtaannnnnnnnnnnnnnnnnnnnnnnnnnnnnnnnnnnnnnnnnnnnnnnnnnnnnnnnnnnnnaaactcgaggcattttattgttggggggccgggaaaaaaaggtaatggaaaagggcccacggggcccataaatgtggtttccgggaaccccagttttttcttgtgtacaaaaggggggtaaaaaattttgggccggggtccttcccctataaaggggggggctcctat

SEQ ID NO: 41875 - DNA, 591 bp, Homo Sapiens
aggagaactcacccagtctgccagggtcacagaatgatcatactcaagatcttcctggggagtcaatggcaaatttcactgggctattttacagatgaagaaggaacataaagaaggttctgggaccccgaagtccacggaacacccaccattacctgatctttggagcttgtcatttggccagtggaccctaataaacacgtccacggggatgtggggatagaatgccggagcctggctcgctagggcatccaggttcttccttcctctttgccctgctgtctccaggcaccaagaatctcctacagttccccaaagatgaaccccccattatctcaggtcactctgtttcccccgatctttaccaaattcctgactcagagttcctcccatttgcttctgactctcattttattcttacctctcattttattcttatgatgtttaccatttctcttctcctcagtgtccctctctgagtggtaagagtatgttaataagccagtgctgagaccggagcacgaggcaactgctcaatgttggtcattgtcactgttattaaatgtaacttaagggaaaaaaaaaaaaaaa

SEQ ID NO: 41876 - DNA, 778 bp, Homo Sapiens
ggtgtatatgatatatattatcttatactgaaaaaaaattcctttcagattggggtgttagaagtgcaccaggtcactctgaccttattactgtctttggtattgtcttaaataaatcaagaatcattgacctaattgttaaatttaaaaataggtagttagcaataggtggaaagagaaatgatgtgaaagataaatgatgattcgtggagccctactcacacattaacccccaaattcaaaagtaagaatgcaaaagtctagagggggtaacagtctgcatcatcatcacaacctaaatggagaaagctgtgcagaggaaacttaagcataaaaattgaattcgtttctgacataccttagactgaaaaactgttggttcatccagaagtgtattcatattaccagaaaatgagtttgtctatggggatacatgaacttcatatactaaggagcctaactccaaagcctgcgttctcatcccagtctgatattcacctaagtttccggacccttttccttagctgtaaaatggaagcggttggactgatggtgtctgaggttctttcccacactgaaattctaaatattgacacttagcagtcatagggctgataatacacacagttactgacttagcctaaacaacctggtgcatcgaaatgtaatcaccctttcttttgtaaaagagacccatcttctatcttcctttcccaccttttctctgtttttatgaaaacccaactgttggacattccaaaccattggatttgaaggg

SEQ ID NO: 41877 - DNA, 629 bp, Homo Sapiens
ttcggcacgagcattgtttgaacttccgtctttagctgatagattctcaaatatccttgattttggatgttcagtatgtttgtgagagaggtttctgggaagactctctttttgccctcgggaaaaagcaaaatatcaatgtttgggtgactgtgtaaagctcagtgtgtaagaacatctttttgtctaggttttctttctgctctttattgaagacaaacactcaccaaaaagaaaaataaaagttttcagagaaactaattttctttggcaagagtattacttaatattttggcctcctaaagtttccctagttagtactcggactcctgtgctaattgtcagcttacatatcattgtatagagactgtttattctgtaccaaactgatttcaaaagtactacattgaaaataaaccggtgactgtttttcttcataaagttctgcgtttggcatcttcactctttccaaaatgtatctgtacatcagaaatgtcactattccaagtgtctttttagtgtggctttagtatggcttccttttaatattgcacatacattgtatctttgttttatggtaataagtaataaaaatgtagacttcatattttgtacaaaatgtcctatgt

SEQ ID NO: 41878 - DNA, 823 bp, Homo Sapiens
gctgaggacctcttcgtcttcctttaaatgtcttttgcctagggagtgtttaccatttgtgaggcagctttgtctgctcttacactgtacatcctattactccattgggaagtaggttcactttcctctggccttttgcctaagttaggctttgctgaatcaaccctacttttccttttagaaaaggttgttacaggagatttactggcaactgttcttttcccatcaaaaatcagtgaatgtttgctgagtataaatgctgcttccttaaaccacttgtcgctttaggatcaactttacctgtaccttttctcctttcctcccttgccacctcaggtgcaaatctgaactcagtgtctgcttcttccattttctcgtctctctcccctcttcccccattatccatatgacattattttacttcaaatgacagcatcaatcttaaaaagatatacattaaaactaaggagttttttttaaagaaagcctgaataagttcctttccctggtaactttgaaaagcagtcagagttgctatatagatatatgtggctcctttaaaatgctttgtgtatgtgtggtgtttaaaaaaaaaaaatcttaccagttaactttgcagtgtctaggtttgagtgtcataaatccacgtgttcctgttgcaacaaatacccaaaaattgtgtgtgcacttcctaataccagtcttcacccatggaggaacagtgctttttagagatgctttctatttcaatgttggcatactggcctgagggtatttgcagttgtggggtgcatttccctaattttgtatggatcaaggatga

SEQ ID NO: 41879 - DNA, 494 bp, Homo Sapiens
gcggccgccactccgccttatacctcaccatcggagaacttaccattccccaaatatatcctgctggcactacaccttcgtaactgctgttcccactgcccccacaacactccaatctccaccttcctgccaaccttgagatattgtatgcatatatacatatttcctttgtttaaaatacaaatagcatactatgcatgctgttctgcactttgctttttttttatacttgcaattagagctgcctcatttcattttacagctgtatactattccattgaatggataaaccataatttatttaatcagtccctcactgacagacgtttccattgtttcctgtcttttgctataaataatgctgtaatgaatattcttgtgcatatttcacattaatttatgggattacatctgcaggataaattcttagaaccaatggtggtttgtggggagggtgacagggtggataggtacaggattgggagacttttcac

SEQ ID NO: 41880 - DNA, 1087 bp, Homo Sapiens
  misc_feature (954)..(954): n is a, c, g, or t
tgctttttagagatgctttctatttcaatgttggcatactgcctgarggtattgcagttgtgggtgcattccctaatttgtatgatcaaratgaactggcccttttctacttccaagcttttaacagataccaccatatttgacagaattcccagagtgaattgcttgtgttattagtagattcagtgcccccagctgggataggcaagccatgacagcttccctgtttcacctacagaagtcttatctgagggatctattcacagtaagcaccaaggtctccatgtcttgaggtcagtttcattgtcttttgaaaagtgcatgcttcatttgaacaattcattcagcagcagatggactttcagtgatttaaaataaaattttgatccaaagctcaggacacaaaccacagtggtaaaattgagtagcatataatatcagactaaattatctgtaattttccacaacccagattgtatgtgttttatgtgtgtttaaataaatatgttagatacacgtgtatacatacacccatatacaacagatccaagactggctgacttcatttgaaatggttgaatctgctgtgtaataaagtggttcaaccatgattaggaactgaaatttagtagaagagggaaaaggagttaatgtaacaaattattttagctacaaaccccggtaatagagcacttgggggatgggatggggtgggttggtgagacaatcagaatggtaaattgattaaatgctcctaaccctgtaattttgtgcatagagcaccctatgctgtggaaataactgttcttagatttcattgtaactggactgttcaggttgcccagagggaaaracattcctaattctaawaaaawaacytttattttgtkattcmataggtacttatgtttattttatagttaaaaatgactaaaggkggctawwagccmccgntatwwkkgcctattymctgttccccttaawawaaatktcaaaattggtktttytttgmgggamyktgawkggcccctyccccmmmtttamytggttatgagctttvrggvtttttkaaratttcmattytgca

SEQ ID NO: 41881 - DNA, 638 bp, Homo Sapiens
  misc_feature (560)..(560): n is a, c, g, or t
ttttttttttttttttttggttaccttctcattcatgtcaagtatgtggttcattcttagaaccaagggaaatactgctccccccatttgctgacgtagtgctctcatgggctcacctgggcccaaggcacagccagggcacagttaggcctggatgtttgcctggtccgtgagatgccgcgggtcctgtttccttactggggatttcagggctgggggttcagggagcatttccttttcctgggagttatgaccgcgaagttgtcatgtgccgtgcccttttctgtttctgtgtatcctattgctggtgactctgtgtgaactggcctttgggaaagatcagagagggcagaggtggcacaggacagtaaaggagatgctgtgctggccttcagcctggacagggtctctgctgactgccaggggcgggggctctgcatagccaggatgacggctttcatgtcccagagacctgttgtgctgtgtattttgatttcctgtgtatgcaaatgtgtgtatttaccattgtgtagggggctgtgtctgatcttggtgttcanaacagaactgtatttttgcctttaaaattaaataatataacgtgaataaatgaccctatccctcgtgccgaattcttg

SEQ ID NO: 41882 - DNA, 552 bp, Homo Sapiens
ggctttgatgatggaagtgtagtcctaacctactgcacagctgggaccccctgcccctagatcccaatactggggatgggaggaccttgcactattcccctcagtccatctatcgaggtctttgcaggaagcatactgggaattgaaacgagagcctaaatgacatctaagaaaggcagtgttcaataccaggtattaggtgaggatgggattctaaggacatcagtgggaggcagggagccaccttcagacctcagcatggaagcttccaagatccagaggaagaggcaacagcactgagagtcataggtagaagaatcatcacagccctgctaaccaggcagctgatgcccctctcccctggctccctgtgtccaaatcctacaggggcatctgttggctgaactcaacctgaagccaaagagaagatgagtggagagaggcaacatttatagagctcaggtttctagggctggagagggatctggagggacacacaggagacacctggcataaccaaaaaatgattaaaaaaaaaaaaaaaaaataggt

SEQ ID NO: 41883 - DNA, 677 bp, Homo Sapiens
agagtaagaccctgccttaaaaaaaaaaaaaaaaaaatgccttaaagaaaataataagagaagggtgtgttctcttccaagtaatgagccgatcaaggggaagcaacccaaggctagcaggctcttttcaattcccagctctgccactcttagcatggcagagagttggcctcattatgccagtatggctgccacagtgtcagacatcacattccaggcagtggaaaggagaaagaaccaaagggcatccctttctcttgaagcagtccctgtgaggggggattatctggaagccccaacccaatttctgcttccaaccattatccatagaaacaactggaagttgagaagtgcagtcttttaggtgggcacctggctgccctgtatgaaaccagaattaggttggtcagcaggaaaacaagaaaacacttactgtgttgactgaggtttttgacgcatcgctttattgtcaaattaaacaactctatctcattctgcactgaaacacgtactaccattgcctataattggaaaatgatcctcagaggcacagaagatgccctgatggaaagtttgccccttgggcaaagagacagccatgggaaccttcagacatagagagagagggtggcttttctccctacattcctcaaatagctaagatttggccagtgtgt

SEQ ID NO: 41884 - DNA, 886 bp, Homo Sapiens
ctgtaatcccagttacttgggaggctgaggcaagagaatcgcttgaactcagaaggtggaggttgcagtgaggcgagattaggccattgcactccagcctcagcaacaagagtgaaactttgtctcaaaaaacaacaacaacaacaacaacaacaacaaaacttcctaggccagatgtggtggctcatatgtataatcttagcactttgggaggccaaggcaggaggattgcttgaggcgaggagttcaagaccagcctaggcaacatagggagacccccatctctacaaaaatttaaaaattagcctagcatggtggcacgctctgtaatcccaaatacgcggtaggctgaggctgaggagggtggattgcttgagcccaggggtttgaggctgcagtgagccacagtcacgccactgcattctatcctgggcaacagatggagaccttgtctcaaaaaaaaaaattcctgacatcgctatgtattcccaactttatcatttgtctgcctgtttagttttgacttatgtttttttttttttttttccccctgtggacatgtagttgacggaaatcgtgaaggaactttaatattttatttaaatttcccaaaactaatcatgccttatgtgactaatcttcagtgataatatttcatctactgatatattttcttgaggtgtgtaattttcagtataccttaatcatttggtataaaaaaagagagaggtttttgatatatgaatgctgtttcttgtaaaaatcaatcttgacactttattttaaactttttattggtaatgaacagtggggttttggaacatccatgaattttcaatttaggggaaaccggggccaaattttggtctctttccgaaataaacct

SEQ ID NO: 41885 - DNA, 895 bp, Homo Sapiens
  misc_feature (825)..(828): n is a, c, g, or t
  misc_feature (832)..(833): n is a, c, g, or t
  misc_feature (835)..(890): n is a, c, g, or t
  misc_feature (893)..(894): n is a, c, g, or t
tgaccggaccgaagatagaactctccctcgcgcgggcccggccagcggaagcccctgcgcccgcgccatgtcaaagaaaaaaggactgagtgcagaagaaaagagaactcgcatgatggaaatattttctaaaacaaaagatgtatttcaattaaaagacttggagaagattgctcccaaagagaaaggcattactgctatgtcagtaaaagaagtccttcaaagcttagttgatgatggtatggttgactgtgagaggatcggaacttctaattattattgggcttttccaagtaaagctcttcatgcaaggaaacataagttggaggttctggaatctcagttgtctgagggaagtcaaaagcatgcaagcctacagaaaagcattgagaaagctaaaattggccgatgtgaaacggaagagcgaaccaggctagcaaaagagctttcttcacttcgagaccaaagggaacagctaaaggcagaagtagaaaaatacaaagactgtgatccgcaagttgtggaagaaatacgccaagcaaataaagtagccaaagaagctgctaacagatggactgataacatattcgcaataaaatcttgggccaaaagaaaatttgggtttgaagaaaataaaattgatagaacttttggaattccagaagactttgactacatagactaaaatattccatggtggtgaaggatgtacaagcttgtgaatatgtaaattttaaactattatctaactaagtgtactgaattgtcgtttgcctgtaactgtgtttatcattttattaatgttaaaataagtgtaaaatgcannnnaaannannnnnnnnnnnnnnnnnnnnnnnnnnnnnnnnnnnnnnnnnnnnnnnnnnnnnnnnaanna

SEQ ID NO: 41886 - DNA, 1129 bp, Homo Sapiens
  misc_feature (591)..(642): n is a, c, g, or t
  misc_feature (644)..(650): n is a, c, g, or t
  misc_feature (652)..(652): n is a, c, g, or t
  misc_feature (654)..(662): n is a, c, g, or t
  misc_feature (665)..(666): n is a, c, g, or t
  misc_feature (684)..(685): n is a, c, g, or t
ttcaccatattggtcaggctggtcttgaactcctgacctcaggtgatccacccacctcggcctcccaaagtgctgggattgcaggcgtgataaacaaatattcttaatagggctactttgaattaatctgcctttatgtttgggagaagaaagctgagacattgcatgaaagatgatgagagataaatgttgatcttttggccccatttgttaattgtattcagtatttgaacgtcgtcctgtttattgttagttttcttcatcatttattgtatagacaatttttaaatctctgtaatatgatacattttcctatcttttaagttattgttacctaaagttaatccagattatatggtccttatatgtgtacaacattaaaatgaaaggctttgtcttgcattgtgaggtacaggcggaagttggaatcaggttttaggattctgtctctcattagctgaataatgtgaggattaacttctgccagctcagaccatttcctaatcagttgaaagggaaacaagtatttcagtctcaaaattgaataatgcacaagtcttaagtgattaaaataaaactgttcttatgtcnnnnnnnnnnnnnnnnnnnnnnnnnnnnnnnnnnnnnnnnnnnnnnnnnnnngnnnnnnncntnnnnnnnnnccnnccccagggcccccccctnncggggccccccctttctccttggcccagcgtgggtcccccaaaagggggcccctattaagagggcccggcatttgaccggaagcttcttcaacgctcgtgttattcgacaaacctggctagggttgcaactcctttttcctaagggaaccttttccgcgggggacggggtgactctaaggtgcgggcgacacatacttgggggaaaacttttccgccgcgcgaagggttaaaaattccaaaatgtgtcacaaaggcacaaattgtggcgaaacactacagcgggccaaaaagctatgcctgccatatgaggcgtttctggtcttacggaggatcttctattttatcgagaaactctcctttccagagagtgttccttaccacgcgccggacactcgggggtggcaaaaatttgagcgccggccgctccccccacgcgccactct

SEQ ID NO: 41887 - DNA, 572 bp, Homo Sapiens
tattcagacttctgatccagaaaattttcagtctgaagaacgatcagactcagatgtgaataatgacaggagtacaagttcagtggacagtgatattcttagctccagtcatagcagtgatactttgtgcaatgcagacaatgctcagatccctttggctaatggacttgactctcacagtatcacaagtagtagaagaacgaaagcaaatgaagggaaaaaagaaacatgggatacagcagaagaagactctggaactgatagtgaatatgatgagagtggcaagagtaggggagaaatgcagtacatgtatttcaaagctgaaccttatgctgcagatgaaggttctggggaaggacataaatggttgatggtgcatgttgataaaagaattactctggcagctttcaaacaacatttagagccctttggtggagttttgtcctgtcacttcaaggtctttcgagtgtatgccagcaatcaagagtttgagagcgtacggctgaatgagacactttcatcattttctgatgacaatacgattacaattcgactggagagagcacttaact

SEQ ID NO: 41888 - DNA, 747 bp, Homo Sapiens
  misc_feature (715)..(715): n is a, c, g, or t
aagtgtcctacataggccaggactgcagagaaattccagagcaccttggcagggactgtggacatttcgcaaagaggcttgatctgagctttaaccttctgaggtcactggaaggactgagcgcattcaggagcctggaggaactcatcttggacaacaatcagctgggggacgaccttgtgttgccagggttacccagactgcataccttaaccctcaacaagaaccgaatcactgatttggagaacctgctggatcacttggcagaagtgacaccagctctggagagcctcagtctgctgggcaacgtggcctgtcccaacgagctggtcagcttggaaaaggatgaggaagactacaagagatacagatgctttgttctgtacaagctgcccaacttgaaatttctggatgcccagaaagtaaccagacaagaacgagaggaggcgttggtcagaggagtcttcatgaaggtggtgaagcccaaggcttctagtgaaggacgttgccagctccccggagcgccactacacgcccttgccttctgcttccagggaactcaccagtcaccaaggtgtcctggggaagtgtcgctacgtttactatgggaaaaactcagagggcaacaggtttatccgagatgaccagctctgaagccaacttctgtataccttcacccatttcatgaaaataaattcaaaagggaaatcaaaantaaagaaaacgcttaagaaaaaaaaaaaaaaa

SEQ ID NO: 41889 - DNA, 610 bp, Homo Sapiens
tacctaaatggctgtcaccccgacggaatttctctcccattgttgacacggactccctggcagctcaagggcatgtcttaacgaagatcagcaaagaaaacaccaggcaccctctgccacttagacataatccattccactcattattccaagcaaacatttactgacaaatcgggtcctgagttgaaaacaccatttgtcaaagaggcctttgaagagacccctaagaaacacagagagtgtttagttaaggacaaccagaagtacacatttacaatagatagatgtgcaaaagacctttttgtagccaaacaagttggaacaaaactctcggtggatgaaccactgtcattttctgttgagtctattcttaagaggccttcatctgccatcactcgtgtctctcagtgaaaggctgcttaaacagaaagctggattttctgcagtcttagagcattatagccatttgctactttttttaaaagttaagatgttggtgtaaagaaatttctaatgtaaagatgatgattttgaaaaattttatatattcctaatatgcatgtacttttttttatcacatatatttaacttacagatggaaattgccaat

SEQ ID NO: 41890 - DNA, 848 bp, Homo Sapiens
  misc_feature (798)..(798): n is a, c, g, or t
  misc_feature (813)..(813): n is a, c, g, or t
  misc_feature (828)..(828): n is a, c, g, or t
atgaaaaaaaagatattgaccatgagacagtggttgaagaacagatcattggagagaactcacctcctgattattcagaatatatgacaggaaagaaacttcctcctggaggaatacctggcattgacctctcagatcccaaacaactggcagaatttgctagaatgaagccaagaaaaattaaagaagatgatgctccaagaacaatagcttgccctcataaaggctgcacaaagatgttcagggataactcggccatgagaaaacatctgcacacccacggtcccagagtccacgtctgtgcagaatgtggcaaagcttttgttgagagttcaaaactaaaacgacaccaactggttcatactggagagaagccctttcagtgcacgttcgaaggctgtgggaaacgcttttcactggacttcaatttgcgcacacatgtgcgaatccataccggagacaggccctatgtgtgccccttcgatggttgtaataagaagtttgctcagtcaactaacctgaaatctcacatcttaacacatgctaaggccaaaaacaaccagtgaaaagaagagagaagacccttctcgaccacgggaagcatcttccagaagtgtgattgggaataaatatgcctctcctttgtatattatttctaggaagaattttaaaaatgaatcctacacacctaagggacatgttttgataaagtagtaaaaattaaaaaaaaaaaactttctaagatgacattgctaagatgctctatcttgctctgtaatctcgtttcaaaaacccagnggttttgtaaagtgngggccccaccagganggacaattcatggaactttg

SEQ ID NO: 41891 - DNA, 974 bp, Homo Sapiens
cacaagcttattttcttttgttgtccagaatacttataattctgagcctcccagaaatggaagctaaataaagcaactcaagtttcctttattttgcactcaattacagtgattattgatgaaagcgatgcatggatattttaatacttcctacatgtcctgacttctgaaagagagtaggtaacaggcatcccgagttcaggaactacctcagaacaccccaggccaggttggtcataggctgtgattttagcccccggcaagtgtgagtgaagcatctgtaccaccgcgcaggctgagcgcctgcgcagggtaaggtgccacctggcagtggggcacacagagggaagaccaggctgtccatcagccggctgccttcagaggcagctccagcaggaccttggttgtctgacaggaaatgcttgtggtcgtggttatttggtttgagagcccttgttcctccatctagtggagtccttattaaaatgctagcaatgtggcaattgagtgccagtagcttaatttcatgtttctaaatggacactgggtgcaaaatcggcaaggtgattagattattagaaaattctgctcaatgagtactctcacatgttacctcttaaatgtacgattataatgtggatcttaggtcaaataaccagacttgagaatacctttataaactgccagatacagcaaatctcttttattcaagtgcaactaccgggtggcttccggtggtatgcctgcactgcagataatgaacaatactaattcgggattttttcacattgcgcacctttcgtgacacatggcctgtttaactctcacggcctaagagatgggcccataacgaccgggcgggatgaaggctggcacggaaacatggactcacaacagatgctggtttgagatacaaacacttttcctctttgaaaaccggtccgcactatatgatccccacgaatgaaagaggc

SEQ ID NO: 41892 - DNA, 632 bp, Homo Sapiens
  misc_feature (13)..(13): n is a, c, g, or t
  misc_feature (624)..(624): n is a, c, g, or t
cgagttcctccanggctggggcagctttttgaatgtgtgctctttactgccagcttggccaagtatgcagaccctgtggctgacctcctagaccgctggggtgtgttccgggcccggctcttcagagaatcatgtgtttttcatcgtgggaactacgtgaaggacctgagtcgccttgggcgggagctgagcaaagtgatcattgttgacaattcccctgcctcatacatcttccatcctgagaatgcagtgcctgtgcagtcctggttcgatgacatgacggacacggagctgctggacctcatccccttctttgagggcctgagccgggaggacgacgtgtacagcatgctgcacagactctgcaataggtagccctggcctctgcctgcctcccgcctgtgcactctggaacctctggcctcaggggacctgcctgtcctcagctccctgggagctgaaagtgaggatactccgtgctccaggccacagggtgaatgtggccatgcctacctgttttgtttttttaagaacagaaacaactattttaaaagaactcttttaagaaatttcataaagggacatgcattttactgggtttgcttttcttaaacataccaaatnaataaaaa

SEQ ID NO: 41893 - DNA, 687 bp, Homo Sapiens
gtccgtgcattagctgtttgtaaataatgcatttgcatactgaaaaaggaatgccacctgccacagttgatggtgaggaagctcctttgacgtggtgcaattttgatgagatgtctctggggacacgaggatgccctaatgatgctgacttgtcatggttgcagcatttgaacttttggtgttaaaaaaaaaaacctgtaagtctgtaacctggcaacattttacaaccctgtatttttaaagatggctttctaataaaaaatccagaaccacacagccctatggtcaaacaatcctacgtttgtgcctctgcttttaaaggtgctgtgctggacagttggcatgccagggttcgagaagagtgaatggcttgacgtacttgcagttaactgtgcaaaattggctggctgcctctgttcctactgtactgtaactttgatcatgtctgttcctgttccattctcccaggagcttctctgcagactgacacaccctcccccaccccgggtagtggagatgctggtgtctgggtagtcatggatttctgctggacatttgaatgtgataaacaatccagcattacttaggaaatgctacatgcggaatgtgcacgtttccaggggcgagtattgtcaatcaaaaggtttgcaatgatttccttcctgccaaaaataaacatgtgaaact

SEQ ID NO: 41894 - DNA, 758 bp, Homo Sapiens
ctcaatcttgcctgccttctgggagctctagaattgttcccaacccagtccatggcttctagccaccactacagggctgtttcatgtacttctctctctgactctgtcttgtccgactctcttgagaatttctcaacgattgctcatgcctgtcagtatcagtgcttccatcgttccatctttgattcacttctctttcctttctatttactcccaaaatggagtcattcatcctgatgtcctcaattgctgctgatatgctggtgattcccaaatacatagctccaacccccaacttcccccagactttagatctgtattggtattacctactggacatctctatggacagttccgtatagactcaactcatctgcccaaccaagtatgttcctcctgaattcctctcctggttacttcatcacaatctacataggctcaccagctagaaacatttatgagcttacattccttcttcccatatcttatcagcatatcatatccatttcactccaacactctgtcttgaatttggccctccctctcccctctctactttaattcattggagcatgggatttggagttaggtggttttgggtttgaattccagctctactatttttggttgtgtgatagagttatttaacctctctgagcctcagttccctcgtatgtaaaatgatgataataatacctacctcacagggttgttgtgaggatttaaattagatattgtacgaaaagtgcctagcacag

SEQ ID NO: 41895 - DNA, 566 bp, Homo Sapiens
  misc_feature (541)..(541): n is a, c, g, or t
cgtgatgagcgtttagtgagcctgctggctgcagagcactatgaaatcatggtacgtagtccccggcacctgtcgttattcctatatcctcctgcaactgtggtttgaaactgcgcattctctagtagtatatatcgtgcctgtcttcaaaaacatttccctttttatactcattccccccaggcatggggtagtgtcagtcggactgcacagggaacacggtttccagtggctttggcccctactcgggaaacgtctgcctgttctcgatggtgatggggtggctgccattcccttggttttcctaagccctttctaacgagagtctcaaacaagcggaggcgagggccaattcaaccccattctttccagcgccccgcaccatagcacctgcccacctgagaaccaggaacgcaccctctctgtggagctctgactggtgtagctggaaacaaacagcaacttgcaaacggacgaagagcctgccgtgtgttaatcatttgccttacaagatgtaccagacggtttccagtactaacanagggaataaaaatacctcacgccac

SEQ ID NO: 41896 - DNA, 586 bp, Homo Sapiens
tatgcattgctcgcttaaggacagcaggaaccatctgccttgagacctttaaagacttccctcagatgggtcgtttcaccttaagagatgagggtaagaccattgcaattggaaaagttctgaaactggttccagagaaagactaagcattttcttgatgaccctgcacaatactgtgaggaaaattgactgcagaagcctacttcacaccgccttctcttattttctgcccattgataaacctctccccatattttgcaaagaggaaattcacagcaaaagtccacattatgtcagctttctcatattgagagctctgctatgccactgttgaatttttcccaagattcctgtccctagccctcacttcaaactctgcttccttggacagatttggcaatagctttgtaagtgatgtggacataattgcctacaataatgaaaacctacaggaatttttttatttttcattttccccttaggcatatttagtatttttcccccaggcagatcattctgagtgtgcgagtgtgtgtgcacatgttacaaaggcaactaccatgttaataaaatattcaatttgaaa

SEQ ID NO: 41897 - DNA, 799 bp, Homo Sapiens
  misc_feature (4)..(4): n is a, c, g, or t
cctnttggaacagatattctccataaagatggcatcatcaacaggaaggtcctaggcagccgggtgtttgggaataagaagcagctgaagatactcacggacattatgtggccaattatcgcaaagctggcccgagaggagatggatcgggctgtggctgagggaaagcgtgtgtgtgtgattgatgccgctgtgttgcttgaagccggctggcagaacctggtccatgaggtgtggactgctgtcatcccagagactgaggctgtaagacgcattgtggagagggatggcctcagtgaagccgcggctcaaagccggctgcagagccagatgagcgggcagcagcttgtggaacagagccacgtggtgctcagcaccttgtgggagccgcatatcacccaacgccaggtggagaaagcctgggccctcttgcagaagcgcattcccaagactcatcaggccctcgactgaaaagttctcagtggggccagactggctcctggagctgacaagcgaccccgtggtgaggagaaatgggggccttgatgctcaccctggttcaggcccagaggtccaagctatactgtgcaggacatggccaggcctggtggacacaggaagcctacccaacacgctggtatttggccaacactgaggatgtggttcatgggggagcagtcccctccccactcttgcccatgggtgactcttacccacagctgactagggccagcgcaaatactgggaacctgtaacaaaattaaagggtgaatgttctgaaaaaaaaaaaaaaaaaaaa

SEQ ID NO: 41898 - DNA, 645 bp, Homo Sapiens
gagagagcaacgccagagcccaggtgcccagaggactttcttccagcttctgctgtccttctttgtggagagcaagctccacgaccacgctgcttacttagtagacaacctgtgggactgtgcagggactcagctgaaggactgggagggtctgacaagcctgctgctggagaaggaccagagcacgtgccacatggagccagggccagggaccttccacctcctagggtgaaaccaggagagattgcttgcttcacttgtacaaggcaggaacggtggcatggggtgggggaaacttggagttggaaggtggctaatcttgtgattctatgtttttgatcctcctggcactccagacctgggtgatgtgcaggagagcacactgatagaaatccttgtgtccagtgcccagcaactcctgcctcggcctcccgagcagctgggactgcaggcgcccgccagcacgcctggctaacttttttgtatttttagtagagacgggttttcaccgtgttggccaggatggtcttgatctcttgaccttgtgacccccttgcccatgcctccagctacaaaacaattcaattgcttttttttttgggtccaaaataaaactcagtagctctggcaaaaaatagaaaaaaa

SEQ ID NO: 41899 - DNA, 500 bp, Homo Sapiens
ttgataatctcttgataagctctgttgttgacattttgcagtgatacaacagctccactcatagatttaaacttttatttttacttatcttggtcataagttggcattctctcacattccacatgatatagagggctacgttttggaattttccttttcttaattgcccagagttatcagacagattataaaaatggcttttaatggcttaaaccatttctaaacctctatcttagcagatcaatgcaggatctaattcttttgataagttctagctctaaaagtgatagtgggactgtatgttttctgatactggtggcttatgttattaaaccttttttaaaaaaggttcactctaaaagctgaactacatccttagttttcagtctacttgactctatcaggagctttttaaggaaagtaagtataacatgcaaaggaagctttttttgtattcattttggactcctgtcaataaaaatagaagtttgttgactcgt

SEQ ID NO: 41900 - DNA, 886 bp, Homo Sapiens
  misc_feature (684)..(684): n is a, c, g, or t
  misc_feature (709)..(710): n is a, c, g, or t
  misc_feature (728)..(728): n is a, c, g, or t
  misc_feature (763)..(763): n is a, c, g, or t
ggagaaactacagcatcatggatgctgtggacatggccatcgcatgggaggagctcaaaccagcactaatgaacagcatgtggaagaagatttggcctgagtgtgttcaggcccagcgtttttcccaggcagataacattgcacagcttcaaaaaaacattgtgacccttgccagaaatgtggcctttgaagaggttgctgaggctgctgtggaccagttgctgcagtcccatgaagaagatctctcaaatgaggaactgatgcggctggaacaggagctggcagtgggggaggaggagagggaagatggtccctgggcactgtggcagctaaccacaggaagactgtcggcagccctctcacattttgaggctggcttgtaggtccttgctagtaacagccctaatgatgactggaaactgagaggttccagagaaatcagtgttgcagtaaactgctagcaggagctgtacaatgagaaaaagcgccactcaaaacaactctcttaggtcatttttcaatgtgtgtaaccaaaagttaatcagaataaagcggaagcaccatgatgacctcaacagtggaggcccagccaggcctccctgctctgtggtgttggacatccctggaaaccttgctgttggtatttccattttgatacttgagagcatcaaattttgtcattanaatgttatttaaatattccaaaccnncaaaaccctccccatccncaaaaaagcccctggcgggccgcaaaaaggggccncattgctgacccgccgaactggacattctccggggtaacccaaatggtgcccggaataaaaaaaaactatttgttgcaggccgccctttaaactttattgttaaatgcgggggggtcgggctt

SEQ ID NO: 41901 - DNA, 617 bp, Homo Sapiens
cgtccggattttttcacttttgaatctttacctacttgctttcacattaagaatttgaacttttgagttttttccaggtctatatataatagattacatttattttgtaaagaaaatagtaatttaaagttttgccattttaaggtgacaatatttgggacagtataaatattatagacaagggcccccttgctgtctgctttagcaggtagtgacattaattgacttatagttttgtgtaaatgaacaaactgcttttgacaagaaatttattctgtcctagtttcctgcgtggtaaatcatagaaagattcaagttcatttgggttaaatgtgctaataggatgtagcttttaaattctgctattgagtcagctgtaccttttaatactttaaatgtgttatttgtatggcccttataaaggtgtttgctgtaattctgttaaaagacttcgcctatgccatactggtgtataaaaactgccgcaattggacgccggtgtggtactcatttcagtatacctgaactgtacattttgtgcaatggctttatctaaaagaatgacgcttcgtgaaagcactttgtggccttttttgggggggaggggtgagagagta

SEQ ID NO: 41902 - DNA, 650 bp, Homo Sapiens
ttttttttttttttttttaggttggttttaaatcactaaaaatatttattcggatttgaaggatttaagtgctaaaaatcaatccatttcttgcccttcaataattgtccatgcctgccttttgttgtttacatgctcttctgcccagactgttagtaatctagggaccccctttggagctgataagtacagttcagccttttctcctcaaatatataatgactttaacattcctaagaatataggtatttctgaatgatttaaatttgaggaattttaatacataaaatacaatgtacaaactttctgcccactcagatctcttctccatcatgtacttagtatttcccattaacctacacactgatttttatgctactccttgtagaaacaaaattctggtttgactcagtttttgtgtttataaacttttggaatgtgtaccccgtttatgtgaagaattatgacctatcagtcatagctaaatagtgaacctcaaaagtgttaacttttgactattcatgttaggtttggtatcttgcatttatgtacatggctgtaaattatgtgcatttactctgtatttatgttatctagctgacttttacttgaattgttcaaattttaaaaattaaaataccctccgtgcc

SEQ ID NO: 41903 - DNA, 735 bp, Homo Sapiens
gtgacagcgggcacgtccaacgaggaggaatgctggaacgggcacagcaaagccagatacttgcctgagatcatgaatgatgggctcaccaaccagatcaataatcccgaggtggatgtggacatcactcggcctgacactttcatcagacagcagattatggctctccgtgtgatgaccaacaaactaaaaaacgcctacaatggcaatgatgtcaatttccaggacacaagtgatgaatccagtggctcagggagtggcagtgggtgcatggatgacgtgtgtcccacggagtttgagtttgtcaccacagaggcccccgcagtggatcccgaccggagagaggtggactcttctgcagcccagcgtggccactccctgctctcctggtctctcacctgcattgtcctggcactgcagagactgtgcagataatcttgggtttttggtcagatgaaactgcattttagctatctgaatggccaactcacttcttttcttacactcttggacaatggaccatgccacaaaaacttaccgttttctatgagaagagagcagtaatgcaatctgcctccctttttgttttcccaaagagtaccgggtgccagactgaactgcttcctctttccttcagctatctgtggggaccttgtttattctagagagaattcttactcaaatttttcgtaccaggagattttcttaccttcatttgcttttatgctgcagaag

SEQ ID NO: 41904 - DNA, 683 bp, Homo Sapiens
tgctccggagaccacagcagtcagtgctgaaaccgggccagaggtcacagatgcagcggcgagggaaaccacggaagtaaaccctgaaacaaccccagaggttacaaatgctgccctggatgaagctgtcaccatcgataatgataaagatacaacaaagaacgaaaccctctgatggatttttgcgggaactagaagaggaaatttttccagtcggagtcagagtcctctgcgtggagatgatttacaggaggaagccagtgtggctctgaggctgcttcggctcaaggctaatctccagccggtagacatttcagcaacaaatgccatagggtgtctgataagtgctttgtgtttttagtacacttagtttaaaaaaaaaagacttattttctagaaaacgttaatgggtcttgaagattttgggcatccactgatagattttaggactgagagacttgagattgtacatttcttactactcttctactgtctgagatcagaatatgacattgcagtaaagagcttacatagtttcatctttggtttttatttctagacacttttcttatatcccagtcatctctgaatttacattttatattaaagaaattgagctatccatacaaccgtgtatttactttaatttcactatgctttcagcttactttatggtagtgata

SEQ ID NO: 41905 - DNA, 738 bp, Homo Sapiens
gacccacgctgtcgtggaccacagagtttaggaagttcagaagaatgcttgtggtgcccttcgaaacctcgtttttggcaagtctacagatgaaaataaaatagcaatgaagaatgttggtgggatacctgccttgttgcgactgttgagaaaatctattgatgcagaagtaagggagcttgttacaggagttctttggaatttatcctcatgtgatgctgtaaaaatgacaatcattcgagatgctctctcaaccttaacaaacactgtgattgttccacattctggatggaataactcttcttttgatgatgatcataaaattaaatttcagacttcactagttctgcgtaacacgacaggttgcctaaggaacctcagctccgcgggggaagaagctcggaagcaaatgcggtcctgcgaggggctggtagactcactgttgtatgtgatccacacgtgtgtgaacacatccgattacgacagcaagacggtggagaactgcgtgtgcaccctgaggaacctgtcctatcggctggagctggaggtgccccaggcccggttactgggactgaacgaattggatagacttactaggaaaagagtctcgcaggcaaagactctgagccaagttgctgggggaagaagaagaaaaaggaagaagacgactccgcaagaagatccatgggatggcgttggtcctataccaagactgtcgaagtccccaaggggtagaga

SEQ ID NO: 41906 - DNA, 680 bp, Homo Sapiens
tggaccggtccggaattctccggataatgaagtgtgttttttttttcttttttgaggaattatcagggaagtgaggaaatgtttgggagaggactttctaagctctatttaggtgttagatctaattacttatagattctgtagtctggtgaaggtgtgggtgacgtgatgagaggtttgagaaatgggtgaaatgaaatgggggatatgtaggtcaaatcaaattaaagatgatttttttaatgtgaataaagttatgttctgatagtttgtacagaaaaaataaaatggatgcccatgttttattgctattactaaatgtcaagattgtatgctattatgtcttgtaaatttcttttgttggtgtaaatatggaaatgccacattggttaagtgccatcatttgtaatgcaatgtgtcacttgaaaagagatttgaagaaactgacaacttcaaaaacaaatgagaagcccaaggaactgtgagcaattaaaagcaaaccgcgacaccctttgtctccaccacacatagtgtactttggaagcacaacgtccaggctggtaccgcagcgccatgcccattcctcgcctcgttcataggacacttcactgccattttctattcacataaaagaaaaataaatgtggaaatttcaaaaaaaaaaaaaaaaaaaaaaaagg

SEQ ID NO: 41907 - DNA, 794 bp, Homo Sapiens
ctctgaaagtggtgaaggcagcagcccaggtcttgaatacattatggcaatatcgggacctccggagcatttataaaaaggatgggtggaatcagaaccattttattacacctgtgtcgacattggagcgagaccgattcaaatcacatccttccttgtctaccaccaaccaacagatgtcacccatcattcagtcaggctccagcaaaccttcaccaatttacatcagttcctattcctcaccagcaagagaacaaaatagacggctacagcatcaacagctgtattatagtcaagatgactccaacagaaagaactttgatgcatacagattgtatttgcagtctcctcatagctatgaagatccttattttgatgaccgagttcactttccagcttctactgattactcaacacagtatggactgaaatcgaccacaaattatgtagacttttattccactaaacgaccttcttatagagcagaacagtacccagggtccccagactcatgggtgtagcatcaagatgcccaacagaggaactctttctttctaaccttgttcagattgaggtgaaaagtccatcttgctgatttgatgattgaaatgtgaaagtgaagtggaaggaatgaatgcaagtgtgtctttttttcttttttgaggaattatcagggaagtgaggaaatgtttgggaagaggactttctaagctctatttaggtgttagatctaattacttatagattctgtagtctgggtgaaggtgtgggtgacgtgatgagaggttgagaca

SEQ ID NO: 41908 - DNA, 651 bp, Homo Sapiens
  misc_feature (567)..(567): n is a, c, g, or t
gccccacccccaccacctgtccccacccagtgtcccaggccacaggagcttattggccaggagggaataatgtcccccaatactgcctgttgagggaccagagttggggtctttggtgcttccaacctcctgccaacctggagttcacaacaccagagccccacggcctcgcacactgaagcaggggcgtgcggtgactcggtgcttctgttttggaagaaccacctgtcatcaaaacatggacagcagggtgttctcagctcccagcgaagcctccacaacagaatggggccacagggcagccgggactccctgtctcacctacattaacccatgcatactgtatgccataaactcactttggtatatccgcgtcacatgcagagaggaactctgcgacgtcaaagtgttgcttcttaaagtttcattattggcaactagagggttgtttttaatgcatggaaactaaacagattcctcggggagttcctgaaggaaccaggtgggcaaacctttgcttatatacatgcggcctcacctggaagagaaataaaccacttgtactanaaaaaaaaaaaaaaacccgtggtgaacggacccgtcgccatgggccgggtgaccggggccagaagaagggccgggtctggtccg

SEQ ID NO: 41909 - DNA, 691 bp, Homo Sapiens
cccacgcgtccgggcggatagcttgagctcagggggccaaggctgctggggggactccgtactcctcgtggacttaacacacgaggagatgccacagagcatcgtggaggccacctctaggcttaagaccttcaacttgatcccggctgttggtgagcaaagagcccaggcccctagagtgcgcatgtgcaggctccgctgttagaatcacagcggttcaaatccggcatctggtcgctgagtggcctcaggcagtgaccacgctcccggacccaaccttcagcttgcccaaagcaataatctttcctaaagaagtgcttggctggggatggtggctcacgcttgtaatcccagtactttgggaggccaaggcagtctgggcaatatagtgaggctcccatctgtactaaaaataaaaaagttaggcgtggcgatgtgcacctgtagtcccagctactcgggggctgagccaggcggatagcttgagctcagggggccaaggctgcagtgagtcatgatcgcaccactgcacccaaacctggggagagagctagactcttgtctcaaaaaaaaaaaaaaaaaaaaaaaaagggctccaaagtcacctctgtcaaagccacagtctgttccttccacagccacaagatggcgacatgagcctaagtcaagtcctgtccctcaacccacgccc

SEQ ID NO: 41910 - DNA, 578 bp, Homo Sapiens
gcggctccgggctacctgccatgtggttagcgactcatgggactcatcccaggccttcgcagattatgttagcaccatgtgatggggcccgtacctcacagtctcatgctcggtaccatcagcttgcaggggctgaagcatgggctgcccagaaccccaaccaccagttctatctttctctttctgtcaccttttttctcttttttccttcttcccttgcactgaggtcctggaggccttgatgaggcccagcaaacaggcattctcacagctgggtttatagtcttgggccccttactcagtatcctgggaaccctgggccaggaggttacagtggtcatcataattgctgaagagatcccctcccctgcccctgggttcctgccttccctcctcaagcaggcacccaggctttagagaagtatagggggcttcttccctgctggcttaccacactgctctcaggcctcaaaccctttcatacctttattcttttttttaaccaaaaaagtttttcttataaaataaattttgggcaaacaaaaaaaaaaaaaaaaaaaaaaaaaaaaaaaaaaagg

SEQ ID NO: 41911 - DNA, 480 bp, Homo Sapiens
atcgttgggccctgtggttgcaaagctgcctcctgaattaagaaggaaagggaaaagatatagctggaagcgagtggaagagatgctgagggctggggctgcacagacgtgctcagcagggctacaggtgctcaagccctattggggatgggtggggagtggggcagcggcgtttgccaccttaagaattggggccaaagccactgatgtttatttgacagtgacactgcactgggtacttaaagaaattatttcccgttgtaattataattactgcttattaaggaaaatatgggaattttagaaagaatcaagtttgccacccaaatgctaccactgttaatcttttggtgttaaatgttccccctagacatttctgtgcatagatttttggtgtgtttacatagtcgttattctgtatatacaattttatgtcccttttgtacttaacgtataaacattttttccatgaaaaaaaaa

SEQ ID NO: 41912 - DNA, 848 bp, Homo Sapiens
aaagatctttgactgggtagaggctaatctagacgaaatccagatgagttcacctacattccttagagctttaatgactgctgtttgtaaagcagctattatagccgactcttctaccttcagagtggacactgctgttatcaagcagagagtgccgatcttactcaagtacctagactcagatacagagaaggaactgcaagcactttatgcactacaagcatcgatagtaaaacttgatcaacctgccaatttgctgcggatgttttttgattgtctatatgacgaggaggtgatctccgaggatgccttctacaaatgggagagcagcaaggaccctgcagagcagaatgggaagggcgtggctctgaaatctgtcacggcattcttcacgtggctgcgggaagcagaagaggagtctgaggataactaaaacttcaaatacacaaaatgaaacaaaagaaacaatttaagtatttttttaaaaagtttcacgtcttcgccaatcacagtgcagcaaggccaattctcgcagaaacccccacgtgtgcacgagtgggagaggggaaagagaaaaaaaggtgatcatggaggaaaaaggtactggataaaagtaaacttcaaaccttagggcgggagcactaaaaccaaaatacatgtattatttatagaaaatattttctgttttaatcttttctttttaaacaaggactcatacttaaaaaaaatgtttagcaaaaaaaaaaaaaagtttgagaactttttaaatttatttttaaaggacttgcaaatgcccagttgtaaatttttttaaatttggcaggttttcttgttaaaacaaaccttgt

SEQ ID NO: 41913 - DNA, 607 bp, Homo Sapiens
ccgcgtaaatccgtacatctattgtttctctttgtaggatctgtatgattttatctacttaacagatagcactaattagattaaaattctataagaaactttttaatttgctgtcataatttctgattggtatgcaataactgtttcaatgaaaatcactgtaatttagtattttaatatttgcacctttgtgaaatatagtaaataaattaagcactatcaccaccttcacagctacttaggagatccacaatcctgggttgggagccagtggatttcctgaaacacagatttgttaatgcgtttataaaatactgatgaaatgatattagtaatgtgcagtgaccatcattgactttcatgatacaattaagtttacataatttttatacttttatatatcattttaattcaatcctgtgtatttattccttcttctgtaatgaccaggaaatcaaaatgttaatgacaccattccttaagtttttcttgttaatttttgaataggcgatacaatcatatgattcaaaatttaaaaaaatattaagacgcataccataaaaaaacaaaaatgcctctaactctctctgacccatagcccccaaaa

SEQ ID NO: 41914 - DNA, 843 bp, Homo Sapiens
  misc_feature (798)..(799): n is a, c, g, or t
  misc_feature (841)..(841): n is a, c, g, or t
taaaattcaatacacaaaatgaacaaaaaaaacatttaagtatttttttaaaaagtttcacgtcttcgccaatcacagtgcagcaaggccaattctcgcagaaacccccacgtgtgcacgagtgggagaggggaaagagaaaaaaaggtgatcatggaggaaaaaggtactggataaaagtaaacttcaaaccttagggcgggagcactaaaaccaaaatacatgtattatttatagaaaatattttctgttttaatcttttctttttaaacaaggactcatacttaaaaaaatgtttagcaaaaaaaaaaaaaagttgagaacttttaatttattttaaggactgcaaatgccagtgtaattttttaatttgcagtttctgtaaacaacttgtataatagaaaagcagagaaataaatttccctccccttcaagatgcacctcatgtttgttttaaggtatagcatttagtccagatttgagaaagtttggggtgaacaaggtaagaaagatttttttttttttggcatcaaatctttctgcctgcctctcagcttgcttcagaaaatttaaaaaatcacaatagtaatcaaaacatacataacattgaaacagaaggaaatgctgtggaccacagaactccaagaattgtttaaaaaaaaaaaaagtgctaccctgagaaaagtactcttaatactcttgaaatctttagagcaactttaaggcttgtaaatacatagaacaaatatttaaaaaaacaaaaagaaattgactcagtactatttcttttcactttgnnaaattaagaaacaaataagacaaacattgcaagtttaaaaanaa

SEQ ID NO: 41915 - DNA, 516 bp, Homo Sapiens
gctgtgtgccttcggcatgagctccctgccctacatgaagatgatctttcccctcatcatgatcgccatgatccccatccgctatatcctgctgccccgaatcattgaagccaagtacttggatgtcatggacgctgagcacaggccttgactggcagaccctgcccacgccccattcgccagccctccacgtcctcccaggctggctctggagctgtgaggggaggtgtaggtgtgtgggtgactgctctgtgctgcgccttctcatggctgactcaggcctggggcatctgggcattgtaggggtgcagtggtatgtgcccacccctctcccattatcctttagctttaggccaagagcgttgctcagggcagcttctgcccagggtgggtgggactgagcaggatggattttcttttgataaaagagtcgatgcctgaaagagaaaccatttccttgattgtgtaaggaacttgctggacgcacattagagaataaagctcctgtttctagca

SEQ ID NO: 41916 - DNA, 688 bp, Homo Sapiens
tgagaagttacagttcatctcccctgttcagatgaaacccttgttttcaaaatggttacagtttcgtttttcctcccatggttcacttggctctgaacctacagtctcaaagattgagaaaagattttgcagttaattaggatttgcattttaagtagttaggaactgcccaggttttttttgttttttaagcattgatttaaaagatgcacggaaagttatcttacagcaaactgtagtttgcctccaagacaccattgtctccctttaatcttctcttttgtatacatttgttacccatggtgttctttgttccttttcataagctaataccactgtagggattttgttttgaacgcatattgacagcacgctttacttagtagccggttcccatttgccatacaatgtaggttctgcttaatgtaacttcttttttgcttaagcatttgcatgactattagtgcttcaaagtcaatttttaaaaatgcacaagttataaatacagaagaaagagcaacccaccaaacctaacaaggacccccgaacactttcatactaagactgtaagtagatctcagttctgcgtttattgtaagttgataaaaacatctggaagaaaatgactaaaactgtttgcatctttgtatgtatttattacttgatgtaataaagcttattttcatta

SEQ ID NO: 41917 - DNA, 572 bp, Homo Sapiens
  misc_feature (504)..(504): n is a, c, g, or t
cacgaggcacaacgacactggatttatcctataacctcctttttcaactccagagttcagattttcattctgtctccaaactgagagttttgattctatgccataacagaattcaacagctggatctcaaaacctttgaattcaacaaggagttaagatatttagatttgtctaataacagactgaagagtgtaacttggtatttactggcaggtctcaggtatttagatctttcttttaatgactttgacaccatgcctatctgtgaggaagctggcaacatgtcacacctggaaatcctaggtttgagtggggcaaaaatacaaaaatcagatttccagaaaattgctcatctgcatctaaatactgtcttcttaggattcagaactcttcctcattatgaagaaggtagcctgcccatcttaaacacaacaaaactgcacattgttttaccaatggacacaaatttctgggttcttttgcgtgatggaatcaagacttcanaaatattagaaatgacaaatatagatggcaaaagccaattttgtagttatgaaatgcaacgaaatctt

SEQ ID NO: 41918 - DNA, 715 bp, Homo Sapiens
cccacgcgtccgcccacgcgtccgcagcaagtgaaacaaagttaatgtgacaagctttgctttgttatcattggtcttcactagaggataccttttacatgtacttctctcttggatcaaatatgtctttaactgtacatctcagtggctggaggccatgccttttaagcatgtgtaaaatttttaaagaaatgaacatacacatagttattttagtaatatttcctgaaagaaaaaccaaattctgctataagtcttgatcttcaatgaacttttaaataatgcatttagctggaaaacaagactttcccagcttgtattacctagaagcgtgaatgtataggatacctgactactaagactatattctcagccctgccctgtcttttatttgcgggtctaatctaatattagaatatattaaccgcttaaggcattgaagccatatgggatggggaatgcatttcttcagtgtttctccgagagactttccatttccttggagttatggcggcaagtaagtatcatagtattaagaaatttgcctaaatctgagttgtgcctttctttactcacaaggcatgggctttgtcctggtgatcagtttgtaagccttcttccttcccagctccttaataaaagcaaagtgattagagtaggtaatgttcaaagtgtctgcctgtgtacatgtacttgtattgattatgtagttcag

SEQ ID NO: 41919 - DNA, 548 bp, Homo Sapiens
cacgaggttatttcatacagtgaacatgattctctgtgggtgaagaatgaattgatccccaatctagagaaggaagatggttctatcttgatttgcctttatgaaagctactttgaccctggcaaaagcattagtgaaaatattgtaagcttcattgagaaaagctataagtccatctttgttttgtctcccaactttgtccagaatgagtggtgccattatgaattctactttgcccaccacaatctcttccatgaaaattctgatcatataattcttatcttactggaacccattccattctattgcattcccaccaggtatcataaactgaaagctctcctggaaaaaaaagcatacttggaatggcccaaggataggcgtaaatgtgggcttttctgggcaaaccttcgagctgctattaatgttaatgtattagccaccagagaaatgtatgaactgcagacattcacagagttaaatgaagagtctcgaggttctacaatctctctgatgagaacagattgtctataaaatcccacagtcct

SEQ ID NO: 41920 - DNA, 585 bp, Homo Sapiens
cagctgaacttggatttctagttcatgaagaaatctctcccaatacccatttatcctatttttagcaataattcgttaatgattccacttgattttcagaatattgtcctggttgattttgatttgacagcatacattatgaaatttgaaagtaggttaccattttgaggcagttggatataaattatgtaaatatgtatgattatgatttttataaatggcataacatgagtgtactaactaccttctatgctggccatgctacagattttctggaggtatgacaatagtatttttttatgctcagattaaaaatcagcttttcacctctccagtttttccaagtgatactcccagttctagagcaatctacagctgtttatgtgaggtgcccaacacccattcatctcaagtgcttcagtctttggtttatttcatgcactgtgccttcaaaatgaaatttttaaaagggactttaaatgaagttgaatagtagtttttaaaagtcaatttgtaatttatgtgaaatctaactgtaatgaggtcctttctgttttttatatgtaaacagatctactaatcctg

SEQ ID NO: 41921 - DNA, 608 bp, Homo Sapiens
cttagcgccaggtgtccataacattattgccatcgctgatgggtaccagcaacaacattcacaggtctttgtgcatcatgatgcagctagttctgtggtgatagtctttgacacagataaccggatatttggtttgccaagggagcttgtggtaactgtatcaggtgctactatgtcggcattgatcctaacagcttgcattatttggtgcatctgctcaatcaagtctaatagacacaaggatggctttcatcggctcaggcagcatcatgatgagtatgaagatgaaattcgcatgatgtctaccggctccaagaagtccctcctaagccatgagttccaggatgaaacagacactgaagaggaaacattatattctagcaaacattgaaaaacacattttgcatatctcccagcataagtaccaagcaaaattacagttcctcttgggagaacactgcattaagaagagagactctcttgcttcttcaaagagctttgggaaattaaattgctaaatttgtattctctgtgaatttcactggcagttttgaacttcccttccttaaagtactctaaacctttaaaaaaaaaaaaaaaaaaaggac

SEQ ID NO: 41922 - DNA, 795 bp, Homo Sapiens
  misc_feature (745)..(745): n is a, c, g, or t
  misc_feature (764)..(764): n is a, c, g, or t
  misc_feature (776)..(776): n is a, c, g, or t
ttaacctgtatttgaacacaaaatatctatacttcatgctccagcccaagcctataccctgtaatagcatactattattgaaatcgcttgaccggtcttgttcacataggcctctgggagtgatttggttctttgccctaatgtttcatttgacggtctctttttgatcaaccaatttttctaaaagttcagtcgaaagcttttaagtatagcttcctcccttgaaaaaaaatgtaaactatgactgctgagtgataaaacactgtggtgtgaaagtgtcatcttcactgccaatcaggcaaagaccggaaagatttgcattttattatgtctgtcttatcatgcaatggaaatgatgctttttgtaagtatgcatcttaccaatgatgtaacggtttaatacctttgaatgttttaataaccaagttgctgctgaacttatactaaatcaggggaccaaaaaacttgctcttatcttctcaaattgtattctatatccattaatgtatcagttatcccaaagccttcaggtggaggggtttaccaccttcctaggtcgttcaaccaggttttgtaaggaatgcattcaaagtggctttataaaagaagattttctttagcaagaataatgaggtcatgtcatttgttaataagtatctgtgataaatccgtggttcaaggttaagccattctggtattctggtattagcaactggaaattctgcccctcatacatggaacagancttgtgggatgctaatagntagtgaagtatnctggattaaattctaataa

SEQ ID NO: 41923 - DNA, 663 bp, Homo Sapiens
  misc_feature (590)..(590): n is a, c, g, or t
cggctgtatgatttgtttttgtatttttaatgggggtagcagctggactacccacgttctcacacccaccgtccgccctgctcctccctggctgccctggccctgaggtgtgggggctgcagcatgttgctgaggagtgaggaatagttgagccccaagtcctgaagaggcgggccagccaggcgggctcaaggaaagggggtcccagtgggaggggcaggctgacatctgtgtttcaagtggggctcgccatgccgggggttcataggtcactggctctccaagtgccagaggtgggcaggtggtggcactgagcccccccaacactgtgccctggtggagaaagcactgacctgtcatgcccccctcaaacctcctcttctgacgtgccttttgcacccctcccattaggacaatcagtcccctcccatctgggagtccccttttcttttctaccctagccattcctggtacccagccatctgcccaggggtgccccctcctctcccatccccctgccctcgtggccagcccggctggttttgtaagatactgggttggtgcacagtgatttttttcttgtaatttanacaggcccagcattgctggttctatttaatggacatgagataatgttagaggttttacagtgatcctcgtgcc

SEQ ID NO: 41924 - DNA, 826 bp, Homo Sapiens
cgggatcagaggtggagcaggccgtctggctagctaggcggctgggagcgttttcgtggcggggaacggaggttgaattgccctgcctgggctcatagggaaggaggatgtgaaggagcttgtgaaggcagaggaagattattgaataataaaatacagttttgaaaaaaatggatgaagaacctgaaagaactaagcgatgggaaggaggctatgaaagaacatgggagattcttaaagaagatgaatctggatcacttaaagctacaatagaagacattctattcaaggcaaagagaaaaagagtatttgagcaccatggacaagttcgacttggaatgatgcgccacctttatgtggtagtagatggatcaagaacaatggaagaccaagatttaaagcctaatagactgacgtgtactttaaagttgttggaatactttgtagaggaatattttgatcaaaatcctattagtcagattggaataattgtaactaagagtaaaagagctgaaaaattgactgaactttcaggaaacccaagaaaacatataacgtctttgaagaaagctgtggatatgacctgccatggagagccatctctttataattccctaagcatagctatgcagactctaaaacacatgcctggacatacaagtcgagaagtactaatcatctttagcagccttacaacttgcgatccatctaatatttatgatctaatcaagaccctaaaggcagctaaaattagagtatctgttattggattgtctgcaaaagttcgcgtttgcactgtacttgctcgtgaaactggtggcacgta

SEQ ID NO: 41925 - DNA, 592 bp, Homo Sapiens
aacggaagagaacagtcactgtgatgctaacacagagatgcagcagattctcacacgagttcggcagaactttggtaaaatcaacgtggtgcctcagttttctggggatgacctggttcctgtggaggtgtcagatcttgaggaagagcttgagagcttttctgatgaagaggaggaggaacaggagcaacaaagagatgatgcggaagagtcttcctcggagcctgaggaggaaaatgtgggaaacgacaccaaagccgttattaaagcactggatgagaagattgccaaatatcagaagtttctagacaaagccaaagccaaaaagttttcagcagtcagaatatccaagggactgagtgaaaagatatttgcaaaacctgaagaacaaagaaaaacactggaagaagatgtagatgacagagcaccttccaaaaagggaaagaagcggaaggcacaaagggaagaggaacaggaacattcaaataaagctcccagggcgcttacatcaaaagaacggaggcgagcagtacgacagcaacggccgaaaaaagttggtgtgcgctactatgaaacacacaacgtgaaaaat

SEQ ID NO: 41926 - DNA, 621 bp, Homo Sapiens
cgcgtccgaatttttaaggtggtagtataaatggaaactttttgaagtagaccagatatgggctacttgtgactagacttttaaactttgctctttcaagcagaagcctggtttctgggagaacactgcacagcgatttctttcccaggatttacacaactttaaagggaagataaatgaacatcagatttctaggtatagaactatgttattgaaaggaaaaggaaaactggtgtttgtttcttagactcatgaaataaaaaattatgaaggcaatgaaaaataaattgaaaattaaagtcagatgagaataggaataatactttgccacttctgcattatttagaaacatacgttattgtacatttgtaaaccatttactgtctgggcaatagtgactccgtttaataaaagcttccgtagtgcattggtatggattaaatgcataaaatattcttagactcgatgctgtataaaatattatgggaaaaaaagaaaatacgttattttgcctctaaacttttattgaagttttatttggcaggaaaaaaaattgaatcttggtcaacatttaaaccaaagtaaaaggggaaaaaccaaagttatttgttttgcatggct

SEQ ID NO: 41927 - DNA, 526 bp, Homo Sapiens
aaaattacttccatataaatattattttctcttttggtgtgggagatcaaaggtttaaagtctaacttctaagatatatttgcagaaagaagcaacatgacaatagagagagttatgctacaattatttcttggtttccacttgcaatggttaattaagtccaaaaacagctgtcagaacctcgagagcagaacatgagaaactcagagctctggaccgaaagcagaaagtttgccgggaaaaaaaaagacaacattattaccatcgattcagtgcctggataaagaggaaagcttacttgtttaatggcagccacatgcacgaagatgctaagaagaaaaagaattccaaatcctcaacttttgaggtttcggctctccaatttaactctttggcaacaggaaacaggttttgcaagttcaaggttcactccctatatgtgattataggaattgtttgtggaaatggattaacatacccgtctatgcctaaaagataataaaactgaaatatgtcttcacaggtc

SEQ ID NO: 41928 - DNA, 533 bp, Homo Sapiens
ttgcaagtaccttttgagtgaagaagaggaccacttcagtgaggaacagtacttggctgcagtcagaaaattcacaagtcagcttctcgatcaaggtacctctcaatgttatgatgtattatcttctgatgtgcagaaaaacgccttagcagcctgtgtgaggctcggagtagtggagaagaagaagataaataataactgtatatttaatgtgaatgaacctgccacaaccaaattagaagaaatgcttggttgtaagacaccaataggaaaaccagccactgcaaaactttaataatcaacaaatagttatggaaaattcggtcacgtaattactctcatcgaaggactcattacaacaaacagggaagtaaaggaagagacacatcctctcatactccctgagactctgagaacagtggacgcagagggaagagatgatcattggaagcaatcagtttactcttccccaccacagtggttaaaaggcgtttgtatctgacactatgtgtgtgttttaaaataaacttttg

SEQ ID NO: 41929 - DNA, 817 bp, Homo Sapiens
  misc_feature (677)..(677): n is a, c, g, or t
agcgtcccctttagattgactctcgcctaaatatctgtgcctttgcctgccctttctcccactctactgaaacccggaacagattcccgcttgccttctgatgaagagaggttaggtaaagagagtttggaggaaaaaagacaccaggaggcaggctgtggggtaggagagggttctgagaggaggcagcaatccagaatacctccttttctagccagcatcccttgaacttttgaaaggttgtgcctaccactggctggcacaccagggcaatgatttccctgcagaaggaaggaaagaatgtttcacccttgcatccttcttggagaagctacagcctgtgctcagttgagtggttcacactcagactttggctttatggttttccttcctccttgtctttgccctgaccttgatcaacaggggtgaaaagaaccaccctgaggtttccatgcctctcccattttagtggtagcattttgtgtctttactccacccttcaccctagttccaccaaggttcacacaccagatgtaactgtttttcagctgagttgtatggattaacttcagtccactgtaaatacacctgggatggggtggggttggggttgtttagggagaagcagccagacttgctttgtgaactgaatgtatttttatgcaattttgagtggnctttcaaccctaagatgaatggttttgttttactggttgttgttatatagttttgagtattctgtgtttgaaagtttgggaataataatattcacttctatatgatgcctgtaaacacaacagtatttataaatgagtaa

SEQ ID NO: 41930 - DNA, 670 bp, Homo Sapiens
  misc_feature (551)..(551): n is a, c, g, or t
  misc_feature (639)..(639): n is a, c, g, or t
agagggactggagcaggccgtgcggtatgccaaagccctgggctgtcccaggatccacctgatggctggccgagtaccccagggagctgatcgaatagcagtcaaggctgagatggaggccgtttttctggagaacctgaggcatgcagctggggttttggctcaggaggacctcgtgggactgctggagcccatcaacacccgcatcactgatccccagtacttcctggacacgccccagcaggcggcagccatcttacagaaggtaggaagacccaacctccaattacaaatggacatattccactggcagatcatggatgggaacctgacaggaaacatccgggagttcctgcccattgttgggcatgtgcaggtggcacaggtcccaggccgaggggagcccagcagccccggagagctgaatttcccctatctgtttcaactgctggaagatgaaggctacaaaggcttcgtgggctgtgagtatcagcctcgaggagacacagtagagggcttgagttggctacgttcatactgggataggcggngccacccagaggctggccagtgagggcccgcacaccacccacgtgcctccagacagcgagtgacatcccatctcctcctctgcattanagatgacctgctgaaaaaaaaaaaaaaaaaa

SEQ ID NO: 41931 - DNA, 908 bp, Homo Sapiens
cagatttatgaggaaagaaagggacagcatttgctgcccccacccctcttttccagtccttgccttccaaccaaaagaaatggatgttttggtggaaggacacttctttctatcaccctcttcagtcacctctatacactctacattttctctgcactttcaatgccctgttcttccaaacccctatcccaagttttatgacagttttaattgaagcatgattgtggtaattcgagccatctggagaatgctctggggagtacaccaggctcagctgtggacccctcaacttcctgctgctcagctactttgtccacattggatttggtccaaacatgtaagacttctaccctaatcagtatccttcagctttttacattaacccagtgtcctctgatataggtgagtcttgtggtagccactccaggatcctgattggggtgccaagagaaacagcaggatgttgaattgatcatcagatgccctctggaatggttagcatccaaggtgacagtgactgcattgaggcgctctattcttcttcacctctcaggaactgacttttattttttctatcaacacccagtaatctccctaactagttttaacccttattcctccctcatacctagccatttctccaaagcgcaaatgggcctggcttcatttattccttttcctttccatccttttatatttttccccttcccaacccctcactcaatgggtataaagctaggaacgagcacctgaacctcagttgtctttgggcatttgtgggaaatcattaattctggagaaaaaaaaatcctcctctggtgcccttggggggaacaccactgcctggctcccttgaaaggagactatgggcataaggggcaactccattgtttttcgcctcccacttt

SEQ ID NO: 41932 - DNA, 913 bp, Homo Sapiens
gaccccagatgtaaccagctcagctctccctagcctgctctctaggtttttcaatacatttcttgaatggctacccaaaagctgaccgtccagcccctgaccacacttgttcctagtgcagggagctcagacagggccttccatctagagcccagcacctagagccaggctgcccagattcaaatcctgactccgccacttttcccactgtatgatcttgggcaagtcacttcacctctctgtgccttggtttcctcatttataaaatgtggataacaggccgggcgcagtggctcacgcctgtaatcccagcactttgggaggccgaggcaggtggatcacaggatcaggagattgagaccatcctggctaacatggtgaaaccccatctctgctgaaaatacaaaaaattagccgggtgtggtggtgggcacctgcagtcccagctacttgggaggctgaggcgggagaatggcgtgaaactgggaggcagagcttgcagtgagccgagatagcgccactgcactccagcctgggccacagagcgagactccgtctcaacaatacaatataattacttaattatttacttaaacaacatcaaaacaatccatgtggattaatactagtacctccctcttaaggtccggctggagcctacggtgacatctccaggggcacgaatttacgaggccaccaaaaaagctcagcaaccacgcatacgaactatttcccagcacaacatcaccctcatcacacagccaacacagccacacgacaaaccaacacgacaggccacacaagagacacacatgacaatcacaacacagtctagaacacaaagacaatccaggatcacacacacaccgcccacgacacgctatcgcgtcgcaccagcacctctagtcatggc

SEQ ID NO: 41933 - DNA, 596 bp, Homo Sapiens
cagaaagcacaaagagattcaatttccctggaggatcaggacagaggaaggaatctctaatcgtccctctcctccaaaaccagggaatcagagcagtcaggcctgttgactctaagcagcagacatcctgaagaaatggtaagggtggagccaaatctctagaaataagtagtgaggccgttaattggccatcactgatggcccttagggaaagactggacctctgtgccaagcagtatccctgttcagcccaccttaaaggtgtaggcacccactgggtctaccagtatgcaggttgggatactgaaaatttccagatgagctcttctttcctacaagttttcataattagggaatgccagggtttagggtaggggttaatctgttgggggttgatgtgtttagcaagaagctactcctagcttttgctaaaatatggttggcactgcctcttgtggcacaggccataattgttccatagacccctctctagccctgtgactgtagttagttactttgataattttctttggccattgtttgtttatatttcacaaactccacctactgcccccccccctcttttttttaagaat

SEQ ID NO: 41934 - DNA, 1092 bp, Homo Sapiens
  misc_feature (24)..(24): n is a, c, g, or t
gcctggggtgggcgctttaatatnaggaagagccaagggagtcctcggctgaacttacgatatctgccccaaacctctgtaaccccaactgaaatgaggagcttcctctcttcctgtgaaggatatgacagtccagcatcgatgcctgtgccctctggaaaaatttcctcctagcccttccagggccttatcataaaactctggatttagagtattcattttgaaggcaactcccccttccccaagtttccttggagctgtatagctgggttctaagcttcaccatgcaaatcagaaattttatctctaagtacaggctgtgccgtgtctcacccacacccccctggggacttcagttccatttcaggttacctggggtataccttgatccctagagtgactggcagagtaagagaaggggagagataataggtgtgattattttaatatggaggtgggagtgtggttggagatagaaaggctcctccccaccatgtaatggcttcctctcagaattttattccaggctagcttgctgcaggtctgggtagatggatcatggctccactgggattggggtggaaagcttgaggggagtagggttccagctctgggacattgtgctcaggaatttgaaaacgctgctatacttactctggttactacatttcttccactcccctttcccctacctgccttaaccaaggctcatactgtcctgtccttaccctcagatggagccaggaagctcagtgaaaggcttccctaccctttgcactagtgtctctgcaggttgctggttgtgttgaatgtgctgttccatggtgttgactgcactaataataaaccttttactccactctctaaaaaaaaaaaaaaaaaactccagggaatctatgtccgggtgccggaaaaggaggtaatgaaagggcaccatggtccataacttggtttcctgacccccccttttcttggtacaaaagtggtaaaaatctggccgggcctccccatataggggaagcccctattaaattttcacaaaaacccagggtttaaacccctggacttaaagtgaatctcggcctgccccaa

SEQ ID NO: 41935 - DNA, 567 bp, Homo Sapiens
  misc_feature (551)..(551): n is a, c, g, or t
caaaaaataaactctcaggcaagcatttctttaaagctattaagggagtatatacttgagtacttattgaaatggacagtaataagcaaatgttcttataatgctacctgatttctatgaaatgtgtttgacaagccaaaattctaggatgtagaaatctggaaagttcatttcctgggattcacttctccagggattttttaaagttaatttgggaaattaacagcagttcactttattgtgagtctttgccacatttgactgaattgagctgtcatttgtacatttaaagcagctgttttggggtctgtgagagtacatgtattatatacaagcacaacagggcttgcactaaagaattgtcattgtaataacactacttggtagcctaacttcatatatgtattcttaattgcacaaaaagtcaataatttgtcaccttggggttttgaatgtttgctttaagtgttggctatttctatgttttataaaccaaaacaaaatttccaaaaacaatgaaggaaaccaaaataaatatttctgcatttcangtgaaaaaaaaaaaaa

SEQ ID NO: 41936 - DNA, 677 bp, Homo Sapiens
agcctgtgtcctgtgacggcctttcacagcggaatgcagttgtacctcacattacttttgaaacttcactcgttccagttggtacaagtatttgccaaagccatttcctatgttcaccgtggcccctcctgatgtggctgtcagcgcagcgttgttgaacagggctattctttttacaaggtgtgaagtgtggctcttcgcttcgtctttgccatggcattaaaagaaagttccctgtcttctttcaatattagttatttcaaatgaatatgtgctacttaaaagcttgttttgtttctttgtatataatttgccttggatttattgtgcacagtttgttgagttgtatgtttttgtgaattatcaggagtaaatttgacaagtacatgtgaataacctcctgtaaatgaattttataacaaaaatgtactgaactattttttaaagttgtgcagattagcaattttttgctatagctttgacttttctatgctgtgaattaatagctgcgatttggcaaacagccctgttgtctttgttaaaccctaaattttaagaggaaatggcagaattaaaagcagaaacaagaagatggaccatggattagaggttatgtattcatgaagtaaactacaagggtactaacatcaagaaacacaccccaaacaaaccaaact

SEQ ID NO: 41937 - DNA, 584 bp, Homo Sapiens
cctcccgtgcggggcgaacctccagctgccagtcccgaggcttccacgtgtcagagcaaatgtgatgacccggaagaggagctctgtcacaggagagaggccagggctttcagtgaaggggagcaggagaagtgtggttccgagacccatcacaccaggaggaactctaggtgggacaagaggacactggagcaggaggacagcagttccaagaaaagaaagcttttataggaaagcccagtgacatgggccagcagccacagcatattgtaaactgaagatgaccagctcgtgggaccatctagataagcttgttttttgtaaggagtttgtgtgctgttggaaaacatggaaaatgcatccttaacacctgagcctctggtcatcttcagtattttctgtcatttgcaaaagctttcagagggcattgtgtatccgtaataatgtccttgaagtcagagactggaaatgttgatctcttagtcttctatagacaaggaggtcaaactggagtgaatgttgtaaaagttgaaatgtatatttgtatagcaaataacaaaatccttttaaaatttaatctagta

SEQ ID NO: 41938 - DNA, 643 bp, Homo Sapiens
ctggcttgtctgctttgcagaaggcagtttcccaataaagaagttctgatcaaacaccagcaactgtcagacctgcacaagcaaaacctggaaatccaccggaagataaaacagtctgagcaggagctagcctatctggaaaggagagaacgagagggaaagtttaaaggaagaggaaatgatcgcagggaaaagctccagtcttttgactctccagaaaggaaacggattaagtactccagggaaactgacagtgatcgtaaacttgttgataaagaagatatcgacactagcagcaaaggaggctgtgtccaacaggctactggctggaggaaagggacaggcctgggatatggccatcctggattggcttcatcagaggaggctgaaggccggatgaggggccccagtgttggagcctcaggaagaaccagcaaaagacagtccaacgagacttatcgagatgctgttcgaagagtcatgtttgctcgatataaagaactcgattaagaaaggagacaagttccatgggatacaacctccctcttgttttgtttgtctctccttttcttttgttactgttcttgctgctagaacttttttaaataaactttttttcaatgtgaaaaaaaaaaaaaaaaaa

SEQ ID NO: 41939 - DNA, 628 bp, Homo Sapiens
ggaccacaggcaccgcaggataaccattcctcagaactcctcgtactgctctagtgcttggaggtccgtgtattacctcagctattccaaccgcaccaaccacgggagccacgtgtctacgtctgacagataaagatgctgagtttagagtctgcaaggcttgacaaccacagatcagggacaggagctgaggtctcctgacctggagcccagggccacccggagctgcaagaaacctgcactcacaactgcctcctattttaaaatgctgagtcgatcccacaggtggcaaaccagttctgggcttcaatttacaagcagtcagaaaagctgggttgaaatcgccactgtccttctatgtggctgatgaggaaggatgacggtgcccaccgctccatctctccagctgaccccaagctggcactcacgggtgggcaggctcagacaggcccagctccaccaagtgcacttgaagccggaatgcaagacatccgatggtatacttactcgaacccgtccttttcacaacagccgcgggatccgctttctttggctgactgctcagagtcttcccttttcctgtgaccccattagacgccacggggggctttttacccttgagctgttg

SEQ ID NO: 41940 - DNA, 569 bp, Homo Sapiens
  misc_feature (569)..(569): n is a, c, g, or t
gcacgagggcctgatgtggtacgtccctccacccccggacccatccaagtcatctgattgaagagcatgacagaaacaaaatgtattcaccaagcattttaggatttgactttttcactaaccagttgacgagcagtgcatttacaaggcactgccaaacaagatgcccttgggagctgtgagggaaagaggacctgtgggcttagatcaatctcaattccttttcatgccctcctgcattgctgctgcgtgggtatttgtctccttagccatcaggtacagtttacactacaatgtaagctataggtggagcatcagcagtgagtgaggccattcttcatccttaggatgtggcaatgaaatgatggtgcaagttcctttctcttttgtgaatctttccccccatttcctgtttacatgtaacccaacaaaatgcaatttctagtgccttctgtccaatcagttctttcctctgagtgagacgtacttggctacagatttctgccttgttttgcgacattgtcccattcacacagatattttgggataataaaggaaaataagctacn

SEQ ID NO: 41941 - DNA, 683 bp, Homo Sapiens
aagattgtaagcaaaggttgaggctttgatggtttttttcttaattattggctgaatctgccttggagcactgctggttttatatattagccaaaggttttgttctggccttctgtactgatctgtgttcctgatcctaattcctatctgtctaacgtggaggtgatcaagtgtggctgtaggcctttgttttccaatggtgctatattctgttttcaaacacttcactgaacccagctgtcttgcaaactttcagtggtgctgtccctggatgggggctacaaaaacaagaattggtgaagatcttgctcttcagtgctgaaaatggatgatggactttggctgtgagccaggcctaggatggttcttgtcctatatccacctagtcttcacctggggctataattctgtcctggaaaaagaactctgaaaacctgggtcaggggaatgattcctaaggaaaacggtctgcatttgagctctggtttgaaagtagccaaggggactgatggtggacactccagatgtggttggaagcatatgtggggaggctggctggctgagttttgttattttctgtatagaaaggttgagatatatcaacacttgggattgttacccatctgcagaattgacttctcaaataaagatgctaaaaatcaaaaaaacaaaataaaaaggac

SEQ ID NO: 41942 - DNA, 784 bp, Homo Sapiens
agaagttagtgttgaatctgaaaactatgtgcaagctgtggaggagttccagtcctgccttaacctgcaggaacagtacctggaagcccacgaccgtctccttgcagagacccactaccagctgggcttggcttatgggtacaactctcagtatgatgaggcagtggcacagttcagcaaatctattgaagtcattgagaacagaatggctgtactaaacgagcaggtgaaggaggctgaaggatcgtctgctgaatacaagaaagaaattgaggaactaaaggaactgctacccgaaattagagagaagatagaagatgcaaaggagtctcagcgtagtgggaatgtagctgaactggctctgaaagctactctggtggagagttctacttcaggtttcactcctggtggaggaggctcttcagtctccatgattgccagtagaaagccaacagacggtgcttcctcatcaaattgtgtgactgatatttcccaccttgtcagaaagaagaggaaaccagaggaagagagtccccggaaagatgatgcaaagaaagccaaacaagagccggaggtgaacggaggcagtggggatgctgtccccagtggaaatgaagtttcggaaaacatggaggaggaggctgagaatcaggctgaaagccgggcagcagtggaggggacagtggaggctggagctacagttgaaagcactgcatgttaagagggggcacagccctcctcccaagggaaagtgtttttgtatataatgtattttttcactttt

SEQ ID NO: 41943 - DNA, 878 bp, Homo Sapiens
  misc_feature (775)..(775): n is a, c, g, or t
ccacgcgtccgcccacgcgtccgcccacgcgtccggacatgggctatcatgtcagtatgatggctgactctacctctagatgggctgaggcccttagagaaatctctggtcgtttagctgaaatgcctgcagatagtggatatccagcctatcttggtgcccgtctggcctcgttttatgaacgagcaggcagggtgaaatgtcttggaaatcctgaaagagaagggagtgtcagcattgtaggagcagtttctccacctggtggtgatttttctgatccagttacatctgccactcttggtatcgttcaggtgttctggggcttagataagaaactagctcaacgtaagcatttcccctctgtcaattggctcatcagctacagcaagtatatgcgtgccttggatgaatactatgacaaacacttcacagagttcgttcctctgaggacgaaagctaaggaaattctgcaggaagaagaagacctggcagaaattgtacagcttgtgggaaaggcttctttggcagaaacagataaaatcactctggaggtagcaaaacttatcaaagatgatttcctacaacaaaatggatatactccttatgacaggttctgcccattctacaagacagtagggatgctgtccaacatgattgcattttatgatatggctcgtagagctgttgaaaccactgcccagagtgacaataaaatcacatggtccattattcgtgagcacatgggagacatcctctataaactttcctccatganattcaaggatccactgaaagatggtgaggcaaagatcaaaagcgactatgcacaacttcttgaagacatgcagaatgcattcccgtagcccttgaagattaaa

SEQ ID NO: 41944 - DNA, 606 bp, Homo Sapiens
  misc_feature (583)..(600): n is a, c, g, or t
caagaggccctaagactggtagaaattaaaaggatttcaaaaactttctattcctttcttaaacctaccagcaaactaggattgtgatagcaatgaatggtatgatgaagaaagtttgaccaaatttgtttttttgttgttgttgttgttttgaatttgaaatcattcttattccctttaagaatgtttatgtatgagtgtgaagatgctagcgaacctatgctcagatattcatcgtaagtctcccttcacctgttacagagtttcagatcggtcactgatagtatgtatttctttagtaagaatgtgttaaaattacaatgatcttttaaaaagatgatgcagttctgtatttattgtgctgtgtctggtcctaagtggagccaattaaacaagtttcatatgtatttttccagtgttgaatctcacacactgtactttgaaaatttccttccatcctgaataacgaatagaagaggccatatatattgcctccttatccttgagatttcactacctttatgttaaaagttgtgtataattgttaaaatctgtgaaagaataaaaagtggatttaaattannnnnnnnnnnnnnnnnnaaaaac

SEQ ID NO: 41945 - DNA, 867 bp, Homo Sapiens
  misc_feature (613)..(613): n is a, c, g, or t
  misc_feature (621)..(621): n is a, c, g, or t
  misc_feature (623)..(623): n is a, c, g, or t
  misc_feature (667)..(668): n is a, c, g, or t
  misc_feature (685)..(687): n is a, c, g, or t
  misc_feature (707)..(711): n is a, c, g, or t
ggaagtttatctacttcaaccacatgaatctcgccgagaagagcacagttcacatgaggaaaacgcccagcgtgtcgctcacttccgtgcacccggatttaatgaagattctcggtgacatcaacagtgactttaccagagtggatgaagatgaggagatcattgtgaaggccatgagtgattactgggttgttggaaagaagtctgatcggcgggagctctatgttattttgaatcaaaaaaatgcaaacctgattgaagtaaatgaagaggtcaagaaactttgtgcaacgcagttcaacaacatcttcttcttggattgacggatgacggctcaccgagagcatatctaaaaaacactctgcaaacatttggtcacatgcaagttagtggtcatatgacggactgcattcaggacaagggtaaagcaatacttgctttgaagaatcacatttcgactcggtctgctgatctgaggtttttagattttaaatatttatgtggaattaattaaaggtagttggctatatcgctatcatttcattcttttgacattatgtgaatattttactggaaaaataagactaataaattgttaaaaagtttttaaaanccccccancncaaacaaccccccccaacccccccacacaccccaaacaaaaaanngggaaaaaaagcgcccnnnaacaaaaccacacaaaaccnnnnncctttgggggcgcccccgggcccttaaaaaaatttttcaaaaacatttctttggggggcccggcgccccctagaggaaggggagaaacggggccaaagctgggttctccagggaaaacccggggcaaagaaaaagggcttgggatccccccccaaa

SEQ ID NO: 41946 - DNA, 783 bp, Homo Sapiens
  misc_feature (730)..(731): n is a, c, g, or t
  misc_feature (779)..(779): n is a, c, g, or t
  misc_feature (783)..(783): n is a, c, g, or t
agaggtaatccaggattactgatgctggaggctcaccattttccaggaccattattggttgaattagccaatgagtttattagtgctgtcagagaaggcagcctagtgaatggaaaatctttggagttactacctatcattctcactgccctggctacgaaaaaggaaaatctggcttatggaaaaggtgtactgagtggggaagaatgtaagaaacagttgattaacaccctgtgttctggcaggtgggatcagcaatatgtaatccaactcacctccatgttcaaggatgtccctctgactgcagaagaggtggaatttgtggtggaaaaagcattgagcatgttctccaagatgaatcttcaagaaataccacctttggtctatcagcttctggttctctcctccaagggaagcagaaagagtgttttggaaggaatcatagccttcttcagtgcactagataagcagcacaatgaggaacagagtggtgacgagctattggatgttgtcactgtgccatcaggtgaacttcgtcatgtggaaggcaccattattctacacattgtgtttgccatcaaattggactatgaactaggcagagaactcgtgaaacacttaaaggtaggacagcaaggagattccaataataacttaagtcccttcagcattgctcttcttctgtctgtaacaagaatacaaagatttcaggaccaggtgcttgatcttnntaagactcggttgtaagagctctaaggatctcactcctccaggctcanattn

SEQ ID NO: 41947 - DNA, 686 bp, Homo Sapiens
aatgcagagctatagtctcaattgttactttataaggtggttttattaacaaacccaaatcctggattttcctgtctttgctgtattttgaaaaacacgtgttgactccattgttttacatgtagcaaagtctgccatctgtgtctgctgtattataaacagataagcagcctacaagataactgtatttataaaccactcttcaacagctggctccagtgctggttttagaacaagaatgaagtcattttggagtctttcatgtctaaaagatttaagttaaaaacaaagtgttacttggaaggttagcttctatcattctggatagattacagatataataaccatgttgactatgggggagagacgctgcattccagaaacgtcttaacacttgagtgaatcttcaaaggaccctgacattaaatgctgaggctttaatacacacatattttatcccaagtttataatggtggtctgaacaaggcacctgtaaataaatcagcatttatgaccagaagaaaaataatctggtcttggactttttatttttatatggaaaagttttaaggacttgggccaactaagtctacccacacgaaaaaagaaatttgccttgtccctttgtgtacaaccatgcaaaactgtttgttggctcacagaagttctgacaataaaagatacta

SEQ ID NO: 41948 - DNA, 590 bp, Homo Sapiens
gtgcctcttaggggccagagcgggcaggaggttggataacaaaaatagagcatcagcaaccctttccaggtagaaattccagcgggagttcaggttcccaagcaatttcacgtacatggctggtaagtgactgatctttccccccgcttggtagcctcacagatgagtcttggatgcattcacagtcatttctggtctgtgcaccaaaggatgcattcagtgacctatgaaaaaccctactgaagggtccagagaccctggtgctcaccttagcctttgtctttgagcaaataacttaccttcttccttcttatgcctgggttttctcacacttaaatctgtactactgtttgccaatgtctgatgtgtgtatccctggttcacaagaagattttagatggtattcaaattaatattttctatttagttatatatttaatgtataatataaaaatatgattagcatattgacctgtagtttgatagatgttctgtctaggataaagctaactgtaaaaaaaaatagtgaatcagtttaaagaaaaacataacgtaaaagtgggcacagatccagagaggtagcaaaaatc

SEQ ID NO: 41949 - DNA, 726 bp, Homo Sapiens
gtccggcacaggcaaccttggcctcctctgcagaagtgggcatctcggagccagcctggaagcctccagcagggctattcccccacacccctacccactggaaaggagtgttgtaagactaggttttggctaaggaagaagtttcttgcccaaatgcctggatgtgtctgcttgactttcagaacttctcacctcagccctaaagagggagcctgtgggttctcagagagatatcacaatttgagtcccaaagaagaggccagatacccacccaccttcccccaaatcttaagcacctgcgccagtacagtcaagaagaggaaagtgtgtgaagacccaggtctggctctgccacttgcctggccatgtcaccttgaagctgtgacctgactccctatattgtttcctcagttgtagaccaaaggcaatggtgtctgccctcctaccttagaagacaaatgcaagggcatttcaccacagagaggacctttgtgctcactttggcccaggaggcagtgatgctcatggttgcatgactttatgagtcgctgggccagggtgaggacctgggcctcctgactcctggcccagagttcttgtccatcagttcatactgcaattttatgtgaaagcattatgactgtcctacccatgggagagtaaatgtagattgaatgctaggagtcttaaagctggagagtatagattttgaggtccccatttggg

SEQ ID NO: 41950 - DNA, 832 bp, Homo Sapiens
attctggtacaggtcaaagaggtcctctccaagctgagcacgctcgtggaaaccacactcaaagagagaagattacagtatgtggggacacccatggccagttctatgacctcctcaacatattcgagctcaacggtttaccctcggagaccaacccctatatatttaatggtgactttgtggaccgaggctccttctctgtagaagtgatcctcacccttttcggcttcaagctcctgtacccagatcactttcacctccttcgaggcaaccacgagacagacaacatgaaccagatctacggtttcgagggtgaggtgaaggccaagtacacagcccagatgtacgagctctttagcgaggtgttcgagtggctcccgttggcccagtgcatcaacggcaaagtgctgatcatgcacggaggcctgttcagtgaagacggtgtcaccctggatgacatccggaaaattgagcggaatcgacaacccccagattcagggcccatgtgtgacctgctctggtcagatccacagccacagaacgggcgctcgatcagcaagcggggcgtgagctgtcagtttgggcctgacgtcaccaaggccttcttggaagagaacaacctggactatatcatccgcagccacgaagtcaaggccgagggctacgaggtggctcacggaggccgctgtgtcaccgtcttctctgcccccaactactgcgaccagatggggaacaaagcctcctacatccacctccagggctctgacctacggcctcagttccaccagttcacagcagtgcctcatcccaacgtcaagcccatggcctatgc

SEQ ID NO: 41951 - DNA, 781 bp, Homo Sapiens
  misc_feature (708)..(708): n is a, c, g, or t
  misc_feature (726)..(726): n is a, c, g, or t
ctaggatgctggggaaaggttctgttcctttgttggtggtttggaacttattgtcaatttactgaaatcagataacaaagaagttctggcaagtgtatgtgctgccattaccaacatagcaaaagatcaagaaaatttagctgttatcacagatcatggagttgttcctttattgtccaaactggcaaatacaaataacaataaattgagacatcatctagcagaagctatttcacgttgctgtatgtggggcaggaatagagtggccttcggtgagcacaaagcagtggctccactagtgcgttatctgaaatcaaatgacaccaacgtgcatcgggcgacagctcaggccttgtaccaactctcagaagacgccgataactgcatcaccatgcatgagaatggtgcagtaaagcttctactggatatggttgggtcccctgaccaggatctccaggaagctgcagctggttgtatatccaatatccgcaggctggctcttgctacagagaaggcaagatacacttgaaatttaaatggacattacaagctatcaaattctacatgacacaggacatgtcactcccatggccagaaagcctaaattgggaaacagttgttagcaaaccctttcaaccatctaaatgaaaacacacaagttgaaaatgcacagaatgtttttcatctgaaaattgcatggagactttngttctatttaatgtttcnaaatatgacatgtgataagatggaaagccaataaacctgtgataagtttctagaa

SEQ ID NO: 41952 - DNA, 603 bp, Homo Sapiens
  misc_feature (88)..(88): n is a, c, g, or t
ctcaaagagtatatgttccctccaggtcagctgcccccaaaccccctccttacgctttgtcacacaaaaagtgtctctgccttgagtnatctattcaagcacttacagctctggccacaacagggcattttacaggtgcgaatgacagtagcattatgagtagtgtggaattcaggtagtaaatatgaaactagggtttgaaattgataatgctttcacaacatttgcagatgttttagaaggaaaaaagttccttcctaaaataatttctctacaattggaagattggaagattcagctagttaggagcccaccttttttcctaatctgtgtgtgccctgtaacctgactggttaacagcagtcctttgtaaacagtgttttaaactctcctagtcaatatccaccccatccaatttatcaaggaagaaatggttcagaaaatattttcagcctacagttatgttcagtcacacacacatacaaaatgttccttttgcttttaaagtaatttttgactcccagatcagtcagagcccctacagcattgttaagaaagtatttgatttttgtctcaatgaaaataaaactatattcatttcca

SEQ ID NO: 41953 - DNA, 968 bp, Homo Sapiens
cccacgcgtccgccagagtctgtacttttctataacacagctcagattaaggtagggcatatgccaaggaggttctcacctccctaaagaagggacttgaattttagggactttaattcacccctccttcaatacaactttcccccttcttgtttgcacatgccaagataactgcttttatgcaggctgtacccccttgaaaaatcctttctacagtgctgctcacaaaagagcccaagttcgcctcctacctgcattgctgacttgaattcacagtcgccgagtctacctagctttcttggaagcagtctagcaaaatttctatttgtacgttcactaattatctacaaggacaaaatcagttgtatttacaaaactctacttcagtgtttgttttagtttttttttttactgaaacttgtttttgtgaatactctgtgcttagaattaaatatcactttcttatgaacaacataacttcttcagattgtgtatatgaaaacattagcaagtcttgttttttctatgaagcaaacacaattggtgacaaaggttgtcaatcatttcttcaaaattataatgcagttctaatggtcagcatattttgatattacatttaaagatcacctctctgcatttgtttttaaattatgctaatacaccacacattatgttggcatgttttgttctgtacctttctttaaaaaaaaaaaaaaacttgtctgagatttgacggaaaatgtgcttatttggaatttccataaaaagagtatcctttttatacccttaatagggactttacaaaataaaagttatattctcacttggttaaaaatccctaaacctatggaaaacccccccctcaattttgaaagtaacatttaaaaatttatttccctgacaggggttattttaacaatgggagcccccttaaagggggggaaacccccggtaacccaaacttaatt

SEQ ID NO: 41954 - DNA, 499 bp, Homo Sapiens
tacattcttattttgtcccacccctccagaaataagctggaaatcttaactttttggggggtcttttttggtgttttaatgggcccagaactgtggtttaaatttttatgtatgtattttcttttttgtggagtataaatttaaaaactggatttgggacctaaaatactcctcaggttgatgtattcatgaagttttaaaacatctttagttttcaaagtaaactggatatgtggaccttaaagttattgagtttaagctacaaattgtaacgtcattactggacatgtcagcatcaaccctctcaaaatagcttggtcactttatgaaggggcgttttaaagttgttgtttagcagtgacatttaatatggtccaattgcttttctttttaacgtgacaaaaagagaataaggaacaaacactattgctgccgaatgccataacactgagttgtacaaattgtgattgaggaaatgaaaaggtttatactttttaaa

SEQ ID NO: 41955 - DNA, 732 bp, Homo Sapiens
ggagcattgggggccttattctggacacaactgtatcagacccaaacttggttgggattgttgtttacacgccagttattaatggtattggtggtaatttggtggccattcaggctagcaggatttctacctacctccatttacatagcattccaggagaattgcctgatgaacccaaaggttgttactacccatttagaactttctttggtccaggagtaaataataagtctgctcaagttctactgcttttagtgattcctggacatttaattttcctctacactattcatttgatgaaaagtggtcatacttctttaactataatcttcatagtagtgtatttatttggcgctgtgttacaggtatttaccttgctgtggattgctgactggatggtccatcacttctggaggaaaggaaaggacccggatagtttctccatcccctacctaacagcattgggtgatctgctcgggacagctctgttggccttaagttttcattttctttggcttattggagatcgagatggagatgtttgagactaataaattctacaaactgctctcaagttacaaaggaagaaaatacacgaccacccacttatgggctcttttttcaaaactccttaaatcagtaagtttgactttttgcccaggggtaatctttccagttggccccctggatttcaaatttaaatgggcctttaaaatttttttttttaaggga

SEQ ID NO: 41956 - DNA, 651 bp, Homo Sapiens
gtatatatgtatgtatgtttcttattgtatgtctatatatgtatgtggggaggacaggagtgaatgttcacacacttttcttgcgtactcaactaaattggagaatgtttctgaagaaaattggatgaaattagctgctgagattgagtttctgccttaaaatctgaaacaaaaaaagggacaaattgctggtagatctactgactgtagccatcaccagaacacttagtttcttcccagacatgaatttcctgacaggctctgagccagaaacacactgtgggcgtgcatctggttcagccctggatatgcctccactgtggagggaagcattggaactggagttgtgcacagcaccgcagctagtgggcctggctgggggtgcagaagggcagggtagttctttccatttccccttgcagctacacttactttctccctgactaccaaatggagtgacggttgaagaatcaagctcataatatgatacacccagacagacccagaaatcttttgatttccccagcgagatacttaccactctctcttctctttcccatggttaaaacaggagttgtgttctctgtcgctgctaaattattcttcacttgagtgaagcaaatatttagcttccaaataaagtatattttg

SEQ ID NO: 41957 - DNA, 756 bp, Homo Sapiens
ccttccctttccagtgaaggagcagcatagtgaaatcctggcacccctcaccttttgtgatgacaagatggctgacagtcacggagtccaggagaaggtgctgctctccttgctttctgagtaaacagagtaatgttttttttcttattttcccaaagaaagaaaagggggaaaatatatttgtatgtttagaccagccaaattctgtcattattttagtatcaacctgctgtatattagagcaactgaatataatatggaataagtttgaccaggtcaagttttaggatatagttgaatttctttaaaaagttttctattttatctaaaatctttctattatatctaaattagaatgatcatcctgcgcaaattcagattactgtttgctggctaattgacagtatttctcagcatcactatgtagcattctgttttagcatctttgaattatgatcatttgattggctaattacaaaaagtacaggtttaaactggacttaccttgagttaaaggcaaagaaaatctaaaaacataaatgttatatttcacaagaaatcagttgcatattatccattacatatttagttttaaaaggaggagtcaccttgaattattttctgagtcaccttgagttatttgatctctcagcctgctttctcatctgtaaaaaaggggggaggataactttcacagggtaatggtaggctaaataggagttacagaaaactgttaaatagggaagaactacatta

SEQ ID NO: 41958 - DNA, 595 bp, Homo Sapiens
gagaggggactggagagtgtggggaatggaaagaagcagtttactctagactaaagagtatattgggggaggaagagagggaggcacgtaggaaccagcaatgagaagaccaggaaaagaaagagctgaaaatggagaaagccacagttagaactgttggatacaggagaagaaacagcggctccactacagacccgccccccggtttgatgtccttccaagaatggaatccttccctggtgatggtctctcgccctgtcttaccagcatccactctcccttgtcctcccaggggtgtatctgagtcagccagtggcttcttgatgatggtggtggtggttgtagtgtgacaggtcccctttaggttatttaagggtgcatgtcccctgcttgaaccctgaaggccgggtaatgagccatttccatggtgcccagctgaggaccaggtgtctctgagaatccaaacatcctggagagtatctgagaaccaaccaagtaaaagtctcgttgctcatatatagtagacaaagagccagaaaattaactgaaaagcagtttagacattgggggaggccggatctctcgagctgtcttg

SEQ ID NO: 41959 - DNA, 912 bp, Homo Sapiens
  misc_feature (721)..(721): n is a, c, g, or t
ccacgcgtccgcaagaatagtgcaagatatttttaattatatttactccatggatgaaaatttggaatttcatattaaggtttcatattttgaaatatatttggataagataagggacctgttagatgtttcaaagaccaacctttcagttcatgaagacaaaaaccgagttccctatgtaaaggggtgcacagagcgttttgtatgtagtccagatgaagttatggataccatagatgaaggaaaatccaacagacatgtagcagttacaaatatgaatgaacatagctctaggagtcacagtatatttcttattaatgtcaaacaagagaacacacaaacggaacaaaagctgagtggaaaactttatctggttgatttagctggtagtgaaaaggttagtaaaactggagctgaaggtgctgtgctggatgaagctaaaaacatcaacaagtcactttctgctcttggaaatgttatttctgctttggctgagggtagtacatatgttccatatcgagatagtaaaatgacaagaatccttcaagattcattaggtggcaactgtagaaccactattgtaatttgctgctctccatcatcatacaatgagtctgaaacaaaatctacactcttatttggccaaagggccaaaacaattaagaacacagtttgtgtcaatgtggagttaactgcagaacagtggaaaaagaagtatganaaagaaaaagaaaaaaataagatcctgcggaacactattcagtggcttgaaaatgagctcaacagatggcgtaatgggggagacggtgccctatgatgaacagtttggacaaagagaaaagccaacttggaaagctttcacagtgggataaaggatattactcttaccaaatgattaaaccagcacccgcc

SEQ ID NO: 41960 - DNA, 1015 bp, Homo Sapiens
  misc_feature (908)..(908): n is a, c, g, or t
gacttcgagctacagctgagagagtgaaagctttggaatcagcactgaaagaagctaaagaaaatgcatctcgtgatcgcaaacgctatcagcaagaactagatcgcataaaggaagcagtcaggtcaaagaatatggccagaagagggcattctgcacagattgctaaacctattcgtcccgggcaacatccagcagcttctccaactcacccaagtgcaattcgtggaggaggtgcatttgttcagaacagccagccagtggcagtgcgaggtggaggaggcaaacaagtgtaatcgtttatacatacccgcaggtgttaaaaagtaatcgaagtacgaagaggacatggtatcaagcagtcattcaatgactataacctctactcccttgggattgtagaattataacttttaaaaaaaatgtataaattatacctggcctgtacagctgtttcctacctactcttcttgtaaactctgctgcttcccaacacaactagagtgcaattttggcatcttaggagggaaaaaggacagtttacaactgtggccctatttattacacagtttgtctatcgtgtcttaaatttagtctttactgtgccaagctaactgtaccttataggactgtactttttgtattttttgtgtatgtttattttttaatctcagtttaaattacctagctgctactgctttcttgtttttcttttcctattaaaaacgtcttcctttttttttcttaagagaaaatggaaacatttaaggttaaatgccctttaaattttaccactttaacaacactacatggcccataaaaatatatcccgttccagaactggtatttttaaaattcccttggaaaggatggatatcccggggttaaaaaataccttggaattggtnttccggaagttttggtccctggaaaacctacctgtttttgagcccctgggaaacgtttaccaaatggcccctaaaaggggattttggaaactggggccaagggttta

SEQ ID NO: 41961 - DNA, 1040 bp, Homo Sapiens
ctcccatgcatcggctaatagcccggagacaagctgaagcaaataagcaacatgtaagatgtcagaaatgcttggaatttggacattggacttatgaatgcacaggaaaaagaaaatacctacataggccctcaaggacagcagaactaaagaaagctttaaaagaaaaagaaaacagattattattgcaacaaagcattggagaaaccaatgtagaaagaaaggccaagaaaaaaaggtctaagagtgtaaccagttccagtagcagtagcagtgacagttctgccagtgattcttcatcagagagtgaagaaacatctacctcttcctcctcagaggacagtgacactgatgaaagctcctctagttcctcatcctcagcctcctccacaacctcttcctcctcctctgattcagactcagattccagctcttccagtagcagtagcaccagcacagatagcagctctgacgatgaaccaccaaagaagaagaaaaagaaatagagttgctccattcatattggaccgatggactgaaaacattgatgtgattcttgaaagggaatttagaatatgttaaggccaagtaggttaactggtgaacatttctagaattcaaaagtttctaaatgttttacattgtaagagcatagagaatattaataatggcttatagagagagacttttatttgaagggtgaatcttgttttttttatctttaaaatatatctctagaacttaaagctgaaatctgcaaatctgtttgtgtgatgaaactatcttttctctctgtgaaataaatgccatactttgttatatatgtkagtggtatgtatcagacatattttcaggatggtgcgtcaggatatctggcagtggatttctaatgcttttggctgtatgttatgtaaratttaatatkttgttaytgtwttttttktwtttttccaccawtaataaawgkgctctattttacatttatgtcagraagtwtcygamttttkkccwagkgggaggtcaggggctwttawatattt

SEQ ID NO: 41962 - DNA, 622 bp, Homo Sapiens
gcacgaggacaaaattgcctccaatcaaagtgacccagaagaagcagtataaggagacaatgatgggacagacttctcgggcttcccgttgggctgaccctgaccactttgcccagcgacagagctgcatgaatacgtttgccagctggtttggctacatgccgctgatccactctcagatgaggctcgaccccgtcctctttaaagaccaggtctctattttgaggaagaaataccgagacattgagcgactttgaggaatccggctgagtgggggaggggaagcaagaagggatgggggtcaagctgctctctcttcccagtgcagatccactcatcagcagagccagattgtgccaactatccaaaaacttagatgagcagaatgacaaaaaaaaaaaggccaatgagaactcaactcctggctcctgggactgcaccagactgctccaaactcacctcactggcttctgtgtcccaagactaggttgtgtacagtttaattatggaacattaaataattatttttgaaatgattgctatgcaggtttaaacttttttaatgatcaaaactattaaaaaccagagttctttgtttaatcaaaaaaaaaaaaaaaaaaac

SEQ ID NO: 41963 - DNA, 485 bp, Homo Sapiens
tatatgaaagttctcgattgtcttttttattgagggacagagaagacaagctacgtgagcgagatgaaagactctctagttctttagaaaggaacaaattttactcttttgcattggataagacaatcacaccagacactaaagctttgcttgaaagagctaaatccctctcttcatctcgtgaagaaaattggtcttttcttgattgggactcccgatttgcaaattttcgaaacaacaaagataaagaaaaggttgactctgctccaagacctattccatcctggtacatgaaaaagaagaaaattaggactgattcagaagggaaaatggatgataagaaagaggaccataaagaagaagagcaagagaggcaggaattgtttgcttctcgttttttacacagctcaatctttgaacaagattccaagcgattgcagcatctagagagaaaagaggaagattctgacttcatttctggtagg

SEQ ID NO: 41964 - DNA, 620 bp, Homo Sapiens
tgggaatgggcggagcacgtgggctgcttaactgctgtataggacaagccccttacccctctctgggcccatgaattcctggcttggtttatgttctgatttgacacactgattttaatcttcgaatcatgacactgagtgcagaggaggtggcattccgacagcaggacatacatgttggtgtgaagactgggacgacactgggtagaatctagtttttaattattattaatataaaggatcaaattaatttaaatatgattctgaagtctacagaacttttagttctgtgctgtctatgtggacactttggtaaaatgcaaattatgatatggacgttatcattggtctggtgagatgtttcatatttgtgacagttaatttaaaaattatgacttaatgctgcctgtgtctatggggttctgtcttctttgatagccatctattcatctggatcatgggaccctctctaatccttccaccaatcaaataagctattgctattggtttggagttgagatatcagtctcggaaacttctgaaaaatgctaataattacccaaggattatgtcaaattttaaaataaatgtgtgtgtgtttctttaaaaaaaaaaaaaaa

SEQ ID NO: 41965 - DNA, 697 bp, Homo Sapiens
cacatttgaactcattcctaagtgaacatggacgtacccagttatacaaagtacttctgttggtcacagaaacatgaccagattttgcatatctccaggtagggaactaagtagactaccttatcaccggctaagaaaacttgctactaaactattaggccatcaatggcttgaataaaaaccagagaaggtttttcccaggacgtctcatgtttggccctttagaattggggtagaaatcagaaatgagatgaggggaagaagcaaggagtctaaggccctagcgatttgggcatctgccacattggttcatattcagaaagtgttatctcattgattatattcttgttaagcaaatctccttaagtaattattattcaaataagattatactcatacatctatatgtcactgttttaacagagatatttaatttttaatgtgtgttacatggtctgtaaatatttcgtatttaaaaatgccatgcattaggctttggaaatttaactgttagttcgaacatgtacacacatgtgacacactttagatcatcttgtagtaataaatcatttttcaacttcattcatacagtttaagtttatctgacaataaaagctctgactgaacaacaaaccacaacaacaaacaccaacaaaccacacaacaacccacacaccgaaacaaaccaacacacaaa

SEQ ID NO: 41966 - DNA, 836 bp, Homo Sapiens
tctagcgaggtgacagcgtagaaccaggcgcgtggcggcggtggcggctgcggcaacagcggggccgatgtgtagttggtgactgcctctccagatgctgaggtgcctgtatcattggcacaggccagtgctgaaccgtaggtggagtaggctgtgccttctgaagcagtatctattcacaatgaagttgcagtctcccgaattccagtcacttttcacagaaggactgaagagtctgacaggtataaatgctttccatgagaactgaaggaagaaggaaataggagttgcctccattgtgcacgttgcaaaacctgtctggaaggagcataggaaatggctttagctaagtgcctgactccagtagcttcttgctgttgccacagtttcattagtgttgattctcaatgttgtctgctgatgttgctaaagcagccacacagtagcattacaaagcctgtgggaattttaatagcaccttcataaatatatttagtagtatatgtagaaatatgacctatacagcactggctatctattagattcacctggggagcttttaaagcacacatgctcgggttctacctgcagcctactgaattagaatctctgggtgggatgaccatctatatttttaataaaagctccacaagttaattctgatgcacagaagatagacgaaccattactttaacatgactcaccttgtattagcttattctcaaagctactttcccattcttgaaattggatgatggcttttttaaggtacgtgcccaaagattaaatggccccaagaaaaatgttggaatctttttaagaattggtttttaggg

SEQ ID NO: 41967 - DNA, 512 bp, Homo Sapiens
ttcggcccttacggccggcctaaaaggggaaacaacccaaagtgtccatcagttaatgaatggataaagagtgtgcattcattcatacagtaggatgttacttggcaataaaaaggaatgaagtattcatacatactgcagtatagatgaaccttgaaaacatgcggagtgaaagaaaccaaatacgaaaggccacgaattacatgattccatttttaggaagtgtccagaatatgcaaatccatggagacagaaagtacagactggtgactgctaaggatgggacagggggaatgagcactagtcagtatacggtttctttttggggtggtaaaaatgttctgtagtggtgatggttgcacaactgagtataataaaacatactgaattatttattttaaaagggtaaggctggactcagtggctcacgcctgtaatcccagcactttgggaagctgaggtgcaaggattgcttgggaccagcctggacaacatagagacgtcatctctcc

SEQ ID NO: 41968 - DNA, 844 bp, Homo Sapiens
aaaggaccaagagatccaccttcagaatggacatgattcagggagctagaagacactttaagttatactggaaaattcaggtgccactgaaagccagatttatagtattccatctttaatatgtgggactaacagcagtgtagattgttaccttaatattttttgctgggaccatctacctgccttatactacacttaggaaaaagtattacatatggtttattttgaaacttcaagtattattgccttaatgtctcttaaccctgttacacgctgcttgtagacatgttaatatagtaatacctttatgatatattgagtttaaggactactctttttctgttttatcatgtatgcattattttgtatatgtacagggcaagtaggtatataatttgataaagttgcaattgaaatattattaacagaagatgtaagaaatttctgcatggtctaaatctttgtgtactttatttgtaaattatttgccctggagttttagaaaatagtttctgaattttaaacttgctggattcatgcagccagctttgcaggttatcagagatcaaagattgtaataataattttgtaaattgtaagcaaaaagttatttttatattatatacagtctaattgttcatcctaattgttcctgttttcatctagtcagagattcagtaagtgccttggaacaatattgaattctcttagcttgtgtgtgtttctttaatatttgaactcaagtgggattagaagactatcaaaatacatgtatgtttcaggatatttgacctgtcattaaaaaaaacaaacagttttacagtgaaaaaaaaaaaaaaaaaaa

SEQ ID NO: 41969 - DNA, 914 bp, Homo Sapiens
aaacatctcctgaccatatcagtagctcgtgttatctttttatcaactgcttcccagagtcctaaaacaatagaaattttggattgaaaagttcagcataaggagtttgagtcagtaaaggatgggataaaggagtcgagatgattcaatgaaaagtatcacaaaaaagagattgatcaacaagagaaataaaaaagcccaagaggaagtggtaggggaaggaatttaagaacagcaataagtaaaactcttaagtaactccaaaaagaaaatggtacattttgccaaagaccacttatacttgagaacatggaagaatttgcctgatactctctttggggaaaagagtctctcctcttttcctcaaaccccagtacactcagcctctctgccccaccttctcctgactttgtcctcacttgcttctgcagtacattggaacctgaattgaaagaaagtcttccttgaataattggagtttgtcttgagaggcaaatatagccccaagaatcacaagattcgaggaccatgtaggtcttttacgtagcccaaatccataaattagtctcactttttgtatttatcgtttcatatttaaaccctctatatcaaatgttcatcatgattttgtactgatttttataactattttattcattttattagatttattctaaaattttttaatggtaaattcttaaactgtggaaaccactgaaggtgcttattaactgttctcccagatttgttcagtattggatgattccttgagttacagtgtcaattagtgtggaaataactttttcaaaaaaaaaaagggggcgccaaatatcctgagggccagctaaggtaccgattctgcacagggccatagggtatacagaaggccgcgtaaccgaaggaagtccggaatg

SEQ ID NO: 41970 - DNA, 1025 bp, Homo Sapiens
ttcccgggatgccttatgagctcagcctcgctttgaggtacccaccgtcctgtcagctccttgacctatgagctggggcctgactaggaaaagttgggagttaaggaggaaattagcattccttaatgttttgttttggtgctctgaatttcttctttattatagtcctatagttttactcctcagttcctcaccatcatcatcttgtctaagacccccattataatattcatgcgctgctttttcatcaaaacctaccctgtcctagagatctatgggcatttggtggatgataatgagcagcccctcccagatagaatgtcaatatttgagcagtaggatattggcatttgttagttaaaggcttaaatcaaaagaatgtccaatggtaggaatttcaaggtgtaggtcagatatttgagaataggggatttttttgatgtgccttaaattataccaaagattactaattattcctctttgcccaaaatacttgcatccaaggttctagtctctgttgctgtgctggtctttagccccactgctggcactgatgtccctccttttcacggagacctatctgaggtacaggatggggctggcaccagatgatgtcccaccacagtccctcacctccggcctccacatgacagaaccaatttacactcaaccatgacctcacccctccttggtttctccctcgatctgtggccctttttggatgtattcttatctaacaacacaatccggaaagactgaattgaatatttatactaatggttcatatcctttattgctcaatgatctaattaaagggatcattgccacatttcatgtttatatttctacaatttgttttagaaaacatctcctgaccatatcagtagctcgtgttatctttttatcaactgcttcccagcgtcctaaaacaatagaaattttgggattgaaarttcagcataaggrgtttgagtcagtaarggtggggtaaaggatcgrgatgatcaatgraaakatcacaaaaa

SEQ ID NO: 41971 - DNA, 556 bp, Homo Sapiens
aatgagattggcgatggggcagagctgacggcagagttcctctacgacgaggtgcaccccaagcaacacgccttcaagcaggccttcgccaagcccaagggcccagggggcaagcggggccataagcgcctcatccgcggcccgggtgaaaatggggatgacagctaggaggctggagcagggccggccacgtgtggactgtggggctgcccaccttccgctccctgccaccatcctccttcctgggctccaggaaagtgtttctgggaggtcaggagggctggcagctgaacgcacttgcagcgtccgagggccaccgggctggcattttgtgacccttccctgttgctgtccctgcatctcgtctgtgtgcccagggtgtccggggaccctgcctggctggcttaagggggctgggtcaggggcctggcatgaacctggcctcccggggagctgagactagggtcccagcacagcccagaaacctttggccacaagaagtggggtcagtcagggctggggcaggggtcactgcagtttgggatggttgaatgct

SEQ ID NO: 41972 - DNA, 491 bp, Homo Sapiens
aaggggcagtggtggttttctgttctttctggctatgcatttgaaaattttgatgttttaaggatgcttgtacataatgcgtgcataccacttttgttcttggtttgtaaattaacttttataaactttaccttttttatacataaacaagaccacgtttctaaaggctacctttgtattctctcctgtacctcttgagccttgaactttgacctctgcagcaataaagcagcgtttctatgacacatgcaaggtcattttttttaagaaaaaggatgcacagagttgttacatttttaagtgctgcatttaaaagatacagttactcagaattctctagtttgattaaattcttgcaaagtatccctactgtaatttgtgatacaatgctgtgccctaaagtgtatttttttactaatagacaatttattatggcacatcagcacgatttctgtttagataatacaccactacattctgttaatcattag

SEQ ID NO: 41973 - DNA, 688 bp, Homo Sapiens
  misc_feature (544)..(544): n is a, c, g, or t
  misc_feature (562)..(562): n is a, c, g, or t
  misc_feature (569)..(569): n is a, c, g, or t
tggaacaccgagctgaccctgtcctgtacaaagatgactttcctgagaagctgaagagcttccccaacattggcagcttatgaaacgtgtcattggtggaggtctgaatgtgaggctgggacagagggagagaacaaggcctcccagcactctgatgtcagagtagtaggttaagggtggaaggttgacctacttggatcttggcatgcacccacctaacccactttctcaagaacaagaacctagaatgaatatccaagcacctcgagctatgcaacctctgttcttgtatttcttatgatctctgatgggttcttctcgaaaatgccaagtggaagactttgtggcatgctccagatttaaatccagctgaggctccctttgttttcagttccatgtaacaatctggaaggaaacttcacggacaggaagactgctggagaagagaagcgtgttagcccatttgaggtctggggaatcatgtaaagggtacccagacctcacttttagttatttacatcaatgagttctttcagggaaccanacccagaattcggtgcanaagccanacatcttggtgggatttgataaatgccttgggacctggagtgctgggcttgtgcacaggaagagcacagccgctgagtcaggatcctgtcagttccatgagctattcctctttggtttg

SEQ ID NO: 41974 - DNA, 606 bp, Homo Sapiens
ggagacgttgcatttgtgaaagatgtcactgtcttgcagaacactgatggaaataacaatgaggcatgggctaaggatttgaagctggcagactttgcgctgctgtgcctcgatggcaaacggaagcctgtgactgaggctagaagctgccatcttgccatggccccgaatcatgccgtggtgtctcggatggataaggtggaacgcctgaaacaggtgttgctccaccaacaggctaaatttgggagaaatggatctgactgcccggacaagttttgcttattccagtctgaaaccaaaaaccttctgttcaatgacaacactgagtgtctggccagactccatggcaaaacaacatatgaaaaatatttgggaccacagtatgtcgcaggcattactaatctgaaaaagtgctcaacctcccccctcctggaagcctgtgaattcctcaggaagtaaaaccgaagaagatggcccagctccccaagaaagcctcagccattcactgcccccagctcttctccccaggtgtgttggggccttggcctcccctgctgaaggtggggattgcccatccatctgcttacaattccctgctgtcgtctt

SEQ ID NO: 41975 - DNA, 674 bp, Homo Sapiens
ggcatagtttggtcaagcccagtgtagactacgtctgccagctgaaattcccttctggcaattaccctccatgtataggtgataatcgagatctgcttgtccattggtgccatggcgcccctggggtaatctacatgctcatccaggcctataaggtattcagagaggaaaagtatctctgtgatgcctatcagtgtgctgatgtgatctggcaatatgggttgctgaagaagggatatgggctgtgccacggttctgcagggaatgcctatgccttcctgacactctacaacctcacacaggacatgaagtacctgtatagggcctgtaagtttgctgaatggtgcttagagtatggagaacatggatgcagaacaccagacacccctttctctctctttgaaggaatggctggaacaatatatttcctggctgacctgctagtccccacaaaagccaggttccctgcatttgaactctgaaaggatagcatgccacctgcaactcactgcatgaccctttctgtatattcaaacccaagctaagtgcttccgttgctttccaaggaaacaaagagtcaaactgtggacttgattttgttagcttttttcaaaatttatctttcattcagttcccttccattatcatttacttttacttagaagtatccaagg

SEQ ID NO: 41976 - DNA, 619 bp, Homo Sapiens
cctcgcgtccgatacataccatggacggcggtgtggcctgagttgtcagtctttaatcctgagtcatgtggctctcttttcatctttgatgtcagttccaattatttggcatcaaaaaccttcatggtaggtagagttttaggtaaaagtggatctagggttactttctttattaacatttcctaaataactgaattgagagacatactctgctactatgtcctcaggttaatttttgtctgatcttacgatgccctgccttttactagctactttagaaatagaaaatgtgaagagtgactatttacatgtatactcctttggctgctagaactcatctgtagtcctttattatttacactgaattccaatttcatttctgcttccgctaagtaagagcacctcattcctgtgttttctctactattgagctgtagacgaactgtttctctaattataaagcaaactgtttgggatattcagggaaactaccccaatgttatgttgtcatttaatgggaaaggctgggatcatatgtatttctatgttctgtaaagtatttgacttactagttctcaataaaatttattaggactataaaaaaaaaaaaaaaaaaaaa

SEQ ID NO: 41977 - DNA, 867 bp, Homo Sapiens
  misc_feature (668)..(668): n is a, c, g, or t
cctcccagaaagacacgtgctgagctcatgaaggcaatcgattttgagtactatggttacctagatgaagatgatggtgttattgtgcctttggaacaggaatatgaaaagaaactcagagccgagttagtggaaaagtggaaagcagagagagaggctcggctggcaagaggagaaaaggaagaggaggaggaagaggaggaagagatcaacatctatgcagtcaccgaggaggagtcggacgaggaaggcagccaggagaaaggaggggacgacagccagcagaagttcattgctcacgtccctgttccctcgcagcaagagattgaggaggcactggtgcgaaggaagaaaatggaactcctccagaagtatgcaagcgagaccctgcaggcccaaagtgaagaagccagaaggctcctggggtattaggacccagctggggctctccttggagttcttccatcccccagtggtacctcaggacccagggctgcagacacaggctggtgctgcaagggctcctgccccattctcagccttccttccctctccttgtctcatgttgaccggagggtaggggtctgtccctggtcttcctggtaggttttgtacacatattttgctactgtgtggatccatttaatttttattgtggagtgtatacnacaggttgcgaactgcctgcctgtgtcttatttttgacttgcactgcccattttgaaggggagaagaattcattaagtggccaaacattttaaaaaaggcaatttttttgccgaacccaaaggattaatttttaaaaaaatgccaaatttttctcaaaagaacccccttttcctttggaaaaattggggaatggttggg

SEQ ID NO: 41978 - DNA, 686 bp, Homo Sapiens
acgacctggtactcaggtcatgggcttgcagctgcagctggataacatctcgtccttcctggatgaccacgaagagaacatgcatgatcttcagtaccatacccactacgcccagaaccgcactgtggagaggtttgagtctctggaaggacgcatggcttctcacgagattgaaattggcaccatcttcaccaacatcaatgccaccgacaaccacgtgcacagcatgctcaagtacctggatgacgtgcggctctcctgcacgctgggcttccacacccatgccgaggagctctactacctgaacaagtctgtctccatcatgctgggcaccacagacctgctccgggagcgcttcagcctgctcagtgcccggctggacctcaacgtccggaacctctccatgatcgtggaggagatgaaggcagtggacacacagcatggagaaatccttcgcaatgtcaccatcctacgaggtcacactttgttttcacataatcggatatgatatgaagccagccataaagcccaggatgaccaagaatataatttgaaaatgaatttgtttactatccttaatggtaagcatcaccttaagcacatattatgccttgagacactagccaattgtggtacatgaaaataatttataaataaataaatttacctataaaaaaaaaaaaaaa

SEQ ID NO: 41979 - DNA, 575 bp, Homo Sapiens
  misc_feature (2)..(2): n is a, c, g, or t
cntttggggacaaagttttacagagtgaaagccgtatcatggaataagaaagtataacttatggacaaaattaatacattctatgacatttttttctgatttgtcctgcagtgctcattcatcactccaaaaacagcaggccatctttttatgcaaaagtcagcgtgacaatatacttcactggtgtacatcgtttactttttaactggcttcattttaggaataataaattcatcagaatccttggctgaattaaaatggtttttgttttttggtttttttttttacccagacaactctagaaatgcggaccaaactacttcattttctcaaagggcataccttgtgcattgtggcttatgatgagccatattaattgcctgttaaatatacactagcttgaacttagatgttaaatgttattattaccagcatttgtccttttgtgaaatcagtatcagaatacttgcactctttaacacattctttataaaatgtataaattattcagaactatttaaaataaagaggagtgttattgcatgctgataatcattttgagtttgcctcagtag

SEQ ID NO: 41980 - DNA, 625 bp, Homo Sapiens
ggataatcttcaggctcttctctgtggtcctgggtggtgtgtctgggcgcgtgtccatgttcctgctgtgagcttgtccagcttctccttgccttccttcccctgcccactccacagcaagccccggggagaggctgcaccatgccacagactggcagagtttgcgaacgcctttctgtggctctaagcttgcctgatagcaccagccagagctttgtgcagctggatctggactttaatctgggtttccttaagaaccccaagaggttcaatgtagctgtgacccgggccaaggccctgctcatcatcgtggggaacccccttctcctgggccatgaccctgactggaaagtattcctggagttctgtaaagaaaacggagggtataccgggtgtcccttccctgccaaactggacctgcaacagggacagaatttactgcaaggtctgagcaagctcagcccctctacctcagggccccacagccatgactacctcccccaggagcgggagggtgaagggggcctgtctctgcaagtggagccagagtggaggaatgagctctgaagacacagcacccagccttctcgcaccagccaagccttaactgcctgcctgaccctga

SEQ ID NO: 41981 - DNA, 779 bp, Homo Sapiens
  misc_feature (764)..(768): n is a, c, g, or t
  misc_feature (770)..(779): n is a, c, g, or t
acctctccatcacttttgcatccctgagagtgggagggggctgtagtggtagctggggctcccaagaacgactcgggaatgtcatctccatcttcacccttcagagagcagtcctttctctgtgcagctggagacgctggtgaggagagccgggtccaggttcttaagaatgaggtgcggaggggctctccggtgctgctgggctgggttgagcaagcctacgcagacaagtgtgtgtgtggaccatccgcacctccagcccccaccccaccctctttgtctcagcgtgttatgtgcaatgacctatttaaggtaaacccattccaactacagcagttcagggctgatccaagcactgcctccctcctgctctgtccaggtggtctggaccataaactcaacttgagagggaaggcttggggttgaggacttgtgatcagaaaaactgaagatggaagttttggccggtgctcattagacatgagtcctcactctgtgtcctgagcccgtgtcattcttccaacctccctgcccccacacacttatcccagacacaacaccatgtggtctggaggtcccagcccccaccctaaaaaggttatccctgagaactccaccagacttgggagcccaagtgcagtgcctggtgctgctcccatctgccgccccccttctctcctgcaattggtttgtactcactgggctgtgctctcccctgtttacccgatgtatggaaataaaggccccttttcctccctgaaaannnnnannnnnnnnnn

SEQ ID NO: 41982 - DNA, 749 bp, Homo Sapiens
  misc_feature (622)..(622): n is a, c, g, or t
  misc_feature (727)..(727): n is a, c, g, or t
agtaacagggccaaagttatttctgttagacgtcaaggaatggtatcacagtctattgacctcagcgatttgtgcttgtttgtgctagaagaacatcccaaataggagaacctctcacaagctggggcaggtcaccttatctttgtaagatgaggatatcatctagatcagaaatctgactagattggattctgaggagaagaacctactacaaggcaaggagccgttttttggctttgaaaagtcttgctgtcttgggtctacattttagggaagagcaggtacatggatccaggcttctgccaaaaaaaaaaaagagaagaagatgacgatgatgaccagtcgtactatcttactgagccacagtgatgcatgcttttcggggaaaacttcattcacaagtattccagacaccaggcttcaggcatggccatgagcaagaccagcaaataacagctttttgccttgcagccctgaccccaatgtctgctgtttccaacactggtgatttctaactacggcccacagcagatgctgttgaataacaccatggcttcatcagaggatgtggggttgtagtacctctgggtgatgaagttgttttagtacatccattttttanaaaaaaaaaaggacttgtttttacttttttctaaatgtctctgactactgactgttctatacatagattatttttccttttttactatacatatatgaatatatnaatatatatatttactgttacc

SEQ ID NO: 41983 - DNA, 536 bp, Homo Sapiens
ctccccctgagcagcgagcctgcgtctgtctcagctgtccagcgctgagggccagggtcttgtgctgtggggctgggggatgccctcttttctatatttatttcatagaaagtctcctgcgggagcggaaatgcagtccggcctagggctcccagcccttgactgtcctcctgtgagggcctgaagctgggccagggcccgtcgcagcggagccccctctcagcagcccaccgggtccctccaggctgctgcccgtgcgtggtctttctcctccttttcaaagcaatagccgccgggtctgcaaagccctgtcagacagactgggcccttccaaggtcaagccatgtgtctgatgacattcctggtgaagcaaaggagaggaggatgggtcagccctcactgggtgtcacacactgagagaagtcctattgtaaagaaacggaaaaagtcacaaaaaagtttgtataaagacatatttttgtactacatggggactcttcctgcatgtcagcaataaaacttcctgatctggaaaa

SEQ ID NO: 41984 - DNA, 687 bp, Homo Sapiens
  misc_feature (656)..(656): n is a, c, g, or t
agctgcgatcctttggaggagaagatacggaccacggagacacaggtgcttgtggcatctgcacagaagaagctgctagaggaaagactaaagcttgtctcagaactgtgggatgctgggatcaaggctgagctgctgtacaagaagaacccaaagctactgaaccagttacagtactgtgaggaggcaggcatcccactggtggctatcatcggcgagcaggaactcaaggatggggtcatcaagctccgttcagtgacgagcagggaagaggtggatgtccgaagagaagaccttgtggaggaaatcaaaaggagaacaggccagcccctctgcatctgctgaactgaacaaactatcagaggaaaggaagtgggactggcactatttgaggttaagacaaactgcatatgtacttcaattgctttgcacttttccgtttcagcggaagacctgaagagtggtcagaacagagcctttgatttttattatggttattttattgattattactggcaaaaacggccaggtacaacacctttttcatacaaggcccaggaggcttagtccagtctgtgctcctgggctacaaggacccagcctgagatggtcccatctgcagggccccgcaccagttggagcagatgcctccccancaccaattgccaaaggtccaataaaatgcct

SEQ ID NO: 41985 - DNA, 901 bp, Homo Sapiens
  misc_feature (848)..(848): n is a, c, g, or t
ctggaccggtccggaattctcgggatccagtcccaatgcagcactgcttccctccagcttcagccgaacacacgctgtgagccaccaagacctggggcgacaggagaaccggtcctctctctgacggggtggcatttggccttgaacaaaaccaagtccactggggacagaggcaggggcaagtggctctccccattaccttctcaagacctcagtgggagcaccagccaatggtaccatcggctgggctgccaggtaccctgggcctggcgctgcagacctgagctggcttggacccatttgaggactgaactaggcaggcaatggctccagtgccctccctctgttccctggaccaccaccccacgtagctgctcacaccagcctccgggtgcctccctctgcttgtacagagcccatggtcgggacagtgccctggcctttgccggggaggaggatgctctgagattcagggtggggctggcaacccctgaagagaacacttcctgttggtctgtctcttcccaccttccatctgcacacacccccaaggtaagggtacagcccggctggcggcctccttgggaacgtgtaggccacggctctgccaccactaggtacctgctgagggcgctggctctgcagatcagaacaacggaggatagctttgtgcctggacccagagagtgtgggactccccgcttcatccccaccgtcccactccacagccttcccgaaacattccctggcaaacaaaggacactaggagaaaaatggaaaaacccttccagtaattaaaagggaagaaaccccgaaagaaaactacagacctcaagattccactctgntgccgcctctgcccgggaagggagggaaagcaccacaggtggaagctgaccct

SEQ ID NO: 41986 - DNA, 632 bp, Homo Sapiens
cacgaggggtgcccttaacaactgtcgtgactccagagaagccgatccccatttttattgaaagatgtattgagtacattgaagccacaggactgagcacggaaggcatctaccgggtcagcgggaacaagtctgagatggagagtctgcagagacagtttgatcaagaccacaacctggacctggcagagaaagactttacggtgaataccgtggctggtgccatgaagagctttttctcagaactgcctgaccccctggtcccgtataacatgcagatcgacttggtggaagcacacaaaatcaacgaccgggagcagaagttgcatgcccttaaggaggtattaaagaaatttccaaaggaaaaccacgaagtcttcaagtatgtcatctctcacctaaacaaggtcagccacaacaacaaggtgaatctcatgaccagcgagaacctctccatctgcttctggcccaccttgatgagacctgatttcagcactatggacgccctcacagccacgcgcacctaccagacaatcattgaactctttatccagcagtgccccttcttcttctacaatcggcccatcaccgagccccccggcgccaggcccagctccccctctgccgtggct

SEQ ID NO: 41987 - DNA, 613 bp, Homo Sapiens
gggagaccagagggtctgtgttctccaggagaatgagggtgttggtcccagaattgggaccggggccccgctggccagccctgggccacttcccgggtctccattgtgcgtgggtggcgtgttccaggcgtggctggagctggcttcctggctgtgctgccatgggcccctccctcagaagcacgttggcaggaggccgatcagaaccctagcgcctttggtcctaagaatgggaggctgccttccttcccaatctccctgccagggcccacagcgtggccctagccctcccctccccgggatgtagaacggggaccctcgcagggttggggcgggggctgatactcctcggcccctccctaccctgccctgtgtgttggctttgtggccgtccaagtgccaattggcttttcgcccaaataagggctggtatttctcctctgtccttggaggtgatttccccctgaccccctcccccaggtgagtgaccacctgggtgccagttacaggtgtttccagagaccatagaaatgtgttttcctgagagttcgtgtcattcgtgacttttttgtaaagaagttgtgttttcagaggtgattttatgacaggaaag

SEQ ID NO: 41988 - DNA, 582 bp, Homo Sapiens
atgattaattccatctgtgtttgtcatttctgactggaaaacttcttactccataccttgttcgatatggaggacaaataattggattgtctgataagtctgccaataaactatccagaaatagcaagtgtaatagtccccactatacgaattttatggtttgtataaacactaacattttccccttctgtagttgtatgaaaaaacaaatattgttagcatagtagataaattgttatgaaataccagaaaaaaaaatctgtatcttttactgagaacacccaatacccagataaatgactgtatcaggatttcatttgcatgttagtccacagagttgcccagaaccctaaatttattcataagagaaaatattgattaattattggtcattcctcataagtgtagctgttgatgtgtgcgtctgattattgcttttttaattttatgaaaattgtgtaaaattacatttttttccaggggagaaaaaaacatcaaacaaaaacatctaaatcatcctttttgttctttttcagtttttaaccacttttaggttttccccttacagaaaccacagaaata

SEQ ID NO: 41989 - DNA, 916 bp, Homo Sapiens
  misc_feature (7)..(7): n is a, c, g, or t
  misc_feature (668)..(668): n is a, c, g, or t
cagcttngggccatcacaaatgcaacttctggaggatcagctgaacagatcaagtacctagtagaactgggttgtatcaagccgctctgtgatctcctcacggtcatggactctaagattgtacaggttgccctaaatggcttggaaaatatcctgaggcttggagaacaggaagccaaaaggaatggcactggcattaacccttactgtgctttgattgaagaagcttatggtctggataaaattgagttcttacagagtcatgaaaaccaggagatctaccaaaaggcctttgatcttattgagcattacttcgggaccgaagatgaagacagcagcattgcaccccaggttgaccttaaccagcagcagtacatcttccaacagtgtgaggctcctatggaaggtttccagctttgaagcaatactctgctttcacgttcctgtgtcagaccaggctacccagtcgagtcctcttgtggagcccacagtcctcatggagctaacttctcaaatgttttccataatactgtttgcgctcatttgcttgccttgcgcacctgctctcttacacacatctggaaaacctccggctctctgtggtggaatacccttctaataaaagggtaaccagaacggcccactctcttttacggaaaaatccctangctttggagatccgcacttacattagagttatgggaatatacacatattaatgtggctccctttttcttgtggggggaataaaagaggagctcctcctcatttccctttaacatggggggaaaaaactgacattttaaagatgagactaaaatcctttaatcttggaattttacaccaactaccttaccgaccaaggggagatgttttaggacccgggttgggggtatacctttcagaagaaactttt

SEQ ID NO: 41990 - DNA, 542 bp, Homo Sapiens
cactaaaaactgatcagtgtaaaaaggaaaacccagttgcaagtttaaacgtgttcgaaagtctgaaaatagaacttgccttttaagttaaaaaaaaaaagctatcttgaaaatgttttggaactgcgataactgagaaactcttaccagtccacatgcaattagacatattcagcatatttgttattttaaaagggagggttgggaggtttcttattggtgattgtcacacggtataccatactcctctccttcaaagaatgaaaggccttgttaaggagttttttgtgagctttacttctttggaatggaatatacttatgcaaaaccttgtgaactgactccttgcactaacgcgagtttgccccacctactctgtaatttgcttgtttgttttgaatatacagagccttgatccagaagccagaggatggactaagtgggagaaattagaaaacaaaacgaactctggttggggtactacgatcacagacacagacatacttttcctaaagttgaagcatttgttcccaggatttatt

SEQ ID NO: 41991 - DNA, 548 bp, Homo Sapiens
gggagacacccatgtggctccccttagggccagcaccaagcaccacgctctcatcctgcaagtcggcgcacacagtggatgaaggcaggagacccagaaagcagtgcagtgcagctctaataaaggccttatttttcttatgtaaatcatctttttacatttgtttgtaaacatgtttaaagaacgaacctagtgggacatttttagactttgatgctctagccattttggattgtgtaagttgcagatgtggcttttactttttaaatggcatattaacaagccagcaaagtgtgtcagaccatggcgtggtatttattgtgcagcagatccagagacagaggcagcctgtcttttcagttggtttctgcttttaatttacttgtacaattcattgttactgttctgtttttctattaatcttttgtcaacttcctgattatgtaacaaagtatgtacagtctacttttgaactatttttatcacagtattatttattgctttctttcaataaagtactgaagcattttccactgccaatgaaaaaa

SEQ ID NO: 41992 - DNA, 663 bp, Homo Sapiens
ggggaagcatcgtgctcaaatccgccttttctgttggcatcacaaccagctacccagaagaaagactacctattatatttaacaaggtcctcttcaacgagggagagcactacaaccctgccacagggaagttcatctgtgctttcccagggatctattacttttcttatgatatcacattggctaataagcatctggcaatcggactggtacacaatgggcaataccggataaagaccttcgacgccaacacaggaaaccatgatgtggcttcggggtccacagtcatctatctgcagccagaagatgaagtctggctggagattttcttcacagaccagaatggcctcttctcagacccaggttgggcagacagcttattctccgggtttctcttatacgttgacacagattacctagattccatatcagaagatgatgaattgtgatcaggaccaagatccctgtggtaaacactctgattgaatctggggttccagaaggtggaacaagcaggaatgggatccaaagagactcccactcagattctaaagcatttaaagacaattctagcagaatttatcaaaacaagatgaaacacagaaaagttgaaaccacacaaaatgaatctattaagaatagcccagaataattctctgaaac

SEQ ID NO: 41993 - DNA, 803 bp, Homo Sapiens
ttcggacagtgcccatgcaatggcttgggttgggattttggtttcttcctttcctcgtgaaggataagagaaacaggcccggggggaccaggatgacacctccatttctctccaggaagttttgagtttctctccaccgtgacacaatcctcaaacatggaagatgaaagggcaggggatgtcaggcccagagaagcaagtggctttcaacacacaacagcagatggcaccaacgggaccccctggccctgcctcatccaccaatctctaagccaaacccctaaactcaggagtcaacgtgtttacctcttctatgcaagccttgctagacagccaggttagcctttgccctgtcacccccaaatcatgacccacccagtgtctttcgaggtgggtttgtaccttccttaagccaggaaagggattcatggcgtcggaaatgatctggctgaatccgtggtggcaccgagaccaaactcattcaccaaatgatgccacttcccagaggcagagcctgagtcaccggtcacccttaatatttattaagtgcctgagacacccggttaccttggccgtgaggacacgtggcctgcacccaggtgtggctgtcaggacaccagcctggtgcccgtcctcccgacccctacccacttccattcccgtggtctccttgcactttctcagttcagagttgtacactgtgtacatttggcatttgtgttattattttgcactgttttctgtcgtgtgtgttggggatgggatcccaggccagggaaagcccgtgtcaatgaatgccgggg

SEQ ID NO: 41994 - DNA, 722 bp, Homo Sapiens
  misc_feature (702)..(702): n is a, c, g, or t
gcggccactacaccatttcttgaagaattttttaaaaactactctttcaagggtattacagataaacccgtggatgttttactgtccatttttgtcatttttttctttgagattttttaattccacaaatcctccgacgtcacctattattgtatgagtaacttctattcatttcccaatgaaagaataatagcttcttaaatatttttatcatgtttaagggtgtgcatatttatttaatcagaagtaaaacaagaacaaattctaggaaaaagaaattcagtaaggaagagggctttttcgtctaattttaactaaatctttgatatttgattctctactcttaaccaaagtattcaaattatttaggaatttcaatgaccttgctttctaaattaggaaaacagccacaccaatcaatttgctaggtgccatattgctttgtataagttattttccatcaaggatttgtgtctgctttgtgtgctgctatataataattatgtcttgctgaagttcttctgcttattgaattcctctactgaagttccttacttattcaaataagtaaggtaggaggtacttagtcaattgagcagctaattggctaaaagtgtcttgagcacaagataagcatgtactgaaaaactgagtatctcttgtccattgttaactgtatttctaatggttgattgcatttanattaaataattcacccctac

SEQ ID NO: 41995 - DNA, 616 bp, Homo Sapiens
  misc_feature (525)..(525): n is a, c, g, or t
cccacgcgtccgcggacgcgtgggcgggacttcaggttctttctgaaatcgccgtgttactgttgcactgatgtccggagagacagtgacagcctccgtcagactcccgcgtgaagatgtcacaagggattggcaattgtccccagggacaaaacactgtgtcccccccagtgcagggaaccgtgataagcctttctggtttcggagcacgtaaatgcgtccctgtacagatagtggggattttttgttatgtttgcactttgtatattggttgaaactgttatcacttatatatatatatacacacatatatataaaatctatttatttttgcaaaccctggttgctgtatttgttcagtgactattctcggggccctgtgtagggggttattgcctctgaaatgcctcttctttatgtacaaagattatttgcacgaactggactgtgtgcaacgctttttgggagaatgatgtccccgttgtatgtatgagtggcttctgggagatgggtgtcactttttanaccactgtatagaaggtttttgtagcctgaatgtcttactgtgatcaattaaatttcttaaatgaaccaaaaaattaaaaaaaaaaaaaaa

SEQ ID NO: 41996 - DNA, 593 bp, Homo Sapiens
gctgtccagcatgactatggacgcccgtctcagcgccaagatggctctccgggggaaggccctgcgcacgcagctggacctgcgcaggttccgaatctattccaaccattctgcactggagtcgctggctctgatcccattacaggcccctctgaagaccatgctgcagattggggtgatgcccatgctcaatgagcggacctggcgtggggtgcagatcccactacctgagggcatcaactttgtgcatgaggtggtgacgaaccatgcgggattcctcaccatcggggctgatctccactttgccaaagggctgcgagaggtgattgagaagaaccggcctgctgatgtcagggcgtccactgcccccacaccgtccacagcagctgtctgagccctcaatccccaagctggcagctgtcattcaggaccccaacccctctcagcccctcttttcccacattcatagcctgtagtgccccctctaacccccagtgccacagagaagacgggatttgaagctgtacccaatttaattccataatcaatctatcaattacagtccgtccaccaccaaaaaaaaaaaaaaaaaa

SEQ ID NO: 41997 - DNA, 631 bp, Homo Sapiens
cgcgtccggttacctgtaaatttctgcccacataacattatactcatccctagtagtgcattttgggagttggggtgggaaggggtatgggaaggatagactcataattaaaatgtctaacatgtctctgttgagaaatttatttaatgtaaggaacttgggtgttaatagttgagagctgtttagtaataacccagttttcttgaggtctgtttactttatactttttaaaaacttctgtagttcttttggccagtgtgtttgtattatctgtgcattaatggtcctcatctgactcctgcattgtgtcttatttttctgcatggattggcataagaccattactaaaatttggcacctgtgagatgtttgatattatgaacaggaaacataatttaatgtatgaatagatgtgaatttgggatttcaaaatagatgaataacaactattttatagtaaagttattgaaatggaaatgaaaacagccagtaacttatgtttcagaatgtttgtaacacacttcatggtgttcccataggctttgctgtctagtcttatagtttgaggtttttttggtctgcatttttctttttgattacaaaatttataatttaataaatactagagttt

SEQ ID NO: 41998 - DNA, 634 bp, Homo Sapiens
gactctacattgtataagaacttatttgtggataagaatatgaagtatattccaacagaagatgtttcaggtctgtcactggaagaacaattgaggaggttgcaagaagaacgaacttgtaaagtgtgtatggacaaagaagtttctgttgtatttattccttgtggtcatctggtagtatgccaggaatgtgccccttctctaagaaaatgccctatttgcaggggtataatcaagggtactgttcgtacatttctctcttaaagaaaaatagtctatattttaacctgcataaaaaggtctttaaaatattgttgaacacttgaagccatctaaagtaaaaagggaattatgagtttttcaattagtaacattcatgttctagtctgctttggtactaataatcttgtttctgaaaagatggtatcatatatttaatcttaatctgtttatttacaagggaagatttatgtttggtgaactatattagtatgtatgtgtacctaagggagtagtgtcactgcttgttatgcatcatttcaggagttactggatttgttgttctttcagaaagctttgaatactaaattatagtgtagaaaagaactggaaaccaggaactctggagttcatc

SEQ ID NO: 41999 - DNA, 684 bp, Homo Sapiens
  misc_feature (684)..(684): n is a, c, g, or t
gggtattttaaataaacattctcgttccttccagttccagtcatagtgtgtctgtggcattccagtccaaccatgtgacttatttattctaatttgagggctgcactgtacaccatggtgtcctgtgacaccgtgttccagacatttatggaaggaaaacatcccatataaatgaaactgtcatgctgtgtcctccccggcagcagaagatgtgtccttccattgagtgagggtaaccttatgtccacaaaggatactttgagaaagcccctaaggaacaagcctcagtcccacggtttcagactatttattctctgaacacaagagtattggttaattatgttctcagctctccctgctgttgtatgtgtgcattcactgcaagtaacttatatctttttatttgaatgtattttaaagcagtagatagaataacaaaggaatatgaaaaccatggactgaatggaccattttatgtattcagagagagaagccactcatcattgccagaaataccatgtaaaaaatggcagttcagaggttgcaatacttagtatagtaaataaataaacggtcaacattgtgcaaccactaacaaaaaatgtgttgtaatgcatcaaaaatcaacccaattttattcactaatgagtatcaataaaataagttcaaaggaggaaaaccttn

SEQ ID NO: 42000 - DNA, 1077 bp, Homo Sapiens
aatattcatacggcatggactttaccaagatggcgtatttaagtttacagtttacatccctgataactatccagatggtgactgtccacgcttggtgttcgatattcctgtctttcacccgctagttgatcccacctcaggtgagctggatgtgaagagagcatttgcaaaatggaggcggaaccataatcatatttggcaggtattaatgtatgcaaggagagttttctacaagattgatacagcaagccccctgaacccagaggctgcagtactgtatgaaaaagatattcagctttttaaaagtaaagttgttgacagtgttaaggtgtgcactgctcgtttgtttgaccaacctaaaatagaagacccctatgcaattagcttttctccatggaatccttctgtacatgatgaagccagagaaaagatgctgactcagaaaaagcctgaagaacagcacaataaaagtgttcatgttgctggcctgtcatgggtaaagcctggctcagtacagcctttcagtaaagaagagaaaacagtggcgacttaagagatggtgaatctggtgcaccatgcactttcctgctagactctggcctagttcaagctgaccaatggcagaggactgcctgaagagtaaaactgtgtgaacaatgactgactgccagtgttttccatgtatgcataggttctaacagcagggtttggaaacctgtctctaagtaatgcattacttctgtcagaagtgtcttagggtggttatctagttcagtactccaaattattggggaccttgaggcttaagtaagtatttttctgaatataatgctaaaggtaagttgcattcatttaaactaatagagcagacagaattcagcactacttaatagtttataaatcagtggtttcagttgtatatatgttaggaaatggagaggtatgagagagcagggttcctacctccacacttttaatggaagatcatttgaatctcagtcttcacccgcactgatttgagcctgcactgtcttactgatttaccaactgaattcctgaaaaatggctttatttcag

SEQ ID NO: 42001 - DNA, 904 bp, Homo Sapiens
ggtccctgctttctctttctctttctctgtgtctcagatggcgattttgctgacagctgccaagaaaatgcttcactcaacagtcctcatgtgcccagagatgtttatagaactgtttgaattgcagccatcccctgccccctcccaggctgaagatctgttctttttaagttgattcgggagtggcattcttttatacccaaagactgtagtgcatcttgaagagctcaaagcacatgaccgcacaaatgcttacagggtttcctcccgagtaatccaatctcactccccttgtaagggaattctggggcagctatggtttgagtatgcagtttgcatcgtgtttctacctttagtaccttgccactcttttaaaacgctgctgtcatttcccatttcttagtactaatgattctttgattctccctctattatgtcttaattcactttccttcctaaatttgttatttgcatatcaaattctgtaaatgttttgtaaacatattacctcacttggtaatacaatactgatagtctttaaaagatttttttattgttatcaataataaatgtggaactattttaaagaaaaaaaaaaaaaaggggcggccgcctctagaagtatcccctcgaagggggcccaagcctttacgcggtacccccggcttttcctttgtaacaaagggggtcccccttattgggggaggtccctaattatataaagcctagggggcacctggggcccgatccctttttttaacaaacccgtcctcgggcacacgtgggggaaaaaaaaacttgcgccaaaacctttgggggaaaaatcttttgggtggggaaagggaaaacccctctgaaacctccccggggaggggggggggggagcccaacaataatatgggga

SEQ ID NO: 42002 - DNA, 822 bp, Homo Sapiens
  misc_feature (795)..(796): n is a, c, g, or t
ggcttctccagttagaatgcaccatggagacgtggtgggactccagctcgtgtgtcctcatggagaacccaggggacagctggtgcaaattcagaactgagggctctgtttgtgggactgggttagaggagtctgtggctttttgttcagaattaagcagaacactgcagtcagatcctgttacttgcttcagtggaccgaaatctgtattctgtttgcgtacttgtaatatgtatattaagaagcaataactatttttcctcattaatagctgccttcaaggactgtttcagtctgagtcagaatgtgaaaaaggaataaaaaatactgttgggctcaaactaaattcaaagaagtactttattacaactcttttaagtgccttggatgagaagtgtcttaaattttcttcctttgaagctttaggcagagccataatggactaaaacattttgactaagtttttataccagcttaatagctgtagttttccctgcactgtgtcatcttttcaaggcatttgtctttgtaatattttccataaatttggactgtctatatcataactatacttgatagtttggctataagtgctcaatagcttgaaacccaagaaagttggtatcgaaatttgttgtttgtttaaacccaagtgctgcacaaaagcagatacttggaggaaaaacactattttcaaaaagcacatgtaattggaccaacagtttttataattttaaataaaaaaggaaatacatttgcccaaaacccctaaaaaagtccccaaaaaaaaaaaanncccccctttgttccggggcggttctt

SEQ ID NO: 42003 - DNA, 691 bp, Homo Sapiens
  misc_feature (580)..(580): n is a, c, g, or t
  misc_feature (667)..(667): n is a, c, g, or t
  misc_feature (690)..(690): n is a, c, g, or t
taggaggccagcaagcgcatctccagccacatccctttgatcatccagttcttcatgctccagacgtacggccagcagcttcagaaggccatgctgcagctcctgcaggacaaggacacctacagctggctcctgaaggagcggagcgacaccagcgacaagcggaagttcctgaaggagcggcttgcacggctgacgcaggctcggcgccggcttgcccagttccccggttaaccacactctgtccagccccgcagacgtgcacgcacactgtctgcccccgttcccgggtagccactggactgacgacttgagtgctcagtagtcagactggatagtccgtctctgcttatccgttagccgcggtgatttagcaggaagctgtgagagcagtttggtttctagcgtgaagacagagccccaccctcagatgcacatgagctggcgggattgaaggatgctgtcttcgtactgggaaagggattttcagccctcagaatcgctccaccttgcagctctccccttctctgtattcctagaaactgacacatgctgaacatcacagcttatttcctcattnttataatgtcccttcacaaacccagtgttttaggagcatgagtgccgtgtgtgtgcgtcctgtcggagccctgtctcctctctctgntataagctcatttctagcagaana

SEQ ID NO: 42004 - DNA, 927 bp, Homo Sapiens
  misc_feature (639)..(639): n is a, c, g, or t
  misc_feature (697)..(812): n is a, c, g, or t
  misc_feature (821)..(821): n is a, c, g, or t
aggaataagaatgtgcatgaagcctaaaataccaagaaagcttatactgaatttaagcaaagaaataaaggagaaaagagaagaatctgagaattggggaggcatagattcttataaaaatcacaaaatttgttgtaaattagaggggagaaatttagaattaagtataaaaaggcagaattagtatagagtacattcattaaacatttttgtcaggattatttcccgtaaaaacgtagtgagcacttttcatatactaatttagttgtacatttaactttgtataatacagaaatctaaatatatttaatgaattcaagcaatatatcacttgaccaagaaattggaatttcaaaatgttcgtgcgggtatataccagatgagtacagtgagtagttttatgtatcaccagactgggttattgccaagttatatatcaccaaaagctgtatgactggatgttctggttacctggtttacaaaattatcagagtagtaaaactttgatatatatgaggatattaaaactacactaagtatcatttgattcgattcagaaagtactttgatatctctcagtgcttcagtgctatcattgtgagcaattgtcttttatatacggtactgtagccatactangcctgtctgtggcattctctagatgtttcttttttacacaataaattccttatatcannnnnnnnnnnnnnnnnnnnnnnnnnnnnnnnnnnnnnnnnnnnnnnnnnnnnnnnnnnnnnnnnnnnnnnnnnnnnnnnnnnnnnnnnnnnnnnnnnnnnnnnnnnnnnnnnnnnaaggggggngcgcccttctaaataatcccccccggggggggcccaagtttttatccggaccccccatttttttgtttgaaaaaaggggggcccccctataaggggggcggccttc

SEQ ID NO: 42005 - DNA, 915 bp, Homo Sapiens
  misc_feature (699)..(699): n is a, c, g, or t
  misc_feature (755)..(755): n is a, c, g, or t
catgagttgcctcatgaattaggtgactttgctgttctactaaaggctggcatgaccgttaagcaggctgtcctttataatgcattgtcagccatgctggcgtatcttggaatggcaacaggaattttcattggtcattatgctgaaaatgtttctatgtggatatttgcacttactgctggcttattcatgtatgttgctctggttgatatggtacctgaaatgctgcacaatgatgctagtgaccatggatgtagccgctgggggtatttctttttacagaatgctgggatgcttttgggttttggaattatgttacttatttccatatttgaacataaaatcgtgtttcgtataaatttctagttaaggtttaaatgctagagtagcttaaaaagttgtcatagtttcagtaggtcatagggagatgagtttgtatgctgtactatgcagcgtttaaagttagtgggttttgtgatttttgtattgaatattgctgtctgttacaaagtcagttaaaggtacgttttaatatttaagttattctatcttggagataaaatctgtatgtgcaattcaccggtattaccagtttattatgtaaacaagagatttggcatgacatgttctgtatgtttcagggaaaaatgtctttaatgctttttcaagaactaacacagttattcctatactggattntaggtctctgaagaactgctgggtgtttaggaataagaatgtgcattgaagcctanaatacccaaaaagcctatactggattttaagcaaagaaataaagggagaaaagagaagaatctggaaaattggggaggcataaattcttataaaaatcccaaattttgttggaaaataagaggggaagaaattttaaaattaagtattaaaaaggccgaa

SEQ ID NO: 42006 - DNA, 902 bp, Homo Sapiens
  misc_feature (779)..(781): n is a, c, g, or t
  misc_feature (784)..(788): n is a, c, g, or t
  misc_feature (790)..(805): n is a, c, g, or t
  misc_feature (807)..(807): n is a, c, g, or t
  misc_feature (809)..(812): n is a, c, g, or t
gggtttactacaatgagttggaaaccagggtccgccttagtaagcgccgggccaaggctggggttcagtcaggcaccaacgccctgcttgtggtcaaacatcgggacatgaatgagaaggaactggaagctcaggaggcacggaaggcccagctagaaaaccacgaaccggaggaggaagaggaagaggagatggagacagaagagaaagaagctgggggctcagatgaggagcaggagaagggcagcagcagtgagaaggagggcagtgaagatgagcactcgggcagcgagagtgaacgggaggaaggtgacagggacgaggccagtgacaagagtggcagtggtgaggacgagagcagcgaggatgaggcccgggctgcccgtgacaaagaggagatctttggcagtgatgctgattctgaggacgatgccgactctgatgatgaggacagaggacaggcccaaggtggcagtgacaatgattcagacagcggcagcaatgggggtggccagcggagccggagccacagccgcagcgccagtcccttccccagtggcagcgagcactcggcccaggaggatggcagtgaagctgcagcttctgattccagtgaagctgatagtgacagtgactgagtcccagggcattcagggctggttcagacaccattattgtgagcagcaaagcacttttctagtggtctgtttgtgagcctttcacttgtttgttccccacccccaaacctttgctgttaataaagtcaacttctctttaannnaannnnnannnnnnnnnnnnnnnnanannnnaaaaactcgaaggcatccattgtcggggtggcggagaaaaaaggtaatggaaatgggcacatgggcccataagcttgggtttcctgcacc

SEQ ID NO: 42007 - DNA, 891 bp, Homo Sapiens
ggaattcccgggatctgcaggccgtgtgtctgtcagcccaaccttcacatctgtcacgttctccacacgggggagagacgcagtccgcccaggtccccgctttctttggaggcagcagctcccgcagctgaagtctggcgtaagatgatggatttgattcgccctcctccctgtcatagagctgcagggtggattgttacagcttcgctggaaacctctggaggtcatctcggctgttcctgagaaataaaaagcctgtcatttcaaacactgctgtggaccctactgggtttttaaaatattgtcagtttttcatcgtcgtccctagcctgccaacagccatctgcccagacagccgcagtgaggatgagcgtcctggcagagacgcagttgtctctgggcgcttgccagagccacgaaccccagacctgtttgtatcatccgggctccttccgggcagaaacaactgaaaatgcacttcagacccacttatttctgccacatctgagtcggcctgagatagacttttccctctaaactgggagaatatcacagtggtttttgttagcagaaaatgcactccagcctctgtactcatctaagctgcttatttttgatatttgtgtcagtctgtaaatggatacttcactttaataactgttgcttagtaattggctttgtagagaagctggaaaaaaatggttttgtcttcaactcctttgcatgccaggcggtgatgtggatctcggcttctgtgagcctgtgctgtgggcagggctgagctggagccgcccctctcagcccgcctgccacggcctttccttaaaggccatccttaaaaccagaccctcatggctgccagcacctgaaagcttcctcgacatctgttaa

SEQ ID NO: 42008 - DNA, 831 bp, Homo Sapiens
  misc_feature (645)..(645): n is a, c, g, or t
  misc_feature (658)..(658): n is a, c, g, or t
  misc_feature (672)..(672): n is a, c, g, or t
gggtctgacatttctgagacgcaggtggaacgtaaaagggggaagaaaagaaataaagaggccacaggtaaagatgtggaaagttacctccagcctaaggccaagaggcacacggagggaaagcccgagagggccgaggcccaggagcgagtggccaagaagaagagcgcgccagcagaagagcagctcagaggcccctgctgggaccagagttccaaggcctctgctcaggatgcaggggaccatgtgcagccgcctgagggccgggacttcaccctgaagcccaaaaagaggagagggaagaaaaagctgcaaaaaccagtagagatagcagaggacgctacactagaagaaacgctagtgaaaaagaagaagaagaaagattccaaatgaatccttcccagccggggccttccgaccactcagctgtcagggcactgcgggggcagacacctctggcctgaagtcacagcagagttcaccccagagcgcctgggcgcatcttgtggcatgcccatgggctgccgagtcctgccctctcgccacatttcccccaagttacattcccaggaggacctttttaatgttctcaatcgtggctctcagacacaaataaatttttttgtaaactctgagcccttcagncagagagtttaanttatatcattacanatacatgcattcatgtaagtgtgcacacgtgtgtgtgcatgtgcgcatctgtgtgtgtgtgtgtgtggcactatctccgtttgctctcggttcccttcaatacaatgaatggtgctttcttttgaaagactcagccttattaaagggattaggaggcaa

SEQ ID NO: 42009 - DNA, 633 bp, Homo Sapiens
ccggaaacggatgatttctatgctgagtttgtgctggtgtatgtgtgaagtgagtgagttgggtgtattgtgcgctaaacttttctgatagaggaagcctgattaaagaatggtccgtgctaaggacttgttagatctagttcactctccatttaataattatatgctatttctatattttcattctcctatcacctgtcttgcctttttcattattttattatgaaacttgtgtaaatacaattttgtttctgtactttttggcataacataaatctgtgaacttgaaatttgaattttgtgttagagatttttttgttgtttgtttagtcttgtctcagattttattatgtaaatcccattattcaaagttgcctaaatccatttggaaatctttaaaaaaaaaattggggattcttaaagttgaatttattggcttttctgatccagttttgtttggaccaaaaaccagtattgtacaaagtattaagcatatatttttatatttactaaaatggactgtggtgactttggataataaggaaaagtttaatattaaagccatgtttattacagtataattaacatgttaaaccatgggataaatgccatcaataaaaaattatgacataa

SEQ ID NO: 42010 - DNA, 706 bp, Homo Sapiens
acccagtccctgtccatacaggagacgtggtcacgggttcagttgtgttgcagagaaacccagtgtggagaaggcacatgtctgtggctctgagctgggctgtcacttccagacaagaccccacatctcaaaaagttggagaaaaagtcttccccatctggagatgacagttgatgctttatttggaaagcagtgtgcatatcttgaggggtgatgaacacaagcaaaccaagttgcacctggcttctgcacactcctgcgaaagtcggtgaacattcactccacattgacccctccctagcctggcaggtgacgtcagggtccttcacagacaaacacgcttgggctcggcaggagctgccgtggccacccccgctgcccagtgtctgccctctagaagtaggctgtgtttccaggtgttcacccgtggtgcccacagtgccgacccgtggctgggtcggagctccatgttcctaagctaggtctaggtctacactcctaggacgcacgcatatcagcccgtgtaccctgtgacagtgactgtccccacctcctgtgttagtggtgcccttactgccgtcgctcatccactcgtgtgggacgtaggattgcacagggctgtgccagtggcgtgtagggaacactgccctggctcagcgtgcgagctaaggtggcgatgtatgcgatgggactctgcatgggatag

SEQ ID NO: 42011 - DNA, 539 bp, Homo Sapiens
gtctggctcacctggaggaagaggtccacgacaaggtggttgcccgggacctggttggagccatgttgagcccactgccgcagccacgcccctctgccccccaggtgctggcccaccccttcttttggagcagagccaagcaactccagttcttccaggacgtcagtgactggctggagaaggagtccgagcaggagcccctggtgagggcactggaggcgggaggctgcgcagtggtccgggacaactggcacgagcacatctccatgccgctgcagacagatctgagaaagttccggtcctataaggggacatcagtgcgagacctgctccgtgctgtgaggaacaagaagcaccactacagggagctcccagttgaggtgcgacaggcactcggccaagtccctgatggcttcgtccagtacttcacaaaccgcttcccacggctgctcctccacacgcaccgagccatgaggagctgcgcctctgagagcctcttcctgccctactacccgccagactcagaggccaggaagcca

SEQ ID NO: 42012 - DNA, 747 bp, Homo Sapiens
  misc_feature (684)..(684): n is a, c, g, or t
aagtgaagactcaggaatggtgtgcattataaatgacacacattgccacttgtgtagatatttttaagttctttggctaagtcctctcctaactgcctgtcctctggttaggcccctccctctccactagtggtgaatgcatgtgtctgtctgatcagcatcactgcacacggaggtctagtgagcctcttgctaagtgtcacacacactcttcccaaagacgtgatgagttaaagttgtattctgaaatcatgaagccagagcctgtgccagaccttctgctacctctcatagaattgctctgtaattctaaatttaaaattagaagtagagagagataagccatcgcccctttgcctctgagaattggctgctgtttctaatataattattttctaagatagccagatagttagaaaaagattttcattgatgacatatctttaaactttcttgcatcagtattctaaattgagcaaactgaaagattttcatcaggaaaggagcactgtgggaagagcccagtattcacattttttccccatttttcagaagcgacatttcatatataggtgccaaaagtgaatcggggtgcggagagtgggaaccttttgaatttatgattgtcacagagatggtagaaattatgatctgactggaaaacaatcctgtatcccctcccanagaatcatggggctttttttttgaattaaaaagcagacaaatagaaaaaaaaaaaaaaaaaag

SEQ ID NO: 42013 - DNA, 637 bp, Homo Sapiens
  misc_feature (562)..(562): n is a, c, g, or t
  misc_feature (575)..(575): n is a, c, g, or t
  misc_feature (589)..(589): n is a, c, g, or t
  misc_feature (625)..(625): n is a, c, g, or t
gttattattcatactgtgttgctcatttgacaaaataaggtaaggatttcataatcaggttgtctgggtttcagagctgtttttaattaactgagttacctacaggcacccaatctagaccctaattctgtggttggtgttcctctgtagatttcaagacaagtagtgatgtcattttctccctgagctgtagggtggacctggacccctcagagatgctcgactgcagggtcctggggtccctagagtggtcctgcagcagcccctggcaatgagctgcctgatgatgagtcccaaggtacattgttctactgttttatacccaggtagaagttacacagcaatttagcaatgttgttaacagacatacagaattgtgtgtgtgtgtgtgtgtgtgtgtgtgtgtgtgagtgttttgatataaacgtgcaattaaaattcaaagtttattttttatcacaagcacctttgaaatgtacgtggaaaacgtcggctgctcgtgagaatcatgtgtgacttacgttccttatgttttatggaactctcggaacagtgttttgtntttgtttagtttntggtttcgtttttntgagatcgaccactgcactccagcactccagcatgngtgacagacaaa

SEQ ID NO: 42014 - DNA, 619 bp, Homo Sapiens
gagaagagcagcaaggtctcggagcagctcaagtgctgcagcggcatcctcaaggagatgtttgccaagaagcacgccgcctacgcctggcccttctacaagcctgtggacgtggaggcactgggcctacacgactactgtgacatcatcaagcaccccatggacatgagcacaatcaagtctaaactggaggcccgtgagtaccgtgatgctcaggagtttggtgctgacgtccgattgatgttctccaactgctataagtacaaccctcctgaccatgaggtggtggccatggcccgcaagctccaggatgtgttcgaaatgcgctttgccaagatgccggacgagcctgaggagccagtggtggccgtgtcctccccggcagtgccccctcccaccaaggttgtggccccgccctcatccagcgacagcagcagcgatagctcctcggacagtgacagttcgactgatgactctgaggaggagcgagcccagcggctggctgagctccaggagcagctcaaagccgtgcacgagcagcttgcagccctctctcagccccagcagaacaaaccaaagaaaaaggagaaaggacgaacagaagaaaaaccagaaacca

SEQ ID NO: 42015 - DNA, 674 bp, Homo Sapiens
gtggaactggaagtgggctatcaccatgggcaagccctgggtgcaggctccccacctgcctgggaactctggcagctctcctcagctccttgggcttgagcagctgcaactgccccagatttgctgtggaagcaggggctagccctggcctcaccagggcctcccggggccctgcattgatgctcaggagttcctgggctgctcttgatcctttctgggcatccagcttccagttaagctctgtttgccaaacaaactattctcagctgccctttggcctgcgcctgatgtgttcctgttgcagtcccgcctgcctgagacaggagcaggcaggagagccttcatgcccagattcccacaggacaattggggagctgctggcattgtctttctgggaagattctgctttcttggaccaaatggcagcctgattaccagtgtcgggcctgcatgctgcccccgacacacgcacgcacgcgcacacacgtgtgcacatgggccatagccacaagccagctctcctccagggtcctttcaacctcgctgtccagggaccctgtccttcttgcccgtggggcttccatctggcagagaacgttcagggcttgttgaacttgaaagctcattagacttaagctgtcacctgtgcttggtgccccaggaacagccagaga

SEQ ID NO: 42016 - DNA, 493 bp, Homo Sapiens
  misc_feature (22)..(22): n is a, c, g, or t
cccacgcgtacgcccacgcgtncgcttcaccgtaagcaaggacagtgttctggcaggtaccaacaaagagaacctagggttgccagtctcgactccattcctggagccacctctggggagcgatggccctgctgtaacttttggtaaaacccaagaggatcccaaaccattttgtgtgggcagtgccccaccaagtgtggatgtgacccccacctataccaaagatggagctgatgaggctgaatcaaatgatggcaaagttctgaaaccgaagccatctaagctggcaaagagaatcgccaactcagcgggttacgtgggtgaccgattcaaatgtgtcactaccgaactgtatgcagattccagtcagctcagccgggagcaacgggcattgcagatggaaggattacaagaggacagtattttatgtctacccgctgcttactgtgagcgtgcaatgatgcgcttctcagagttgtagatgaaagaaaga

SEQ ID NO: 42017 - DNA, 568 bp, Homo Sapiens
gtttctgataggatgtgaaatggactctcctcgggtgggtccagcaggggccctgcccaccagaacacagtccgtgctgtgctgcgctaaggagctggccctcaactctccttggtgcagggttcccacaaccgagttctagttccctgaggtctttaaaaacaaaaacagaatgttgtacgtgaagattctaggaggggagggaccagcaaatctgagagaaccgtcctggggcctcccttcgaggagccctctgatgtgaggagggacttgagttgagtgacgctgtggtgtgaggtgttctgagctcactgaccggaaggtccaggtgaatctcgtcataagtgatctcaggctctcacaggatccggagggaaatgtgttagagggtctggaaaattcagtgcttttgagttacttgtttttattaaaaatttcctcacaaaagagagtcctcaagttgtggctgttcttgggaaaggggtcaccgtgtctgacaaagtgtaactttaaaaagcacgttgattttttacaaatgtaagtgtgcttgggaattccttaaattttg

SEQ ID NO: 42018 - DNA, 623 bp, Homo Sapiens
tcagtgccctctgtgctttatggacacaaaaccagagcacttgatgaactcggggtactagggtcagggcttatagcaggatgtctggctgcacctggcatgactgtttgtttctccaagcctgctttgtgcttctcacctttgggtgggatgccttgccagtgtgtcttacttggttgctgaacatcttgccacctccgagtgctttgtctccactcagtaccttggatcagagctgctgagttcaggatgcctgcgtgtggtttaggtgttagccttcttacatggatgtcaggagagctgctgccctcttggcgtgagttgcgtattcaggctgcttttgctgcctttggccagagagctggttgaagatgtttgtaatcgttttcagtctcctgcaggtttctgtgcccctgtggtggaagagggcacgacagtgccagcgcagcgttctgggctcctcagtcgcaggggtgggatgtgagtcatgcggattatccactcgccacagttatcagctgccattgctccctgtctgtttccccactctcttatttgtgcattcggtttggtttctgtagttttaatttttaataaagttgaataaaaaaaaaaaaaaaaaa

SEQ ID NO: 42019 - DNA, 800 bp, Homo Sapiens
tccagccttagctgaccctgctggacccccagatcaaggtgatgcacaagcagctgctgctcttcccaatgctgtgtccgcctactttgctgggaaccagaaacagctggagcagaccctgcagcagttcaacatcaagctgcggcctccaggagctgagaaaccctcctggctagaggagcagtgagctgctcccagcccaacttggctatcaagaaagacattgggaagggcagccccagggtgtgggagattggacatggtacatcctttgtcacttgccctctggcttgggctcctttttctggctggggcctgacaccagttttgcccacattgctatggtgggaagagggcctggaggcccagaagttgctgccctgtctatcttcctggccacagggcttcattcccagatcttttccttccacttcacagccaacggctatgacaaaaccactccctggccaatggcatcactcttcaggctggggtgtgctccctgaccaatgacagagcctgaaaatgccctgtcagccaatggcagctcttctcggactcccctgggccaatgatgttgcgtctaataccctttgtctctcctctatgcgtgcccattgcagagaaggggactgggaccaaaggggtgggggataatggggagcccccattgctggccttgcatctgaataggcctaccctcacccacccacccagtttaattgtgcttagagcccaggaagattgggatctagcactaggaataaccctttcataaaagcaaaaaaaaaaaaaaaaaa

SEQ ID NO: 42020 - DNA, 700 bp, Homo Sapiens
ttcaggaagtcaaggagcagcgggtgacggggctgctggttgccctgcttgtgggcctctccatagttatcggggatctgctccggcagatccccctggccgtgctctttggaattttcctgtacatgggagtcacctcccttaacgggatccagttctatgagcggctgcatctgctgctcatgccgcccaaacaccacccagatgtcacttacgtcaagaaggtccggaccctccgtatgcacctgttcacggccctgcagctgctctgcctggccctgctctgggccgtcatgtccacagctgcctccctggccttccccttcatcctcatcctcacagtgccgctccgcatggtggtgctcacccgtatcttcaccgaccgagagatgaaatgtctggatgctaacgaggcagagccggtgtttgatgagcgggagggtgtggacgagtacaatgagatgcccatgcctgtgtagcctgcaccgagggacagccgagggaccgatggacgaggggacaggctggtgggatggggttccccctcccatgccctccctcctttttatttaagtgaataatttaaagtcttcttctcccccattgcccctgcagtaaagtgcttggggccccacctaataaaaaaaaaaaaaacaggggggggaggaaagaaataaaaaagattaaatcggattaaaca

SEQ ID NO: 42021 - DNA, 768 bp, Homo Sapiens
ggactttcagaagatgaaggtaagtagaaaccgttgatgggactgagaaaccagagttaaaacctctttggagcttctgaggactcagctggaaccaacgggcacagttggcaacaccatcatgacatcacaacctgttcccaatgagaccatcatagtgctcccatcaaatgtcatcaacttctcccaagcagagaaacccgaacccaccaaccagggcaggatagcctgaagaaacatctacacgcagaaatcaaagttactgggactatccagatcttgtgtggcatgatggtattgagcttggggatcatttggcatctgcttccttctctccaaattttacccaagtgacttctacactgttgaactctgcttacccattcataggaccctttttttttatcatctctggctctctatcaatcgccacagagaaaaggttaaccaagctttggtgcatagcagcctggttggaagcattctgagtgctctgtctgccctggtgggtttcattatcctgtctgtcaaacaggccaccttaaatcctgcctcactgcagtggaactctctctctgatgctgattgtgcactctcgtggaattctgcctagctgtgctcactgctgtgctgcggtggaaacaggcttactctgacttccctgggagtgtacttttcctgcctcacagttacatgtggtgaattctggcatgtcctcaaaaatgatcatgactgtggatatgaagattattgatttctttaagaaaa

SEQ ID NO: 42022 - DNA, 799 bp, Homo Sapiens
ggagcgagcaagctgaggccacgtccacaaggagcttttcatgcccctgtgccgcatagcctcacctctttcctccagagtggctctctgcggccctgtgttcctgctacagagtgttcttttctggagtcaggatgttctcggtcaccctcctggttctgccctgtcccattccaccccaccccagggggaacagtagcttcaccttgttattcccattgctctcctggctcactcttacggtcggtctccagtgactgaagcattccccacccttggaatttctcatcttctgcctcccttcctactccttttggttttgtggggagaggggaaggatcagggggccaggccagcagctcgggggccacaaggagatggataatgtgcctgttttttaacacaacaaaaaagcctacctccaaaatcccctttttgttcttcctggacctgggcattcagcctcctgctcttaactgaattgggagcctctgccacctgccccgtgtatcctggctctcagctcatggggaagccacatagacatccctttcttcccttgcacgctcgctagcagctggtaaggtcttcacaccctgattcctcaagttttctgcttagtggcactgacattaagtagtggggggacagtccatgccaggacaccctggagtagccttcccccttggccgtgggcaggccctaactcactgtcgctttggagttgaggtgtcttttctttttctttctttagttcctgtattctaaacattagtaaaaataaatgtttttacacaga

SEQ ID NO: 42023 - DNA, 582 bp, Homo Sapiens
aggcacatactcagttttttaaatgtacaatcaacaagtaaaaataacctcatgtaagtaagccatttttatttgcctttctagatattttattttattgtggaaaactgtaaacatggtcagatttggctttttttttcattaactgagcaagactttcaggatattgtagatgcacagatggtaggttgtcctgaattctacattattagattactttaattgagatttgttaaaacggttaggactgttttgtccaggaaagataagaggaccaaacatataaggtgaaattcagaattccgtttccttctaactaatgaaaaactgcttactaaaaaaaaattttatactttccttgctaaggtcccatatattgatttgtacagatccacttagtcattttctcctttttttaagaaccattttcatctgatttttaaactcacgataccagttatctgttaatcaaaattgcattttacaatttaataatgtgatatttcctatgtctacagcataccttattaggtataaaacctactgcaacttagaaaaaggaaagaaaaaaagaaaactttt

SEQ ID NO: 42024 - DNA, 755 bp, Homo Sapiens
ggtgaaagctcaccacgccatgaaattcaatcatatctgtgaacagacaaggttcaaaaactaagcatccagaggccctgagcagctttcagcactggaggtgaagagagcgtgtttttaaaatacagagacaagcacgtcaaggtgttttcacagccccctgagggaagggacgcagggtctccgacaggtgctctggggtgactcttctgtggagctttttaccctctgagtgagaccctccccagagccccgggggccgcagcccgccctcctggtgagcgctgggcagggctcgtggtggcatcagcagcagagacgaagcctttctgtaacatgcggccgtcccgccgagaggggcagttttgctcttttgtacattttccgaaactacagttaaagcagaagtctgttttcaggaaaagtttcaagggagaagggcaagtttatcaaaaacattgtttcaggagaagggagcataagtttacagcctacaggacgtacacaatatcctgctgctgggaaaaccacagcattttatctattttttattttaataggtttggtgcttatcttctaataagatttaaatgtcacaaactgtagcacaaataatataatttataatttacaaattgactaaaattgggtatagtatggtatttgaaagaataagcatatgcttctgtttattaaaaaaagaaaccttccaatgtccaaaactgctaaccctcgacgtggccgccaagttagtc

SEQ ID NO: 42025 - DNA, 658 bp, Homo Sapiens
tttttttttttggcattgcaactgtggcatagttacaatttctgtttgttcatcacatttaaaattggaagagaacgcgcttgatggatagagcgccttcagtgtactgtttcttattaactttactttttttaaatcaacttgctatagactttatatacattttgttaaatatagttcctagtgacatagaaacgatgcgtagttttcatttactaattacaaatgttgaggcctaattctgaaagtcctcatatttaaaggctagacaacgtaatgaaatttttaactatttgtatgtcattttgaaagtgtactgctttatggtaaaagtgtttttcatttgttcattgttttcattatttgtgatcatgttgtctttcaatacaggcataaaccttccactcttgaacaaagcagctgctttttaaaagcggtaattgcttctttaccttttatttcttttgtaaatgaagcttttctttaagaatgtgactttaaagtgttgtctattgcataaaacagttgacactcacttattgtaaagtgaagattgttctactgcatgtgaagtggaccatgcagatttctgtatgttctcagtatgcatcactagataataaagtcttttgtgaacaaacctcgtgccgaattcttg

SEQ ID NO: 42026 - DNA, 868 bp, Homo Sapiens
  misc_feature (785)..(785): n is a, c, g, or t
  misc_feature (855)..(855): n is a, c, g, or t
gctgttttattttgggggagagaagaaatgaaagaagcctactatcaaactcttcatttgatgcggcagttatatcatgaatgtacgcttgtccatgctgacctcagtgagtataacatgctgtggcatgctggaaaggtctggttgatcgatgtcagtcagtcagtagaacctacccaccctcacggcctggagttcttgttccgggactgcaggaatgtctcgcagtttttccagaaaggaggagtcaaggaagcccttagtgaacgagaactcttcaatgctgtttcaggcttaaacatcacagcagataatgaagctgattttttagctgagatagaagctttggagaaaatgaatgaagatcacgttcagaagaatggaaggaaagctgcttcatttttgaaagatgatggagacccaccactactatatgatgaatagcactaatacccactgcttcagtgttaacacagcagtgattgtcagctgccaatagcaaatgaagttatgggtgacttgaaataccaaaacctgaggagtgggcaatggtgcttctgtgcttttcccccttgtaacccatgtgccagatgtgtggaatttttagctcagcattgagagaataaaatgtcactacctctcatcttatgaacaggataatataattctttaacagctataggttatctggctgaagtagacctaattttatgtgacttgtggtgtaaaatgtcttgatgataatttttaaaacttgggtaacacttccaaatatgggaggaaanggacaatgtgtttaccagggaaggattttccacatacttgctttaattcccttcctggtttggggtgcgnctttccttgaaat

SEQ ID NO: 42027 - DNA, 688 bp, Homo Sapiens
tgcgtctttccttgaatattttattggcccagagttagcctttctcaattatgtttccagactgtggccgtgattctaaaggaaaatgtgtgctctttagtgggtagaacaaatggaaatttggtttcagaatggctgacagaaatcgacataagtcatgtaatttttgttgatatatcatgaaaatgaacagaattctttttccatacttatatctaagaaaaggcatcataggtttctgaaagagataactatataacagctttttaactatccagtcaactttcagcttttctacatttaggtaaaatggttaggatataactcatggtgtggctaatctacatttatcaataaaatgtaaattatctgaaaggacagaatataagatttaaccatgtttgacgtattttaatttagttaatgaagcaaaattcagtttatatttcactagaactgtgtacttgattgattttcagagaaatatcacaaattagaaatattaaatctaaggatgaaaggtatatataaaacaatttgggggccaggcacgatggctcaaacctgtaatcccagcactttgggagaccaaggcgggtggatcacttgaggtcaggagttcaagaccagcctgggcaacatggggaaaccctgtctctactaaaaatacaaaaattagccgggtgtg

SEQ ID NO: 42028 - DNA, 702 bp, Homo Sapiens
gattcaatacctcttatgtaaccaaaaccatttttaattagcttttaaggactgagagagcatcatgttcaactggcatgcagtctgcctgcattgccaatgaagtcctcaactgtttaatattttgaactaatattatttataatctatgaatttaatcttttttgaaagactttaataatttgagtctctgagaggatactttcaatttccatgggggacttatttgttggggatcttaaataagattccttttgatctaccggaatatacatgtacagagtacattggatcatgttggaaagaaggcaagtgaaaaggtcagagatgaagtagcgaagttatggaatatcgtggaaaggatactagttgtgaaatggaaagagacaagttatagtaccccaaaagcaaaacaagcaggagatgcaagagatgccccaaaaggacaaagcaacaattttctgttgccacctttataccggaagactctgttgtagaagaaaagaaggctttggtgcaccttatgtgggaggaggaggggcagggcatgctgatgctgagcgtacaggcagacaagagcgtagcctgctgttgcctccatcactatgaaatgacttattttacctgaaggacccatggtttatgttcctctaattcctttcactctccctaagccctctgagagagatgaagatagatgat

SEQ ID NO: 42029 - DNA, 741 bp, Homo Sapiens
  misc_feature (715)..(715): n is a, c, g, or t
  misc_feature (721)..(721): n is a, c, g, or t
gctaggcttagggtcccctgcatgccctgaacccctgggtgggtggcacagcagtgcccccctgcagccttcccctctacacaggacatgcacacacaagtaacattgagctgcatggacaggagccttgagctggcgtgtgggaattgagcgccatgtcaggctgttgtgggtatccccctggcagggccagctaggcctgtggttccctgctccgactctcagggctgcctccctgagctccagggccagaatgcctggatgcctgggtagccagtttggggagtgggctgcaaggggcagccagcagctcccactggtgtgtcactgcatccattgccacctcctgttcgtgacctgacagggtgacacagcccctttcacactctgtcctcctatcttcctgggtagatgccctggtgtagggctgagtactgaatggtcttccatccccagcaagggggtgcagcccagggtcaggcccttcagagccagggcagaggacgcacggtggctagagccgctgcactatccttttcagagcacttcatccacttgctcctccctctaccctcggcaccctgggtgggaaagggttgatgctcatcatttattgaggggaagccacttaataaggagtcagacctaaaagggggtgggggacattttcttacctcacccaagaaagaggtcgtcacttttgctgtggccaggnccccanctccctctctcagatatgta

SEQ ID NO: 42030 - DNA, 778 bp, Homo Sapiens
ggtggaagtgaaagaatcaggagaaaagccttttaaaaagtattctccaggtttgtcagggtcactctaaagataaaaatgtaactaagtcttctgtgaaatatcatccatctaatcttgatgctgttgcagatggtggtgacacaagttaattgacaaactactgccaaatggtgcacaatattttgtaaaaagtacccagtagccccatttcatacaatgtacctaaattatgcagtaacttggcatcatcgttccctccttgttgctgtgtaattagtcagtgttgccacagtgtgtggcgctgatggagatgtcagaaccgagaacacttaaccttctttgattgtttttcaagttttaagacttcgatccacccctatgagagcaagtaattgtggaaatatttttggtgtaaaatcattccagagtatgtaatatttaactgatagctgcatgaaagtgagattcgtgttactttggcttttctgtctctgttgacacggttgcacatttccaagttactacagcgtgaaaactgtgtgtttaaaaaaaaacaaaattaaaaaaaagagattgttggcctggttttgtaaaagttttagggtaaaattacaaattgattggttttaaggaatcatttattaaaaaagattttcctgccaaaatccataaaagccctatattcgaagggctgtttggaggcttttaggccaacctaattggcacaatttgggtaaaatctaatttccatttgggtggggccttgttcccaagg

SEQ ID NO: 42031 - DNA, 815 bp, Homo Sapiens
ttggaccatttttacaaagatttcagcaagagagaactcgttgtatgatagagattggtgtggcgttttatgacatgctgctgaatgttgaccagtgtagcacccatttaaattacatggatcccatctgtgacttcctctatcacatgaagtatatgtttactggtgacagcgtgaaagagcaagtagagaagattatctgtaacttaaaaccagctttaaaacttcgtcttcgattcatcacacacattagcaagatggagccagctgcagtgcctccacaagccatgaacagtgggtctccagcacctcagtctaatcaggtgcccgtgtctttaccagtaactcagtgaagccagactgtactgtggagaaagtagaaatatatccgtctttgagagtggactcaaaccttttaaatctgaatgcgatcacactgtagtgatatagtagaagcagtgatgatattcagattgttttattttgattcaaatgatgaatctgttgacaccttataactcccatctccctatctatatttttgtctctaagagatcaagtaagatacatgttgttcatattcataacaacttattagagctatgtaggaacatagaggtatctgtgatcaaatgacttgtcattggcactttcagtctttcctattctaaccggttgttttggtttggattttttaataataatgacctatttaagccttccggatatattattttttaaagggcacccccacatgttaaaaacggttatttaccaaatatttttataacataaaatccccctggggaaaaatt

SEQ ID NO: 42032 - DNA, 788 bp, Homo Sapiens
cacagtagtttaaatcttttgttaatgctcctccgaagtttttcagggggtaaaagtaacatcagtggagggtattattttaaataaattttaattgagaatttgttgcattttcagcaaattttaaaacatttttaggttttacagagattttaacctttaaacaacagatctttaaaaaacaggtgaatacaagtgagtttaacaaagaaacatttagaatagatctgaatgtaagaactacagaactgtttcagaaataaaacatactaccttgatgtgacatttttttcttaaccttgttgagctggttttgttcagcttaatttactgttcaaaggcattatctgttggtcacaccagtgggtatatgattgaatttagggaacagggttgacacagcagggctagtcctgcatattttttcttaaatatttcccaattgtgtttttcattatttcttttcaatatataacttttataacaaattattagctttgatcttgtagtttaaaattgcagggaactggggtaatcttttactgagctggatcttagagaaaatgaatatttaaattttaaagtttgcacatttcatctttgtcctaacatgagtgcttgtaacaaaataaacaacaaaaacaaagccaaaaactacctttatccatatgtgaaattatagatgaggcatacgaatttgtttaatgcttcccttcccttcccacatatcatctcactgcctattatctggtgtcacctcatgtatcgtaagttaatactaaaagaag

SEQ ID NO: 42033 - DNA, 700 bp, Homo Sapiens
  misc_feature (616)..(616): n is a, c, g, or t
  misc_feature (674)..(674): n is a, c, g, or t
gcacgaggggcacgtttgggggaagttcctgcttcaaactgagctgccccgcataggccaggtcaacccacaccaatcttttctggacaggtgctgggtaggccttcctggtctctggccgcctgctgccagggtgtggccatccccagcaaccggagccggccaaaccagaggcctcgctccgcactccacactttcctttctgtgctccttccaagttaaattaaaccccctctccacgattcccacggcaggcgtcattcccgagatgggagccagtccaggggtcagcaggagccagcgctgggcacacgtgccctggctgaggccagcggcatcctgggtggcccaggtccatcctgggcagcaaaggcgtgtccccttctgtcagacagcttcacagagtgtggcttcaccagtcagagggagcagtccggagaggcaagatgaccccaccgggactgcagagcctcctccttactaacaaggacctgtccgcagccgcgaggtccttcactcccaccctgtaattgtggggggagtgccagcaacaggcctgtcccctggcaagttggccacggaacccaccatgcactgcaaggctgtgacagcctgngcacccctgcttctcctctgcttgtacggttccccaataatcctattttccatctcanaaaaaaaaaaaaaaaaaaaaggacgc

SEQ ID NO: 42034 - DNA, 883 bp, Homo Sapiens
ctgagtttgaaccctctacctgagcacaagagctgtgaggagaagtcagtgaagaacaccagcatccgagtggctgactttggcagtgccacatttgaccatgagcaccacaccaccattgtggccacccgtcactatcgcccgcctgaggtgatccttgagctgggctgggcacagccctgtgacgtctggagcattggctgcattctctttgagtactaccggggcttcacactcttccagacccacgaaaaccgagagcacctggtgatgatggagaagatcctagggcccatcccatcacacatgatccaccgtaccaggaagcagaaatatttctacaaagggggcctagtttgggatgagaacagctctgacggccggtatgtgaaggagaactgcaaacctctgaagagttacatgctccaagactccctggagcacgtgcagctgtttgacctgatgaggaggatgttagaatttgaccctgcccagcgcatcacactggccgaggccctgctgcaccccttctttgctggcctgacccctgaggagcggtccttccacaccagccgcaacccaagcagatgacaggcacaggccaccgcatgaggagatggagggcgggactgggccgcccagccccttgactccagcctcgaccgccaggccccaggccagagccacccaatgaacagtgcaatgtgaagggaagcaggagcctgcaggggagcagacttggtgcccagctgccagaaagcacagatttgacccaagctatttatatgttataaagttataataaagtggttcctactgtttgtaccccctggtaccagtgtggtccatctcccaggctccttggccttccccttaccctgac

SEQ ID NO: 42035 - DNA, 532 bp, Homo Sapiens
ccttgtcatggacccgctacagacagcatctgtccagtggtttgaacgcacactggatgatagtgccaaccgacggatctgtttggccgaggcatttcttaccgcagatactatattgaatacgctgcagaacatttctgaaggattggtcgtgtaccccaaagtaattgaacggcgcattcggcaagagctgcctttcatggccacagagaacatcatcatggccatggtcaaagctggaggtagccgccaggattgccatgagaaaatcagagtgctttctcagcaggcagcttctgtggttaagcaggaagggggtgacaatgacctcatagagcgtatccaggttgatgcctacttcagtcccattcactcccagttggatcatttactggatccttcttctttcactggtcgtgcctcccagcaggtgcagagattcttagaagaggaggtgtatcccctgttaaaaccatatgaaagcgtgatgaaggtgaaagcagaattatgtctgtagagttggaagagaatt

SEQ ID NO: 42036 - DNA, 754 bp, Homo Sapiens
gcaaatgtcgagataagagagcagatgttggagaattcttctagattttcagaacttgaagactattttctaatttctatttttttttctatttcaatgtatttaaactctagacacagtttttatcctggattaacttagataacttttgtagcagtggttatattgcttataatttaatgtacaatactattgaaactggtgagttctgattattaaatattctctgtaaatcagtaaacatgtataaagtatttgtaatgtttggtcataatttatttatgaagacagcaaaagactgatttcatgatggggaaaacaattagccaaagtttaatttcttacactgtggttgtcaagaatactgatttactataatgatatatacatgcaagatatttaacttaatatcttagacaagagttctgggtacaattttgggatctagttcccctggaaaagctgctgtatttttaatttttaatggaatgtagcttttaaaatcctgtcactggcatcaacaaaaggaattataccatgagaccttatagctgtacttaaaagccattcagttcagctattgggagttcatgatgaattagcatatgccagaaaggttgctaaccttaacatctgagagcagtaacactgattttatctgctgtataagactttgtgcattttacttttgaaataaacgatttttttccacgcttgaaaaaaaaaaaaaaagggggggcgctcaaaagtatcc

SEQ ID NO: 42037 - DNA, 944 bp, Homo Sapiens
cacagatagtcacagcgtccattccaatagtctgtctcctcacatctgttagtattgacacagcacagacaccacaagccatcaggttcttcatggggcaggtgaaatacttctaccccatgggtaaatgtattcacatattaccaagagaagaagcacattatctatgatctttggcccagttcttatttagcatttttattccagcctacttggaaacatgtttttatttgcaatatatgcctgactgaattaagcttgcttgttttaaacaaccaaatcattggaacagaaaaggatttaaaaaacaagaatgcatgatctcagagtgattaaaaaaaaatcagtggaaataaatgatcatagaaggtgcttttcaaaacaactgctattataattctcaaagtcctactctgccaaaagaagattaaaagtcatacattacattacaaggaaatgttcatgtgggaagagggttgctgaaaatcaacaacgcttgaagttaaaaagtgtgtctttgtagatttcattgtataatgtgtatttcttaggagatggtgacttgattgatctacgctaagtggagacatttcacatttttaaaacaaaatgttcaatctgtattactctttgcgtcctgtatgtagaggctaattttaaaatccttaaatttttagaacctctaaaaaaaaaacataaccaaaaacaaaaaacaaccaaaaaaaaagcacaaaaacacccaacaacaaaaaacaaaaaccactacaacagaacagaacacaagcgaggacatcaaaaaactaaacatacaacagcaaagagagacacaaacagagaacagaaacaaacacaaaagataaggacatcagacaaaaaaaagcgcgcaaacagaagcacagacaaacaagtgaggaacacaaaacaaacccaaaatagacaaccaa

SEQ ID NO: 42038 - DNA, 919 bp, Homo Sapiens
ggtgaatgatcagaccctggtagctaagaaggaacttgtccctttgagtcagtgtgcagaccccctttcaggccatgcctctgtgaaccctgtattgctggggccggaaggagcccctgagcctagccccttcccgtctgccctgtgtcctcactgcgtgtgggtatgacctctgcctggtggctggtgtatcccaactgggcaagagatggcagagggtcccccttgtgggtgcgcttggatgtgcagagccttctccatggattttcttccctgtaagtgccgggcccctcaccccagctgacaggctgttgctgtgcctgctcacacctgctcctgcaggcacactgggctagggacgaggaaggagcagccacaagtggtagaactgccttggtggacaccagcctcgccctgtctttatttcctgaatggtttgtgaacttgctcacctggaccactgtatcctgccactgtccttcctggtctcgcactgccactgcatggcctcctgtcactgtgaatcgtggcccagtctcagtttgtagtttctcattaaattggccctttcactcccccgccctgggcctctgctctcttgcctggcttccttcttttttgagggaaagagggtggggctgcaggcagtctactggcaggacgggaggctgagtcctcagggtctcacaccctcagtgctgatgccatgccaactgcctgggacaacaccaacaccgtaaggacctaatttaaaccaaccccgaattcgggtggtaaaccagccccctggggaatttccagcctgtggacctggggcccaggggccacacggttgggccctcggggcagtgggcctttaaaagggcccccctttcccttccctcctggatgggtgtgggtttcccacaccacattcttc

SEQ ID NO: 42039 - DNA, 581 bp, Homo Sapiens
  misc_feature (2)..(3): n is a, c, g, or t
gnnaaaaagagaatatcatgaaacagaacaagatgcagctggaacatcatcagctgagccagttccagctgttggaacaagagattacaaagcccgtggagaatgacatctcgaagtggaagccctctcagagcctacccaccacaaacagtggcgtgagtgctcaggatcggcagttgctgtgcttctactatgaccaatgtgagacccatttcatttcccttctcaacgccattgacgcactcttcagttgtgtcagctcagcccagcccccgcgaatcttcgtggcacacagcaagtttgtcatcctcagtgcacacaaactggtgttcattggagacacgctgacacggcaggtgactgcccaggacattcgcaacaaagtcatgaactccagcaaccagctctgcgagcagctcaagaccatagtcatggcaaccaagatggccgccctccattaccccagcaccacggccctgcaggaaatggtgcaccaagtgacagacctttctagaaatgcccagctgttcaagcgctctttgctggagatggcaacgttctgagaagaaaaaaaagaggaa

SEQ ID NO: 42040 - DNA, 731 bp, Homo Sapiens
  misc_feature (685)..(725): n is a, c, g, or t
gcggctgcagatggacaacgagctcctgaggcagcagatcgaggagctgaagaatgagaacgccctgcttcgagcccagctgcagcagcacaacctggagatggtgggcgagggcacccggcagtgacgcccgccaccaccacgcagccgccgccgcccacgccggcctctgctgcccccttccccagcccttagcacagagagggacacatgcccctcccccagctgcgtttttttatagtagatttttaacaaaaaacggggagaaataatgcatttctgtggatacagtgcccaccgccctcctccacttggaaacggtatcctccctgcccatccgtctgtctgtcgcccttctcccggccctcactaagccccggcacttctagtggtctcacctggaggcaagagggaggggacagaggccctgccacgtcccgctgcctcctgctctctggaggtactgagacagggtgctgatgggaaggaggggagcctttggggggccacccggggcctggacctatgcagggaggccacgtcccaccccacctcttgtttctgggtccctgctcccctttgggggtgtgtgtgtgtgttttaattttctttatggaaaaattgacaaaaaaaaaatagagagagaggtatttaactgcaataaactggccccatgtggcccccnnnnnnnnnnnnnnnnnnnnnnnnnnnnnnnnnnnnnnnnnggggcg

SEQ ID NO: 42041 - DNA, 657 bp, Homo Sapiens
  misc_feature (630)..(638): n is a, c, g, or t
  misc_feature (649)..(649): n is a, c, g, or t
ggcagcacagtgtgaatagaacagagcgggatcaagaatttcacagaagacaggtcagctgaggggcctgcacacacagggtgttgaggaaccacagatgggcgccgagaggcctgccttttgcctggcccaggctcacccccaccttgggcctcacctcctccaggaagccttcccagctacccgaagctcaggtggccttcttgcaggtccccgtagcaccctgagcctgtaccttgggtggcacttgttatgctatcctgtgctagccgtttgtgcctcgtctcgctgttagattgtgagttcccatgggcagagacccactgtcgttccccgtgtgtccccagcccggtccctgtcacatttgttaaatgaaagaacaatgaagcccagtgtaacgtcagtccacagaaatagccacagcttccagtggtggccgtagacttggctcggaacttagtggcaccagagtaactctagtcagttacagtaaaatccactgtgtgtggaaggcagaagctagcggttgtatcccaagcatcttttgtatttgtctttatactttgctgaattctctgaaatacctattactgtatgttgcttttctaaataaatgtattgtaaaaaaannnnnnnnnaaaaaaaaaanaaacatgt

SEQ ID NO: 42042 - DNA, 775 bp, Homo Sapiens
cttattgcacctgtctctctctgagaacacggtgtgtctcgacacgtaccacgtacgtggaaacacaagagcccaccacttgaatttctaagaccatttcattctgaaacttcttatcaattacctaaatctcaacgaaaaacaatttactgaagccgactcccctccccatctccctctcaacctcaacccacctgcatgcatctcccccagaggaaacactgagggtaggggacaggaggctcaggacgcgccctctgaatcgagtgtttcttcttcacaagtcaccaagagaggacatgagggggaaagtccttttttgcccttctccaaaaaataaccttccacagagacaaactgtccttctatccacttttatcttttaataaatatcaaaaggaaaaagctgcaagggtgcaaagggcctgtgccagaagaaaacacacacagggaaaccgctttttttaatcaattgtagagaatagtcatttttaatctaaattagagaattgtgatacaatggcagtcctcaaaggcgtaacgagttcatctttctttcaccataggggttatagttggcttgtgctactctggaatcattttactgtttgtttttattatcttaagtgctaattaaaaaaaaaataaaattttaaaaaaacctgtagtttcattacctttttgaataatgtcatacaaaaaatgtatttgttttttttgtgctgtgagaattgatgtttgtagattaataatcattttgtttagaattacaaaa

SEQ ID NO: 42043 - DNA, 939 bp, Homo Sapiens
aaaaacattgctgcattcatgcaagactgaaatttattattagacaaattcattatagaaaaaacctgtggcaaaaacgtttctttcttattttttttcttttcctaaaacagacttgaaagtattatacagggattggcattcttcccggtcactggtaacaatagcaatatgtgtccagggacacagaatgttggtttctaacagactacttccaaaaacagtttgagaaaaaaactgtctgattttaagtctctagaggtctgtaatagtttttacatttttcaggcagtgtaaagttttttgataaggccattttaggtggctcactttctcattaagatatatatatagaaccactttttgtagattagtataagaaaaatatttaccctgttttggggcaaatgctacctatttgtgtcaccttttgctgaactcacagttagacaatccatggtttaatgcacatgaaattacctatattttatactgtttcaatgtacaggagaaaggttactgtaaactgtgttatgttggtgcttctgtgaattaagttgtggtttcatcatgagtcttaatgttctttgttgataagacaagtttcagaatcggtgtaccttaaattacagaaccacaaccaacaagccaagtcgcaacaagaagacaattagaaacggcgcgcccacatcataaccatcctcccgaaaagaacacccaaggtctagagcgcccccaaactttctgtgaaaggggccccccataatgggacccagacaatatccgaacgaacaaggggccgcgatattaaacaccgctgccatcgaaaacaggtgcccctgcgcatccaacgcacaaaaccgccaatcctgcgcccgaaacattgcggacagcacacctacacatgtacaggacccgaggtaaacaacagcacaggta

SEQ ID NO: 42044 - DNA, 1056 bp, Homo Sapiens
tcccgcgtccgggttttgtttggattctttttgtcgtcattgctggtgactcatgcctttttttaacgggaaaaacaagttcattatattcatattttttatttgtattttcaagactttaaacatttatgtttaaaagtaagaagaaaaataatattcagaactgattcctgaaataatgcaagcttataatgtatcccgataactttgtgatgtttcgggaagatttttttctatagtgaactctgtgggcgtctcccagtattaccctggatgataggaattgactccggcgtgcacacacgtacacacccacacacatctatctatacataatggctgaagccaaacttgtcttgcagatgtagaaattgttgctttgtttctctgataaaactggttttagacaaaaaatagggatgatcactcttagaccatgctaatgttactagagaagaagccttcttttctttcttctatgtgaaacttgaaatgaggaaaagcaattctagtgtaaatcatgcaagcgctctaattcctataaatacgaaactcgagaagattcaatcactgtatagaatggtaaaataccaactcatttcttatatcatattgttaaataaactgtgtgcaacagacaaaaagggtggtccttcttgaattcatgtacatggtattaacacttagtgttcggggttttttgttatgaaaatgctgttttcaacattgtatttggactatgcatgtggtttttccccattgtatataaagtaccgccttaaaattgatataaattaactgaggtttttaacatgtattctggtccttaagatccctgtaagaatgtttaagggttttatttatttaaaaacatcttttgaggcctggtctttgcacgacatgcgttctgggttggtccgctcataagcggaaagggctggggcctgccggtggtcggcttggcgacccccctctgcgcttgtaggcctgggaaaaccgtggggcccccaggcttatgacggggcggctccctcaaaagtatctcccccccagcgt

SEQ ID NO: 42045 - DNA, 962 bp, Homo Sapiens
aaccaagatcgtctacagggacctgaagttggacaatttgctcctggacaccgagggctacgtcaagatcgcagactttggcctctgcaaggaggggatgggctatggggaccggaccagcacattctgtgggaccccggagttcctggcccctgaggtgctgacggacacgtcgtacacgcgagctgtggactggtggggactgggtgtgctgctctacgagatgctggttggcgagtccccattcccaggggatgatgaggaggaggtcttcgacagcatcgtcaacgacgaggttcgctacccccgcttcctgtcggccgaagccatcggcatcatgagaaggctgcttcggaggaacccagagcggaggctgggatctagcgagagagatgcagaagatgtgaagaaacagcccttcttcaggactctgggctgggaagccctgttggcccggcgcctgccaccgccctttgtgcccacgctgtccggccgcaccgacgtcagcaacttcgacgaggagttcaccggggaggcccccacactgagcccgccccgcgacgcgcggcccctcacagccgcggagcaggcagccttcctggacttcgacttcgtggccgggggctgctagccccctcccctgcccctgcccctgcccctgcccgagagctcttagtttttaaaaaggcctttgggatttgcccggaaaaaaaaaaaaaaaaaaaaaaactccaaggcatcttatgtccggggggcggagaaaagaagtaaatgaaaatgccaccatggtccataccttggttttcctgaccccacccttttccttggacaaaaagggggcaagaatcttggccgggtcttcctcctaataggggagctcgcgaatttaatatttccgaattaaagccaaggccttcacccctgccattttaaatggaattccggggcttgccgaatcacca

SEQ ID NO: 42046 - DNA, 895 bp, Homo Sapiens
ccctttcaataaatccagctcagaaacacctattgtcaaaatcttcaactcgccacaggctaccaccactccctatggctttgcaaaattaaagatttagaagaaggatggggcggtggaagctatgaaaagaggcagaaaaaagttcctttgacccgatgctgtcagagagcgtgcatgaagaagaaagttaatggtatttccatttatataagaagcgcctaagaaatgcctgtgacgttcgtgaactagtgattgtgaattccaaatttgatgccaactttatgtgtaaagaagctaactcctgccaacatcgtggctgaatgaacagctgggactatgcttaacccattcccagcttataaaagccccatggcagctgcagtgaagcatcaggtgagtctgatatgggctgtctgttccctcggggatttgaatcttgcctgtcctttccaagtggagtcttgtgcctaagtgctagagcccactccttcctccccactgattcccttctttccatttctgccatattcgcctttcttgcattttacataaccaacttggggaccattcttcttggcaaagaaacaaaaaacaaaaaacaaacaacacgcaagaaaaacacacaaacatgaacacaaaaaaaaaagagaatgaaagacattatcggacaacaagaagaagagcgggcggaccgcgaagagaaggaacggacgagaggaaagcgagggcgcagcgggagggcgacaggcgggacgagggggggggaggggggaggggcagaaagagagggggggggcaggaggcgaaaggaaggggaagaaggggaaggaggggcgggagagcagggagggaagagggacggcgggggggggagaggggggcgaggcgagga

SEQ ID NO: 42047 - DNA, 657 bp, Homo Sapiens
  misc_feature (598)..(598): n is a, c, g, or t
  misc_feature (648)..(649): n is a, c, g, or t
  misc_feature (654)..(654): n is a, c, g, or t
  misc_feature (657)..(657): n is a, c, g, or t
ggttttcttgtttctgagttcttagaaagtacccacatactcttttttttttttgtagaagtagctgtcatagagtgaagaaaaggataagactttaaacagttgattctttttgtgttttctacaaactattttttgaaatttaaatcacaaactcattttctggtttttagaaagtagatgatgatttcagaggagtaaggcatgccaagcagcatgctcagtggggttttaggctgtcacatgcagctgagaaaaggtatgttcaagtcataagtaggtaattgatagggtatgaactagtcaaaatatgaaccattatgattcaagttagattttcctctggagagacagatctgaatgttcagttctagccaaggtagattttactttcaactttttaatcagtatcactttctgtgcttaactatttggtgttaccttgtctgttttcatttgtctaaaattctgcagagatgactaaaatttgacataatggtgtaaatggattgttaaggtaactttcagtttgaagattaagcaagatgccctttttccccatggacttgggttttgtttacatttttccccttttccngttagtatacacctacacggtactggtattaaaattcccataattttggnnaaaanaan

SEQ ID NO: 42048 - DNA, 758 bp, Homo Sapiens
ggagatggagaaagcatgaatacggaagaatcaaatcgaggatctactccaagtgaccaacagcaaaacaaattacgaagttcatagacgagatttgttcaacactgcaattgtttgttagatgtaaaccctgtgactatagtacgttgcttcttgttcttcacaattcatgacttaagtaccaaaatgcataccagttattatatattgccaagaattaaatgataaacttagagactgattagactgaaaatgcctaatcgatatatatattcttgtgcctagtactttaccacaaatacagtgtaatatcatcagtccaaaactgcattacttttgtaaaaacactggttaatttgtataagatattatagagctttttatgctttagaagttaaacaatatctttgggggggaactaatttattttcatcacttgaaatgtggtagctcttacaaagtttattgatttgatttttttaaaaatcaaaagcccattgaacaacaggatatatggactgataaatatttaggctgaatagtattttaacacttgtcttcaactttgatttggccgttttattgaaaagaattattaagagttactggttgcatttttctggacccaactaattttttaaaaattccctggttgaaattttcctttgggggtttaccaagggaaaagggaactggaaacttttttttcctcattcaaaaaaccttaggcctttggttttccccccacaaaaattaaa

SEQ ID NO: 42049 - DNA, 779 bp, Homo Sapiens
gggtctttctcatgtacttaacaggctgcccaagcctgtactcttgccagagctgcccacgcttctttccttgctgctggaggccctgtcctgccctgactgtgtggtgcagctctccaccctcagctgccttcagcctcttctactggaagcaccccaagtcatgagtcttcacgtggacaccctcgtcaccaagtttctgaacctcagctctagcccttccatggctgtccggatcgccgcactgcagtgcatgcatgctctcactcgcctgcccacccctgtgctgctgccgtacaaaccacaggtgattcgggccttagccaaacccctggatgacaagaagagactggtgcgcaaggaagcagtgtcagccagaggggagtggtttctgttggggagccctggcagctgagccctcagtcctggcctagactgttctgacaatctaacctgggattactaactgttgagccatcttccccaaagcagggaaaccactggtctctgactgcctttcccacagacacagcacaaatgctaggcctctgttgcatggctgtacaaagaacataagagtccatatttctagtggatttgtaaaataagtgtgtgtgagacacttgcgtttgaagaaagatctagggccctgggtctcttgcatttatatgtcagaaaaagggcgatatgctgcttgagggtgagtgcatatgaagtgtgggccctgaaggaccaaggcctgggcaaatgtttgttctaacctgcctgaaagaaataaa

SEQ ID NO: 42050 - DNA, 907 bp, Homo Sapiens
  misc_feature (691)..(691): n is a, c, g, or t
ggtcgtggttaattccgaattctttatattatgaaaagaaagtttaccaacaaagaatgggaaacaatcagaagctttaaggatgagtggactcagctggatatgttttataggaattgggcacttaaggaaagcttcataaaagccattggtgttggactaggatttgaattgcagcggcttgaatttgatctatctccattaaacttggatataggccaagtttataaagaaacacgtttattcctggatggagaggaagaaaaagaatgggcatttgaggaaagcaaaatagatgagcaccattttgttgcagttgctcttaggaaacccgatggatctagacatcaggatgttccatctcaggatgattccaaaccaacccagaggcaatttactattctcaactttaatgatttaatgtcatctgccgttcccatgacacctgaagatccttcattttgggactgtttttgcttcacagaagaaattccaatacgaaatggtacaaagtcatgatgattccctgagtaacaaagggaaatgaaaactgtttgtgatcttccgtattcactgaaaaataaatgcttgtttagtatcaaattttatttcacgaaagtttttttaaagaacagaaacttttccaattaaaaaaaaaaaagcagacttctggttcaagatagctcactgnaatacatgtttacctctttctttcctaaattgcattgaattgataggaaggatggcggaatcttaaagtgatacatgctaactgtagaaaaaatagaaaatgccataagcaaaaggaacatttaatgctatctttcaagatactactctaaaaccctgagtatctttcagaccttttctttgcaaagaaccatattgacatattgattttttaaaa

SEQ ID NO: 42051 - DNA, 642 bp, Homo Sapiens
cacgaggattatgcacgttgagacatgtgctttttatttcttagcaagatattttatctctgtacataaagtagaaaccaaaagctagggaaacagatactctttacaccatcatgccacgcattgtttttaaagcattgcgttaaaaaaaaaattaactaaaccaagatgctgtgattttttaagttgcaatatgtttttggtttttttcattttttaatcattgcagttaagagaaatggaaattagttgtgttaatcttgcagaatgtttgcaggactgactatcaaactggatgatttccatttataccctactgtgtcagttcaagcatcaaaataccttgcatctgagacagacttcctacatcagggacaggtatctgtgtgtcattatacaaaacagttctagggggttgaactacatagtaaaaaaataaaataaatagtacttagtgtaaaataattttataaatgatcttttgtactttaggacattaaattgtacaacttttgtatatataaaagcttaggaactttctgtttagcaggaaggcaacacattcctacacttttaatgtatatgtttgttataatgtccatgtaaacatgccctatgtttgtgccttttaattagtttgtc

SEQ ID NO: 42052 - DNA, 760 bp, Homo Sapiens
gcggccgctccagctgcagttggaagggttgaaatacatagaaagaaatgaacaaaaaatgaaaaaagttgcaaaaatattaagtcaagaaaaaacaactctgcagaaaattaatgattggataaaattaaaaactgatatgtatgaaggacttccattcttttcaaaattgtgatgagtatatgcttatgttctcataaatgaaggtctgtttagaagatcaaccacattcaataaggaattgtggggttcgacatgagttaactttgaaatacgtatgaattctggagaatcctgaaaaagacggtgcttcaaccagcttgcatagcacagagaatattcttggttacagaattcatatgggaactaggcttttaagatgttaataattagctaagctttagtaacccttactgtgctagtagattttagtagatattggtgttatattgtttgatgtttgaaaatatattaatatatgtgccgaacaagaaaccgaaagctatattgtactgtgtatttttactttagtcctcataatcatgttgaatttatgtgatcattgattttatttcatatggaaaagctaatttcttcttaaatttacattacctaatattctcactagctatgttctccaatccacactgccttttattgtaatatcatctaaatagatgcagaaaaatggaattttctctattaaagtattttacatttgacataaaaaagagacagatacagttttctattcagatat

SEQ ID NO: 42053 - DNA, 645 bp, Homo Sapiens
gaagtaattgttttatcaattcattgtataataaacaggagtgagacttcattgtatgacttcagttaaaatactattttgtatgcattctttattcacttaagaagcttgtctgcaataataaagccacgtcatgtcttcttttgggagggagagagtcgatggcaggagggggtttgggtgggccactgaaaaggggtaccgaataggttgtgtgatgaaattctgtgtcttggaactggaattgagtttcgatgttgatgaactgattcaaccaggtgttgaaggcacgacagccactgctctacgaaaaggcagagtacgtttttcccttctggttgtaacctggttgagagcttcccctttatcagattggcagctaaacagttgtattagataatccttaaatctgacatccagcctgttacgctctagggctcgctgcttggcctgcgtttgctttttattgtgtatccgttcccctcctacggtgtgctcctgaatgaaggtttctatgtaagcagatgatgattttacctgtcaataccagcactgtattactaacatgcaaaatactgcagatttatttcgaaaattaaagttactggtcacaaaaaacagagactaccacacaaaacaaagggg

SEQ ID NO: 42054 - DNA, 718 bp, Homo Sapiens
  misc_feature (672)..(672): n is a, c, g, or t
taaagcaaggaagcgcattgttttagtttcccagtgcatctaagtcatgtttactgcatattgcagtccactaaatgtgcaatagcattatgtctaacaaatgtacaaaccttaatttaaaaatatttactgttcaaaatgctgacacagaaacgcaaagtgagcacatgctgttggaaaatggtgccaaatagacttgcctgatgccaggctgctacaaaccttcaatttaaaaaaaaaacacagtattcacaaagcatagtagaatgaggtatgcctgtattgctctttctgaagtggtgtgatataaaccatctctaagaaatgtttctaccctaaagatttccccagtacagtcagctctccgtaactgtggtctccacatttagatccaaccagccttggataggaaatatttgaaaaaagaaattgcattggtactgaacacgtacagacctttttttcttgccattattccctaaacaatatggtgtagcatatttacatagcatttatattgtatttggtattataagaaatctagagatgatttaaattatacaggaaggtgtgcgtaggttacgtgcaaacgctatgccattgcccatcagggacttgagcatcctcagatgtcggtgtctgagggttgaggttgcagtcctggaaccatcncccatggatactgaggcatagctgtactgtgtgttttcactttgct

SEQ ID NO: 42055 - DNA, 661 bp, Homo Sapiens
aaagcaaaaagtaaaccatgaaattgggagattttattacattagttaataagagtgtggtagcatttttctccaatttggctgggattattcaaagtagggtgtgtatgtaacttatcactggaccactttagtttaatcagaaattccttttagctgacaacattgcttaaacaggatagtagttggcaagatgaaatgccagaattaaaaccaatcataagtagaacccacttcaaaataaaaaaacagcattactatttctaatcccaaggaatcactttattgtaaacactagcagaactcttctccctatacaaggtggatggctgattttaacctgaaattttaaatccacagattgagagctagtgtagaattgtctgtgtttattgtttttatgagtaaatacatgcattgtcataataaaatgcatttcagagaatatgcattttacctttgggaatatgttaatttcaggcagcattccctatgggaaaggtgataccagctctgatatgcaaagcatatgataatttgtcattctaacttcaacgtataatagggattgtgacctgatatttggagatgtaaatattgctcagcatattaatcccgatggaatatagcattgtagttgacttttttttttttaaaaaaa

SEQ ID NO: 42056 - DNA, 873 bp, Homo Sapiens
  misc_feature (11)..(11): n is a, c, g, or t
  misc_feature (822)..(822): n is a, c, g, or t
cggatggttgnatgtgttgagagaatccatagcagcaccgttcattctatgagtctatttttctaatgatgcagtaattaaattgcatcccaggagatttataaagttttgatatttttccctactctggaatttgaactttcttcatgtttgccatactgaacatcttttttcttgtggaatttaaagtccagctgtgttttctttttaatttgattctcagtgtaagaaatgttctgattacatcactgattggtaatggttagaaaccattaacctaaaacttactatttaacctagtgtttttgttgatgaggtttacattatgtgaatacatgcacatttgtttcttatacaggtggtgtgaactctagggcctatactagaatcaatttgttccttgttaaaggccttttgaattatactgcagggcatcttgtgaatatgtatgtaaatatatacagaataatacacacagttgtgtgtgcatataaaatacatatttacgccaggcgtggtggctcacgcctgtaatcccagcactttgggaggccgaggcaggcggatcacctgaggtcaggagtttgagaccagcctgacatggtgaaaccccatctctacgaaaaatacaaaaattagctgggcatagtggcgggtacctataatcccagctactcgggaggctgaggcacgagaatcacttgaagccgggaggtgggggttgcagtgagccgagatcacaccactgcactccagcctgggcaacaagagcaaaactccgtctccaaaaagatgaaaataaaataaaatatttttttttcnggcccttacaacttttggcctccgaactgtttccccccttttcctaagggg

SEQ ID NO: 42057 - DNA, 698 bp, Homo Sapiens
ctgaggtgtatgatggtcccaaaaatgtaagatctgatatttctgatcaagaggaagatgaagaaagtgaaggatgtccagtgtctattaatttgtctaaagctgaaactcaggctttaactaattatggaagtggagaagatgaaaatgaggatgaagaaatggaagaatttgaagaaggccctgtggatgtccagacttccctccaggctaacactgaagctactgaagaaaatgaacatgatgaacaggtcctacaacgtgactttaaaaagacagcagaaagcaaaaatgtcccattggaacgagaagccactagtaaaaatgaccaaaataactgtcctgtgaaaccctgttacctcaatatcttggaagatgagcaacctttaaatagtgctgcccataaggagtcacctcctactgttgattcaactcaacagcctaaccctttgccgttacgtttacctgaaatggaacccttagtgcctagagtcaaagaagttaaatctgctcaggaaactcctgaaagctctctggctggaagtcctgatactgaatctccagtgttagtgaatgactatgaagcagaatctggtaatataagtcaaaagtctgatgaagaagattttgtaaaagttgaagatttaccactgaaactgacaatatattcagaggcagatctaagaaagaaaatggta

SEQ ID NO: 42058 - DNA, 597 bp, Homo Sapiens
atctccagtctgcatgtgctgcgggcggtggagccggcgctgctgcagcgctaccgggcccagacgtgcagcgcgaggctcagtgaggacctgtaccaccgctgcctccagagcgtgcttgagggcctcggctcccgaacccagctggccatgctactctttgaacaggagcagggcaacagcacctgaccccaccctgtccccgtgggccgtggcatggccacaccccaccccacttctcccccaaaaccagagccacctgccagcctcgctgggcagggctggccgtagccagaccccaagctggcccactggtcccctctctggctctgtgggtccctgggctctggacaagcactgggggacgtgcccccagagccacccacttctcatcccaaacccagtttccctgccccctgacgctgctgattcgggctgtggcctccacgtatttatgcagtacagtctgcctgacgccagccctgcctctgggccctgggggctgggctgtagaagagttgttggggaaggagggagctgaggagggggcatctcccaacttctcccttttggaccctgccgaagctccctgccttt

SEQ ID NO: 42059 - DNA, 632 bp, Homo Sapiens
ggacacacaggaaatggcttactcaaccaagcggcagagattcttggtagatcaaggttatagcttcaaggtgatcacgaaactcgctggcatggaggaggaagacttggcgttttcgacaaagaagagcaacagcagctcttacagaaagtcctggcagccactgacctggatgccgaggaggaggtggtggctggggaatttggctccagatccagccaggcatctcggcgctttggcaccatgagttctatgtctggggccgacgacactgtgtacatggagtaccactcatcgcggagcaaggcgcccagcaaacatgtacacccgctcttcaagcgctttaggaaatgatgcttaggcagggtacttcgttcaagaccggcgcttggcacccttgttggaaagggattttcagcataacattttccttccacctctttgaccttccctccagcgttggccaaattgtgctgaggaagatgcatcaagggcttggctgtgccttcataggtcatctagggttttataaaggaggaggagacaatattttttcaaactttttggggagtggggtcatttctgtatataaaaaatgttaatatttaaggtatatttatgttaccgttctg

SEQ ID NO: 42060 - DNA, 820 bp, Homo Sapiens
ggtcgtggctcacatccgcccagccgcagacacaggcgtgctgtttgcgctctgggcccccgacctccgtgccgtgcctctctctgtggcactggtagactatcactccacgaagaaactcaagaagcagctggtggtcctggccgtggagcatacggccttggccctaatggagatcaaggtctgcgacggccaagagcacgtggtcaccgtctcgctgagggacggtgaggccaccctggaggtggacggcaccaggggccagagcgaggtgagcgccgcgcagctgcaggagaggctggccgtgctcgagaggcacctgcggagccccgtgctcacctttgctggcggcctgccagatgtgccggtgacttcagcgccagtcaccgcgttctaccgcggctgcatgacactggaggtcaaccggaggctgctggacctggacgaggcggcgtacaagcacagcgacatcacggcccactcctgcccccccgtggagcccgccgcagcctaggcccccacgggacgcggcaggcttctcagtctctgtccgagacagccgggaggagcctgggggctcctcaccacgtggggccatgctgagagctgggctttcctctgtgaccatcccggcctgtaacatatctgtaaatagtgagatggacttggggcctctgacgccgcgcactcagccgtgggcccgggcgcggggaggccggcgcagcgcagagcgggctcgaagaaacatattctctattatctttattaccaagcgcttctttctgactctaaatatggaaactaacatatttacagaacg

SEQ ID NO: 42061 - DNA, 1050 bp, Homo Sapiens
  misc_feature (933)..(934): n is a, c, g, or t
gaagcatgtccctgaagaggtgctagctgtgttagagcaggaacccattatcctgccagcatgggaccccatgggagctttggctgagtgatactgccctccagctctttcctccttccatggaacctgacgtagctgcaaaggacagatccagggactgaagccaaagttatgcaagggactgtgtgttgccacaggacacagtcagatttccagtctctaccaggaacctcttcagaaagtgtgctttatgctgaaacagaatactgttaaaggaaaaaaaagaggggggaagatcaggtcatactatctactctcctcatctctaacagctcaggatctcttagcattttaattagatgtaattgtttgtctttaactgtcaaaaagtttggttctgtgtctgtgttttaataagacgagaggacgagcgattgaggtgtatggagagaaaacagacctaatgctccttgttcctaaagtagagtggagggagggtggcctaagagttgagctctcggaactgcatgctgctggacagtatcactgtcttttcctacacggcagtccccccaattccattcttttgggggacctccgcttgtgcccccccactaggcccccaatgtgacgttgagtcccaaccccccctgattccccttcccggtcctggcgcgggtggggcggggcggcccctgaccccacgcccccccgcctctcaatcgcccccctccacgcacgctgcgtggcgcttcccctcccccatcctcttgttggccccccccccccgactcgcgggcgggtggtgacccccccccgtatccgtgcccccccccgccccgcgtagtcggcgcgccacgggtgggccgcgcggggcggcgcaccggtaacgcaccgtcgccggccacgcgcggcgggcgggccgtctttctnncaccccgcccgcccggtggtgtcgtgcgagtgtccaccatccctccctggtacctctcgccccctggcggtgcgttcatcacccccgcccccccccgcgcccatttccccgcccgg

SEQ ID NO: 42062 - DNA, 789 bp, Homo Sapiens
acccgggacgccctgcaacgcagcgtccagctggccatcgagatcaccaccaactcccaggaagcggcggccaagcatgaggctcagagactggagcaggaagcccgcggccggcttgagcggcagaagatcctggaccagtcagaagccgagaaagctcgcaaggaacttttggagctggaggctctgagcatggccgtggagagcaccgggactgccaaggcggaggccgagtcccgtgcggaggcagcccggattgagggagaagggtccgtgctgcaggccaagctaaaagcacaggccttggccattgaaacggaggctgagctccagagggtccagaaggtccgagagctggaactggtctatgcccgggcccagctggagctggaggtgagcaaggctcagcagctggctgaggtggaggtgaagaagttcaagcagatgacagaggccataggccccagcaccatcagggaccttgctgtggctgggcctgagatgcaggtaaaactgctccagtccctgggcctgaaatcaaccctcatcaccgatggctccactcccatcaacctcttcaacacagcctttgggctgctggggatggggcccgagggtcagcccctgggcagaagggtggccagtgggcccacccctggggaggggatatccccccagtctgctcaggcccctcaagctcctggagacaaccacgtggtgcctgtactgcgctaactcctgattaatacaatgggaagtttctggggcaaaaaaaaaaaaaaaaaaaaa

SEQ ID NO: 42063 - DNA, 582 bp, Homo Sapiens
aactttctgcgaaactaatgtacctcagtattccatcatggtctgaaagtcaaacttcggcaaggcacggacgactgtgcagacacagcagcggcaagaagcgagaactgccctccccctcctctcggtgcagcccagccgggcccccttccccaggccggagcgcccctcttccttccagctttcacttctgccggctccgcaactgagtgacacccagcgacaaccgactggggagtggtagaagcaactgaacggatgcgtgcgagctgaggacagggcgggaggagggggcacacatgccccaggggagcgaggagaactcttgaaatctccattttcaatcccttcgaaatcacgtatggtttccacaaagccgagtcgtgtcacgtggcaggtttacgtcaatagtccctctctctgctcctccattcgcaagtgtcttcctgggccagactcccctccacctcatgtacttgctatattgaggatgaagttttctatggtgggacactaaatataaagctatatagagaaagaatgtacggtcagttccctatggtttctgtagatcatcgtcat

SEQ ID NO: 42064 - DNA, 870 bp, Homo Sapiens
  misc_feature (757)..(758): n is a, c, g, or t
  misc_feature (788)..(788): n is a, c, g, or t
  misc_feature (816)..(816): n is a, c, g, or t
acgggaatagatagcccttagccctttccctcccagtcccagctgagccctcagaccacttgcttcccacataacaatgtcgcctccatttccgaggaacatccttgcgtagagaatgaaatatgctgcaatcatttctgcatccttactcctcacccccaaagaaaaaaaaaaggcctagcagggaagcagcatgcaggcttcacagcttaatgccaaggacagcgagtgaggctgggagcttctcttgggcctgctgggtctgtcagctctcggaatagggacagtccttactggtgccccaaggtgggacttggagaatattttgcttggcatatgtttggtctgaatggtgtagttgctggttccctagagaggaaaaggtggcaggcccagctttgctgggaaatggctcttaatttccagttgaaaccctagtagaattgtgaatgaaaacctcaaggttgagcccctctgccaagcagcagagctagtagaaggggatgcaggggcaaagcactcagttgccaagcaaggaggagagatgtacgtgggctgtgtggcagtccccacaccctgccctggcttcttcaggttatcgcaccactatggaatcctttgcagaatggtactcatataatggtttaaaacaacacattcataattgactctgtgcaggatgtcactcaatcagtttgggtttgctttattttattttatatatatattttttggtatcctgtacatttgcagtggnngtgtgaagatagtattttaataatttgtancaagttttaatttaaattttaaattggnttctatgtataataactggcatttttctaaattaaattaaaaaaaaaagttcct

SEQ ID NO: 42065 - DNA, 673 bp, Homo Sapiens
  misc_feature (639)..(641): n is a, c, g, or t
  misc_feature (650)..(650): n is a, c, g, or t
tgccgctgtgccagcgccctggagaagttcttctacttcaagctcaaggagggaggcctcattgacaagtaggcccatctttgggccgcagccctgacctggaatgtctccacctcggattctgatctgatccttagggggtgccctggccccacggacccgactcagcttgagacactccagccaagggtcctccggacccgatcctgcagctctttctggaccttcaggcacccccaagcgtgcagctctgtcccagccttcactgtgtgtgagaggtctcctgggttggggcccagcccctctagagtagctggtggccagggatgaaccttgcccagccgtggtggcccccaggcctggtccccaagagctttggaggcttggattcctgggcctggcccaggtggctgtttccctgaggaccagaactgctcattttagcttgagtgatggcttcaggggttggaagttcagcccaaactgaagggggccatgccttgtccagcactgttctgtcagtctcccccaggggtggggggtatggggaccattcattccctggcattaatcccttagagggaataataaagctttttatttctctgtgtaaaaaaaaaaaaaaaaaaaaaaaccccnnnaaaaaaaanaaaaaaaaaaaaaaaaaaaaaag

SEQ ID NO: 42066 - DNA, 766 bp, Homo Sapiens
ggaggctacgagaatgtgcccaccgtggacatccacatgaagcaggtggggtacgaggaccagtggctgcagctgctgcggacgtatgtgggccccatgaccgagagcctgtttcccggttaccacaccaaggcgcgggcggtgatgaactttgtggttcgctaccggccagacgagcagccgtctctgcggccacaccacgactcatccaccttcaccctcaacgttgccctcaaccacaagggcctggactatgagggaggtggctgccgcttcctgcgctacgactgtgtgatctcctccccgaggaagggctgggcactcctgcaccccggccgcctcacccactaccacgaggggctgccaacgacctggggcacacgctacatcatggtgtcctttgtcgacccctgacactcaaccactctgccaaacctgccctgccattgtgcctttttagggggcctggcccccgtcctgggagttgggggatgggtctctctgtctccccacttcctgagttcatgttccgcgtgcctgaactgaatatgtcaccttgctcccaagacacggccctctcaggaagctcccggagtcccgactctctcctccgaccacaggggttcgtgggcacagggcttctggggactccccgggtgatacattattactgttccgcagtctcactctgaatcaaggacagtctgtaagtcttgaaaaacaaaaacaaaaaacattcggggaccaatatagcaggcgccgcaaa

SEQ ID NO: 42067 - DNA, 627 bp, Homo Sapiens
cacgcgtccgcagaaatatgatggggggaattacctgccctaacccctccctcaataaatacattactgtactctggaatttaggcaaaaccttaaatctccaggctttttaaagcacaaaatataaataaaagctgggaaagtaaaccaaaattcttcagattgttcctcatgaatatcccccttcctctgcaattctccagagtggtaacagatgggtagaggcagctcaggtgaattacccagcttgcctctcaattcattcctcctcttcctctcaaaggctgaaggcagggcctttccagtcctcacaacctgtccttcacctagtccctcctgacccagggatggaggctttgagtcccacagtgtggtgatacagagcactagttgtcactgcctggctttatttaaaggaactgcagtaggcttcctctgtagagctctgaaaaggttgactatatagaggtcttgtatgtttttacttggtcaagtatttctcacatcttttgttatcagagtaccattccaatctcttaacttgcagttgtgtggaaaactgttttgtaatgaaagatcttcattgggggattgagcagcatttaataaagtctatgtttgtaaaaa

SEQ ID NO: 42068 - DNA, 618 bp, Homo Sapiens
ctcaaggaataagcgcaaataaatttgtggactccacgttctatcttcttttggacttgatcaccttttttgacgagtatcatagtggtcatattgatagagcttttgatatcattgagcgcttgaagctggtgcccctgaatcaggaaagtgtggaagagagagtggctgccttcagaaatttcagtgatgaaatcaggcacaacctctcagaagtgcttcttgccaccatgaacatcttgttcacacagtttaagaggctcaaggggacaagtccatcctcgtcatccaggccccagcgagtcatcgaggaccgcgactctcaactccgaagtcaagcccgcactctgattacctttgctggaatgataccataccgaacgtctggggacaccaatgcgaggctggtgcagatggaggtcctcatgaattaagtgccatgctttgtgggagtctgggtcggcacactgtcagtacatcaggcacatgggcccactaggctggggtttctggttttgtttctgttgtgttttgttttggtttctgtattatgtatttttgtcaacgccaataaatttctttgatttgtatttcttttcaaaaaaaaaaaaaaagggc

SEQ ID NO: 42069 - DNA, 725 bp, Homo Sapiens
gcttgtatgctgttacttttattttattccttgtaattaagtcacaggcaggacccagtttccagagagcaggcggggccgcccagtgggtcaggcacagggagccccggtcctatcttagagcccctgagcttcagggaaggggcgggcgtgtcgccgcctctggcatcgcctccggttgccttacaccacgccttcacctgcagtcgcctagaaaacttgctctcaaacttcagggttttttcttccttcaaattttggaccaaagtctcatttctgtgttttgcctgcctctgatgctgggacccggaaggcgggcgctcctcctgtcttctctgtcctctttctaccgcccccgcgtcctgtcccgggggctctcctaggatcccctttccgtaaaagcgtgtaacaagggtgtaaatatttataattttttatacctgttgtgagacccgaggggcggcggcgcggttttttatggtgacacaaatgtatattttgctaacagcaattccaggctcagtattgtgaccgcggagccacaggggaccccacgcacattccgttgccttacccgatggcttgtgacgcggagagaaccgattaaaaccgtttgagaaactcctcccttgtctagccctgtgttcgctgtggacgctgtagaggcaggttggccagtctgtacctggacttcgaataaatcttctgtatcctcaaaaaaaaaa

SEQ ID NO: 42070 - DNA, 995 bp, Homo Sapiens
  misc_feature (592)..(592): n is a, c, g, or t
  misc_feature (823)..(823): n is a, c, g, or t
  misc_feature (825)..(825): n is a, c, g, or t
  misc_feature (827)..(827): n is a, c, g, or t
  misc_feature (829)..(835): n is a, c, g, or t
  misc_feature (837)..(849): n is a, c, g, or t
  misc_feature (852)..(853): n is a, c, g, or t
  misc_feature (871)..(871): n is a, c, g, or t
  misc_feature (876)..(877): n is a, c, g, or t
  misc_feature (888)..(888): n is a, c, g, or t
gggacgaacactggtcagatacacgggcgcgggtttaagtggacgccaggtgcaccggacacaggctgtgtttaaccacaccgaggactatgtgttgctgcccgacgagaggacgatcagtctttgctgctgggactcgaggacagccgagcggagaaacctgctgtcgttggggcacaacaatattgtacgctgcatagtgcactcccccaccaaccccgggttcatgacgtgcagcgatgacttcagagcgcggttttggtaccggagatcgaccactgactgagccaccctctccgtagggttctttctcgaggactctaccctcctcccccacgtcctgtctcagctgcagtcgtaagtccgtgcaccatccttgacgttttgctgccacctctgtccacattcttcttggatttgtataaaagaatctttttttaccttgatgtagaatcatggtggaaaaagttggaaacacagatctgtgcagttctacattcactgattattacagtgtgattttcatcggttttgtaagtacaggacttgccgtttcttttgatctcttgattgaaggaggatagggcattanagtgcttttgacatgaggaattttcatttggttcttctgtcaactttcttgcttattctgctgaaccctctgtgtatttcccttccaggtatatttgaacagataagcaggcatgcagctctgagactcctgagttttatgccattatccaaagcattttcaagaatccctcaattctatcctgaaatgatgttattctgataataaagctcagatctggcactttaaaanananannnnnnnannnnnnnnnnnnnatnncccccccccccccccccnccccnnccccccaaaancaatctcggggggcttcttgtgtcgggggcggggaaaagagaggttagggaaatgggccccgtggggccaatacgtgggtttctccggaaccccaactttttcttgg

SEQ ID NO: 42071 - DNA, 592 bp, Homo Sapiens
aaagtgaagctcaagggtaaccagtgaggctatgaaattgccagtgaatcaagaccagggctagagtcaacagtccagaacccctatccgtatgaacaggggcccgtttctggttgaaatcaaggttaggatgcaactgagaaaataaaagactgcactttggagaggcaagcacgctatccgggttgttgttttgttttatgtcttggtgcttaggtgaggacttagctgggtttattcaaagtgggcgggtctgggctattcttgagaatgtcccttccatttctgagaacaagtcagccccttctacctgcctccacccaggagactgatgcacaagatctgtttgtgaaagcctgatttaaaaagaaaaaaaaaattccttaagccaaatggtgttccaagttggttgctgtgacaacctccaggaagagccacttgttaccctctattctttctagtgctttcagtcagtggcaacacataggccccttggaccgtggggatggcggccctgagattctgtcagtgggaccaccctgggcctcctttctacctccactcagcaccctgttggccaaggagaatttct

SEQ ID NO: 42072 - DNA, 514 bp, Homo Sapiens
gtcgacgttagtgcttaaataacaatacatgcgcagaaggcaagattccaccggatgctacattgatttttgagattgaactttatgctgtgaccaaaggaccacggagcattgagacatttaaacaaatagacatggacaatgacaggcagctctctaaagccgagataaacctctacttgcaaagggaatttgaaaaagatgagaagccacgtgacaagtcatatcaggatgcagttttagaagatatttttaagaagaatgaccatgatggtgatggcttcatttctcccaaggaatacaatgtataccaacacgatgaactatagcatatttgtatttctactttttttttttagctatttactgtactttatgtataaaacaaagtcacttttctccaagttgtatttgctatgtttcgcctatgagaagatattttgatctccccatacattgattttggtataataaatgtgaggctgttttgcaaacttaaaaaaaagtcgacgcg

SEQ ID NO: 42073 - DNA, 559 bp, Homo Sapiens
tctgacttctacctcccatgtttgctctcccaactcattagctcctgggcagcatcctcctgagccacatgtgcaggtactggaaaacctccatcttggctcccagagctctaggaactcttcatcacaactagatttgcctcttctaagtgtctatgagcttgcaccatatttaataaattgggaatgggtttggggtattaatgcaatgtgtggtggttgtattggagcagggggaattgataaaggagagtggttgctgttaatattatcttatctattgggtggtatgtgaaatattgtacatagacctgatgagttgtgggaccagatgtcatctctggtcagagtttacttgctatatagactgtacttatgtgtgaagtttgcaagcttgctttagggctgagccctggactcccagcagcagcacagttcagcattgtgtggctggttgtttcctggctgtccccagcaagtgtaggagtggtgggcctgaactgggccattgatcagactaaataaattaagcagttaacataaaaaaaaaaaaaaaaaa

SEQ ID NO: 42074 - DNA, 841 bp, Homo Sapiens
  misc_feature (827)..(828): n is a, c, g, or t
  misc_feature (831)..(831): n is a, c, g, or t
  misc_feature (835)..(835): n is a, c, g, or t
  misc_feature (837)..(839): n is a, c, g, or t
gctgttactgtactgtactctctgactccttacctaacaatgaatttgttacataatcttctacatgtatgatttgtgccactgatcttaaacctatgattcagtaacttcttaccatataaaaacgataattgctttatttggaaaagaatttaggaatactaaggacaattatttttatagacaaagtaaaaagacagatatttaagaggcataaccaaaaaagcaaacttgtaaacagagtaaaaatctttaatatttctaaagacatactgtttatctgcttcatatgctttttttaatttcactattccatttctaaattaaagttatgctaaattgagtaagctgtttatcacttaacagctcattttgtctttttcaatatacaaattttaaaaatactacaatatttaactaaggcccaaccgatttccataatgtagcagttaccgtgttcacctcacactaaggcctagagtttgctctgatatgcatttggatgattaatgttatgctgttctttcatgtgaatgtcaagacatggagggtgtttgtaattttatggtaaaattaatccttcttacacataatggtgtcttaaaattgacaaaaaatgagcacttacaattgtatgtctcctcaaatgaaaattctttatctgaaattttaaaagacattgattccgcatgtaaggatttttcatctgaagtacaataatgcacaatcagtgttgctcaaactgctttatacttataaacagccatcttaaataagcaacgtattgtgagtactgatatgtatataataaaaattattcaaagaannaanaaanannnac

SEQ ID NO: 42075 - DNA, 872 bp, Homo Sapiens
  misc_feature (647)..(647): n is a, c, g, or t
  misc_feature (818)..(819): n is a, c, g, or t
  misc_feature (826)..(827): n is a, c, g, or t
tatgtttccagtgtcctctgggtgtttccaagagcaacaagaaacgaataaatctctggctgcataaggggagtgaacacaaagtacatttgaccacaaaatgactctttaaaagtcagaactacggtagcatgaagccaaacgagggttccacagaagtctccaatcttcaaatcttcagtgtataaaagcacagattcctgaaagaatggcctcaaatgaccaggagtaggagctctctatatccctgctcctgaaaaacaagctaactggagtctccatcacctgccaccagctatacacactaccaactacccaactgaactccatgactgatttgccagctaatcatgcccctgacccagcccacatggacatgggaaggacatcagtgaactgtgaaaagaggcagaggctcactcccgtttgtattattaaaacacacgccaataggacataaaaagaagcaagagtactgggctttaccatgagttcaaatctcatttctgccaattcctatgtctaaaaaaaaaagcttcttaatctctttgagcctcacattctctatctagagaatcacttgacaagaatgttcaatgcagataaaaatactagaaggtattttaattcattccaagattccttanaattctgtaattctatgtcctcttgattctgtctatagaaaaacttggaatacataggcagcagagtttgaaaaaataatagaacaaaagaaacaccaagaaaaaacagagaagaaagtttttaaaaatggaagaacaagattatataaaaagtcatggggaaaaagcacnnagactannaaaatgtattatgggaaagtaaagcagaaatactttgccctaaat

SEQ ID NO: 42076 - DNA, 769 bp, Homo Sapiens
ggcaggattagatattgatttcctcttgcctctccagaaggcaaaaccttagtttttgaacaaagaaaatcagatggagttcacactgtagagactgaagttggtgattacatgttctgctttgacaatacattcagcaccatttctgagaaggtgattttctttgaattaatcctggataatatgggagaacaggcacaagaacaagaagattggaagaaatatattactggcacagatatattggatatgaaactggaagacatcctggaatccatcaacagcatcaagtccagactaagcaaaagtgggcacatacaaactctgcttagagcatttgaagctcgtgatcgaaacatacaagaaagcaactttgatagagtcaatttctggtctatggttaatttagtggtcatggtggtggtgtcagccattcaagtttatatgctgaagagtctgtttgaagataagaggaaaagtagaacttaaaactccaaactagagtacgtaacattgaaaaatgaggcataaaaatgcaataaactgttacagtcaagaccattaatggtcttctccaaaatattttgagatataaaagtaggaaacaggtataattttaatgtgaaaattaagtcttcactttctgtgcaagtaatcctgctgatccagttgtacttaagtgtgtaacaggaatattttgcagaatataggtttaacctgaatgaagccatattaataactgcattttcctaactttgaaaaatttgca

SEQ ID NO: 42077 - DNA, 742 bp, Homo Sapiens
  misc_feature (610)..(610): n is a, c, g, or t
  misc_feature (658)..(658): n is a, c, g, or t
  misc_feature (664)..(664): n is a, c, g, or t
  misc_feature (693)..(693): n is a, c, g, or t
  misc_feature (729)..(729): n is a, c, g, or t
  misc_feature (735)..(735): n is a, c, g, or t
  misc_feature (738)..(738): n is a, c, g, or t
  misc_feature (742)..(742): n is a, c, g, or t
atccatgttttgtgcctgccctccctcttggggaggccatgcttgactctgctgaaagctgctaactggtgacagggtggatcatggtgaggactaggggtaaggtcagggaatgcttaagctctggccctgccctgtattcctcttccccttggtagcagttccctgaccaagggcaaggtgtgtctcaggaaggtggttctgtgcatgcctgggtgtggttaaggcgtggcccagaaggcttccctggtgctctcagtccaggcaaagcccagagcatctgagcacgtctctgacttccagtggcaacacagtttgaacgtggtgaaacagggtgtagttcttttccacattctgtgtcatctagtcgtgcaggtagggaaaaagttggtctaattgaagattgtgcatttcctagtgacaggtgccaagaggttatgatacgggtttcttgggtctgatgtacagtgtgaataaatgcttgcagctcttagctcttttttgatcgatgaagcacttttttattaatattttcctttgttaaaggaggaaccgtaactctccatagctgtacatataacccttttctcctaaagaggagtcagtcagngctcctatatttttcattttttgtcaaagcaagaagtaaatactttanaattgntaaatatataaataaaagcaaataaaagntgagtgttccaaaaaaaaaaaaaaaaaaaaaaaaanggttgnggnccgn

SEQ ID NO: 42078 - DNA, 646 bp, Homo Sapiens
gccagcacagggaaatccagactgaaaacagggcctcagagcagcccccaggtcttagcaccctccagatgtaccccacacccaatgggcattgcgccaatggggaggctggtaggagcaaggactcactgagccgtcagctgtctgctatgagctgcagctctgcccacttacactcaaggaacttgcaccacaagtggctgcatagccactcaggaaggccatctgcaaccagcagccccgaccagccttcccgcagccacctggacgatgatggcatgtcagtgtacacagacacgatccaacagcgcctgcgtcagattgagtcaggccaccagcaggaagtagaaactttgaagaaacaagtccaggagctgaagagtcgcctggagagccagtacctgaccagctccctacactttaatggagactttggggatgaggtgacttcaatccccgactcggaaagcaatctggatcagaactgtttgtctcgctgcagcacagagattttctctgaagccagctgggagcaggtggataaacaggacacagagatgacccgttggcttcctgaccacctggccgcccactgctatgcgtgcgacagtgccttctggcttgccagcaggaagcaccactgcag

SEQ ID NO: 42079 - DNA, 755 bp, Homo Sapiens
aaaaggtgacctgaaacatatcacgaagctgaaaccttggggcctttttgaggttctagtggagaagtatgagtggtcgcaggaagaggcagctggcttcacagatttcttactgcccatgttggagctgatccctgagaagagagccactgccgccgagtgtctccggcacccttggcttaactcctaagcccctgcccagcaccacagcagagatcacacactgaccctccgcccttccccttcaagcattttcctcttcccttttcagggtgaagctcttccttcaagagtttctagatcttgttttttttttaatccaacatgttcatttgggtttgcttacttgaccctgtggagatccccacagccattgggcatcctaggtgaatttggccttggttgggctctgccaaagactaatggactaaaatgtgaaacagcctcttgccctgtacctttccttcccattaggacatcctttaaattataagcatcctttttgaaaagagctatgaaggtgtatgagcccatccttttattcattgactctaagagtcaaattttctagtgcatatcctattgccagcataaggatgaggagggggaaagggtcttaattctatgtacagcagagacattaaacttgctgtgtccgggctgcatcatcttcctggactgtttctgttgttctctgtgttcacattttttcctgcaacttttaagctactgtctttttaatagctatatgacac

SEQ ID NO: 42080 - DNA, 347 bp, Homo Sapiens
aacttttgtatcttttatcctgggagcactgcgttttcctagctgtgttattcctggtttaattcagcagagaaggtaaggtgtgaacctacctgccttggagagggcccaggtcccaaatctcttcaaattcttcacatgtttaactttaaggatttgaaccatgaagtcataggttacagacctcagttttatgccccattggattactttttttttttttttttttttactctttgaaagctttgttttggggtagtccttttgggaagaatccagtattatctacaattattggcaaagtttaaatgtattttacataacggaaagtttttagaatgttgaaa

SEQ ID NO: 42081 - DNA, 683 bp, Homo Sapiens
cgcgtccggtgaaagaagaataaatacatatttttaataatgtaattttaaaaatcctttataatcaggactgagtcttggtttgcagaagctgtcacttaccctgaaacacagtatcaaaagggaaacttaaaacatactgtttgatttttttatttcctcttacaatccatgttttcaggtagaattatgactttccccccattgttacacatttctttacaaaggaggcctgtagaaattggacacgatcatgcttgagcatgtgagttagtcaaattatgagtccctgcctattgtccattacacaccgaatgttaatttaagaaccagaggcagaagttctggcttcctgcttgaaacccaattcttatatgaaattttttaaaagcagaaacctagcagcccatctgctttttctcttttgtcggtgtatttggtacccctccaatgctggtctttttgtagaaactcagtagagaaagtctagctaagcagtgttgaaaagcctgcaagatttcagtttacatatcgacagcatatccactgatttctaaatgggctggtcccatcatctgaagattctgtatagaattattaaaaaaaaaatccatctttctttattttcttcacatgcgacaatttcttaagcactttgacattttggtagttccacactattg

SEQ ID NO: 42082 - DNA, 1027 bp, Homo Sapiens
ggatggtgacttaaggagctgcgagtctgatttaccggcctactctcgacctgccccccacccccagctcaggggaccttttgtctgaacgccagagctactgaccaggtcggggggccgcgggtggggagtggaagagccggtcctgctgtccgccctcccagccccaggtggaaggctcagttgtcggaaagacaaaagcgatttcttcccactcctgcagggccagaagttcaggctgccccgcctccactgggggatcgcacctgtgaattacctgaggtatgcatttcccagaaccgtgggcgtacccaccttggggggcatgttggttctggggggaccacctctccttgcattcaggggctgtgaagctgagtaattttcggtcacagggcaggcccctgttgaaatttcatttgtcctgctctgggcccaaaggtggtggtggtttgggtcatcagaggactgcctgggacggttcagcgggcacggagcgctgtgctggcctggctggggatggccgcggaggtgcccttttcctggtgctttgtggtggctgcagaagaccagttttgttgagaactgcttttcagcctggaatcagacatcttccagatggtttggaccctgtccatgtgtaggtcattatcacacaaagagaccaataaaaataaaaaaaaaaaaaaaaaaaaagacgaactattggaggtggtggccaatgatgcatttcctgtttgcaggatagttaaaggtgtttaaagggtaaggcttttggtgtaaatgctggatggggtgtgtgtgtgtgtggatatagggacctccctctgtaatgtgtaataggaattaataaatagaataatatgtatggaatttaaaattatattagcataatgattggtttggatgagcacaaaagctgaaggtgtgtgctgaattgaaagatggtatttaaaatttaaaaaagggatgtttattgtaatataaacggggtgataatgggttttaggaatgttgaaaaaaaaaa

SEQ ID NO: 42083 - DNA, 768 bp, Homo Sapiens
tttcaacactgagggcctggagacctcggctcctcctgctcctgaaccaggaggcttcatgtgggggaggaggagaggtctccatgtgacacatgggctcagggctgccagaatcagcggatgctggatgggcctgcagaaacaacactcaccacacacacttccttcaaaagaccaaaagtgactggtgtctcgtgtgacagattgcttcatttatgtttctacatagtaaggtgactgccaaataatatttgaagtcatctgtctctttgtaaattattttatatgacctataaatttaaaaatgtttttcagtgagtgcttttaacaaacttaagcttctgccctgccaagggaattaatgttatcttgtgaaaggtgttgctgtttgaattgatgagaaatggaagatgagaactccctaagagttctcataataaatcatctcatcacaaatcaatacggtatacagagttaaagtggaatgaggtaagaagatacagctacagaaaatagttgcgtgtatgggagaacagtcattgtaattgggtagttttgttaataaatatttttaaatcttgcttttcagaaattaccgaatgtgtataaacaaataaagaaaaataatttagctgtgttttagacagcattagaatatattgttcagcacagtaaaatatatttgaaatttgataagccaaaaatgtggttttgaatgaatattttgtgaatctttcttaaaagctcaaatttgtagacttctaaata

SEQ ID NO: 42084 - DNA, 651 bp, Homo Sapiens
  misc_feature (601)..(602): n is a, c, g, or t
  misc_feature (604)..(605): n is a, c, g, or t
  misc_feature (607)..(607): n is a, c, g, or t
  misc_feature (646)..(646): n is a, c, g, or t
agtgaggccaagcgcctggccattatgatgatgaagaagcgggagaagtacctgtaccagaagatcatgtttggcaagaggcgaaaaatccgagaggccaacaagctggcggagaagcggaaagcccacgatgaggcggtgaggtctgagaagaaggccaagaaggcaaggccggagtgagtgcctgcggcccctcacagggctgaggccagcccctagcagctggatgtggcagaggcaggccagaggacctaagtgtgatggaccagagtcacttctcctcctcctttctccagccagccctgacccctcatgctctctggctgggccagtgggcagccctcgcttcccttggatggagctgccctgctggtgcctggtcagagaagaggcctctgtgcccagcctgattctctgctcccaggagccagtgacatgaggtgcagaggcccacccagccccctacctactgcccccattcatcctggctttccacagccccctcccacacagttggacccgtgattctcagggtgctgtgatggggtgagggtagggggagcatttgttattaaatgactggacttttgtgccaattgcnnannanaaaaaaaaaaaaaaaaaaaaaaaaaaaaaaaaaaaaaanaaaaa

SEQ ID NO: 42085 - DNA, 804 bp, Homo Sapiens
gcaattgttcgaattatgaagatgagaaagacacttagccacaatctccttgtttcagaagtgtacaaccagttgaaatttccagtaaagcctgctgatcttaagaagagaatagaatctttaattgaccgggactacatggaaagagataaagaaaatccaaaccagtacaactatattgcatagaatgttggccttgcagcatttggtgtcatatgcagtagccagtggataaactaacctgttgattcaatattatttgactccttttttactaccgatgaccaaatgaagcagtgtaattaatggaaatagttgagtggactttttctcagtggttaacatgcccattttaaagagtaatacttacctttaagaagaatgttgttgaactctttgcatgttatttagtatgatgtgcagaaaacacttaagaacgtacctggtcttcatgaattcctctttggaactgggaaagagatccctgtggctattaaaaaggggggagggttcttacacaccattaattatgaagcaaaaggtttatttgcttaaaatgtcatttaaagatacttaaactgcatgcaaactttatttactgtacagagttctggatgtatttatcaaatagaaaaaccacccttgacttggttgttcacccgttttgtgatttcccttgaaaagagaaatgaattgtcatagctattgatattttactaggtgatgttctgttacactgaaagggatgttttttaaaaaaaaattattttggaaacaagttttcaagtaaggggacagttgctt

SEQ ID NO: 42086 - DNA, 804 bp, Homo Sapiens
cccacgcgtccgtgttgattgtttgcttgagttctcaaagacctgtggccaggtattttaaaaagtcgtctatttctttctagttgcatcaacttgcacactggtgtctaactatatgtggtattcggaacttgtaattcttattgagcagccattgcctatattttctcagctcctcactgatttctttatatgagctcagctgacaagcaaatgcagctattttgtttaccctctcttcataccggaccatcaacaacagtgttctaactcatccctgatggtctgtgagatgtagactattacacaagattcaagttactcgtaagcaacttttagatagagttggtcctgttaggaggagactcttgatgtcaccttcagtatcttgaaagcgggtcccctccccgaggctcttaattctttgaaaacttgatgctgtttcagctgaaaaattagcaagactgttaaaaaaaaaaagttgaggggagctgtttaagaaactgaaaagtaattgcaaactacattggataattgtgactttcagattgttgtctctgtatcagtttgaattttggtgctctttttccctggtgtacgtggggtgggtcctattttttcttcccaagtaaaactttttattttaacaacaaaaaacacactatagcacatgaaacccaaaaacacataaacaggacagaacagaacagagacaacacacaaatacaaaacacagcacagcgcgacgtaatagatgacaaacagacaaacgtgaatacacaaaaccgccaagcaaccactcaa

SEQ ID NO: 42087 - DNA, 1101 bp, Homo Sapiens
  misc_feature (845)..(845): n is a, c, g, or t
atgatgtggtggccccaggtagattcaaccagagaccggaccttggaccagcagtgcactgtgagtcgtccaggactggccgtgattgcaggagccctggccgtggaattgatggtatctgttttgcagcatccagaagggggctatgccattgccagcagcagtgacgatcggatgaatgagcctccaacctctcttgggcttgtgcctcaccaggttcttgatcaatatgaacgagaaggatttaacttcctagccaaggtgtttaattcttcacattccttcttagaagacttgactggtcttacattgctgcatcaagaaacccaagctgctgagatctgggacatgagcgacgatgagaccatctgagatggccccgctgtggggctgacttctccccggccgcctgctgaggagctctccatcgccagagcaggactgctgaccccaggcttggtgattctgggcccctcctccataccccgaggtctgggattcccccctctgctgcccaggagtggccagtgttcggcgttgctcgggattcaagataccaccacgttcacagcttaaataataaaccttggcgcttggcccttgcctattggacctggaaaacgcccgcccttcgatacgggcatacgcgcctccgagggacctcttatggccgcgggcggccggtaaaaaataaaagggcaaggggggaaatcggcccgcccttgggggcggttaaggcacgtggctgtcccttcggcgcgccgcgacattgtggcgttggaaaagagagcgtgggcttaccagccgttgcccgaggcgtcgctcgcctttacatagggggcgantcacgtggagtccaaattcgcgccgggcaaggccccggaggtgccgagaccagtggggtttgtaggacgagggtgtgcgcactgccacgcgctacccccgggcataagttctacggccccccccgcggtttcaccgaggcccagcggttctcttttgaacaggggggtgcgccacgaagggagacctgtactctgtagccgaaccaccggctttctcttctcgccggccgataataccatgcgcgccgggcttgga

SEQ ID NO: 42088 - DNA, 661 bp, Homo Sapiens
  misc_feature (638)..(644): n is a, c, g, or t
  misc_feature (646)..(648): n is a, c, g, or t
  misc_feature (650)..(655): n is a, c, g, or t
gacggcgctgcctcaggcactctcctgtctgaacctgcccttactgtgtttaacctgttgctccaggatgcattctgataggagggggcggcagggctgggccttgtgacaatctgcctttcaccacatggccttgcctcggtggccctgactgtcagggagggccagggaggcagagcgggagggagtctcaggaggaggctgccctgaggggctggggagggggtacctcatgaggaccagggtggagctgagaagaggaggaggtgggggctggaggtgctggtagctgaggggacgggcaagtgagaggggagggagggaagtcctgggaggatcctgagctgctgttgcagtctaacccactaatcagttcttagattcaggggaagggcaggcaccaacaactcagaatgggggctttcggggagggcgcctagtccccccagctctaagcagccaggagggacctgcatctaagcatctgggttgccatggcaatggcatgccccccagctactgtatgcccccgacccccgcagaggcagaatgaacccatagggagctgatcgtaatgtttatcatgttacttccccacccctacattttttgaaataaaataaggaattttattctcnnnnnnnannnannnnnnaaaaaa

SEQ ID NO: 42089 - DNA, 750 bp, Homo Sapiens
  misc_feature (650)..(650): n is a, c, g, or t
tctctatctcttagcaaaggtgaatgccagatgtaaatggcgcctctgggcaaaggaggcttgtattttgcacattttataaaaacttgagagaatgagatttctgcttgtatatttctaaaaagaggaaggagcccaaaccatcctctccttaccactcccatccctgtgagccctaccttacccctctgcccctagccaaggagtgtgaatttatagatctaactttcataggcaaaacaaaagcttcgagctgttgcgtgtgtgagtctgttgtgtggatgtgcgtgtgtggtccccagccccagactggattggaaaagtgcatggtgggggcctcggggctgtccccacgctgtccctttgccacaagtctgtggggcaagaggctgcaatattccgtcctgggtgtctgggctgctaacctggcctgctcaggcttcccaccctgtgcggggcacacccccaggaagggaccctggacacggctcccacgtccaggcttaaggtggatgcacttcccgcacctccagtcttctgtgtagcagctttaacccacgtttgtctgtcacgtccagtcccgagacggctgagtgaccccaagaaaggcttccccgacacccagacagaggctgcagggctggggctgngtgagggtggcgggcctgcggggacattctactgtgctaaaaagccactgcagacatagcaataaaaacatgtcatttttccaaaaaaaaaaaaaaaaaa

SEQ ID NO: 42090 - DNA, 971 bp, Homo Sapiens
  misc_feature (10)..(10): n is a, c, g, or t
  misc_feature (832)..(832): n is a, c, g, or t
  misc_feature (882)..(882): n is a, c, g, or t
aacaattttnagtggacaataacacatggaataatacccatatttctcgagtagggcaggcaatggcgtccacagaggaaaaagcctatgagatcatgagggagctcgatgtcagctatgtgctggtcatttttggaggcctcactgggtattcctctgatgatatcaacaagtttctttggatggtccggattggagggagcacagatacaggcaaacatatcaaggagaatgactattatactccaactggggagttccgtgtggaccgtgaaggttctccagtgctgctcaactgcctcatgtacaagatgtgttactatcgctttggacaggtttacacagaagccaagcgtcctccaggctttgaccgtgtccgaaatgctgagattgggaataaagactttgagcttgatgtcctggaggaagcatataccacagaacattggctggtcaggatatacaaggtaaaggacctggataatcgaggcttgtcaaggacataaatgtcacgtccagctctgatatgcttcgcactgagcacatcacatttaggacgttgaagatttttttttttttttttttttaatatgcagtttgtaagaacaaaactggatggcatcagaattgtctggaagttttgtcttgggcagtatgggctgggccaaatgaaatgatttttataattctaaacaggttaccaaatgaaatgtcatggctttactttggtcaataaaagggggggaattttttttaaaaaatgtgcccttaatttgttttgacttataactggatttgagggaaggcaaaagctatgctaagcttgccgaanggacataaagcagaactttggtcaattcttcttagcttccctaaataagnccaaaataaaaactttcttttctccaattcgggaaaactatccaaggaaccatttccgaatcctaactttacacagaaaggtttttgtc

SEQ ID NO: 42091 - DNA, 642 bp, Homo Sapiens
gccgcaagcagactaacgcgttgacgctaatttaatgtattttacctcacactaaggtcatgcttgataaagacgttaaactcaacttgtaaaatggtagcccagtgctatgcacagagtgggtgctcattagtgttgaatgaacacatttgtaatactacatgtaattccatctgactgctttgttaaattttcagttagaacgtagatactgtaaagtccacacacacattaaatcttgttttcctgaaagtatggcatcaaaaatacttgtagaaaaaccttgtcacaactgatttgaatgttcctattttcttttcctttgactttgatattggcttgtaatgtctcttttcatcatatgtaatatcagtggaacaggcagcgctactcaagtcctaaggattcctcagtgatcagtgatccagggccgttcatgaaccactgggctggatttgactgttgagtgtggcagttaatgcccctcaagaaatcaaaggatgtcttataagtgtcttccaaaaaaaagcaaatgctgaaatcctattggcaaagtaaactgaaattggctgctatattttatataatcatttctgcaaatcccattttttgaatactaatatttgacatggttaattctta

SEQ ID NO: 42092 - DNA, 883 bp, Homo Sapiens
taaaggttacgaagattaatgtgagtggtcagtgggaaggggagtgtaatggcaaacgaggtcacttcccattcacacatgtccgtctgctggatcaacagaatcccgatgaggacttcagctgagtatagttcaacagttttgctgacagatgggaacaatcttttttttttttttccaactgccatctatacaattttcttacagatgtcaaaagcagtctagtttatataagcattctgttacctgtgatattttttagactgaactgctccattcctagtcttaattaccatattcagggtacgaactggagggcttgtgtgttagcttctgaattggcaattggaggcggtagtggtcgtgcctgtgtgtatcagaagggataggtatcttgcctcctttctctcaggcagtgcaaatcaccctgtggaaaaccgatggacaggaaggagtgttacacactgcttaccctgatttattcagtggttttgttttcattctggaaccatactatcaaatggcgacagactgttccgttccacccccgtgaagtaatcatgcaccgtggtgaatagtatcaagcaggattgctttcattgtatggagcatgaccagcgtgtgactcattctgacatttcagatcctaagaattctaagaacactactagaagcatttgttccctcctagtcaatgcttcatactttttcttgggattcttttagcccttgacattcttgtcccccaacctgtaagtaggggattccctaagataagtgtggattttctttccagggggaaaagcaggatgtacccgagcactttatttcagggcataacctttaaagccaggggttggatttccctaagggggaccagccc

SEQ ID NO: 42093 - DNA, 563 bp, Homo Sapiens
gcgtccggcgagatgtcttggaacagatccagcaattcttggccacgcagttgattatgcaaacatccgagtctgggatcagtgctaaaagtcttcgagggagagattctacccgcaaacaggatgcttcagagaaggacagtgtcccaatgggctctcctgccttccttctctctctctttgatggaggaaccaggggacgccgctgtgccattgaagcagatatgaagatgaaaaagtgaagcctcagagttaccctctttgagccgaacctaaaataaaagtaaacaagatagagcttgggcttgcgggcccagttccagaggtggaagttacagaagaggaggtacctgggccacacgacatgagctggaaaatctctcttagagagttggagtagcacaattgcctgttttagggcagaaaccatgggctatgttaatgtcctaatgtgtagctagcagatcgtagctagtttgtattgtcttgtcaattgtacagactttttaaaaaaaacaaccaccagtgaaatgtgtgtgtatacaataaactgaaaaaaaaaa

SEQ ID NO: 42094 - DNA, 916 bp, Homo Sapiens
  misc_feature (801)..(801): n is a, c, g, or t
  misc_feature (803)..(803): n is a, c, g, or t
ccggctcctgcagctctgggagaaaaacggctacttcgatgactcactcattcagcagctacagagcccagccctggggcttggtcagtaccaggccaccctcatcaacgagtactcctcagtggtccagccggtgcagctggccttccagcagcagatccagaccctcaagacgcagcacgaggagtttgtcaccagcctggcccagcagcagcagcagcagcaacagcagcagcagcagctccagatgccgcagatggaggctgaagtcaaggccacgcctccaccgcctgctccacccccggccccagcacctgcccctgccatcccgcccaccacccagcctgatgacagcaagcctcccatccagatgcctggctcttcagagtacgaagctccaggaggggtccaggatcctgcagctgccggcccccggggccccgggccacacgaccagatcccaccaaacaagcccccttggtttgaccagcctcaccccgtggctccttggggccagcagcagccgccagagcagccaccctacccgcaccaccagggcggcccaccccactgccccccctggaacaacagccatgagggcatgtggggcgagcagcgcggtgaccccggctggaacggccagcgcgacgcgccctggaacaaccagcccgacgccgcctggaacagccagttcgagggcccctggaacagccagcacgagcagccgccctgtggcgggggccagcgcgagccacccttccgcatgcagcggcccccacacttccgggggcccttttccgncnaccagcagcacccgcagtttaaccagcctccgcacccccacaacttaaccgcttctccgcccgcttcatgcaggacgactttccgccacggaacccctttgagcggcgctcta

SEQ ID NO: 42095 - DNA, 618 bp, Homo Sapiens
tttttttttttctggaatgtagcatttgctgttatctgggaaacaagattctaacaggaaaccagcctaagacacttcaggttgagcgctgcctcggagtctgtgcccgtcgcgtcccctgcttgagttttgcacttggaagaaccctgcaccggctggcgtgtgcgacggcccagtcccatccagagcatggagcccgaccccagccagcgccttccactccatcatttcatttcacacccccgaagggaggggaggccaggaggggagctgctcctgccagaagctggtgggtgaccgttgggaatcggccacacctggtgtccatgggcagcctggtgcaattccattcatttgtacagaaacatttttgaaaaattcttttcaataagatgcaaaatcttccaacttttcaacccaacgtgatgaatatttgattttgttctagatttcctgtagctgtgaattgttaaaatgtatgattcaggataaaacgtaaacacgtgctgttagtaatttcttgtggatttcattgttttgccttcacataaagcctttttttacagaaaaaaaaaaaaaaaaaaagaccgcgcctcgtgccgcctcgtgccgaattct

SEQ ID NO: 42096 - DNA, 582 bp, Homo Sapiens
caatgaattatattcaatgcatttaaaataccactgtaattgacagagtaaaagtatagatacaaaaccttgtgtaagaggctgacttttccaaataaacattttttaagaaaacatttcttctcccaaatgtctattttcttgaggaaaatattgctgtgtcttcattttcattaccaggtttcattttgggccttgctaaattgattgaattaaatcctccagcttttgaaccttgatatttgtgtatatgatttattttcatttgaatttctcctttcctcttctttgctgtaaggcaaggaggaggggaattttaaaaccatcttatttgaactgagagcatccagagcagttaaccttaaggaaacaatgaaaaactccctttgtatgcctgggcatcatggcagatagaggaagagtgttagaggagaaaactgctgctgagagtattggcaggcttggcctcagtttggactctgtaattttctttggacccaagtctgtaacctctgcgtacttcttctctcttaccttctataaaaatgaggattactgttggtgagggaataaggaatgtaa

SEQ ID NO: 42097 - DNA, 660 bp, Homo Sapiens
actaacttgtttgaggcaaatctaaaatttaaaattaatcttgcttcattgttacatgtaatatatttcagacattttcactggaagatttatgaacagaaatattggttgaaagttagagattttacaaaatgctgacaaaaatattttcctagcatcagtagatttctggcatatgtttctgctagctatatatttaggaaattcaaagcataaaactttggcaacatcttggctgttctagacacagtgtacttgtcaacccctctcaggtaccttttcttgggatgcttattagaagccaagtaaagtgcttaaggtttgttttcattaaattagctatttctgctcccctgttcaaagatgcattttgagtgtttatagatcactgccctttttgaaatcacctggtattatttttcttactggaaaagttagtattaaaatctacagaactacatatttgtgcctccttggtaaatacaacacatctaattaaatgtagacagatatttcaaacatcagctgaattcacttaagtttttccaaaacctcagttaaactgtgaagctattggaatttttttttcctggaatttttcccctttgattcacagtggtcccatttatatctgcttctagcttagtgctatgtgtgaga

SEQ ID NO: 42098 - DNA, 533 bp, Homo Sapiens
cagtgctgaaatcaggtggttaaacgggtaaacaaaatatactgtattttgagaaatggcacaaaaacaggcagtcatctttaagggctatgctaggcaaactactaacatgcattgtgagaatgccgtgtatacctcacgtactgtgtactttgtacatatattttaccttttatacctatgttcgattttgttttgttttgttctggctttgaggcttgttttgttgtctgtgtctgtctgaataacctgcgtgtctaaaaccacgtgaaatgtgaatgattattggcaatattaccttgacagaatcatgggactttgagaagagggaggacagaggcctctgtcgcactaacgctctcgtggttgctcgactgttgtatctgtgatacattatccgactaaggactctgggctggcagggcttctgccgggaaagctagaaacactaggttcttcctgtacatacgtgtatatatgtgaacagtgagatggccgtttctgacttgtagagaattttaataaacctggtt

SEQ ID NO: 42099 - DNA, 589 bp, Homo Sapiens
cagtccctggcctctccccctggctgatcactctccctcaggcagtggagatctgcgtctggacaccctcagatcctgtcattgcctgcccagagtccttcaggggcacccctctgccttggtgtgcggtccagggctctcacccaggtgccgcaccctctggggtcttctgtccagctcccttgccccatgtgctgtcactgactctccttgggactcgcctgcctgctcagagccctgcagggcttggtcagctgcctgttcagtgtcaacacttccctgcacatcttaaaactgggctttattttcgctgaaggaactgtgttgggacccttgacatctgtcaggtttgcacatgctgtttttttttctcagcccacgtgttctcccccacgtggggtagcagcaggacagacagtgaatcacagagtctgccctgagcagaggctgctgtccctgggactcctagccatggtcagactgtacaaaacggttttccagaaatgaaatgtaaatccatttttatactgaaaatgttactgaaagtcacttttatgagcatctgccttaataaacagacattattccc

SEQ ID NO: 42100 - DNA, 889 bp, Homo Sapiens
ttcggacgagggagggaagcctattttgttaactggtttgggatagggaatggggtttctttttctttaatctcccttgtttcttgggctgggggaggggtggggggaacaactggctattcagtaccaaggggccagagtggagggtaggagtgccactctctctttggtttaggtttttgaccttttcttcctttgttttttaaaagtttatgacagttggctccccccccacccccagcaaccccatcccagaatcctattttcctgggaagtccttaaagcccctaaccatcccacactcttcactttcctttccaccttattcattctctgtacttaccacagtattttgcacttgattacatatccttcactctcttctcttcatcccatcaccccctaaataggtcaggtgagggaggctgggaagaggtgggaggaggggcagaagtgaaggaagaataggaaggatattacctcttctgttatttttttaagaaacattgtttggtggcagcaatctccctgtccctatcactgttagaggcctaattttatatctataaatatattaaaaagcaagtcaaacttggatgtatcaaggtaaaattattgtcaaagtttaaatacctatatattctctgaatgcaataaagggacttaagagtgaacaagagtaatggtgtggaagtgacaccctggggtcagtttacctctgtgtatggtcactacagattgggacttaccctttaggttttaggagggttgagaatggaaagaatcctctttcctgcccttcctggttccctgctttgggggaaaggggctgggcaaaaacacggaaattcccccttcccctctggcctcaggatcttccgaacccccc

SEQ ID NO: 42101 - DNA, 605 bp, Homo Sapiens
ggcacgaggggctcttctaaccagaggctggcctgtctttaaaacttaactactttagggtggtgccaccactgcagactattgtggtactttgtgacagaagacatgtacacacacaccacacacatacatacacactctctcactctgtctctcttacctttagctgcttgatcattaagccatccaacttcatgccagttcccttctttatagaagagtgaagggaaagacttcctgggtttgacttaaaccttgtccacctcttgatattttaggattgaggaataagtcattaatctaaggactgattacagtggctggagcttgggcacttgtcttatcactggtcactgagtctgaaagtcccagctgaattcttgcccttaagtgcttttgctgctatttttttgcccccagttccacaagatccaaccaagaattctgtatcctgggacagtcagattcttctaaatcaggccaggaaggaggggaaaagagtgagagaatggtattcccagatacttcttcctcctgccccttttcccagcagctctgagaccagatgttggctgctgtacttactccctgaggtagggaatgtg

SEQ ID NO: 42102 - DNA, 1100 bp, Homo Sapiens
agagttcgaaatttgagcaacccagccaagaagttcaagattgaagccaatgctgggcaactgtacctgacaggggtggtggtactgcacaaggatgtcaacgtggtagtagtggaagggggccccaaggcccagaagaaatttaagcgtcttatgctgcatcggataaagtgggatgaacagacatctaacacaaagggagatgatgatgaggagtctgatgaggaagctgtgaagaaaaccaacaaatgtgtactagtctgggagggtacagccaaagaccggagctttggagagatgaagtttaaacagtgtcctacagagaacatggctcgtgagcatttcaaaaagcatggggctgaacactactgggaccttgcgctgagtgaatctgtgttagagtccactgattgagactactgcaagcccttgcctctcctcccttgcctttgtctcttcagtcctctcacttattctatttcccaaccccctcccacttgtttgtgtgatctcagaactgtgccaagcagacactgggacaaagggagaatatcttgctcccctcctgagtcagcctggtgttgccctttattccccttatgtgcatactgattaacagagttatttttaaaaaaacaaaaacaccaaacacacacaccacaatacaaacaacaacacactaaaaaacaaataacatcagccactaaacaataagcgcgggccgctccataaaaatcacacccagaggggaccaacagagccgagaaagtgaccacatttactaattaataaagaagtgggccccacctagcggacgtctctctataaaagcgagagtgacgcgcccggtgtaaaaaccaacgcacggggacagcagagacaaactatgtctcctagtggtgcatcacctttgagaaggaacacacatcatacggcgtggcggagacacacatataggaaaccacccctcaacgcaggtaataagtggccaggagggaacatatacagctcgtgagaggcatattaggggagcagccgaccccgctaccctctgcccggcgtcaaaaattatccatggcggattctgtgaactcatcacg

SEQ ID NO: 42103 - DNA, 801 bp, Homo Sapiens
cagcaatgctgtgagagagatggcctggggggtggagcaaggcctgttggatcccagtggatatctctgagtctctgcttgataagtgcctctataccaaccgctctcctcatcctgacatcttgatacggacttctggagaagtgcggctgagtgacttcttgctatggcagacctctcactcctgcctggtgttccaacccgttctgtggccagagtatacattttggaacctcttcgaggccatcctgcagttccagatgaaccatagcatgcttcagaaggcccgagacatgtatgcagaggagcggaagaggcagcagctggagagggaccaggctacagtgacagagcagctgctgcgagaggggctccaagccagtggggacgcccagctccgaaggacacgcttgcacaaactctcggccagacgggaagagcgagtccaaggcttcctgcaggccttggaactcaagcgagctgactggctggcccgtctgggcactgcatcagcctgaatgaggctggccacctgccactttgccctgccctctgcctccagggctccactccccttccttttcttggtgaaaggcacctcctttcctgataatgaatggtgttccctttgcttggctggggagccccccaggccaggtttgctggccatagatacctttgggctgcctgggacaggctcctgaggaggattgagggtgaaagtctcccaacgagtacactaaacctaggtctggtcaccaatagggtccggaggagcaaagggccacaactcatcagtgc

SEQ ID NO: 42104 - DNA, 633 bp, Homo Sapiens
tcccgggatgcaggctgctttgggcccctgggtcactcttccaaggctgctgtagagcacagagacatggggctggccagtgttgactgacctgaggagacccctttgtttgttgccttcataactgtcactaaaccgacccctctgccctttcagtggcaactctggtctaagggaacattcagcactctagcggcatctgattggaagttccctcacccaagtaatctcaattccttcctctctccatccctgaaagaaacaggatggattttcctctcttctccctgctacattcactaccagatttttatgctacagtttcattcttgattgtgatttctccatggaattttttttttctggtgacatttctatcatggaaataggaagatttcggagtgctttgtgaagatttcaattgtctgtctctttctctctttgacttgtatgaaggagattgtacattgcctgatatctctttgtaaatgagaaatattgctaacatccaagcattctgaagtcttgcttatccttctgagtttagttctcattttgttttacattttgtttggggacttggggcaagctatttattagagttttgcaacagagttcttgtttgaagcctct

SEQ ID NO: 42105 - DNA, 817 bp, Homo Sapiens
  misc_feature (693)..(693): n is a, c, g, or t
agaggtaatccgcccaagccctcttggagggacttttggagctcctattgcctagagagacagtggctggggcactgaggcgtctgggggcccgaggaggaggcaaagggagaaaggggcctgggcaacccagttcccctcagcgcctggaccggctctccgggttggccgaccagatggtggcccggggcaaccttggtgtgtaccaggaaacaagggaacggttggctatgcgtctgaagggtttggggtgtcagaccctaggaccccacaatcccacacccccaccctccctggacatgttcgctgaggagttggcggaggaggaactggagaccccaacccctacccagagaggagaagcagagtcgcggggagatggtctggtggatgtgatgtgggaatataagtgggagaacacgggggatgccgagctgtatgggcccttcaccagcgcccagatgcagacctgggtgagtgaaggctacttcccggacggtgtttattgccggaagctggacccccctggtggtcagttctacaactccaaacgcattgactttgacctctacacctgagcctgctgggggcccagtttggtgggcccttctttcctggactttgtggaggaggcaccaagtgtctcaggcagcgaggaaattggaggccatttttcagtcaatttccctttcncataaaagcctttagttgtgtactggggccttggctgtgctgatggccagaagcagggccttctcacagtcctttggactgtctggtcctgatactccatgagaatctctggagtgctgtcaga

SEQ ID NO: 42106 - DNA, 796 bp, Homo Sapiens
agattgggcctacagcaagggctttgtgactgccgacatgatccgggaacacctgcccgctccaggggatgatgtgctggtactgctttgtgggccacccccaatggtgcagctggcctgccatcccaacttggacaaactgggctactcacaaaagatgcgattcacctactgagcatcctccagcttccctggtgctgttcgctgcagttgttccccatcagtactcaagcactataagccttagattcctttcctcagagtttcaggttttttcagttacatctagagctgaaatctggatagtacctgcaggaacaatattcctgtagccatggaagagggccaaggctcagtcactccttggatggcctcctaaatctccccgtggcaacaggtccaggagaggcccatggagcagtctcttccatggagtaagaaggaagggagcatgtacgcttggtccaagattggctagttccttgatagcatcttactctcaccttctttgtgtctgtaatgaaaggaacagtctgtgcaatgggttttacttaaacttcactgttcaacctatgagcaaatctgtatgtgtgagtataagttgagcatagcatacttccagaggtggtcttatggagatggcaagaaaggaggaaatgatttcttcagatctcaaaggagtctgaaatatcatatttctgtgtgtgtctctctcagcccctgcccaggctagagggaaacagctactgataatcgaaaactgctgtttgtggcaggaacccctggctgtgcaaat

SEQ ID NO: 42107 - DNA, 654 bp, Homo Sapiens
aaattgttgcagtgaagaaaaacctttaactgagaaatatggaaaccgtcttaattttccattggctatgatggaattaatattgtattttaaaaatgcatattgatcactataattctaaaacaattttttaaataaaccagcaggttgctaaaagaaggcattttatctaaagttattttaataggtggtatagcagtaattttaaatttaagagttgcttttacagttaacaatggaatatgccttctctgctatgtctgaaaatagaagctatttattatgagcttctacaggtatttttaaatagagcaagcatgttgaatttaaaatatgaataaccccacccaacaattttcagtttattttttgctttggtcgaacttggtgtgtgttcatcacccatcagttatttgtgagggtgtttattctatatgaatattgtttcatgtttgtatgggaaaattgtagctaaacatttcattgtccccagtctgcaaaagaagcacaattctattgctttgtcttgcttatagtcattaaatcattacttttacatatattgctgttacttctgctttctttaaaaatatagtaaaggatgttttatgaagtcacaagatacatatatttttattttgacctaaatttgta

SEQ ID NO: 42108 - DNA, 804 bp, Homo Sapiens
ttttttaatcagcattaacatgggcaggcaccctcatttatagatgtcaggaaacattcagtgaaaaacttgtagaatgggatgtgataacgaggttccagtaatctgagcagtctaacgaggcccacctcctccaccacagaacgtggctatgttccaagtgctactctcactcagcctgttgcggatcttcatggcctcaggagacttgtttctccatgggctcttctggactgcacacttccaccatagcttgctgggttgatctagatgtctgtttgttgtatggaaattttgggggaaaaaatccaaaacacaaactgtgggttgaaatattaaccgtctccttggttccttggtattcaccgtgcctgatctgcacatttcatcgtggctgtttctgtatagcctatactgcattagcccaagagattgttgctttgtaactttttgcactattgttttggctggatttgtattacacacagttttaaaaaaaaaaaaaaaaaaaaaaaaaaaaaaaaacggggcggagcgggatactaaaaagtaaattccccacggggaggcggcaacaggatctatagcggggatcaccccagcgatttcagtggtaccacgggggggccccatagtagtagaggcggaaataataacgaatgagggaaacgtgggcggagttagacacgcggagtggacagcgggcacacagtgcaagaccggcgacccaccgtgggaaggaaaccataaccgggggcgcgaaacatggtggacagaacactaagagatattaaggaccaggaa

SEQ ID NO: 42109 - DNA, 816 bp, Homo Sapiens
  misc_feature (658)..(724): n is a, c, g, or t
  misc_feature (726)..(774): n is a, c, g, or t
  misc_feature (776)..(776): n is a, c, g, or t
  misc_feature (781)..(781): n is a, c, g, or t
  misc_feature (783)..(787): n is a, c, g, or t
  misc_feature (789)..(793): n is a, c, g, or t
  misc_feature (795)..(803): n is a, c, g, or t
ggtgttgccaaattgctgcagtccattggccaggcaccagagtccatttcagagaaagaattaaaattactctgcagcaattctgcatttcttcgagtggtaagatgtcgatccttagctgaagaatatggtttggatacaattaacaaggatgaaattatttctagcatggacaatccagataatgaaatagtgttgtacttaatgttacgggctgttgatagatttcataaacaacagggtagatatccaggagtatctaactatcaagttgaagaagatataggaaagttgaagtcttgtctcactggcttccttcaggaatatggtttatctgtaatggtgaaagatgattatgtccacgaattttgccgatatggagctgctgagccacataccattgctgcattcttggggggagctgctgctcaagaggtcatcaaaataatcaccaaacaatttgtaatttttaataatacttacatttacagtggcatgtcacaaacttcagcaactttccagttgtagagtaagcaagcaccttaagtagtgtgttaatgattgaaactgtaattgccttcgggttgtgctttagtctgtaaaattctaaaggagagctgctaaattgttttcttaataaacatttttctcatttgtnnnnnnnnnnnnnnnnnnnnnnnnnnnnnnnnnnnnnnnnnnnnnnnnnnnnnnnnnnnnnnnnnnnannnnnnnnnnnnnnnnnnnnnnnnnnnnnnnnnnnnnnnnnnnnnnnnntngtggnannnnnannnnnannnnnnnnnaaaaaaaactggg

SEQ ID NO: 42110 - DNA, 630 bp, Homo Sapiens
caagactacacggtctatgagcaataatgtgatttctggacattgcccatgtataatcctcactgatgatttcaagctaaagcaaaccaccttatacagagatctagaatctctttatgttctccagaggaaggtggaagaaaccatgggcaggagtaggaattgagtgataaacaattgggctaatgaagaaaacttctcttattgttcagttcatccagattataacttcaatgggacactttagaccattagacaattgacactggattaaacaaattcacataatgccaaatacacaatgtatttatagcaacgtataatttgcaaagatggactttaaaagatgctgtgtaactaaactgaaataattcaattacttattatttagaatgttaaagcttatgatagtcttttctaattcttaacactcatacttgaaatctttctgagtttccccagaagagaatatgggattttttttgacatttttgactcatttaataatgctcttgtgtttacctagtatatgtagactttgtcttatgtgtcaaaagtcctaggaaagtggttgatgtttcttatagcaattaaaaattatttttgaactgaaaatacaatgtatttcac

SEQ ID NO: 42111 - DNA, 544 bp, Homo Sapiens
tgctttcactagtacacaaaaggttaagttaaaactactttaaacttgtatagcctgccatctgaggtgaattattttcaaaaaatactaaatctatgaactgagactagcaattagttggctgctccctaccatgattttacttttaatagcaatacagttatattggtgataaatatgacaggcttaagtactgctgtccttttgcatcttcctaagcatcttggttaaatttctgaagtttaaaaattagatccagatttcttctgttgtgtctgaagagaaccatgacatttagaagtatactggtaatctattaggtccattggcaaagtatattggtccatattcaaacctattccaaaaggttagaagtgtttaagattcctttattgtggtaccatgtctgtttacctatgcttatgagcaacaataaattactagtttaccttctggaattttaattgttataaccgaatcaattatcggaaagtgaaaaacacctcccggtcacacaacaggctacgtaaatcacctgtgtcgc

SEQ ID NO: 42112 - DNA, 546 bp, Homo Sapiens
  misc_feature (503)..(503): n is a, c, g, or t
atttctggaggatgaccttgagggaagctttttaatattagtttcaagctttccttaccctacaactttaaacaaaagctttaattttgtttgcactcctattttgagcttgtaactggaaaagcatgtcttgcactgttcaacctcctgagtggtcgctttaacaacctccaaattgtgtacagtggttattttccccagttgtatagttttgagacattcaattatcactgtcttagttgtattttaatttactaaattatgtagctatttgactgttaagttcttttaaacaactgtttccttgggcttcagttatttaaagtaaatttaggtgtaatatagaaaactgtccctttccaggtgggagcttaacacctgtataaaacctaaggttttagtaagtaccttagttgaataaaagcacaaggttatcaccttttttatccgtccaccgtgacatggttatgcatcctttagattaacctcaccaaatgaagctntttctatccatttttaatattgtccttacataatattgtcctt

SEQ ID NO: 42113 - DNA, 499 bp, Homo Sapiens
tggagaagagctatgagctgccagatgggcaggttatcaccattggcaatgagcgcttccgctgccctgagaccctcttccagccttcctttattggcatggagtccgctggaattcatgagacaacctacaattccatcatgaagtgtgacattgacatccgtaaggacttatatgccaacaatgtcctctctgggggcaccaccatgtaccctggcattgctgacaggatgcagaaggagatcacagccctggcccccagcaccatgaagatcaagattattgctcccccagagcggaagtactcagtctggatcgggggctctatcctggcctctctctccaccttccagcagatgtggatcagcaagcctgagtatgatgaggcagggccctccattgtccacaggaagtgcttctaaagtcagaacaggttctccaaggatcccctcgagactactctgttaccagtcatgaaacattaaaacctacaagcctt

SEQ ID NO: 42114 - DNA, 928 bp, Homo Sapiens
  misc_feature (14)..(15): n is a, c, g, or t
gtccccgggaattnncccgggatggtcctaggagagcatggccgaggagtcactgaacactatggaatcaatattgatgatattgatcttatcagtgccaacatggagaatgcacttgcttctattggaggtttctgctgtggcaggtcttttgtaattgaccatcagcgactttccggccagggatactgcttttcagcttcgttacctcccctgttagctgctgcagcaattgaggccctcaacatcatggaagagaatccaggtatttttgcagtgttgaaggaaaagtgcggacaaattcataaagctttacaaggcatttctggattaaaagtggtgggggagtccctttctccagcctttcacctacaactggaagagagcactgggtctcgcgagcaagatgtcagactgcttcaggaaattgtagatcaatgcatgaacagaagtattgcattaactcaggcgcgctacttggagaaagaagagaagtgtctccctcctcccagcattcgggttgtggtcacggtggaacaaacagaggaagaactggagagagctgcgtccaccatcaaggaggtagcccaggccgtcctgctctaggcagagtcccgggaccatggcctcctgccacacaacacgcagagaggactcaagactcccgctggccatggagtggcctgaaagagagcaagaacatgtggatctttgataggattgttaccaaatggtgtcagtatggaccaattgtgtgaccatgagaaggatgcttattttttttaaaaagaaacacatctaaaaggccagggaactgatttttttaagaagaaaactaaatgacagttgtataaatgaaagttttaaattgttgcattttaggaactattttaaaaggtttttcttaatccctaaaaattttttaaat

SEQ ID NO: 42115 - DNA, 1005 bp, Homo Sapiens
aagcaaggctggtacggtccggattcccgggatgatcgcttgaggccgggaggcaaaggctgcagagagctgagatcacgccattgcactctggcctgggtgacagagtggagaccctgtctcaaacaaaaaaaagtttctgttcttttctagctcaaaagccaaaagtctctgagaacgactttgaagatctgttgtccaatcaaggcttctcctccaggtctgacaagaaagggccaaagaccattgcagagatgaggaagcaggacctggctaaagacacggacccactcaagctgaagctcctggactggattgagggcaaggagcggaacatccgggccctgctgtccacgctgcacacagtgctgtgggacggggagagccgctggacgcccgtgggcatggccgacctggtggctccggagcaagtgaagaagcactatcgccgcgcggtgctggccgtgcaccccgacaaggctgcggggcagccgtacgagcagcacgccaagatgatcttcatggagctgaatgacgcctggtcggagtttgagaaccagggctcccggcccctcttctgaggccgcagtggtggtggctgcgcacacagctccacaggttgggagccgtcgtgggacctgggtccccaccgtgaggaccccgtgggcgacagcaggtgtggccagggtggggctccgagccccgggtcaccgcccgcccagcgttccaggcacatgaagagaaagcattccaaagcctctgattgttgtttcctttttctcctcccgaaggaacagctgattcatgctcctcccgcaattgtcacgtctgtgatttatttgggtgtttcggggcgtggcctctggagccccggcacgtggtgggccacgctgctggcgctcatgggccctggtgtttgcaccgcactttgtaatcagtccccgtggttgtctgtacagaattaaacttattttcgatgaaaaaaaaaaaaaaaaaaaagggcgg

SEQ ID NO: 42116 - DNA, 1007 bp, Homo Sapiens
  misc_feature (834)..(834): n is a, c, g, or t
ggagcgttatgtgtaaaaaacaagtatctgtatgacaacccgggatcgtttgcaagtaactgaatccattgcgacattgtgaaggcttaaatgagtttagatgggaaatagcgttgttatcgccttgggtttaaattatttgatgagttccacttgtatcatggcctacccgaggagaagaggagtttgttaactgggcctatgtagtagcctcatttaccatcgtttgtattactgaccacatatgcttgtcactgggaaagaagcctgtttcagctgcctgaacgcagtttggatgtctttgaggacagacattgcccggaaactcagtctatttattcttcagcttgcccttactgccactgatattggtaatgttcttttttgtaaaatgtttgtacatatgttgtctttgataatgttgctgtaattttttaaaataaaacacgaatttaataaaatatgggaaaggcacgaaaaaaaaaacacccaccccaaaaaaaaaacatgtcggcccgcctcggcccctcgagaaacctttcctaaaccattccttttgggcgcggcgggccccagtaagggtaaggtggaacatgggcccataaccttggttttcccttaggaaaaattcctgggctcattggaccttagtggcttgagaatttcttcacccaaataaaaaaaaaccgccccggggaggaaaaccccgaagcggtttttgaaaaaaaaatccccaaatggggagtttcctggaaggtccttttacctgggaatcctaatccaaccggggaagtccccaaggggagagctctcaaaatttccaaaatatatcgnccccccggccccttggccagtttcaatttgggaaggaacgtggggggcaaaattccaatttaaagcacatttcctgggccggaaacttggtgaaagccccattcctccaaaaccgggtattgggttagcaaacccttgaaacttcgccccgagggggcgatattcggcaccca

SEQ ID NO: 42117 - DNA, 567 bp, Homo Sapiens
ccaagaagcctcaggtcgtggagaacatggattaggatcctagactgtaaagacacagaagatgctgacctcacccctgccacctatcccaagacctcactggtctgtggacagcagcagaaatgtttgcaagataggccaaaatgagtacaaaaggtctgtcttccatcagacccagtgatgctgcgactcacacgcttcaattcaagacctgaccgctagtagggaggtttattcagatcgctggcagcctcggctgagcagatgcacagaggggatcactgtgcagtgggaccaccctcactggccttctgcagcagggttctgggatgttttcagtggtcaaaatactctgtttagagcaagggctcagaaaacagaaatactgtcatggaggtgctgaacacagggaaggtctggtacatattggaaattatgagcagaacaaatactcaactaaatgcacaaagtataaagtgtagccatgtctagacaccatgttgtatcagaataatttttgtgccaataaatgacatcagaattttaaacataaaataaaaaaaaaaa

SEQ ID NO: 42118 - DNA, 752 bp, Homo Sapiens
  misc_feature (714)..(714): n is a, c, g, or t
tctgtgctgtagaaaaacattaacccttgttcaaaaaagaaatggataaacttggcctttctaagtggtaagaatgacctgtcactataatatactgtatgtttacattttatttaaatttaatctcttatgtatagggtgataaccttccccagaaacaacagtgattgcgattgttttctagaaacttctttaaagtgccacatttggcagtacaaatgagtctgagtgtaatagcccagagatttatatatagttgaatgtctaaaatggtaaaatgtgccactgtgtcaagttacagtggcttatgtttttcatagtaattcaaatgaacttcctatttttgatagtaaatgtcatttaatagtatacttgccatttgagcctcactgcaaaattagtgcagaggagaaaacaatttttaatgtaatcttgattttacctcatatactgtacattccaaaaactctaaactttttaaagattatagatacactaccaaacatatcaccttaaaattgtataaggctgaatgaacttcatacaaatgaaaaaaatctcataaaaatacataaactatgtagcaaaagtatctgtaaaatccatggaaaataaaagttgtatcattctttttgagatacgtttattgtattcatatatattcattatttgctacctggttaagaaagtgaaatggtatggtctcccctcttncaatgagcttaaaacatttttcccaacagtatataaat

SEQ ID NO: 42119 - DNA, 891 bp, Homo Sapiens
  misc_feature (659)..(659): n is a, c, g, or t
  misc_feature (684)..(684): n is a, c, g, or t
agccactttggtcccgtgcagcttctgtcctgcgtcgaagctttgaaggccgaaggcagtgcaagagactctggcctccacagttcgacctgcggctgctgtgtgccttcgcggtggaaggcccgaggggcgcgatcttgaccctaagaccggcggccatgatggtgctgacctctggtggccgatcggggcactgcaggggccgagccattttggggggcccccctccttgctctgcaggcaccttagtggcttttttcctcctgtgtacagggaagagaggggtacatttccctgtgctgacggaagccaacttggctttcccggactgcaagcagggctctgccccagaggcctctctctccgtcgtgggagagagacgtgtacatagtgtaggtcagcgtgcttagcctcctgacctgaggctcctgtgctactttgccttttgcaaactttattttcatagattgagaagttttgtacagagaattaaaaatgaaattatttataatctgggttttgtgtcttcagctgatggatgtgctgactagtgagagtgcttgggccctcccccagcacctagggaaaggcttcccctccccctccggccacaaggtacacaacttttaacttagctcttcccgatgtttgtttgttantgggaggaagtggggagggcctggnctgtatggcctccagcctacctgttccccctgctcccagggcacatgggttgggctgtgtcaaccccttaggggcctccatgggggtcagttgtccccttctcacctccccagctctgttccccattaggggcccctggggtggcacccgggaaggaatgggacttgacctttccacggaacctgggttggggttgccacgggaact

SEQ ID NO: 42120 - DNA, 581 bp, Homo Sapiens
  misc_feature (559)..(559): n is a, c, g, or t
agaacatcacctaccactgcaagaacagcgtggcctacatggaccagcagactggcaacctcaagaaggccctgctcctccagggctccaacgagatcgagatccgcgccgagggcaacagccgcttcacctacagcgtcactgtcgatggctgcacgagtcacaccggagcctggggcaagacagtgattgaatacaaaaccaccaagacctcccgcctgcccatcatcgatgtggcccccttggacgttggtgccccagaccaggaattcggcttcgacgttggccctgtctgcttcctgtaaactccctccatcccaacctggctccctcccacccaaccaactttccccccaacccggaaacagacaagcaacccaaactgaaccccctcaaaagccaaaaaatgggagacaatttcacatggactttggaaaatatttttttcctttgcattcatctctcaaacttagtttttatctttgaccaaccgaacatgaccaaaaaccaaaagtgcattcaaccttaccaaaaaaaaaaaaaaaaaaaaaggggtttnttttttaaccttttaaaaaagg

SEQ ID NO: 42121 - DNA, 646 bp, Homo Sapiens
cccacgcgtccgggagagactgttctgttccttgtgtaactgtgttgctgaaagactacctcgttcttgtcttgatgtgtcaccggggcaactgcctgggggcggggatgggggcagggtggaagcggctccccattttataccaaaggtgctacatctatgtgatgggtggggtggggagggaatcactggtgctatagaaattgagatgcccccccaggccagcaaatgttcctttttgttcaaagtctatttttattccttgatatttttcttttttttttttttttttggggatggggacttgtgaatttttctaaaggtgctatttaacatgggaggagagcgtgtgcggctccagcccagcccgctgctcactttccaccctctctccacctgcctctggcttctcaggcctctgctctccgacctctctcctctgaaaccctcctccacagctgcagcccatcctcccggctccctcctagtctgtcctgcgtcctctgtccccgggtttcaaagacaacttcccaaagcacaaagcagtttttccccctaggggtgggaggaagcaaaagactctgtacctattttgtatgtgtataataatttgagatgtttttaattattttgattgctggaataa

SEQ ID NO: 42122 - DNA, 429 bp, Homo Sapiens
cttgtgataagcctctcttcggcatctgaggagcagctgcagcaaaatctaggggtgtaagtgtatcaggacttatgtgacttatattttggggagatgagggttgggttttttttttaatgctacgtgacagtttgaaaccttcacagttatcctctgggggtaaatcaattcttcaacccttgggtgtgtgagtttgaggcagggtcatttgtgtgatgtgtttggccttaccaaagcaaaagagggtgcaagaatgtgggagtatgtctgccggtttcaacacacacagacaaacacagccacacgcggcacacaagtataagactttttgtattactgctccctacttaacatacttgaattctcaaatttcctttggggtaaaaaaaaaaaaaggatttgaaaccataaagtgttctgaagaaa

SEQ ID NO: 42123 - DNA, 586 bp, Homo Sapiens
aaagaagtttttccaaagatgttatgaagggctctaatccataaagtaccacagcaaaacaacttcagtgactgtggtgtatatgtattgcagtatgtagagagcttttttgagaatccaattctcagttttgaactacctatgaatttggcaaactggtttcctccaccaagaatgagaacaaaaagagaagaaatccgaaacataattctgaagctacaggaagatcagagcaaagagaaaagaaagcataaggacacttactcaacagaagcacctttaggcgaaggaacagaacaatatgtcaatagtatctcagattgaccatttctgttacttgtcatttctactttcagaaactaaatgactttcaaatttgggtatagacaataaagaactgaagtgctcactactcagtgatttggaaattttgatgcttgtataaatgtcagataattaatttccaaaggcgtatgtattaagtaaaagtctgtaaatatgttaatgaggccaatttttccagcatttataattatttttttcacttgttaggaagcttttgttatgtattttctgttaatagtac

SEQ ID NO: 42124 - DNA, 637 bp, Homo Sapiens
  misc_feature (609)..(609): n is a, c, g, or t
  misc_feature (637)..(637): n is a, c, g, or t
atattctttagtgaacttgtttaattcctcagtgggtgtgacatatttcatgggaatattcaaatatctatggtaatattttgaccctttatatttgttctaaaataagtcaaaatgtgaaaataatattaaatctaagatattttgaactaagcatctttatatgcttgtgtaacaggaacaaagtaacagcctttcaattcatatactgccttgtgttcagtgaacccaagaaatgtaataaatatttgtaattttacacaaatatttaagaggaaagagtattaagagcaattcaaaaaaagtaaccttatactactaaaaaaaaaattcttgcatatattatcatcaaatgcatttttgaagacatcaaagactcaggttaaaactattttggtaagtgcagcttgaatttcaaatatcccgtgttacctttctctattacagcttaaagtatgctacaatctgtgtcatatagttaattgataagcatttttaatctgtgtaaacacaggaatttaaataggaatttactatttttttataaagcttttgctattttttcattgctcattttgttcttaatattttgataaagatcagactttntgcttgagtttctcagtgttaattattn

SEQ ID NO: 42125 - DNA, 815 bp, Homo Sapiens
gtctgtccccgctgaggaggtgcagcagccggagatggcggcggtgctgaacgcagagcgactcgaggtgtccgtcgacggcctcacgctcagcccggacccggaggagcggcctggggcggagggcgccccgctgctgccgccaccgctgccaccgccctcgccacctggatccggtcgcggcccgggcgcctcaggggagcagcccgagcccggggaggcggcggctgggggcgcggcggaggaggcgcggcggctggagcagcgctggggtttcggcctggaggagttgtacggcctggcactgcgcttcttcaaagaaaaagatggcaaagcatttcatccaacttatgaagaaaaattgaagcttgtggcactgcataagcaagttcttatgggcccatataatccagacacttgtcctgaggttggattctttgatgtgttggggaatgacaggaggagagaatgggcagccctgggaaacatgtctaaagaggatgccatggtggagtttgtcaagctcttaaataggtgttgccatctcttttcaacatatgttgcgtcccacaaaatagagaaggaagagcaagacaaaaaaaaggaaggaggaagaggagcgaaggcggcgtgaagaggaagaaagagaacgtctgcaaaaggaggaagagaaacgtaggagagaagaagaggaaaggcttcgacgggaggaagaggaaargagacggatagaagaagaaaggcttcggttgggagcagcaaaagcagcagawaatggcagcyttaaactcccagactgccgtgcagttccagca

SEQ ID NO: 42126 - DNA, 803 bp, Homo Sapiens
  misc_feature (764)..(774): n is a, c, g, or t
  misc_feature (776)..(795): n is a, c, g, or t
cacgcgtccggggagctgatctctgatgctgaggctgatgtgagagaggatgattcttacctcttcgacttagacaacaaggatggagaggtgtactgcatagatgcccgttactatggcaacatcagccgcttcatcaaccacctgtgtgaccccaacatcattcccgtccgggtcttcatgctgcaccaagacctgcgatttccacgcatcgccttcttcagttcccgagacatccggactggggaggagctagggtttgactatggcgaccgcttctgggacatcaaaagcaaatatttcacctgccaatgtggctctgagaagtgcaagcactcagccgaagccattgccctggagcagagccgtctggcccgcctggacccacaccctgagctgctgcccgagctcggctccctgccccctgtcaacacatgagaacggaccacaccctctctccccagcatggatggccacagctcagccgcctcctctgccaccagctgctcgcagcccatgcctgggggtgctgccatcttctctccccaccaccctttcacacattcctgaccagagatcccagccaggccctggaggtctgacagcccctccctcccagagctggttcctccctgggagggcaacttcagggctggccaccccccgtgttccccatcctcagttgaagtttgatgaattgaagtcgggcctctatgccaactggttccttttgttctcataaaaagggttgggtttgggtaatnnnnnnnnnnnannnnnnnnnnnnnnnnnnnnaaagggcg

SEQ ID NO: 42127 - DNA, 942 bp, Homo Sapiens
gagaccctcccggcccaggtccacacgtgctcggcgcaggaggcttcagcaccagcgattacgacgttggctgggagagtcctcacaatggctcggggacgtgggcctattcagcgccggatctgctgggggcatggtcctggggctcctgtgccgtgtatgacagcgggggctacgtgcaggagctgggcctgagcctggaggagagccgcgaccggctgcgcttcctgcagctgcacaactggctggacaacaggagccgcgctgtgttcctggagctcacgcgctacagcccggccgtggggctgcacgccgccgtcacgctgcgcctcgagttcccggcggccggccgcgccctggccgccctcagcgtccgcccctttgcgctgcgccgcctcagcgcgggcctctcgctgcctctgctcacctcggtgtgcctgctgctgttcgccgtgcacttcgccgtggccgaggccgtacttggcacagggaagggcgctggcgcgtgctgcggctcggagcctgggcgcggtggctgctggtggcgctgacggcggccacggcactggtacgcctcgcccagctgggtgcgtgaccgcagtggacccgtttcgtgcgcggcgccgcgccgcttcactagcttccgaccagtgggcgcagtgagctccgaggccgtggctggggctcgtgtcttctgctttggtccagctgcccagcaagctacgctcggcgccagtggtccgctttgaaacttttgccgagtctgcagagtcctggggtcacttggctgggtgtcggggtacctaccccagtggctcggcggttccggttggcccctggcggcgccgccctggtggctgggggctacttgtcgggtggctccctggtggtgcccggggccagggggttcgcccctgggggccgcacattggtggggacagg

SEQ ID NO: 42128 - DNA, 1036 bp, Homo Sapiens
  misc_feature (12)..(12): n is a, c, g, or t
gcctttcctttntggagattttttttccgtgtgtttattttttattatttttcaagataaggagaaagaaagtacccagcaaatgggcattttacaagaagtacgaatcttatttttcctgtcctgcccgtgagggtgggggggaccgggcccctctctagggacccctcgccccagcctcattccccattctgtgtcccatgtcccgtgtctcctcggtcgccccgtgtttgcgcttgaccatgttgcactgtttgcatgcgcccgaggcagacgtctgtcaggggcttggatttcgtgtgccgctgccacccgcccacccgccttgtgagatggaattgtaataaaccacgccatgaggacaccgccgcccgcctcggcgcttcctccaccgaaaaaaaaaaaaaaaaaaaaaaaaaaaaaaaaatccgggggacttctattttcgggggggggaaaaacgggtgcaatagacgaaaggggcacatggggcaaaaggctgtgtacccgggaccccaggttttctgtggtgacccaaggggggaacaattcgcgcgggagtactccccataatgagagagagagcagtacaaaatctcgagaaaaccagggggtataacccgcgcggcttatagagacacctctgggggcaacaacgtccgagaaggccagcgagcgcgacgagacgagacgcagcaacgccgcaggagacgaccgagacccaccggccgcggacgatacgaaccggacatcgagaaacagcacgacaccacagcatgcacggacaccgcagaacgaacacgcagagaacagcggactggacaggccaggcgaatgaaggcaagcgggagacgaaggacgcgacaagaacgacgagcacagacaagaagaagggagggggcgggtacaaacgcgccaatgcggacggatggcgcggggcggcagaggagcggcgcgcggtagcgagacagggagggggagagggcgtcggcgcgagaggagggaagcgaggaggtgagaacacgccctagggcgc

SEQ ID NO: 42129 - DNA, 591 bp, Homo Sapiens
  misc_feature (515)..(515): n is a, c, g, or t
ggagtcctcaggcccctcgcagcataaggatgttttgcaactttccagaatctggcccagaaattagggctcaatttcctgattgtagtagaggttaagattgctgtgagctttatcagataagagaccgagagaagtaagctgggtcttgttattccttgggtgttggtggaataagcagtggaatttgaacaaggaagaggagaaaagggaattttgtctttatggggtggggtgattttctcctagggttatgtccagttggggtttttaaggcagcacagactgccaagtactgttttttttaaccgactgaaatcactttgggatattttttcctgcaacactggaaagttttagttttttaagaagtactcatgcagatatatatatatatatttttcccagtcctttttttaagagacggtctttattgggtctgcacctccatccttgatcttgttagcaatgctgtttttgctgttagtcgggttagagttggctctacgcgaggntttgttaactaaaagtttgtgtacaaagttacaaaacacaagaacaaaacacaaacaaacacacaaacaacacaag

SEQ ID NO: 42130 - DNA, 530 bp, Homo Sapiens
taacatatctcaacttctgccgctccctgcggtttgacgacaagcccgactactcttacctacgtcagctcttccgcaacctcttccaccggcagggcttctcctatgactacgtctttgactggaacatgctgaaattcggtgcagcccggaatcccgaggatgtggaccgggagcggcgagaacacgaacgcgaggagaggatggggcagctacgggggtccgcgacccgagccctgccccctggcccacccacgggggccactgccaaccggctccgcagtgccgccgagcccgtggcttccacgccagcctcccgcatccagccggctggcaatacttctcccagagcgatctcgcgggtcgaccgggagaggaaggtgagtatgaggctgcacaggggtgcgcccgccaacgtctcctcctcagacctcactgggcggcaagaggtctcccggatcccagcctcacagacaagtgtgccatttgaccatctcgggaagtgaggagagcccccattggaccagtgt

SEQ ID NO: 42131 - DNA, 723 bp, Homo Sapiens
  misc_feature (40)..(40): n is a, c, g, or t
aaaaacataaccagtgcaagagactttgtcacttatttcnttatgtgtgtaggaggggttaataagtctctagctctccatctattgatagtttcatttacaatttcaaaagaacattcttatatttatcagaatgtacctctattagtttcaattgagtaattctagacataactggtttgactctgtccaactctgtatttaggccatttgttacagtttcttcatgcattacttactgttaaaactgtaccgcgatttcacagttggcacttctgccatgagcagagaactgatgcgacttgttttgctgcttggtagcactttaaaaaattttttgattaatgaagaaagtaaaaccataaacatttgccaaaaattcatgccccagtattagcaatgaattagttgcattggtttgagaaaggcacatattggagggaaatcttggtgtaacttaaatatttgaaaattacctttaatgcaatgcatatctgtttattctgggaaatgttttaatgccagggcctgctgagttgcttcttcttgtggagattttttttttaatctcctgagttgtataaaagttgtactgcatcttagtttactggataaatttaaaacacagtattgtagaaagctaatacaaaactatcctatgccttcaaatagtatagaaaatggaaaatatacaagtaaattctgttgaaaaaaaaaaaaaaa

SEQ ID NO: 42132 - DNA, 602 bp, Homo Sapiens
aagaggagtattcagcacctctgcctgcgctcgcaccttcctcctcctgaaaaccaagctttgatttagattgagtaagatttacccagaatgtcagattcctttccctttagcacgtttaaagttctgtgtatttaattgtaaactgtactagtctgtgtgggactgtacacactttatttacttcgttttggttaagttggcttctgtttctagttgaggagtttcctaaaagttcataacagtgccattgtctttatatgaacatagactagagaaaccgtcctctttttccatcataattctaatctaacaatggaagatttgcccatttacacttttgagactttttggtggatgtaaataaccccattctttgcttgaacacagtattttcccaatagcactttcattgccagtgtctttctttggtgcctttcctgttcagcattcttagcctgtggcaataaagagaaactttgtgctacatgacgacaaagctgctaaatctcctatttttttaaaatcactaacattatattgcaatgaaggaaataaaaaagtctctatttaaaaaaaaaaaaaaaaagggcggccgctct

SEQ ID NO: 42133 - DNA, 737 bp, Homo Sapiens
ggggaagccgtggctgccaggaagctctttgccccacagcagattctgcaatgcagccctgccaactgagggacctgcgagggccgcccgctcccttcctgccactgccgcctactggacgctgccctgcatgctgcccagccactccaggaggaagtcgggaggcgtggagggtgaccacaccttggccttctgggaactctcctttgtgtggctgccccacctgccgcatgctccctcctctcctacccactggtctgcttaaagcttccctctcagctgctgggacgatcgcccaggctggagctggccccgcttggtggcctgggatctggcacactccctctccttggggtgagggacagagccccacgctgttgacatcagcctgcttcttcccctctgcggctttcactgctgagtttctgttctccctgggaagcctgtgccagcacctttgagccttggcccacactgaggcttaggcctctctgcctgggatgggctcccaccctcccctgaggatggcctggattcacgccctcttgtttccttttgggctcaaagcccttcctacctctggtgatggtttccacaggaacaacagcatctttcaccaagatgggtggcaccaaccttgctgggacttggatcccaggggcttatctcttcaagtgtggagagggcagggtccacgcctctgctgtagcttatgaaattaactaattgaaaattca

SEQ ID NO: 42134 - DNA, 805 bp, Homo Sapiens
  misc_feature (3)..(3): n is a, c, g, or t
  misc_feature (741)..(741): n is a, c, g, or t
  misc_feature (784)..(784): n is a, c, g, or t
  misc_feature (796)..(796): n is a, c, g, or t
cangtactagagatgaattgcttagtgcccgagatgaaattttgctccttcatcaagcagcagcaaaggttgcctctgagcgggacactgacattgcttctttacaagaagagcttaagaaggtgagagctgagcttgagcggtggcggaaagcagcgtctgaatatgagaaagaaatcacaagtctgcaaaacagttttcagcttagatgtcaacagtgtgaggaccagcagagagaagaagcaacaaggttgcaaggtgaactagagaagttgagaaaggaatggaatgcattggaaaccgaatgccattctctaaaaagggaaaatgttttgctatcatcagaactgcaacggcaagaaaaagaattgcacaattctcagaagcagagtttagagcttaccagtgatctcagcatccttcaaatgtctaggaaagaacttgagaatcaagtgggatccttgaaagaacagcatcttcgggattcagctgatttaaaaactcttctcagtaaggcagaaaaccaagcaaaggatgtgcagaaagagtatgaaaagacacagactgtactctcagaactgaagttgaagtttgaaatgactgagcaggaaaagcagtcaatcacagatgagctcaaacagtgtaaaaacaacctgaagctgctccgagagaaaggaaataatccttccatattacaacccgtcccagccgtattcatcggcctattcctggctttcctgntttggtgtttcggtccattggtggtagagaaagaaaccctggncctggatgcccntgttggctg

SEQ ID NO: 42135 - DNA, 503 bp, Homo Sapiens
  misc_feature (444)..(444): n is a, c, g, or t
atccacaatccaagagctccagtaataatttataaacagaccaaagggggagtccaaaattttaataaagatcttgttcaagattgtggatttgagcatcttgttcctgtaatagaaatgtgggcagatcaactgacatccttaaaggatttgtataagtccttgaaaacactatctgcagaactggtaccttggcttaatttgaagaagcaggatgaaaatgaaggtatcaaagttgaagatttgttgtttatagtagatactatgctggaagaagttgaaaataaggaaaaggacagcaatatgccacactttcaaactttgcaagctattgcttctcacttccaaaagttatttgatgtgccttctttaaatggagtctatccccgaatgaatgaagtttatactaggcttggagaaatgaacaatgctgtgagaaacctncaagaactcttagaattagatagttcatcctcattgtgtgtgctagtaagcacttgtgg

SEQ ID NO: 42136 - DNA, 589 bp, Homo Sapiens
  misc_feature (589)..(589): n is a, c, g, or t
gggacaagatcttcatggacacgctgcccttctgacccctgcctgggaacacgtgtgcacatgcgcactctcatatgccaccccatgtgcctttagtccacggacccccagagcacccccaagcctgggcttgagctgcagaatgactccaccttctcacctgctccaggaggtttgcagggagctcaagcccttggggagggggatgccttcatgggggtgaccccacgatttgtcttatcccccccagcctggccccggcctttatgttttttgtaagataaaccgtttttaacacatagcgccgtgctgtaaataagcccagtgctgctgtaaatacaggaagaaagagcttgaggtgggagcggggctgggaggaagggatgggccccgccttcctgggcagcctttccagcctcctgttggctctctcttcctaccctccttccacatgtacataaactgtcactctaggaagaagacaaatgacagattctgacatttatatttgtgtattttcctggatttatagtatgtgacttttctgattaatatatttaatatattggataaaaaatagacatataan

SEQ ID NO: 42137 - DNA, 638 bp, Homo Sapiens
  misc_feature (197)..(197): n is a, c, g, or t
  misc_feature (589)..(589): n is a, c, g, or t
tggtgcactacacagcgcagccgctgttcctgctggaccccggctccgtggacaccgggagcaacgacctgccggtgctgtttgagctgggagagggctcctacttctccgaaggggacggcttcgccgagtaccccaccatctccctgctgacaggctcggagcctcccaaagccaaggaccccactgtctcctanaggccccggaggagctgggccagccgcccacccccacccccagtgcagggctggtcttggggaggcagggcagcctcgcggtcttgggcactggtgggtcggccgccatagccccagtaggacaaacgggctcgggtctgggcagcacctctggtcaggagggtcaccctggcctgccagtctgccttcccccaaccccgtgtcctgtggtttggttggggcttcacagccacacctggactgaccctgcaggttgttcatagtcagaattgtattttggatttttacacaactgtcccgttccccgctccacagagatacacagatatatacacacagtggatggacggacaagacaggcagagatctataaacagacaggctctatgcanaaaaaaaaaaaaaaaaaaaaaacactttaatggggcggccgcaagctta

SEQ ID NO: 42138 - DNA, 641 bp, Homo Sapiens
actcaaaagaaggcagcagacaaagtcgtcttccttctttccaatgacgtcaacagtgtgtgcgatggtacctgtggcaagagcgagggcagtcccagtgagaactctcaagacctcttcccccttgcctttaaccttttctgcagtgatctaagaagccagattcatctgcacaaatacgtggtggtctactttagagagattgatacaaaagacgattacagtgctctcagtgtctgccccaagtaccacctcatgaaggatgccactgctttctgtgcagaacttctccatgtcaagcagcaggtgtcagcaggaaaaagatcacaagcctgccacgatggccgctgctccttgtagcccacccatgagaagcaagagaccttaaaggcttcctatcccaccaattacagggaaaaaacgtgtgatgatcctgaagcttactatgcagcctacaaacagccttagtaattaaaacattttataccaataaaattttcaaatatgctaactaatgtagcattaactaacgattggaaactacatttacaacttcaaagctgttttatacatagaaatcaattacagctttaattgaaaactgtaaccattttgataatgcaacaataaagcatcttcag

SEQ ID NO: 42139 - DNA, 955 bp, Homo Sapiens
cggggtggtagtgccattgttcgtgtgctcaggtctgaatcgccgagggaggaggcggtggaggaagaggtggcggcggtggcggtggtcgtagcggtggcggaggaggcgggtacgaatcagctgcgggcggagacatggccaacatcgcggtgcagcgaatcaagcgggagttcaaggaggtgctgaagagcgaggagacgagcaaaaatcaaattaaagtagatcttgtagatgagaattttacagaattaagaggagaaatagcaggacctccagacacaccatatgaaggaggaagataccaactagagataaaaataccagaaacatacccatttaatccccctaaggtccggtttatcactaaaatatggcatcctaatattagttccgtcacaggggctatttgtttggatatcctgaaagatcaatgggcagctgcaatgactctccgcacggtattattgtcattgcaagcactattggcagctgcagagccagatgatccacaggatgctgtagtagcaaatcagtacaaacaaaatcccgaaatgttcaaacagacagctcgactttgggcacatgtgtatgctggagcaccagtttctagtccagaatacaccaaaaaaatagaaaacctatgtgctatgggctttgataggaatgcagtaatagtggccttgtcttcaaaatcatgggatgtagagactgcaacagaattgcttctgagtaactgaggcatagagagctgctgatatagtcaagcttgcctcttcctgaggagcaccaacatctgttatttttaggattctgcatagatttcttttaaactggcattcttgcctaatgatgttatctaggcaccattggagacttgaaaaaaaaatccctgctctgtaaataaagctatttaaacgtctgtggtaaattaaaaaaaaaaaaaaaaaaaagg

SEQ ID NO: 42140 - DNA, 913 bp, Homo Sapiens
  misc_feature (607)..(621): n is a, c, g, or t
  misc_feature (623)..(628): n is a, c, g, or t
  misc_feature (631)..(633): n is a, c, g, or t
  misc_feature (635)..(635): n is a, c, g, or t
  misc_feature (637)..(638): n is a, c, g, or t
  misc_feature (643)..(644): n is a, c, g, or t
  misc_feature (679)..(679): n is a, c, g, or t
tcattgattattttgttcccttcctccccctggaatacaaacacctaaaaatgtgtatccgagtggaaatgcagtcccgaggctatgaaattgatgaagacattgtaagcagagtggctgaggagatgacatttttccccaaagaggagagagttttctcagataaaggctgcaaaacggtgttcaccaagttagattattactacgatgattgacagtcatgattggcagccggagtcactgcctggagttggaaaagaaacaacactcagtccttccacacttccacccccagctcctttccctggaagaggaatccagtgaatgttcctgtttgatgtgacaggaattctccctggcattgtttccaccccctggtgcctgcaggccacccagggaccacgggcgaggacgtgaagcctcccgaacacgcacagaaggaaggagccagctcccagcccactcatcgcagggctcatgattttttacaaattatgttttaattccaagtgtttctgtttcaaggaaggatgaataagttttattgaaaatgtggtaactttatttaaaatgatttttaacattatgagagactgctcagattccnnnnnnnnnnnnnnncnnnnnnccnnncncnnccccnnccccccccccccccacccccccccccccccccccnccccaaaaggggggccccctcaaaaatatccctcggggggcccaagttttcgggtccccatttttttggtaaaaaggggcccctaagggggggccgtattaaaacctaggcctgggccccttttttaaaacgcccgggcatgggaaaaaccggccaccttggggaactctttggaaagggaacccttttttttctggggggggggggacacataatgtgggacaaaattctcca

SEQ ID NO: 42141 - DNA, 590 bp, Homo Sapiens
  misc_feature (587)..(587): n is a, c, g, or t
ggattattacatagactgtgaagtatctttactggaaatgagcccaagcacacatgcatggcatttgttccacaggagggcatccctggggatgtggctggagcatgagccagctctgtcccaggatggtcccagcggatgctgccaggggcagtgaagtgtttaggtgaaggacaagtaggtaagaggacgccttcaggcaccacagataagcctgaaacagcctctccaagggttttcaccttagcaacaatgggagctgtgggagtgattttggccacactgtcaacatttgttagaaccagtcttttgaaagaaaagtatttccaacttgtcacttgccagtcactccgttttgcaaaaggtggcccttcactgtccattccaaatagcccacacgtgctctctgctggattctaaattatgtgaattttgccatattaaatcttcctcatttatactattatttgttacgttcaatcagaatccccgaaacctcctataaagcttagctgccccttctgaggatgctgagaacggtgtctttctttataaatgcaaatggctaccgttttacaataaaattnttc

SEQ ID NO: 42142 - DNA, 766 bp, Homo Sapiens
ggtggaggagcagctggtactgaagcgggtggccaacatcctcatcaacctgtatggcatgacggccgtgctgtcgcgggccagccgctccatccgcattgggctccgcaaccacgaccacgaggttctcttggccaacaccttctgcgtggaagcttacttgcagaatctcttcagcctctctcagctggacaagtatgctccagaaaacctagatgagcagattaagaaagtgtcccagcagatccttgagaagcgagcctatatctgtgcccaccctctggacaggacatgctgaggcaggggacagtgtcccctgctaccgcccgcccctacccatggcccgttgctggatgactgttactcttttttcagaaggtgttgggattatcacaggttaagccttttgttccccgtctgcacctgaagggttgtcgcctggcctgggagagcctcttccaggttttgacctgcaggcagtgctctctaacaggaccatcacagcttctgaactgagccggagagagagaatggaattgctgacccctggaactggcgggtattctggtcattgaggagacaccatagtggaaactggggcttatgctgctgcctccagggtgtgaggtgggtggggacctgtgtcaggtgtggatagccatttctgctcaacacacattctctaaaaacagcttgaaagctctggtttgggtcattcatttaaactagaagcagagggcacttaaaacatgtaccagggaaccat

SEQ ID NO: 42143 - DNA, 684 bp, Homo Sapiens
gatgaataatttaaagaaaaacacctaaaatttgaaaaatgattgtaggatcaaaaaaggcagatgaaattacttaatactcagtgttttggagagtattccttttagtttgttggttggctggtttgaacgatagaaatatgcagcatgcaatatatgcttatatttcattttaatttctgatatataatgaacttcttgggagaggtactgaatctttgatgttttttgtcattgttctcaagtgcaatataacaatgtaaccaaatctagataatttcaaagttgtcattaatttagtaagcctaatataaacaaatatttgtattatttttgttagcaggaaagagtgattaagtgaggttatttacccctaaatggtccattctgcattgtatttcaggctggaaatgaattattctttaccagttttgaaacactttgaaatatcctaaggtaacttggaagctgtgtagtatatcaaattaatttgctacctaataacatagaaagtaaatatctttgtggtcacccacattgggtgagacagaaaatgaatctgttctaaaatttgtaatttgctaacttgatttgagttagtgaaaactggtacagtgttctgcttgatttacaacatgtaacttgtgactgtacaataaacataagcatatggtaaaaaaaaaa

SEQ ID NO: 42144 - DNA, 629 bp, Homo Sapiens
gtatacaggcagaaagtgaaaaatggcagcaggctctgaagagtgttgtactctatgttatcctggctccttttgacaatgaacagtcagatttggttcaccgaataagtggtgacaagaagttagaagaaattcccaaatacaaggatcttttaaagctttttaccacaatggagttgatgcgttggtccacacttgttgaggactatggaatggaattaagaaaaggttcccttgagagtcctgcaacggatgtttttggttctacagaggaaggtgaaaaaaggtggaaagacttgaagaacagagttgttgaacataatattagaataatggccaagtattatactcggataacaatgaaaaggatggcacagcttctggatctatctgttgatgagtccgaagcctttctctcaaatctagtagttaacaagaccatctttgctaaagtagacagattagcaggaattatcaacttccagagacccaaggatccaaataatttattaaatgactggtctcagaaactgaactcattaatgtctctggttaacaaaactacgcatctcatagccaaagaggagatgatacataatctacaataagggtcttagtgctttagaaaa

SEQ ID NO: 42145 - DNA, 802 bp, Homo Sapiens
ggtgattcagtgctatttgtaactgtgtcccagtgaccaaattgcactcgactcgatcagctgttcatccatttcgtgttttttcctgtcaaacattaatccagcaaatatatgaggtatttaccaatttattttcttagtattacaaaataattcattagcataaagtacaatagtgaaatatttgagttgttcggaacctcaattaatcctgttttacatttcagacctaaagctggcaatcaggagaagaagcactttgttttaaatgtggagaagataacacttgattccatttcattgtcattagtgtattaaccagcaggagaggtgatgagccatttttcaaatgaaataccttttatttccatataatttttttattttagagttcaatagctgtttttatgattatcctcaatttccatatgttactgaatctgaaaaacatctttaaaattcaaacagttccattttctctcttgtaagtgttaaatgtgataaaagtacatattttaaattgtttccagctcttggatatagcagcaataaaagcactaatttgtgggtatttacgaaaacccggaaaataaactcatactttaaaggaagcagcaaaaaaaagaaagccggcgacgccctgctacccgcccccctttttctatttctcgcccccccacgattatttcaaaggttcgcaccacctcccgggggtggcccgccccccgccccccccaaagtcttcccaagcaccctcttcggcgacccgcgcgccccccccacgcaaaagttcaactttgcg

SEQ ID NO: 42146 - DNA, 774 bp, Homo Sapiens
cccacgcgtccgcacccaccccgcaggtagaagaagcgcaggaaagacagcagcgaggagtcggacagctcagaggagagcgacattgacagcgaggcctcctcagccctcttcatggcgaagaagaagacgccacccaagagagagcggaagccgtcgggagggagctcaaggggcaacagccgcccaggcacgcccagcgcagagggtggcagcacctcctccaccctgcgggcggctgccagcaaactcgagcaagggaagcgggtgagcgagatgcctgcagccaagcggttgcggctggacacgggaccccagagcctgtctgggaagtcgacaccccagccaccatcaggcaagacaacacccaacagcggcgacgtgcaggtgactgaggatgccgtgcgccgctacctgacacggaagcccatgaccactaaggacctgctgaaaaagttccagaccaagaagacagggctgagcagcgagcagacagtgaacgtgttggcccagatcctcaagcgactcaaccccgagcgcaagatgatcaacgacaaaatgcacttctccctcaaggagtgaggcttggtccaatacatggctctgccccccagaacttaaggctctcactgccccttcgccatcctagagtgaggctctgtccaatacatggctctgccctccagaacttcaggctctcagtgacccttcgacatcctgcttgctccctgactcccagggccccgtagttagcaattctggaaaagttaagcc

SEQ ID NO: 42147 - DNA, 722 bp, Homo Sapiens
acagggctgagcagcgagcagacagtgaacgtgttggcccagatcctcaagcgactcaaccccgagcgcaagatgatcaacgacaaaatgcacttctccctcaaggagtgaggcttggtccaatacatggctctgccccccagaacttaaggctctcactgccccttcgccatcctagagtgaggctctgtccaatacatggctctgccctccagaacttcaggctctcagtgacccttcgacatcctgcttgctccctgactcccaggccccgtagttagcaattctggaaaagttaagccatctcctcctctggcccttccttctggaatcttcagatgcctgttaggccttcttattgtcctcctcctcctggctcggcctccctcacactgaccaagggcctgtgctgcccactgggtaacttctacagttctcccttccacttccctaagtctctcttcagctgtgacttatccaccacatagcccagtaagtcttcagttttggctgggcatgatggtgagcgcctgcagtcccagctacttgggaggctaagcccagttcaaggctgcagtgaactatgatggtgccactgcattccagcctgggtgacagaatgaaatcctggcacaaaaaaaaaaaaaggtgccaggcatggtggcgggaccctgtggtcccagtgtccgaggctgaggcgaaatcctttgacccggaggtga

SEQ ID NO: 42148 - DNA, 754 bp, Homo Sapiens
  misc_feature (708)..(711): n is a, c, g, or t
  misc_feature (713)..(749): n is a, c, g, or t
cacctgtgttgctttgaatctgctgccagttctggctcaaatgtggcacaaaatcagtacatcagacacaccatgaaatccctgtggctataaattctaaggaatcttttgacacttccagcccaaagaacttatttttatttcgtattatataagagtccccacctctactccacgtaccccaaaaagataagctgtcctcagatcctccttctacccaggagggaaataatggatattgccaagggaacaatcagaactcatctggctttgaaaacgacctgccaagtttggctagcaggttcagacaacaagagagtaacaattggtgggagagccacaggtagctggaaaagatactcccagctgacagggtgataaaaggcagggaagaattgggcctgtgctgatccaggaaggttttattgtttgcttgttttttgtatttactcgtgactaaattttattcatttaagtcagaattttgatatttgaaataagactactttcccttttcttactatctataaaaaagacgaggcagggatgctgtgttctttctgtcaaattctaaatgtgatctttgccattgcttatttgaattcaagaaagctatactttttcatcacatataactcacagtttcatttttgcattgttggattagacttaataaaacctaaatggaaaataaattcctaaatctgnnnnannnnnnnnnnnnnnnnnnnnnnnnnnnnnnnnnnnnnggggc

SEQ ID NO: 42149 - DNA, 770 bp, Homo Sapiens
tcagtttagctctcaaagaaggggtgaatcataaagccagtgaaaatttcaccctctgagggagttccccaatctgaaggggaagagggtgacctcagcggcttttctcccaaaaatcggctgaaggctggttgtggatccttgttcctctcctgaccccatctggctgctgccccgtctcccacccctgtccccggggctcgctggccctgcactccgccttagtcctggggccggcgacacagtgggggctcctcacttgctgcagtgtcatagcaataaaatgtgattcttggggtccccccagggagctgcccatggctttatttatgaacctggttttcgggagtcaggggaggagatgactttgcttctgtgcacagccccgtcttccaggagccacaactcagaagaaaagggtgctcagacttttgttatacacatttgctttgtgtaaataaatgtttacaattttatatgaaagatggaataagcgctagagcttccaactgtatattttttacttttatagattttaaaactatgatcctttatatgtgtgttttgggggagctatgataagttttatggcaaacggttggtattgttaactttttattgtcatcaaaagttcataaaagtcctattaatccccatattcttctactgcccttaactctggtatacaccaaaaagaaatctttactttccttgttttatcattataaaaataaagtatttttgctagtatggaaaaaaaaaaaaaaaag

SEQ ID NO: 42150 - DNA, 574 bp, Homo Sapiens
  misc_feature (542)..(542): n is a, c, g, or t
ctaaggttactacagggggctcagtgtcatccacaacttcctatattagggataaaacatataggtgcacaagagctggggtatagcccataggtggtggagagaaaagtggtcagtccttcttgggcctggaggttagcagtcaagtttctctgctttcactgctcgctcgctctctcctgcaatgattgatgatcactccgtggatagagaggcacactgtcagaggtgaccggagaactgagttgcaaaatatattaagatctggtagaggtaccagcttcctttccagctggagaggccccaacactggatggttctgtagggagcctagggagcctggtcatcaacttgcaatacctcacagagccagttcacatcccactctgagctcccacgagaaacactgcttctccaggcccggggttgttggggagagaggcagaggcagctggagcgccgttctctcctgctgggacaccgcttgggctttggtattgactgagtggctgacagttatcttccaaccccaactggcttgngggcaggacaagggctaggcttgatggtggcc

SEQ ID NO: 42151 - DNA, 604 bp, Homo Sapiens
gggtatccaacttaaatcccagaattttgttccaccatggttagttatttgccatatgaatgtattcttgtttctaccaatattctaggcatgagaataccttaatactgagttggagattttgtatctgtttctcctcctttacgcccattttcctacccacagcagcaaatgacaacgtgtctgtccaggtctgtccccctgctcatcccaggatgccactcacatttttttcttcttgttaccttgaccacgctgtacagtaacatccaagagcccattctacagtgggtggttttggtctttttataactttttctcaaagtcactgatgtttgttcctgttaaatgtatagcattgtaatgagagcccatcaaatcctgagtgtcagtttgttgtccctattgtagatgaaatagtgatgtagcaaaaacctagtaaattctgaatgcttttccacgtagacttatctggaatgtgaacacaactctttggttaatagtaaatgcttaactgtagtcctgagtaggtgcatttctgtctgtctcaataaattttactttgtctgcaaaaaaagaacaaaaaacgcgggcggccgcaagc

SEQ ID NO: 42152 - DNA, 587 bp, Homo Sapiens
  misc_feature (54)..(54): n is a, c, g, or t
ttttaaagcttatccataaaaaaaaaatagatggtcttttatagtgggaaaaancacatggggaaaaaaatcatctattttgatgcagcatttgataatgataaaacacctcacacctcactctttatagtgcacaaaatgaatgaggtctgggctaggtagaaaaagggtcaatgctatttttgtttttagaatcattaccttttaccagcttttaaccatctgatatctatagtagacacactatcatagttaacatagttaagttcagcacttgtctcattttaatgtaaagatttgcttccattttcctacaggcagtctctctcttcctcacagtcccactgtgcaggtgctattgttactcttacgaatattttcagtaatgttattttcttctaagtgaaatttctagcctgcactttgatgtcatgtgttccctttgtctttcaaactccaaggttcccctgtggccctctcccttaccctgggaaggcctcttggagaccttacccctggctgtttggactttgtatactttaaataatttaactacccttaattacttaaaaaaaaaaaaaaaaagg

SEQ ID NO: 42153 - DNA, 592 bp, Homo Sapiens
ctcagcccccacctcaggttagggctctgcccgcagcctgacctctagccctggtggcagaggtccctcagctgcgaggctaattgggtgaccaccgattccagctgcggttaatccagcttgggcctgtctgcactgcgatcctcttgggctctcctaggatccccccatgccccgtaagaggtggaagacgcttccttccaggacagcaggctttgagtccagcacccccagcctgcctttgccaccagccccaccctgcagagtatatgaggcttgacagagtctgccccctcccccactgcaccccaagagagagagccccagccagcggaacagtttctattaccccctccctgcccccagacccatgtgatttctgctttcttctttagcaagatattctggtttctagataaggaagagtctctaatgagcccccgagccccagtctcttcagactcatggattggtctgaggggtctgaacgtctcctagccaatcagaactggctgtgggccaccctagcacgggcaccctttcaggccactgggcggcccttctgagttgaattggagttgcataattagct

SEQ ID NO: 42154 - DNA, 610 bp, Homo Sapiens
gaaaaaaccattctcacgatggggcttaagtcattgtccaggaataagattggcgtggtgcccatgacatcaccgtcactctgcctaaaagcactctagagctacttgttcacgtggagaggaaggatattttgcgaagcaacagccgcaggtggagagccctgttcacctgatagggtctagctgtgacagtaaatataataccgctgtttccttgggtacagatttgagtgttcatgtgatgagactgtaaacctcatttttcggttcctctgtttaaaaaaacatctgaaggatgaactaaggctgctggtgccctgagcaactgataatgcaaatgtggacaaagtgtctgttttctactctagcctgttcatatggaccaaatttcaacaaggaactcaaggaaaatttgtacctgccgtatttatgctttcatgtaaaaaagggttggggggaggggtgtctttttgcttttggtgaactttttttcaaaatcatttttccactgtttctgtctggttttaaaacaaattacagttttgtatggattttttaaatgtacattttggaacaaatgatcaaatattttctgaaataacaataaaag

SEQ ID NO: 42155 - DNA, 497 bp, Homo Sapiens
aaaaagtgttcaaataatcataacttctacattacaggttctgtttagatgcagaactagaggggccagggtaaatgtagatcaagagatatatagcaccatgcttcttaatgcttcatacttttgcaaacagaaaaaaaaagttttacttttattataaaacttcatctatggtcaaagtaaacactgttacatttaaattgctttttaaaaacaattgcgatctaaaaagtcaaaaatctgaaatttaataatatgagacttacactgaatataatgttcatttagaagttgctgtggtccacttcatttataaggaacaaatatttttacagtacactatagcaacagcaaaagccctctctcaccctgataggaatgggtttgctgggtgtctagaagttagattcctgctgaatagaattagccatccttaaaagattttaatccaatactgaactgtttataaaatgctttctctattgtaatgtactgta

SEQ ID NO: 42156 - DNA, 620 bp, Homo Sapiens
gttaatacagatgttttactgtttatttctaattcaaacacttaagtagctttattgttaaactttgctatttaaaattggttataatttagattatgttcttataagattctatatttcctatctaaaatgttgttgtaattcaatttaaatgtgttcatgtacagtccccatcagtagcgtatagaacaccccactctcctttagtaaatgttgagaaaatgcctttgttgtcatgctccaaatcccacactgggctgccacctgggagttctggataccgaaaggttcctttcccagaggttctgctgttgccatcagaggaggatgaccgtgcttgaggaggaagaatgggttcaagatcatcatattcatcagaaggggacactaaatagaacccttaacctgttgtacttgccaaaattgagaatcagagatgtgtaaaatgcagcaaattaattataatgtaagttaagatttgctttttgccaagttgcaaagttgtatccacatcaggtcactgtaaaaatgtattatcttgtaaaacttatgtaaaaaaaaaaaaaaaaaaaaaaggcaaagatactaaaaattttaagtccgactttatttttcctaca

SEQ ID NO: 42157 - DNA, 781 bp, Homo Sapiens
  misc_feature (679)..(679): n is a, c, g, or t
  misc_feature (755)..(755): n is a, c, g, or t
cctgggttttcctcgaagtgcccttccaccctcctgcccgtatactatggtgccattgggaggactcccaggccaccaggccagtggacagccctacctcagtggcatcagtggacgggcctgtgctaatgggatccacatgaataggggctgcccctcggctgcagtgggctacccgggcatgaagccccagcagcactgcccaggcgagcttcagcagcagagtgacaccagcagcctgctgaggcagacccatcttggcaatggatatgacccccaaagtcaccagatcacgaggggtcccaagtctagcccggacgagggctctttcttatacacactgcccgacgactccactcaccagctgctgcagccccatcacgactgctgccaacgccaggagcagcctgctgctgtgggccagtcaggggtgaggagagcccccgacagtcctgtcctggaagcagtgtgggaccctccatttcactcagggcccccatgctgcttgggccttgtgccagttgaagaggtggacagtcctgactcctgccaagtgagtggaggagactggtgtccccagcaccccgtaggggcctacgtaggacaggaacctggaatgcagctctccccggggccactggtgcgtgtgtcttttgaaacaccacctctcacaatttangcagaagctgatatcccagaaagactatatattgttttttttttaaaaaaaaaaagaagaaaaaagagacagaganaaatggtatttattttctattaagca

SEQ ID NO: 42158 - DNA, 626 bp, Homo Sapiens
aataggctagttttgatttcttgctcattttcagaataactttccaggaagagatggcatttagaacttcagctttggtgctcaggtataaagccaattaaggtacaattgtaccataaagggaacaatctgtttctgattgcacagtttctaatttttaaaactgatgtggtttgcatttcataaaaggcaaagtttacagaaccataaacattctcaattttctttatgctagacatataaattatttttcaaactgtatagatttggggtaaaaagttgtctcagttcctctcccaattgcaatgagaaaaaaaagcttaatttttacattatacttaattttctaaaaccatgtaactccattgaacacatttttcaacttaaggtctgcatagcagacttttaataaccttgggatttatctggtagaacaatatgtgttctacatttttttcataattatatattgtgtatgttaaaactattttccagttgttttgtctgtaaaactgtctttatcaatatgcttaatggttctttgtacaattttgaaagtttctacctgtatataatggatgttaaccagtatcaataaatcacttcgtataaaaaaaaaaaaaaaa

SEQ ID NO: 42159 - DNA, 1049 bp, Homo Sapiens
aggctctgcggaaccaccccagcttgaccaccctgagtcttgcgtccaacggcatctccacagaaggaggaaagagccttgcgagggccctgcagcagaacacgtctctagaaatactgtggctgacccaaaatgaactcaacgatgaagtggcagagagtttggcagaaatgttgaaagtcaaccagacgttaaagcatttatggcttatccagaatcagatcacagctaaggggactgcccagctggcagatgcgttacagagcaacactggcataacagagatttgcctaaatggaaacctgataaaaccagaggaggccaaagtctatgaagatgagaagcggattatctgtttctgagaggatgctttcctgttcatggggtttttgccctggagcctcagcagcaaatgccactctgggcagtcttttgtgtcagtgtcttaaaggggcctgcgcaggcgggactatcaggagtccactgcctccatgatgcaagccagcttcctgtgcagaaggtctggtcggcaaactccctaagtacccgctacaattctgcagaaaaagaatgtgtcttgcgagctgttgtagttacagtaaatacactgtgaagagactttattgcctattataattatttttatctgaagctagaggaataaagctgtgagcaaacagaggaggccagcctcacctcattccacacctgccatagggaccaacgggagcgagttggtcaccgctctttttcattgaagagttgaggatgtggcacaaagttggtgcccagcttctttgaataaaacgtgttttgatggattagtattatacctgaaaaaattttcttccttctccgccactttcccatgtattggatactggccccactttccagctggaacacaccggaaatatttgcaatgtggggatttgactccttccaaggttttggtggaaaagttaatggtcagggaaaggatgccccccgggcctttttaattttaaacccggggagtccccctggtctgctgggcaaaaaataaaaat

SEQ ID NO: 42160 - DNA, 611 bp, Homo Sapiens
cttaaaggctgaaataagggttggcaggacaacattccttcatggaggctctggggaagaatctgcttctaagttcattcaggttgttggcggaattcagttctttgctggctctcagctggaggcccctctctcacctcaaggctgcctgcattccttcttatgtggtcccctccagcttcaaaccagccttcctgctctttctcatgcttcatatctctctcccgtcctcctgttttaggggcatatgattagctcaagcccacagatatattttaaggttgattgtgcgatagaacataattgcaggagtactgtctcatctcatcatattcacgggttctggagattagctcattgaaagggggaggggcattttcaaattctgcctaccacaggcaataactgcccatctcagctgtaggtggaatttttacccagaaaagataggccctagaagcctcatttcttttctccatggaaaaggacagccctctgctgcagcgttcaacttgtgtgtttactgacagagtgaactacagaaatagcttttcttcctaaaggggattgttctacattttgaaagtattttttaataaaattgaattatg

SEQ ID NO: 42161 - DNA, 700 bp, Homo Sapiens
  misc_feature (648)..(649): n is a, c, g, or t
  misc_feature (651)..(651): n is a, c, g, or t
  misc_feature (657)..(658): n is a, c, g, or t
  misc_feature (666)..(667): n is a, c, g, or t
  misc_feature (681)..(681): n is a, c, g, or t
  misc_feature (691)..(692): n is a, c, g, or t
  misc_feature (700)..(700): n is a, c, g, or t
ggctataggtaataactcttagagaaattaatttaatattagaatttctattatgaatcatgtgaaagcatgacattcgttcacaatagcactattttaaataaattataagctttaaggtacgaagtatttaatagatctaatcaaatatgttgattcatggctataataaagcaggagcaattataaaatcttcaatcaattgaacttttacaaaaccacttgagaatttcatgagcactttaaaatctgaactttcaaagcttgctattaaatcatttagaatgtttacatttactaaggtgtgctgggtcatgtaaaatattagacactaatattttcatagaaattaggctggagaaagaaggaagaaatggttttcttaaatacctacaaaaaagttactgtggtatctatgagttatcatcttagctgtgttaaaaatgaatttttactatggcagatatggtatggatcgtaaaattttaagcactaaaaattttttcataacctttcataataaagtttaataataggtttattaactgaatttcattagttttttaaaagtgtttttggtttgtgtatatatacatatacaaatacaacatttacaataaataaaatacttgaaattctaaaaaaaannanaaaaannaaaaaaannaaaaaaaaaaaaanaaaaaaaaannaaaccccn

SEQ ID NO: 42162 - DNA, 1045 bp, Homo Sapiens
  misc_feature (712)..(712): n is a, c, g, or t
  misc_feature (749)..(749): n is a, c, g, or t
  misc_feature (803)..(803): n is a, c, g, or t
  misc_feature (826)..(826): n is a, c, g, or t
  misc_feature (831)..(832): n is a, c, g, or t
  misc_feature (841)..(842): n is a, c, g, or t
  misc_feature (939)..(940): n is a, c, g, or t
  misc_feature (950)..(950): n is a, c, g, or t
  misc_feature (954)..(954): n is a, c, g, or t
  misc_feature (985)..(986): n is a, c, g, or t
  misc_feature (994)..(994): n is a, c, g, or t
  misc_feature (1002)..(1003): n is a, c, g, or t
ccacgcgtccgctcaggttatatgacccctggactaaccccagccaattcccaggcctcaaaagccactcccaagctagactccagcccctcagtttcctctactctggccgccaaagatgacccagatggcaagcaggaggcaaagccccaacaggcagcaggcatgttgtcccctaaaacaggtggaaaagaggctgcttcaggcaccacacctcagaagtcccggaagcccaagaaaggggctgggaacccccaagcctcaaccctggcgctgcaaagcaacatcacccagtgcctcctgggccaaccctggcccctgaatgaggcccaggtgcaggcctcagtggtgaaggtcctgactgagctgctggaacaggaaagaaagaaggtggtggacaccaccaaggagagcagcaggaagggctgggagagccgcaagcggaagctatcgggagaccagccagctgccaggacccccaggagcaagaagaagaagaagctgggggccggggaaggtggggaggcctctgtttccccagaaaagacctccacgacttccaaggggaaagcaaagagagacaaagcaagtggtgatgtcaaggagaagaaagggaaggggtctcttggctcccaaggggccaaggacgagccagaagaggagcttcagaaggggatggggacggttgaaggtggagatcaaagcaacccanagagcaagaaggagaagaagaaatccgacaagagaanaaaagaccaagaaaaaaaagaaaagaagaagaaaagcaaaaaggcctcaaccanagattctgagtcaccgtcccagnaagannagaaggaannagaagaagaccgcagagcagactgtatgacgagcaccagcacaagggcacagggatttcctagcccgagcagtgggcatcccccatgccctctgacnntcacgacttngtgnccccacaatggggttgtggaactaaaactgnntacccttnccctcgcnntccacagaaggaagacgggcccagctttccagggggggtccc

SEQ ID NO: 42163 - DNA, 759 bp, Homo Sapiens
attataatttaaagctacgacagtcacaaagtcacaataacttagaaacattgcgcatattcttctgaaatagcacttaaaaatgattagtgtcagtattttttcacttgggtcaatcaaatctgtaacactgaatccaagctattaaacaaaaagtatgcaatgaatgaattttgtaaatgaatagagagtatcagtttacaataatgttcttaaaacagtatcctctggatagttgagtatgggttagaaatcattgaaatggattggtcagaaattgctatctgtgtaaaatgtctaccagtagccagatgcttccagagttcttaatgcctctctggcatttcagagccagcatcccccaactcccacccctctgccatcacccaacccaaacacatcagctttcaaatgagatgatagtaaatgcggcaatgttaagacaagaaatttatgatttgccagattcaacatttatgacctccccttccaaagactgtctccgttgaccttgtctttttggtatgccttggggtttctgataatgtgtggagtctcattatggctgagagtttagtgttttcacagtgaagtgcagacatttgatttctttatgagttccctgtgttagaaatggctatagaaaaatttgtcataataatttcatttgcatgaaatcctgaggggtgcattaaggaaactaaaagcaccacttaccaaatctatcggcagaactgatgtgaggtaagtgagcatgtc

SEQ ID NO: 42164 - DNA, 542 bp, Homo Sapiens
cgtccgggaaaaatacaggatgttgtcccatcaagggagggagggggtgggagaatccaaatagtatttttgtggggaaatatctaatataccttcagtcaactttaccaagaagtcctggatttccaagatccgcgtctgaaagtgcagtacatcgtttgtacctgaaactgccgccacatgcactcctccaccgctgagagttgaatagcttttcttctgcaatgggagttgggagtgatgcgtttgattctgcccacagggcctgtgccaaggcaatcagatctttatgagagcagtattttctgtgttttctttttaatttacagcctttcttattttgatatttttttaatgttgtggatgaatgccagctttcagacagagcccacttagcttgtccacatggatctcaatgccaatcctccattcttcctctccagatatttttgggagtgacaaacattctctcatcctacttagcctacctagatttctcatgacgagttaatgcatgtccgtggttgggtgcacctgtagtt

SEQ ID NO: 42165 - DNA, 849 bp, Homo Sapiens
gctctcccccagcagagccacacagccttcgtgacaactgctttccgttcccacattcacctcatcctgctctttagaaaaagcagtctttgtgcttgtggctgaacgcatcaccctggactctgctagtgtcttctgaggacactgatgacactgattaatgatacagacctttgcaggacctgatgagtgacccttctggagctggccaggtcctctgcagcaggcaagaccaatcaatcactgaacctgcctcatggcaccagagtgaacagggcaggcaggtagtaggcccagctggggaaatgggagagttcctgtccccctccacatatccctacatgaaatatgggaaagttgctgctattgattcagggtctgtcttggaggcagaggacccttggtggatagttggtcagtgcctggaaaacctgtcccagtttatcaggaacgcaggcctggggagcccccagtggcggggacagggccagatttcatgttgaccctggggatgctgtgaatttctcctgcaggagagacatcattgaattttttcaactgtatcagtagcacagtattttggtatgaaaagtgggagacttctgaacagtaattcatttaatggcaaagcatgtgaaataaaagaaaatcaaacttaaaaaaaagcacaagaaaacccgaaggacactcataagtcaggagtgccgagacaccagagcgtacacgcacatgggcccagggctaatcagcagtgtcctacccaagcttacatgtgatcacagtgggaaatccagccgggaccccaaatagagaagcccaacacaagccgaaagccaggtaaccggatag

SEQ ID NO: 42166 - DNA, 861 bp, Homo Sapiens
  misc_feature (673)..(675): n is a, c, g, or t
gggaatcagcgggggtgcaaatgaaattctggatttacagaggttacagtcttcttcataccttgatgattcgagtccaacaggtttaatgaaagatactcatactgtaaactgcaggagtatgtcaaataaggagttgtttccaccaagtccttctgaaatgggggagctagaggctaccaggcaaaaccagagtactgttgctgtccacagccatgagccactcctcagtgatggtgcacagttggatttcgatgccctatgtgacaatgatgacacagccatggctgcatttatgaattacttagaagcagaggggggcctgggagaccctggggacttcagtgacatccagtggaccctctagcctttgatttttaactccaaaaatgagaaacattttaaagcatttcatttacgaaaaactgtctcaactattcttaagtactgtattgatattgtttgtatcttttattaatgttctaccactttttatagatttgcatcttcctgtcacagggatgtggggaaatacgttttcctcccaagagaaccaagtttattatagactcctttattcagtgaaatggcttataatccactagttgccatatttttgctaaaatatttctacccaggaatactaccttaaacgaacccagggacggtgggnnngacatggggggcgcccttcgcccccagaaaagctttttaagaccctttccttttgggccgcgggcccccgaaggtaaggggacttgggccatactgtttctccaggaaatcctgggaactgaaaaaaggcttggactccccccacataaaaaacgcccgggggggaacccgaggcgttgtaacaaa

SEQ ID NO: 42167 - DNA, 581 bp, Homo Sapiens
caaaaggaagcacccgttgagtccttttgagggtgatttgtcttacaactgactgacttagcaggaatttaattaggtcatatttggtgatgagacttatggagtgtgcctctctctcccaactgctgcttaaaatgcaaggacaagcaattagaagccatcctaaggtgcttacctcacacgccacccatgaggcttgtggccacagtggcacttgggtgtggctcctctgttatttgtcctcatgtgagaaagcagatcatctccaaatcttgccatttgtatacttttggtggagacttggatgtcatatcttctttgttttgggttttcttccctagcttattttgtggcttttaaagaagtggattgtattgtgagatcctgtgattcctggtggccagtatcctggattcctctaagatcttgcctctttcctcctcatgaaagcagcacacattgtgttaacttatgtctcttgttaaatgagcttaatgtctttgtgttttgtccaaaactgtattgaaaaaatattgtttaatgcaaatgaaggaatgcaataaagagtaaatatacttgaa

SEQ ID NO: 42168 - DNA, 485 bp, Homo Sapiens
  misc_feature (468)..(468): n is a, c, g, or t
tttcctcaggagagctcaacaaacactttcggtcccatacaggagaaagaccatttatctgcgaattatgtggaaattcttacacagatattaaaaatttaaagaagcacaaaacaaaagtccattctggtgcagataaaactctagactccagtgcagaggatcatactttgagtgaacaggattccatacaaaaaagtcctttatcagaaactatggatgtgaagccttctgatatgactttaccattagctcttccacttgggactgaggaccatcacatgcttctgcctgtcacggatactcagtctcctacatcagatacattgttgaggtcaactgtgaatgggtattcagaaccacagttgatttttttacaacaattatactgactttgtaaggaatatggaattgctaagatatcattggtagcaaacatctctggtaaggtgcatatattcatattanattcccattcatttgag

SEQ ID NO: 42169 - DNA, 814 bp, Homo Sapiens
  misc_feature (24)..(24): n is a, c, g, or t
attttaggtttttactatatgtgncattagtaacctattgcgaaaccatctgacaaacagaaggagaagcatttgtgaacagtttctgaacagaacactttggaaatatttatgcttttctttgtgtggcatgactgacatacatactcaaatataggctgtctctagtaaatcttaaaatcttgaagctaaaatttatccttttatgaggtgtggaagtcagtgacttggtgacgttcttcctagcagtgttaatacatgcaagaagtaagagcatttgtggcttgaacttgccagatgcaaataccacagactccaagaaaacccgagttggggtttgttttgttttgatttttttttttttaaagcgggtaaaagagaaaacactgaaaattgaattcttatcttccagaggctacaattattataatggacaatacttttacctttgtctctaaagatcagattagttttatttgttcacttacgtgctttgattatcccctctgaattatagaccgagtcttgttgtttagcctaagagaagatttatgtagtaatttcttctcaggtatggaaccacggtcataactaacatgttggccagaatagaaccactggttaaacatattttattcaccattaagtgatctttatcaatattctggattagacaacaaattacctttctgggtgtttcttgtaaactatactcctgtttgaatgttaaactttgttgctaaagttaaaatttaagatgtttgaatgttcagtttatgtatttgaactaccaataaccaaccttttttatata

SEQ ID NO: 42170 - DNA, 1037 bp, Homo Sapiens
attctcccagggcttaggcgcccataaatgttctttctgtggtggagtagggcctcctgcttccatactgtcgcatgggctagatctcaggtgtggtgttgagccaccttaagatgagggctgcttcgcagtaaagtttccagcctgggcccctcttgggccttctggctggggaccctcagcctcctgatgctgttgcagggcaggtctgagagggtgcccagcagcacccggtgtcagggccaccttgttttccatttttgaacagcgctccctgtggtttgtgcccactgctcaatacagcctccgatcctcactcttgawagctccatgataagcacagagatgggcagtgtgggtcagaaggtgggccgcttcctgtggaagagggaagtgtaggtgaatagatatcaaaacccctgatgtcattcttttgaggggttggattttcttttttctggcagacatttcagtacattcacatttctctcacatttgctgaatgtgagatcagaataaaggagatcggcgtttatttcgtaccttctgttagttggcatgagccagatcattcaactgtccttacaacaggcattcttatccccattttgcagatgacgaaagtagacccagctccagtwaccttcccttagattacacggggctgagatctgagactgttcacttgactccactgtccttttctttcctcgctgcttaagatggcttctcccaatgttatcatcttcttttttatagataaggaaactgagcctcagagagtctgacttctcacaaaccgtggtctaaataggcttgattttctaaggtggccagtgatcatgtyatagagtataagagccaaagagtcgtctgtgttcctccatttaactgatgttgaagcggagcccaaggtggtaaatgttatkttgagggtamaaatccarascactggacctggccaatatkggtttyagtgcccctgccmctaawaaaawytkaaatytttyattttcatttyywattcctgggggggc

SEQ ID NO: 42171 - DNA, 334 bp, Homo Sapiens
ggaattccacccgtgcccggccaccagaatcctttggtatagccaagccttttggttaccgcctcatgaagaatatgcttcccgcattgtcctagtcccagttgtattctcacaggtgttatgtgcaggacacaatccaaatcataaacctggctcatgcccaacacatttctgctaatagggagagggacccaccacacacccacacatgccagaggtccctcctcacagaggagagggcctgtgtctgtagaaggttaaagctgacaacatgtgaaacatcccagaattatgactcttcccaagtttaaaatacattctcctcatgagagct

SEQ ID NO: 42172 - DNA, 652 bp, Homo Sapiens
ccggcggggaggaggaacgggcagccacaggactgagccctctcactccagccaaagaaatgggcctgcctgcctccacccgtcctccctcagcctccccttcttcccgccccacctcccatttctgttgctggaggggctgtcctccttcctgggaccccctcgccagcttggctcgatgtttgccatgagtattagcttacccaatgggaccgtgccccacctccccacacacaggccttctgtggggctgggcaccgtgtcctcctctgaggaagcagttggggccctcttgccagcctccttgctgaccccaggtcagccctgtgtctgtcacaggctgggtcaaaagagccctggctctgcccctcagggggccagctggggagatgggggcttcttcctcacactgctgtcctctcccccttcagctcctgagtagctgggcctgtgcactgggcaggttcctggggccgcctgccctgccttgccgctccccttggacctccaggggctcctgggttggagggaaccaccagcgttcccttctcccccttgtcttcccccctctcctcccagctgctttacttaaagttgattttgaactttttatttgaggagacgaagtgaaaacaaatctataaatatatat

SEQ ID NO: 42173 - DNA, 721 bp, Homo Sapiens
ggaagattttatgcacagcctagttatcaaggggatgatttgccgacatgtttgagaaccccctaacctctaaccctcattgctgtcttgccccagttggggtgccaagatggaagtcacctttctgggctttctcctggagatagctggggcttatgggtggctttcaaggctggggcatggcaaatcaggggccagagagcaggggagcttgggactcaggtctgtaactgcccagccccttttctctgctcttgtttcactccaccatcactcactcactccccactcccccacccatggggaggagacctttgatgaattcttcctctccttcccacaaaagacagacccagtgagtgaatcaggcaaagtgcttataatgtgtgttgtgtgagcgtggccttgggaggacatgcgtgtgtcagggatgagttgaggtgatatttttatgtgcagcgacccttggtgtttcccttcctcggtggctctggggtatgtgtgtgtgggtgtgtgcgcctgagtgagtgtgtgtgcttgaatgtgagtgtgtatgtcagtggtttctacttcccctgggatgctgacccaggaatagtggacatggtcacagtcctatgtacagagctttctttgtattacaaaaaaatactctttcaataaatgtatcattttgtgcacagaaaaaaaaaaaaaaaaaaaaggggcggggaaaaaaata

SEQ ID NO: 42174 - DNA, 993 bp, Homo Sapiens
  misc_feature (666)..(666): n is a, c, g, or t
  misc_feature (751)..(751): n is a, c, g, or t
aggaagaggcccaaccaggctctgctggagaacatcgccctgtacctcacccatatgctgaagatctttggggccgtagaagaggacagctccctgggattcccggtcggagggcctggaaccagcctcagtctcgaggccacagtcatgccctaccttcaggtgttatcagaattccgagaaggagtgcggaagattgcccgagagcaaaaagtccctgagattctgcagctcagcgatgccctgcgggacaacatcctgcctgagcttggggtgcggtttgaagaccacgaaggactgcccacagtggtgaaactggtagacagaaacaccttattaaaagagagagaagaaaagagacgggttgaagaggagaagaggaagaagaaagaggaggcggcccggaggaaacaggaacaagaagcagcaaagctggccaagatgaagattccccccagtgagatgttcttgtcagaaaccgacaaatactccaagtttgatgaaaatggtctgcccacacatgacatggagggcaaagagctcagcaaagggcaagccaagaagctgaagaagctcttcgaggctcaggagaagctctacaaggaatatctgcagatggcccagaatggaagcttccagtgagggggcacaggactgactttttanaccattgtggactagtggctgctgtctgcctcagtgacaatgtcccagcgctcctatcatgtttacagtcacccttgggtcctanaattaagagttgtgttcctgtaggtgtcgtggtcgtccgttggcctctgaagacatttggtaattaaattttttctccaccggggaagaaaaaaaaaaaaagaagactccgaggcattctattgtccgggcggcggggaccaaaaaggccaatggaaatgggcacccgggggcctatagctcggtttccccgggacgccccctttttctttggcaccacggggcgttagcaatgctgcccgc

SEQ ID NO: 42175 - DNA, 581 bp, Homo Sapiens
  misc_feature (563)..(577): n is a, c, g, or t
  misc_feature (579)..(580): n is a, c, g, or t
cttttgatatcttccacagagggaagtttaaaacccaaacttccaaaggtttaaactacctcaaaacactttcccatgagtgtgatccacattgttaggtgctgacctagacagagatgaactgaggtccttgttttgttttgttcataatacaaaggtgctaattaatagtatttcagatacttgaagaatgttgatggtgctagaagaatttgagaagaaatactcctgtattgagttgtatcgtgtggtgtattttttaaaaaatttgatttagcattcatattttccatcttattcccaattaaaagtatgcagattatttgcccaaagttgtcctcttcttcagattcagcatttgttctttgccagtctcattttcatcttcttccatggttccacagaagctttgtttcttgggcaagcagaaaaattaaattgtacctattttgtatatgtgagatgtttaaataaattgtgaaaaaaaaaaaaaaaaggccacatgtcctcaacctgcaggtcgcggccgttaaactgtctaacccccccccccccccccaccnnnnnnnnnnnnnnncnnc

SEQ ID NO: 42176 - DNA, 760 bp, Homo Sapiens
  misc_feature (711)..(711): n is a, c, g, or t
  misc_feature (732)..(759): n is a, c, g, or t
ggacgcgtgggcggacgcgtgggttttgatataataggaaaaatggctaatacattttgattcttagatactattccatttttatcttgctgttcagtattttaactcactgtgtttttaaaagagcaaaaaagggaggatcgtgaaaacctgggaatcacatataagttcatcctgaatcctgatactcccctccccttccctgaggtggaccacatttgaagtcagcagagaaaaagtgtgatattcagaagaaatgcgtgattttggagtcgctttggaggaaatattttctttctctatgcctaaagaaactgaagccagactgaagttttgcaccctaaaaaaggaacagcattgtttgagttacttgagcaaatgttggtggtccacgttaagacatatttttaaaacttccaaaagtgtcgattattaaaattgtagtattttacatttcattttggggggaaatccaagtatggtgtttgtattgaagtcagacagtcatacttgtgcttttacatgaagtttaaatgatacatattgtaaatattcaataactacagtgtttaaaaagcatgcttcaacatagaagtagcagcaatgtaattatttgaagtaacacttaacacactccgctgcattgaatgcagtggattgatcagaatgttaagactgacatttccaaggttggctactatgtaaaattanaattacacaaattgtgcagannnnnnnnnnnnnnnnnnnnnnnnnnnng

SEQ ID NO: 42177 - DNA, 664 bp, Homo Sapiens
ttctcaccatttggacaaattatggaaataagagttttcccagaaaagggctattcatttgtcagattttcaacccatgaaagtgcagcccatgccattgtttcggtgaacggtactacgattgaaggacatgtggttaaatgctattggggtaaagaatctcctgatatgactaaaaacttccaacaggttgactatagtcaatggggccaatggagccaagtgtatggaaacccacaacagtatggacagtatatggcaaatgggtggcaagtaccgccttatggagtatacgggcaaccatggaatcaacaaggatttggagtagatcaatcaccttctgctgcttggatgggtggatttggtgctcagcctccccaaggacaagctcctccccctgtaatacctcctcctaaccaagccggatatggtatggcaagttaccaaacacagtgagccgggactctaaaaaaaaattgtaattcatgataggcttcgatttcctgtgacactctgaagacatgaaagtagacatcggaaaatgaaaatatttattttaaaaattgaaatgtttggaacctttagcacagatttgctttggtgaaggacacgtgtcttctagttctgcctttttaagtttttgttcatgatggatatgaacatg

SEQ ID NO: 42178 - DNA, 643 bp, Homo Sapiens
atgaacgtgaagccagagaaaatgtgaagagagagcaagatgaggcctatcgcctttcacttgaggctgacagagcaaagagggaagctcacgagagagagatggcagaacagtttcgtttggagcagattcgcaaagaacaagaagaggaacgtgaggccatccggctgtccttagagcaagccctgcctcctgagccaaaggaagaaaatgctgagcctgtgagcaaactgcggatccggacccccagtggcgagttcttggagcggcgtttcctggccagcaacaagctccagattgtctttgattttgtagcttccaaaggatttccatgggatgagtacaagttactgagcacctttcctaggagagacgtaactcaactggacccaaataaatcattattggaggtaaagttgttccctcaagaaacccttttccttgaagcaaaagagtaaacacggcccagcggtggaaccagccattccttgacaagccagcagcctgcgtcaggagaagggctcctcgccaacccacccacacgctcgtctcactcaattcaatgtcacacttctgcctcttgcaaaattgctggaaaaagtaataataaatatagctacttaaaaaaaaaaaaaaaagggcg

SEQ ID NO: 42179 - DNA, 797 bp, Homo Sapiens
  misc_feature (756)..(756): n is a, c, g, or t
aacgagctgaacatcatccataagttcatccagggataagtactcaaagagattccctgaactggagtccttggtccccaatgcactggattacatccgcacggtcaaggagctgggcaacagcctggacaagtgcaagaacaatgagaacctgcagcagatcctcaccaatgccaccatcatggtcgtcagcgtcaccgcctccaccacccaggggcagcagctgtcggaggaggagctggagcggctggaggaggcctgcgacatggcgctggagctgaacgcctccaagcaccgcatctacgagtatgtggagtcccggatgtccttcatcgcacccaacctgtccatcattatcggggcatccacggccgccaagatcatgggtgtggccggcggcctgaccaacctctccaagatgcccgcctgcaacatcatgctgctcggggcccagcgcaagacgctgtcgggcttctcgtctacctcagtgctgccccacaccggctacatctaccacagtgacatcgtgcagtccctgccaccggatctgcggcggaaagcggcccggctggtggccgccaagtgcacactggcagcccgtgtggacagtttccacgagagcacagaagggaaggtgggctacgaactgaaggatgagatcgagcgcaattcgacaagtggcaggagccgccgcctgtgaagcaggtgaagccgctgcctgcgcccctggatggacagcggaagaagcgaggcggncgcaggtaccgcaagatgaaggagcggctggggctgacgga

SEQ ID NO: 42180 - DNA, 649 bp, Homo Sapiens
  misc_feature (575)..(575): n is a, c, g, or t
  misc_feature (615)..(615): n is a, c, g, or t
  misc_feature (648)..(648): n is a, c, g, or t
gatgaaccagtatggatttgcttttctaagcctcctgttggttactaatctcacttggcacattataactaaaggaatcccctcaattcaaaagcatagatggatacaaatgtcagaccgtgggtttaatttgtttagaacacatggcatttcttcacaaggtaacctgctgtatttatttattttcttttggttaaatataatttccaaactttgtggtcaggcagcgtctaaggttacgttaccacagactgacagttggtatatgtaccagccaatcccttcattaaatgtatacagatttagttaagtagcattaaataggattcttagaagtatgtcctcatagaacttttaatacttaaggctttgtaaaaactatccatgaagggaaagctcctcagcataactgctcagggaaatagggctaaataactgaacattaaataattggttaaaggtgctgttagtcgagcctcaatgcttgctacaaggatgtatgtacaaggactgactttaataatttgcattatattgtcccaaccagtagtttattttttgccacggagatgtanaagatattacaagctactggatgcactggtcagattaacntatttcattaaagaagttgggagaacaaaatang

SEQ ID NO: 42181 - DNA, 671 bp, Homo Sapiens
acgcctaccaggaggacctgggattcagcctgggccacctgggcaagtcgggcagtgggcgtgtgcggcagacacaggtaaacgaggccaccaaggccaggatctccaagacgctgcagcggaccctgcagaagcagagcgtcgtatatggcgggaagtccaccatccgcgaccgctcctcgggcacggcctccagcgtggccttcaccccactccagggcctggagattgtgaacccacaggcggcagagaagaaggtggctgaggccaaccagaagtatttctccagcatggctgagttcctcaaggtcaagggcgagaagagtggccttatgtccacctgaatgactgcgtgtgtccaaggtggcttcccactgaagggacacagaggtccagtccttctgaagggctaggatcgggttctggcagggagaacctgccctgccactggccccattgctgggactgcccagggaggaggccttggaagagtccggcctggcctcccccaggaccgagatcaccgcccagtatgggctagagcaggtcttcatcatgccttgtcttttttaactgagaaaggagatttttgacaagagtacaattaacaggacatcgtcaaaaacaaaaaagccccccacaacacaacccgacaagcacacaacacacag

SEQ ID NO: 42182 - DNA, 552 bp, Homo Sapiens
ggcaagcgccctgtgagtgggccattcggaacattggacagaagcccaaagagccaaattgtcacaattgtggaacccacattggcctgagatccaaaacgcttcgaggcaccccaaattacctgcccattcgtcaggacacccacccacccagtgttatattctgcctcgccggagtgggtgttcccgggggcacttgccgaccagccccttgcgtccccaggtttgcagctctcccctgggccactaaccatcctggcccgggctgcctgtctgacctccgtgcctagtcgtggctctccatcttgtctcctccccgtgtccccaatgtcttcagtggggggccccctcttgggtcccctcctctgccatcacctgaagacccccacgccaaacactgaatgtcacctgtgcctgccgcctcggtccaccttgcggcccgtgtttgactcaactcagctcctttaacgctaatatttccggcaaaatcccatgcttgggttttgtctttaaccttgtaacgcttgcaatcccaataaagcattaaaagtc

SEQ ID NO: 42183 - DNA, 633 bp, Homo Sapiens
ttctacttcagcaggcccgcaagccgtgtgagccgtcgcagccgtggcatcgttgaggagtgctgtttccgcagctgtgacctggccctcctggagacgtactgtgctacccccgccaagtccgagagggacgtgtcgacccctccgaccgtgcttccggacaacttccccagataccccgtgggcaagttcttccaatatgacacctggaagcagtccacccagcgcctgcgcaggggcctgcctgccctcctgcgtgcccgccggggtcacgtgctcgccaaggagctcgaggcgttcagggaggccaaacgtcaccgtcccctgattgctctacccacccaagaccccgcccacgggggcgcccccccagagatggccagcaatcggaagtgagcaaaactgccgcaagtctgcagcccggcgccaccatcctgcagcctcctcctgaccacggacgtttccatcaggttccatcccgaaaatctctcggttccacgtccccctggggcttctcctgacccagtccccgtgccccgcctccccgaaacaggctactctcctcggccccctccatcgggctgaggaagcacagcagcatcttcaaacatgtacaaaatcgattggctttaa

SEQ ID NO: 42184 - DNA, 841 bp, Homo Sapiens
agggcagaaatttagcatctggagaggttggattttttccaagtgatgcagtcaagccttgcccatgtgtgcccaaaccagtagattattcttgcyaaccctggtatgctggagcaatggaaagattgcwagcagagaccgaacttattaatagggtaaatagtacttaccttgtgaggcacaggaccaaagagtcaggagaatatgcwattwgcattaagtataatwwttwwgcaaagcacatcaagattttaacaagagatggcttttttcacattgcagaaaatagaaaatttaaaagtttaatggaacttgtggagtactacaagcatcattctctcaaggaagggttcagaaccttagatacaactctgcagtttccatacaaggagccagaacattcagctggacagaggggtaatagagcaggcaacagcttgttaagtccaaaagtgctgggcattgccatcgctcggtatgacttctgtgcaagagatatgagagagttgtccttgttgaaaggagatgtggtgaagatttacacaaagatgagtgcaaatggctggtggagaggagaagtaaatggcagggtgggctggtttccatccacatatgtggaagaggatgaataaattcaaatcccgtgttgcaccctgcacaaaaaatttcagagaagggatawatagaagcytgcacagcatcgtgaattaactgaagtgtttaaaaactgcatgtctggctgttcaacatcctccyycttwasccctcctaagtcttawgctgagatttttaagatgctggtmtgaaaattatgggttgctaragtgtgmararaasctgc

SEQ ID NO: 42185 - DNA, 603 bp, Homo Sapiens
ctgaagaaaaaaatgcctggtgtcatacctagtgaaagtaatggactttcaagaggtagcccttcaaagtttaacagactttccttaaagttttttcagaaaaaggaaactaagagagctttggatttcacagattctcaagaaaatgaagaaaaagcttctgaatatagagcatctgaaattgatcaagttgttcctgcagcacagtcttcacctataaactgtgagaagagagaaaacttgttaccatttgtgggactgaataatctcggcaatacttgctatcttaatagtatacttcaggtattatatttttgtcccggttttaaatctggagtaaagcacttatttaatattatttcaaggaagaaagaagctctaaaggatgaagccaatcaaaaagacaagggaaattgcaaagaagattctttggcaagttatgaattgatatgcagtttacagtccttaatcatttcggttgaacagctccaggctagttttctcttaaatccagagaaatatactgatgaacttgccactcagccaaggcgactgcttaacacactgagggaactcaaccctatgtatgaaggatatctacag

SEQ ID NO: 42186 - DNA, 591 bp, Homo Sapiens
gcacgagtcgatgcccagcagacacagctccgaattgattccttctttagattagcacaacaggagaaagaagatgctaaacgtattaagagccagagactaaacagagctgtgacatgtatgctaaggaaagagaaagaagcagcagccagcgaaatagaagcagtttctgttgccatggagaaagaatttgagctacttgataaggcaaaacgaaaaacccagaagagaggcataacaaataccttagaagagtcatcaagcctgaaaagaaagaggctttcagattctaaacgaaagaatacatgcggtggatttttgggggagacctgcctctcagaatcatctgatggatcttcaagtgaacatgctgaaagttcatctttaatgaatgtacaaaggagaacagctgcgaaagagccaaaaaccagtgcttcagattcgcagaactcagtgaaggaagctcccgtgaagaatggaggtgcgaccaccagcagctctagtgatagtgatgacgatggagggaaagagaagatggtcctcgtgaccgccagatctgtgtttgggaagaaaagaaggaaactaagacgt

SEQ ID NO: 42187 - DNA, 751 bp, Homo Sapiens
atatccccacaggaaaatggcctagaggaggttaagcctctaggtgaaatgcaaacagatttgaaagcaaccggaagggagatttccccaagggagaagacaccagaggtgattgatgccactgaggaaatagacaaagatctggaagaaactggaagaagagaaatatccccagaggaaaatggcccagaggaggtcaagcctgtagatgaaatggagacagacttgaaaacaactggaagagagggttcctcaagggagaagacacgagaggtgattgatgctgctgaggtaatagagacagatttggaagaaactgaaagagaaatatcgccacaggaaaatggcccagaggaggtcaagcctgtaggtaaaatggagacagatttgaaagaaattagagaagaaatttcccaaagggaaaaggtgctagcagagttcagtgctataagggaaaaggagattgatttgaaagaaactggaaaaagagacattcccatgatggagaaagtatcaggaaagatggctgttgttgaagaaatggaggcagatttgaaagaaactggaaaagaaaattttagagagagaggatctgaagagatctgtattactgaggaaaaggtggcagaattgaaacaaactggaaaaacagacatttctccaagggaaaacgagctagaggagaccagtacctcaagacaaactgacacacattttaatgcagagcggtagcaatgacttcagtgctatg

SEQ ID NO: 42188 - DNA, 596 bp, Homo Sapiens
gaaaggaaaaaaagaaaccgaagccagtattttaataattgctttttctgtgtattttgtattgggctgggggatagcatcaaaggttgaactttttgagctttctatgaaaaaccccaggaccttctttctttggccatttctatggaaatgcgatgtcagatggatggtaatggtgccctccagtggctgtgagacctcattgcgcattgtctactggagctttagtcttctgagacggaggaaaactgctgaatactctggattcatctatgtctacaatgttgcatttatgaaaaactacactgtgctaggcgcattctaggacatgaatatgaccacaccctctttcaccgggtgtttctgtagcaagttttcatattcttttcaaacaatggtttctctgcgttaattattgaggaaaaaaaaagatggggtaagaaaactacccatgcatgatgtagagagctgttgatttgtttctgttttttaaaggaaaactatttgtaagatgttgcactaaaacattttatatacacttcagagacctgtagtacactatgttacaacacacacacccaacaaacacaaaaaca

SEQ ID NO: 42189 - DNA, 804 bp, Homo Sapiens
  misc_feature (690)..(718): n is a, c, g, or t
ggtaagggaccagggagatgccactaccccttgattttccatctaaaaatatacatgtttatgtaaacaaatctttccatatccatagtgacttttcaagtatttaagcctaaagattttgatctcacatttttatacctgtttaaattgctcacagttattacatacacatcagccatcaactaaagttgtactttaaaaatttactacaatatgtacatttctaagtcaaacacttgtgacttttgctttaattccatgaatgttcctgcctccttgatatttgtatttattctttttttctctagagtagaggtataattgtgtgatatttcagaaatacagataaatgattcaaaaagtcacagttaaggagaatcatgtttctttgatcatgaataactgattagtaagtcttgcctatattttcctgatagcatatgacaaatgtttctaaggtaacaagatgagaacagataaagattgtgtggtgttttggatttggagagaaatattttaatttttaaatgcagttacaaattataatgtattcatatttgtactttctgttaaaatgcatgattgcagaattgtttagattttgtgtttattcttgatgaaaagctttgtttgttcttgtttttaagtttgcactcaaatcttaagaaataaatccacccatggtatctnnnnnnnnnnnnnnnnnnnnnnnnnnnnncatgtcggccgccctcgggccctcgaggaagctttctaaaacaattcgtttgggcgcgcgggccccataaggttaagtggaacttg

SEQ ID NO: 42190 - DNA, 807 bp, Homo Sapiens
gaaaccttccccaagaatgtttctttatagacgggcgattgaaatctttgtgttcttgaatcaagtgtaatataatttttttcttcttttttaaaatattcccactcagcactcagagacacaaaaatactgtaagtctcaattaacagcagaatctcagagaaaagctgtggggggcaaatccagcctttggaggaatagagatggtcaattaacaatcaaaaagaggagattaacctcttgtttttttaccacctggtgaatcagccataacgcacacacacgccacccagcctcttgtttctagtatgtactttgaaatgctaactgagggtcttgatgcttgagcctttgactgataaaactcaaatagcagtccccagtgatttgcctcttaggttctttcttaaattgttggtggatgactgtacattttagtgatttgaaaaataactgacaaaccattgaaacagtttattttatgctggaagagatggcgcagatgtgtgtcagaagggagatcacggtgtgagtttcgtagctatttaacgtgatacatacctctagttttgtatgtcttttgagatcctgagttcatcccctgtgaatcagagtgcacaagcacctctcctgtgagtgggctaatgagaagagggacagaccgacaccagcacagtagggcagatctggacagcagaatgttataaccgcaagttcatgtgttgctcccaactccattctcttttctctcgtgcaaccaagtttgccattctcttcctattacttgctccagggatagggtcaaac

SEQ ID NO: 42191 - DNA, 627 bp, Homo Sapiens
  misc_feature (605)..(605): n is a, c, g, or t
  misc_feature (607)..(608): n is a, c, g, or t
  misc_feature (611)..(613): n is a, c, g, or t
atctcgcctcggccgaggccccccgggcgccccgtcagcggtcacgggatggatagccggcctgccatggccatctttgaactcctggactatattgtgaacgagccacctcctaagctgcccaacggtgtgttcacccccgacttccaggagtttgtcaataaatgcctcatcaagaacccagcggagcgggcggacctgaagatgctcacaaaccacaccttcatcaagcggtccgaggtggaagaagtggattttgccggctggttgtgtaaaaccctgcggctgaaccagcccggcacacccacgcgcaccgccgtgtgacagtggccgggctccctgcgtcccgctggtgacctgcccaccgtccctgtccatgccccgcccttccagctgaggacaggctggcgcctccacccaccctcctgcctcacccctgcggagagcaccgtggcggggcgacagcgcatgcaggaacgggggtctcctctcctgcccgtcctggccggggtgcctctggggacgggcgacgctgctgtgtgtggtctcagaggctctgcttccttaggttacaaaacaaaacagggagagaaaaagcaaaaaanannaannnaaaaaaaaaaaaag

SEQ ID NO: 42192 - DNA, 533 bp, Homo Sapiens
gggaattcggcccggccgacatgttttttttttttttttttttttttttgagctgcggggcatgatggggattgctgcatatcagcagttggatgttcttgcctctgacagtagcttatttgctctgggggccaggaattggattcagtttacactatcattaaaaaagagggagagagataataaactatattttggtggggatggtgattaaacacctcttttgggtatgccttttaaaaatgcttatagagaaaaaaaattttaaaaagaaagctaatgctagtatatactgcaatgttaggggaatgaacatgttttcctactgcattggggacttctagataggttaatgaaaggccttttattctgttactggacatgaaaactttgtctaatttcttactctattgtacgtttacagtcgcagcactaaaaatggatgacatcaaacatttttaacaaaatgatgtacaaactaaggactatttattgataatgttttgctactcttgtcagacaatggctataaa

SEQ ID NO: 42193 - DNA, 768 bp, Homo Sapiens
ggccaccgggctgcacgtccaccggaacagcgcccacagcgcagggtgggcgccatctttgacaggtgctgacggagcttgtgtccaagatgcgggacatgcagatggacaagacggagctgggctgcctgcgcgccatcgtcctctttaaccctgactccaaggggctctcgaacccggccgaggtggaggcgctgagggagaaggtctatgcgtccttggaggcctactgcaagcacaagtacccagagcagccgggaaggttcgctaagctcttgctccgcctgccggctctgcgctccatcgggctcaaatgcctggaacatctcttcttcttcaagctcatcggggacacacccattgacaccttccttatggagatgctggaggcgccgcaccaaatgacttaggcctgcgggcccatcctttgtgcccacccgttctggccaccctgcctggacgccagctgttcttctcagcctgagccctgtccctgcccttctctgcctggcctgtttggactttggggcacaggctgtcactgctctgcctaagagatgtgttgtcaccctccttatttctgttactacttgtctgtggcccaggcagtggctttcctgaggcagcagccttcgtggcaagaactagcgtgagcccagccaggcgcctccccaccggggctctcaggacagcctgccacaccccaaggggcttgggcgactacagggtcttcgggccccaagcctggagctgcaggagttggggaat

SEQ ID NO: 42194 - DNA, 753 bp, Homo Sapiens
  misc_feature (4)..(4): n is a, c, g, or t
  misc_feature (22)..(22): n is a, c, g, or t
  misc_feature (57)..(57): n is a, c, g, or t
  misc_feature (67)..(67): n is a, c, g, or t
  misc_feature (74)..(74): n is a, c, g, or t
  misc_feature (109)..(109): n is a, c, g, or t
  misc_feature (188)..(188): n is a, c, g, or t
  misc_feature (217)..(217): n is a, c, g, or t
  misc_feature (224)..(224): n is a, c, g, or t
  misc_feature (234)..(234): n is a, c, g, or t
  misc_feature (306)..(306): n is a, c, g, or t
  misc_feature (337)..(337): n is a, c, g, or t
  misc_feature (380)..(380): n is a, c, g, or t
  misc_feature (529)..(529): n is a, c, g, or t
  misc_feature (559)..(559): n is a, c, g, or t
  misc_feature (608)..(608): n is a, c, g, or t
  misc_feature (723)..(723): n is a, c, g, or t
  misc_feature (733)..(733): n is a, c, g, or t
attnggccctgcgcggccaganttcggcacgaggtctgatcgaacagcctcacttgngttgctgtcntgccagnagggcaggcaggaatgcagcagagaggactcgccntcgtggccttggctgtctgtgcggccctacatgcctcagaagccatacttcccattgcctccagctgttgcacggaggnttcacatcatatttccagaaggctcctgnaaagagngaatatgtgncgcatccagagagctgatggggattgtgacttggctgctgtcatccttcatgtcaagcgcagaagaatctgngtcagcccgcacaaccatactgttaagcagnggatgaaagtgcaagctgccaagaaaaatggtaaaggaaatgnttgccacaggaagaaacaccatggcaagaggaacagtaacagggcacatcaggggaaacacgaaacatacggccataaaactccttattagagagtctacagataaatctacagagacaattcctcaagtggacttggccatgattggntgtcctgcatactgatgaaactactgatgncagctggtctgaaggaccctaccagaagctaaatcatcaaagaatgcantttccatatcctaatgattcaatctcccttaccctgaccaatcagtggcccaaattttccagccccttgcctcccagaaccccagcccagaactcttcagagatttaagaatctnctcctacctnctgactcagcaccatgtaat

SEQ ID NO: 42195 - DNA, 934 bp, Homo Sapiens
  misc_feature (703)..(703): n is a, c, g, or t
aagaggcaggctcctggcaaaaggtcagagtctggatcaccttctgctggaggccacagcaaacctcctcacagcccactggtcctcaagaggtgccacgtctccacacatcagcacaactacgcagcgcctccctccactcggaaggactatcctgctgccaagagggtcaagttggacagtgtcagagtcctgagacagatcagcaacaaccgaaaatgcaccagccccaggtcctcggacaccgaggagaatgtcaagaggcgaacacacaacgtcttggagcgccagaggaggaacgagctaaaacggagcttttttgccctgcgtgaccagatcccggagttggaaaacaatgaaaaggcccccaaggtagttatccttaaaaaagccacagcatacatcctgtccgtccaagcagaggagcaaaagctcatttctgaagaggacttgttgcggaaacgacgagaacagttgaaacacaaacttgaacagctacggaactcttgtgcgtaaggaaaagtaaggaaaacgattccttctaacagaaatgtcctgagcaatcacctatgaacttgtttcaaatgcatgatcaaatgcaacctcacaaccttggctgagtcttgagactgaaagatttagccataatgtaaactgcctcaaattggactttgggcataaaagaacttttttatgcttaccnatcttttttttttctttaacagatttgtattttaagaattgtttttaaaaaattttaagatttacacaatgggtttctctgtaaatattgggccattaaatggtaaataaacttttaataaaaccgttttattagcaagttacaccagaaatttcaatcccctaggtatatatagtaccctcaagtatttattagggtaactattaaaaccccctaaattgttttttttat

SEQ ID NO: 42196 - DNA, 684 bp, Homo Sapiens
  misc_feature (656)..(657): n is a, c, g, or t
ggctgtaaaacttgacgtattttgtgtatgcatgttttcattttgcaaatatttaatatatagacctatgatgtacaggtacgacatgtataggttacctagatgttatgagaaattttagtttattgtgagtactcaagttgcttagagagccaccagggtgatttgctgctggctttctatcatttttatgttttaatgcaaaggaaattttaaaatgttctggaagtgtttttgattaagcaatgcagcctagaagcaatggttctgttcaatcattcagatgttagtggaagcataaaagtcaagactgcatgttgaaacctttcttttgatagttactgaactgcttggttaaactaaatggaaccatgtgctaatttttcacaattattgacctgtattgattgccactgtagtttggtatttccctttactttggtggcctgcttccctcatgccctggaatacaactcagagctccaggcagcggaaccatctattgttttgtttgccagaaagtgcaccctgtatggtctcctgtctaagttggaaatattatgcatgtgcaggactattcgagtattttataaacagtagcacacaataaattccatgcatgggccgctgctcctaaaaaaaaaaaaaaaaaaaannaaaaaaaaaaaaaaaaaaaaaaaaaaa

SEQ ID NO: 42197 - DNA, 807 bp, Homo Sapiens
ctcctatctgggtgccatggtctccagcaattcagcactacagtttgtcaactacccaactcaggtccttggtaaatcctgcaagccaatcccagtcatgctccttggggtgaccctcttgaagaagaagtacccgttggccaagtacctgtgtgtgctgttaattgtggctggagtggcccttttcatgtacaaacccaagaaagttgttgggatagaagaacacacagtcggctatggagagctactcttgctattatcgctgaccctggatggactgactggtgtttcccaggaccacatgcgggctcattaccaaacaggctccaaccacatgatgctgaacatcaacctttggtcgacattgctgctgggaatgggaatcctgttcactggggagctctgggagttcttgagctttgctgaaaggtaccctgccatcatctataacatcctgctctttgggctgaccagtgccctgggtcagagcttcatctttatgacggttgtgtattttggtcccctgacctgctccatcatcactacaactcgaaagttcttcacaattttggcctctgtgatcctcttcgccaatcccatcagccccatgcagtgggtgggcactgtgcttgtgttcctgggtcttggtcttgatgccaagtttgggaaaggagctaagaagacatcccactaggaagagagagactacctccacatcaagaatatttaagttattatctcaaacagtgacatctcttgggaaaatggacttaataggaatatgggactgagttccagtctttttta

SEQ ID NO: 42198 - DNA, 925 bp, Homo Sapiens
  misc_feature (520)..(520): n is a, c, g, or t
  misc_feature (718)..(718): n is a, c, g, or t
  misc_feature (744)..(744): n is a, c, g, or t
  misc_feature (837)..(837): n is a, c, g, or t
  misc_feature (896)..(896): n is a, c, g, or t
  misc_feature (902)..(902): n is a, c, g, or t
aatccaagcgctcctggcactgacgacgccaagagactcgagtgggagttaaagcttccagtgagggcagcaggtgtccaggccgggcctgcgggttcctgttgacgtcttgccctaggcaaaggtcccagttccttctcggagccggctgtcccgcgccactggaaaccgcacctccccgcagcatgggcaccagcctcagcccgaacgacccttggccgctaaacccgctgtccatccagcagaccacgctcctgctactcctgtcggtgctggccactgtgcatgtgggccagcggctgctgaggcaacggaggcggcagctccggtccgcgcccccgggcccgtttgcgtggccactgatcggaaacgcggcggcggtgggccaggcggctcacctctcgttcgctcgcctggcgcggcgctacggcgacgttttccagatccgcctgggcagctgccccatagtggtgctgaatggcgagcgcgccatccaccaggccctgggtgcagcaggggnctcggccttcgccgaccggccggccttcgcctcctttccgtgtggtgtccggcggccgcagcatggctttcggccactactcggagcactggaaagtgcagcggcgcgcagcccacagcatgatgcgcaacttcttcacgcgccagccgcgcagccgccaaagtctcgagggccacgtgctgagcgaagcgcgcgaanctggtggcccttctgggggcccgcancgcggacggggccttcctccgacccagggcgctgaaccgtcctggccgtggccaacctcttgaatggccgtggggtttcggctggcgctaacnccccaacaaaccccaagtcccggggagtcgctcccccacacaacaaaaagttccggggnccccgntggtgccggtggcgatctttggg

SEQ ID NO: 42199 - DNA, 627 bp, Homo Sapiens
  misc_feature (607)..(607): n is a, c, g, or t
gcggccgcggctgtatgctatgcaggagcttcctgggagatttttttgagtcaaagacttaaagggcccaatgaattattatatacatactgcatcttggttatttctgaaggtagcattctttggagttaaaatgcacatatagacacatacacccaaacacttacaccaaactactgaatgaagaagtattttggtaaccaggccatttttggtgggaatccaagattggtctcccatatgcagaaatagacaaaaagtatattaaacaaagtttcagagtatattgttgaagagacagagacaagtaatttcagtgtaaagtgtgtgattgaaggtgataagggaaaagataaagaccagaaattcccttttcaccttttcaggaaaataacttagactctagtatttatgggtggatttatccttttgccttctggtatacttccttacttttaaggataaatcataaagtcagttgctcaaaaagaaatcaatagttgaattagtgagtatagtggggttccatgatttatcatgaattttaaagtatgcattattaaattgtaaaactccaaggtgatgttgtacctcttttgcttgccanagtacagaatttcctcgtgc

SEQ ID NO: 42200 - DNA, 708 bp, Homo Sapiens
aagatgtttggcgtagcagagttaaatctcaaataggctattaaaaaagtctacaacatagcagatctgttttgtggtttggaatattaaaaaacttcatgtaattttattttaaaatttcatagctgtacttcttgaatataaaaaatcatgccagtatttttaaaggcattagagtcaactacacaaagcaggcttgcccagtacatttaaattttttggcacttgccattccaaaatattatgccccaccaaggctgagacagtgaatttgggctgctgtagcctatttttttagattgagaaatgtgtagctgcaaaaataatcatgaaccaatctggatgcctcattatgtcaaccaggtccagatgtgctataatctgtttttacgtatgtaggcccagtcgtcatcagatgcttgcggcaaaaggaaagctgtgtttatatggaagaaagtaaggtgcttggagtttacctggcttatttaatatgcttataacctagttaaagaaaggaaaagaaaacaaaaaacgaatgaaaataactgaatttggaggctggagtaatcagattactgctttaatcagaaaccctcattgtgtttctaccggagagagaatgtatttgctgacaaccattaaagtcagaagttttactccaggttattgcaataaagtataatggttattaaatgcttcatttgtatg

SEQ ID NO: 42201 - DNA, 825 bp, Homo Sapiens
ggacgcgtgggcggacgcgtggggttgttcacactgggaaaacatttaaagatgtgactatatccatgggtggattgaatcactcaaaatatattagtatccttctttagggatggttggttacagacatgtatttattcaggaggcagaaaatattccattttaattgcttattaaagaaaacattaaattctaaattattttgaggactgtgaagacttttcattagtgtaatattaggtcattgtcaatctcccagaatgtagttctatattctctaaatatgaaagtatccagaaaggccagtggtagtaaaaagcttagtgtatataatctcaaaagggatggaatatttacaactcatatttataacatgttgaatcttctcagttatcagtagtcatcagaagtgtcaatagctttctaaataaatattaaatatctactgtcctgtagtgaaggagtaatttttagtaattttctctttacaaagtctccagtgtttccaggtaaatatttgtgaaacaaaatacagcaaactacattgttacttcagtgtattgttgccaaaaatgacaagatattatattaaaatcagtaaattttagacagattttaaaaattaattagcctacaatagaggttatatggtaacacggtgatcttctaagcagttaagtgactgactgttctggcaacaacgacttctccgtgactgaagggccctgttcatttcctgatcctgaagctcgtctctcttttgagcctccgcttgctttggtcgatgggttccctcagcttttttctttgctggtctttcattca

SEQ ID NO: 42202 - DNA, 933 bp, Homo Sapiens
  misc_feature (21)..(21): n is a, c, g, or t
  misc_feature (654)..(654): n is a, c, g, or t
  misc_feature (898)..(898): n is a, c, g, or t
  misc_feature (915)..(915): n is a, c, g, or t
ggacgcgtgggggaactatantcatctgagataaaatcagctagaggttcacatcatttgtccatttacgctgagaatagtttgaaatcagatggttaccataagcgaacagacaggaaatccagaatcattgcaaaaaatgtatctacctccaaacctgagtttgaatttaccacactggactttcctgaactgcaaggtgcagagaacaatatgtcagagatacagaagcaacccaagtggggacctgtccactctgtctctaccgacatttctcttctaagagaagtagtaaaaccagctgcagtgttatcaaagggtgaaatagtggtgaaaaataacccaaatgaatctgtaactgctaatgccgctaccaattctccttcatgtacaagagcagatcctaaaaatgttagtataccatcttctgaagctttatcttcggatccttcctacaacaaagaaaaacacattattcatcctacccaaaagtctaaagcatcacaaggtagtgaccttgaacaaaatgaagcctcaagaaagaataagaaaaagaaagaaaaatctacatcaaaatatgaagtcctgacagttcaagagcctccaaggattgaagatgccgaggaatttcccaacctggcagttgcatctganagaagagacagaatagagacaccgaaatttcaatctaagcagcagccacaggataattttaaaaataatgtaaagaagagccagccttcagtgcagttgggactttggggggcatgctgacagccctggagaagagcagcactctcagcatgcaaagcagtcctccaaaacagtggtagtctccagttggagcagtgccagtccttttcaaggaatgggcattccagggaaaagaagccgcccncatgagtccaaatgaangaccccgcacaatccctc

SEQ ID NO: 42203 - DNA, 562 bp, Homo Sapiens
ttgtgtaacaagcaaagagaatatggcaaatatttgtatattcccaaggggccgggtgctttcctgtcctgccagagcatggatgaagtttcgctgggtgctcgtgactggccagttttgtgcagctgactgtctcagccaaaccactgatcttccctggaggccttcggcctgcctgcctgcctgcctgaggtccccgctgccagtcccgggccctggagagcagatgctgtcttgttatgtacaggaggaccttttaaaaaaatcaagtttctattttttgctggtagtccgcatacccataccctctgtttttgaaaggcaaaggccaatcagtccccatttgtagcatggcaccagggtcttaggcctagtcctctcattcctcccaccctccgagatggtcagtgtgtcatgggaagcccacccccagctctgccagtgctctctgggcctggctcccagtcagtggtggccacgatgcggtacagggcatccctccttcccatctacgggtgttctcaataaacaatgtacagttgtttgggcccaaaaaaaaaaa

SEQ ID NO: 42204 - DNA, 986 bp, Homo Sapiens
  misc_feature (668)..(668): n is a, c, g, or t
gggacaactcttgtgtacgctatgttgaagctcaacaaaaaagtcatgggaccacttctagaaatctttcagctgtcaggcctgtcagtctcatgacagtttgttggttgtgccaaacactttatttgggaaaggaaagcccagatttgaatgggtctttcccttgggccttatcctatagaggcatttgtaatatggagaaaataatttttcatttttgctcatttaattctataaattctctttataaatgaattttgtgttctttagttctccttaaaagaacttttgaattataaaaataaaatctttacctgtcgaattgttgctgcagatgattgttgtggaaaatctggatcattgacctctgtgctttcattcctagagatgttttatagttacatgagcaaaagctgttgccccaaagtgatggccctggaggcggggctgaggaacagggaaatgccgctgtgaagtcttaaagcacttctgcttaaactccatgtgtgaggagtgtgcctccctgtgccctctcagctctgaggctggccgtctttcggggtgttccttttggcaaatatacactgtaatcttgagtctaaatttatatgttgaaatgctaccttttttaaaataagacactaaataacattattttactatcgaanagacacccccccctatgccaataaccccttgtcggccggcctccgcccttcgaaaaagcttttctagaccacttcgttttggccgcgccggtgccccccgtaaggtaaagtcgaaccacgggcccaaaacctggcttccctaagggaaaattccctggtctacattgaactaaattgcccttgggagatcttcctcacccccacataaaaaaaaaaccgccccccggggcgggggaacaaccccgaaaggcggcgttttcttgtgaaaaaccaaaaaattccccagaaaaaagggggaaacagctttctctggtaagt

SEQ ID NO: 42205 - DNA, 492 bp, Homo Sapiens
ccgggctgcattctctgctcctcctcgcctgcgaacatcacgtccgcttcccgacgctgagggcagccccgtccagggtatgtggagctggtgaacgctgcctgtaacttcgagccacacgagagcttcttcagcctcttttcggacccccgcagcacccgcctcacgcggatccacctccgtgagacctggtgcaggaccaggacctggaggccatccgcaagcaggacctggtggagctgtacctgactaactgcgagaagctgtccgccaagagcctgcagacactgaggagcttcagccacaccctggtgtccttgagcctcttcggctgtacaaacattttctatgaggaggagaacccagggggctgtgaagatgagtacctcgtcaaccccacctgccaggtgctggttaaggatttcaccttcgagggcttcagcgcctccgcttcctcaacttgggccgcatgattgattgggtccctgtgga

SEQ ID NO: 42206 - DNA, 904 bp, Homo Sapiens
  misc_feature (698)..(698): n is a, c, g, or t
  misc_feature (724)..(724): n is a, c, g, or t
  misc_feature (755)..(755): n is a, c, g, or t
  misc_feature (836)..(836): n is a, c, g, or t
ggacgcgtgggtagttctagatcgcgagcggttaccagtgttttgtgtttatttttaatcaagacgtttcccctgttttcctataaatttgcttcgtgtaagcaagtacataaggaccctcctttggtgaaatccgggttcgaatgaatatctcaaggcaggagatgcatctattttaagatgctttggagcagacagctttagccgttcccaatccttagcaatgccttagctgggacgcatagctaatactttagagaggatgacagatccataaagagagtaaagataagagaaaatgtctaaagcatctggaaaggtaaaaaaaaaaaatctatttttgtacaaatgtaattttatccctcatgtatacttggatatggcggggggagggctgggactgtttcgtttctgcttctagagattgaggtgaaagcttcgtccgagaaacgccaggacagacgatggcagaggagagggctcctgtgacggcggcgaggcttgagaggaaaccgccgcaatgggggtgtcttccctcggggcatgagggtgggcctgaggctttcaagggttttcttccctttcgagtaatttttaaagccttgctctgttgtgtcctgttgccggctctgggcttcctgtgactgactgtgaagtggcttctccgtacgattgtctctgaaacatcgtggccgcangtgacaagggttttgatggacagtancgatactatttgtggaacaaggacacgccanagggagaaattgctgaaatgatgaacaaaaatatgcagcggttaaaataccatcgaccaattcgggggtcggaacagccgnttgcattagagggggaagtttacagggccatgaaagaaatggtgttagagtggcggttccgtctctaa

SEQ ID NO: 42207 - DNA, 491 bp, Homo Sapiens
gcacgaggtactttaaaataaagcaaagggagactgttgctcaaccatcaggaaacagttgtcagaagacatcattggttctgtgtttcctacggaaataagaaacgataaatattgcactgaatgtttgtggtttggagtccctgaataataaagagggaatatatttgcagaaagtcgcatagggttttttaatgcagaattttgtcagaagacaatggcgctgcatgtttttctttgagtgcaaatgtacattgctaagatttttttaagatggcatgtgctttgaaaagaagatattgcatttttaagagtttaaaaatcttatgagtgagaaatattaaaaaaatcttattttcacctctttagaagaaataaaagatgtttctcctatctccttttctctagtatttgactgttactgtccttggcgaatcgataatcattgcatagtgactgaaaagcctaagtgcaaaaaaaaaaaaaaaaaa

SEQ ID NO: 42208 - DNA, 739 bp, Homo Sapiens
  misc_feature (613)..(614): n is a, c, g, or t
  misc_feature (617)..(618): n is a, c, g, or t
  misc_feature (621)..(621): n is a, c, g, or t
  misc_feature (624)..(625): n is a, c, g, or t
  misc_feature (634)..(636): n is a, c, g, or t
  misc_feature (641)..(641): n is a, c, g, or t
  misc_feature (644)..(644): n is a, c, g, or t
  misc_feature (646)..(651): n is a, c, g, or t
  misc_feature (654)..(655): n is a, c, g, or t
  misc_feature (658)..(660): n is a, c, g, or t
  misc_feature (662)..(665): n is a, c, g, or t
  misc_feature (678)..(678): n is a, c, g, or t
  misc_feature (681)..(681): n is a, c, g, or t
  misc_feature (687)..(687): n is a, c, g, or t
  misc_feature (689)..(689): n is a, c, g, or t
  misc_feature (692)..(692): n is a, c, g, or t
  misc_feature (694)..(694): n is a, c, g, or t
  misc_feature (698)..(699): n is a, c, g, or t
  misc_feature (710)..(713): n is a, c, g, or t
  misc_feature (724)..(726): n is a, c, g, or t
  misc_feature (733)..(733): n is a, c, g, or t
ggccgtgggaacgggtttcctacaatgcctgcggcgtcctctcccactcatgtttgatggacccgaggcctggggcgtctgtgagccccagcgtgaggaggtggaggaacgcatgtgggctgccatccagagctgggacataaactctcggagaaacatcaattacaggtcatttgaaccaattctccgcctccttccccagggaatctctcctgtcagccagcactgggcaacctgggccctgtataacctcgtgtctgtctacccggacaagtactgccctctgctgatcaaagaaggggggatgccccttctgagggacataattaagatggcgaccgcacggcaggagaccaaggaaatggcccgcaaggtgattgagcactgcagtaactttaaagaggagaacatggacacgtctagatagaggcctccgtccccatggccgccaccgctctggaccacaggcggggaggaagcatgctcaagcagcccagcgggcgggccccttccgagggagcctcccacggagtgaagagacatgggggacttttgcacaaccgacgcttttccttaatgttagtgagatatatatatattataatattatttnnttnnttnggnnaaggaaagnnngaagnttntnnnnnnatnnatnnntnnnnaaaaaaaaaaaanaanattttntnaantntttnnaattttttttnnnnattttttaaannnatttaanttttat

SEQ ID NO: 42209 - DNA, 708 bp, Homo Sapiens
gtgaacaagacaccatattaagtacagtgataaagcatctatattctgtaaaaaaaaaaaaaatctgcctatgcatgttttttaagaaaaaaaaaatggctgtatcggcctgtatgggactgtaatgcgcttagtggtctgacatatactggaaatgtatgtatactggcgtactttatattctctaaaatgcttaatgcctttgaaattttgtaatcaaaaaaaagctttgaaaaaatctaaaggggagagtattctttaaagtttttaacataagcttgtcaatgcacatgtagatggttagcatgtttagcaaaccttgtgaaattataataagtttgtagttacatgtgaaactctaaatgcatggcaactgttaatgtcataacagtttagttattttgttctgttctgtcatgtgccacaaaatatgtacttttttcacttttttccctttgtatatcagttacgggttacaactggttcattctgaaaacaacaacaacaaaagtccattcatattttttaacaattgtataagtgcccaagtaattcactacagcctaaagccttgcctttgtaatttgacttctgacatgttggcaatcaaagcatgcacttgtaacaatgaaaaagaaaaagcattttatattactactcaataaaatgtgcatgaacttacagaattctcatccttccactgagtcc

SEQ ID NO: 42210 - DNA, 831 bp, Homo Sapiens
  misc_feature (466)..(466): n is a, c, g, or t
  misc_feature (594)..(601): n is a, c, g, or t
  misc_feature (603)..(603): n is a, c, g, or t
  misc_feature (607)..(608): n is a, c, g, or t
  misc_feature (618)..(621): n is a, c, g, or t
gggggatgtcctaaaatgaaagctgctcaaagtcacagaacaaccgagggacaaaggagattggatgactgggaagcgctggcccggaacagcccctgcaactgtggggcctgcacacagcccttccacagttggcactgcaggtgcaggccaaccctttaaagaataaacaaggaagtcagctctttcactttttacaagttggcaaaaacagacttccggggaattttgatgttttcccgtgttgtagagcttccagggtttaataaaactggttaaaaattgagtctttccctgaagtaagtgctctttccagatgaaaactactcttttggttttgtttgaaagtaagaaagggaggggaaactttgctcttttaataattatgttcagcctatgatgaagtatttgattattagacagcaatgtcactaataagttttaagttgtccaaagttaattgtanacatcatcagtacagtactcttagttacagtaaagcaattgttgcaagatgaatggctaatattttggtgcagtgtttgatgttcaaaacaaaatgttacaacaataaacgaacataacataaacccnnnnnnnnanaaannaaaaaaaaannnnacatgtcggcccgccttcggccctcggagaaactttctaaaaccattccggttggccgccgcgggcccccagtaggataagtgaaacctgggcccatagctgttttccctaagaagaaccctgggccatgaaactaggggcttggaaattcctcccccaataaaaaaaaaccccccgggggggggaaacacgcgaaggggttctttaaat

SEQ ID NO: 42211 - DNA, 789 bp, Homo Sapiens
gttggttgcatctgtaggccatctgacttcctgtttttaaaacgggggtctggtcttgctaaacactacaggtaggttggtctttgaagtccactagtggagaatgtcaagacaagatacttattaccatgacatctgatgcatgtgcagcagtggggagttctagattgatctctgaatgtgatcgacgcccagcaaggacaagctttaaaatgtctgcggtctgcccttttgaagcaggactggctcactctgtcattgggagctgtcagctgcgactgcaggttctctaggaggcattccagaatagagtagcacactgtgtctgcagttctcgatgaccgaaagttatcaaaaatatttaaaatatttaaattgtgaacctattgataaagaatatttataaaaactgatctgtaggcctgtactaatctctacgcattagcaatattgactgtaaacccacattaaggaaaccactacgggtctggcagtgcgtgtcccgtggggtgtgcattttaaaactcgattcatagacacaggtaccatgttccatttccgtcatggtgaagcaaatgaattggcctggctaccactgtggtcgcgtgctacaggtttgaccaaaaagatatcatgtttcgatttattgtgtgtggacaacaatatggaagctacaaattgacactattttctatgtaaaggtttgtctaatctctttcgaactcttttaaagtaaaaccttggggaaaaccccagagcacaaaaactaaaaagatgaacacgagcggc

SEQ ID NO: 42212 - DNA, 798 bp, Homo Sapiens
  misc_feature (686)..(686): n is a, c, g, or t
  misc_feature (716)..(717): n is a, c, g, or t
  misc_feature (742)..(742): n is a, c, g, or t
agaggtaatcctatagttacttaatcaaagatttttttcaaacctgccttacatataggcccactttaaaagcacctgactagcatgtgttcttgattgcaaaattggcagaggcagggtgtcaacttgattaggtgtttttatgggaatgtaatttgaaatcactacttcagaaatttgacttaaaattcttgagcacgttaatatgtttttaagatctgattatctttgagagatcttctgttaatacacattggttgttaaagagtacccaaattctaggacaatgcttaaagtgttaaaataccctagatactgtgttatgtgcaactgtagaaaccctccagaaatttccactgctgttcttcactttcatcttgtctgctatcaaaccacttctgacaaaattagctgttttgaattacccatatcactgccagttttattttaaaatattttgtgtttgaagtatctgtgcatgggatcgttgatgtttatcagaactgttcactttcagaaatgattttttaaagcattttgttgaaaatgcggttgcttttttaacattattttagagttgtatcaaaattttcctgttttctgtatattgttgtgtcatttcttggctttttaatattttgactacaatgccctaatgcgaagaagtatggacatataaatattancagagaaattagttatagtaaaggttaaanngtagtaaatgtcatgaaataaattntcttgacagttaaaatgatccaaatctactgcactgatgactgaattatactatat

SEQ ID NO: 42213 - DNA, 836 bp, Homo Sapiens
ttcccgggatgtgacccggcacaaggacatagacatcctcattgtccgggagaacacagagggcgagtacagcagcctggagcatgagagtgtggcgggagtggtggagagcctgaagatcatcaccaaggccaagtccctgcgcattgccgagtatgccttcaagctggcgcaggagagcgggcgcaagaaagtgacggccgtgcacaaggccaacatcatgaaactgggcgatgggcttttcctccagtgctgcagggaggtggcagcccgctaccctcagatcaccttcgagaacatgattgtggataacaccaccatgcagctggtgtcccggccccagcagtttgatgtcatggtgatgcccaatctctatggcaacatcgtcaacaatgtctgcgcgggactggtcgggggcccaggccttgtggctggggccaactatggccatgtgtacgcggtgtttgaaacagctacgaggaacaccggcaagagtatcgccaataagaacatcgccaaccccacggccaccctgctggccagctgcatgatgctggaccacctcaagctgcactcctatgccacctccatccgtaaggctgtcctggcatccatggacaatgagaatatgcacactccggacatcgggggccagggcacaacatctgaagccatccaggacgtcatccgccacatccgcgtcatcaacggccgggccgtggaggcctaggctggccctaggaccttcttggtttgctccttggattccccttcccactccagcaccccagccagcctggtacgcagatcccagaataaagcaccttctccctaga

SEQ ID NO: 42214 - DNA, 1122 bp, Homo Sapiens
  misc_feature (703)..(710): n is a, c, g, or t
  misc_feature (712)..(782): n is a, c, g, or t
gattcttccgaatcgtcgaccacgcgtccggttggggcctccttgtcctggatttccagctctccccatgccccctccctgagcaccaccggcaccgcctcccaaacagggctgctggtttccgcagccactgctccacctcccccaaatcgtcatggaaagggtggagaatggaggggaaccaggcgtccttggaggcagcttgggagggtgactgtgtagtgtcacccacaagggaggctagggcaatggagcaggccaccagcagcagctgtgcagcatggaactcaggccaggctccgaggctgggggatctgcttggagttttctgccccccaccccaaacttctgtcgaggagcaaggcttgccagcaagtcagaaggatttgaaccgagcagccaatctttccagccctcccctaccgacctctgcctggagacgcagcagcctgtgtcctccagggcctctggtttgttgtattatagtatatttcgctgtggaaaatgtcacgtttagtcaccttggagcccactcacctggtcctgttgttttaccccatcccttctctcgcgcgcctattgatttgtttctgaggagagtacaccgttcactattgtagagtaacccctgtgactcaatattaccatagtgcgatgtcgttttgtgctattttgaacaattaaaagactttttttgaaatannnnnnnnannnnnnnnnnnnnnnnnnnnnnnnnnnnnnnnnnnnnnnnnnnnnnnnnnnnnnnnnnnnnnnnnnnnnnnagggggggccccctctaaaaatatcccttcaaggggccccaattttaccggtcccccggtttttttttgaaaaagggggcccctaaaagggggccgtttttataactttaggcactggcccgcctttttaacaaaccccgggacttgggaaaaaattgcttatctggggaaacttttgggaaggagacctttctttctgggggggggaacttattgggacacactctcccttcagagattttaaccccccagcgggaaaataaaaaattttttagggggtaaatgggggtaaaaataaacgcgacatgagtttgcccgctaagaaacattattcctataa

SEQ ID NO: 42215 - DNA, 582 bp, Homo Sapiens
ctaaaaatacaaggaaccttgacccgctggtgtacctgttgtcaaagctcacggaagacaaagagactctgcagtacttacaacagaatgcaaaagaaagagctgagcttgcagccgctgctgtgggcagcagtaccaccagcatcaacgtccctgccgcggcctccaagatctccatgcaggagcttgaggaactgaggaagcagcttggcagcgtggccacaggctccacgctgcagcagtctctggaacttaaaagaaagatgcttcgagacaagcagaacaaaaaaaattcaggccagcacctccccatcttcccagcatgggtgtatgagagacctgccctgatcggggatttcctgattggtgctggcatcagcacagacaccgctttgccgataggcacgttgcccctggcctcgcaggagtcggccgtggtggaggacctgctgtacgtgctggtgggcgtggacgggaggtacgtcagtgctcagcccctggctgggaggcagagccggaccttcctcgtggaccccaacctggacctgtccattcagggagctggtgcacaggatcctccca

SEQ ID NO: 42216 - DNA, 681 bp, Homo Sapiens
cgcgtccggttaacatttataattctttttccttgtttgagtatttctgtctctgaaataaccttttacttggcttttctagatagctttatttgatttcgagtggcaaaatgttttttattacggcttttctattgctgtatgatacagaactcttttggcataaatatttgtgttcccagtacctcacttgttcggatttgactgcctgtatatgttttgtgaaatggtcctgtttttgggtaggtgacacgtggactctagtatgtaaatgttacttgaatctgtgcttcataatagtgtgtggcatgtatgtgcagactcttggatgctttatgcctgcgcagcaggagccctgtcctcacgttcccaggagggcggcttcacccttcgtaaccaggagacaaggcggccatggatttgcccttgattctattttgctaatggaagatagaaaggagagaaggttttttttttttttaacattctgaagatggtgctgtgtcaagaaggaccttttttttcccctctcccctattttttaagtaccttggaggaggagaggttggtgacatgcatggtggggatctatggcctctggtgctttgtcctgtatttggtttaatgtttttgtcctaatcttcaatcaataaaattgtgcgtatttaactaaaaaaaaaa

SEQ ID NO: 42217 - DNA, 679 bp, Homo Sapiens
cgtcacatggaagagaacttggaccctttctttaactgagctcatgccccacggagacttagcaggttccaggagtgagcgagggcagcggaaaggagttcttccgggggacacgaattgcctggctgagtagcaagaaagacacactcttaagtttcttggttcagagcaggaaaaccttcaaggagctgactgaccacgtagcatgggggcaagaggcgtgggatggggattggggtgagatggatgggagcccgctggagcttgtcttccctaacatagcctgggagaccaccccttgccacttgggccacttccgcctaccccacttttcattttgttccaaaatagttgcagatcctgacagaatcaaaactctctgcctcaaacacacatcctggcatcgcactgttagcatttaatttcttgttaggattcagggaaggaacagttggccaagaattttttttcttttaaacaagccaaccacctagctggtaattaatgaggttcacttaaaaaaaaaattcggtgcacacagactgacatgaaacctgggtgctacagtaaaagaaaacaaaagtccagtttgtgtctcttaatcgctcacttcaactcatttcttctaaataaactatttaatatcctggtcaggaaatgacatgttaatgctttgctc

SEQ ID NO: 42218 - DNA, 977 bp, Homo Sapiens
tgggagccagcgaaaacgccggaagtcagtgacaccagatcccaaggagaagcagacatgtgacatcagactgcgggttcgggctgaatactgccagcatgagactgctctgcagggcaatgtcttctctaacaagcaggacccacttgagcgccagtttgagcgctttaaccaggccaacaccatcctcaagtcccgggacctgggctccatcatctgtgacatcaagttctctgagctcacctacctcgatgcattctggcgtgactacatcaatggctctttattagaggcacttaaaggtgtcttcatcacagactccctcaagcaagctgtgggccatgaagccatcaagctgctggtaaatgtagacgaggaggactatgagctgggccgacagaaactcctgaggaacttgatgctgcaagcattgccctgacctattccctcttctcactttggggactgttcccatcacccacctctggagcttacactgttctggggtttgttctctacccttccaaccaatcacacccctgccttttttttttttttaaagaaaaagacaaaagaaaagtggaaagtggtattccccacccctccctgcacccatgggcctgggcttcccctttatttcccttttccatttaccccgtaaaggggtctctacggttaccttaccatgggagccggaagaacaatgggataggaacaagcaaagtcttaccgcccattagccctttgtaaagggatttgaggggaaacttttttttttggggagcgcccacgggaggcccccacttacttcccgggcgcccacgaaaccttccttcacactcgggtctaacaacccgcacgcgtctgcggatttactgggccccccccgggcgaaacggggcgcccaccgagcgggcgagttgcgatactataagccgcctggggccctttcccgaggcaacaccactcgttttatc

SEQ ID NO: 42219 - DNA, 636 bp, Homo Sapiens
  misc_feature (6)..(6): n is a, c, g, or t
  misc_feature (10)..(10): n is a, c, g, or t
  misc_feature (50)..(50): n is a, c, g, or t
ccttcngggnaaaaggccagacgtatacagcaagtacgcaagaaattggnaaaaagcactgatggcagacatcttgtcgcgagctgctgatacagaagagatggatattgaaatggacagtggagatgaagcctaagaatatgatcaggtaactttcgaccgactttccccaagagaaaattcctagaaattgaacaaaaatgtttccactggcttttgcctgtaagaaaaaaaatgtacccgagcacatagagctttttaatagcactaaccaatgcctttttagatgtatttttgatgtatatatctattattcaaaaaatcatgtttattttgagtcctaggacttaaaattagtcttttgtaatatcaagcaggaccctaagatgaagctgagcttttgatgccaggtgcaatctactggaaatgtagcacttacgtaaaacatttgtttcccccacagttttaataagaacagatcaggaattctaaataaatttcccagttaaagattattgtgacttcactgtatataaacatatttttatactttattgaaaggggacacctgtacattcttccatcgtcactgtaaagacaaataaatgattatattcacagacaaaaaaaaaaaaa

SEQ ID NO: 42220 - DNA, 496 bp, Homo Sapiens
  misc_feature (203)..(203): n is a, c, g, or t
aaagaggagcccccgggtgagaaagttgccaactagaggcccagagggaggccatctcagtctctccactgtggtttcagctggtgcattatttcagctgtggctttcagaagaatgggaatgctgcgctgattttagccagccactggcccagctgaaatgatggggaaaggagtccttagtcctttcagcctcagaggtcncagtgggtggcaggtgactttccggaggccttgagggaaatgcacactgtcccatagcctcattgggctcccagacgtgctggaaaggttgagcccagagtggccgaggctggaccctgtggcaccaagtggggtcggctgaccgtgtggcagggatcgttgcactggactcttggcgtgtgggaagggatgctttctctttgtcgcccactcttcattcctgtttctcctcagttcccctgtgcagatgggctgtgaaattaaattggagtcttgataagaacattttaaaa

SEQ ID NO: 42221 - DNA, 692 bp, Homo Sapiens
ggacatgtcagatccttcttcatggacttttttagttactgttttttctctcaaacttgttttcgaatctcctgggagtgagggagaaacagggagctgaatcctcccccaagctgttccaggccagaggactctgcagtaccttctcctacatctagtaacaaagaatggtgataaccatgcactggttcaaggttctggagttctccatgaaacttgggttaattttgctcagagtatccggagttagccactaggctgcgggtgaaatgggatggagtagaacaacagcaggcttcctggagccacatgggctgactagggcactctgtggctggcctggcacgggctcagcccaggaagaggagaaacgatcccttgcctgcccctccctgtggcagggctaactgcctggccctcctggctcgcagccagccagccccctggcagcaggttctcctcagggcttgggtcttcaacctgtggcgacaggaggcagggcagactgtggaggacaggatgcaggtcagggagagggaaggcaggggtggaccgccatgagcatgaaaagacccgaagcaagttgactcttgcaatgtgcaactgttatgttctgcaaaatgagcaacgatgtatcaaattgatgcaaatttagatgttgatacttacaataaagtttttaatgtgtttta

SEQ ID NO: 42222 - DNA, 692 bp, Homo Sapiens
tcacttccagaaatttggactcttacttaccagcagaattcagctaccccggttctaggtcccaattctactgcaaatagtatcatggcatcttatcagcaacagaagacttcggttcctgttcttgatgctgagctttttataccaccaaagatcaacagaagaacccagtggaagctgagcctgctagactgagtgactgcagttaggagggatccgacagagaagaccatttccactcattcctgttgtcctaccaccccttgctctttgagggctggctattgagaactggaaagagtaaaatgataacttaccttagcattgccaagaacttcagcagacaacaagcaattctatttattttatgttgtgtatacatcttgatcattagcaagacattaagctttaaccattatggcaccattttgtgagaatgattgttctttcacttgggctgtttgagagcataattatggtaatcatgagattaatgtttcatgatttctacctccaaagtgtgaagacaagtaaaacaatgtttctaaattgtcttattttgttggcggagaagattacaatggctattagtgctacatttggtcaaatgtaatcacttaaatagcttcttgtcaccttaaactaaagcagaataaaaagtatcctttgaaattaaaaaaaaaaaaaaaaaa

SEQ ID NO: 42223 - DNA, 623 bp, Homo Sapiens
ctgaacctggtgctgtatgtgtgtgaaactgtggacccagcccaggtttttgggcagccaccctgcccgctctcccagcctgtgctcctttccctcatccagcagctggcatctgaccttggcactcgaactgacctcaagctcagctacctggaagaggccgtgatgcacctggaccacagtgaccccatcactcgggaccacatgggctccgttatggcccaggtgcgccaaaagctttttcagttcctgcaggctgagccacacaactcacttggcaaagcagctcggcgtctcagcctcatgctgcatggcctcgtgacccccagcctcccttagctgctaagcctgccttgcccaggggtgggatggcactgaaggccagcagacaggcctaggctggggcagggtcacggctggcctttacctgctcaggcccccatctctggggtgtttgggggtcagggagcagggagcactggccgtggtctacagcgtgtggtagtcagaaggtttagctgggcccagagcaggtattgcgcctgcttgggttctgccatgcctggagcatgaccctgagatcgtgacaccacttgagtggaattttccatgttcctttttac

SEQ ID NO: 42224 - DNA, 657 bp, Homo Sapiens
ggaaactcagccaggcaaagcccagccctgcagcacaggcccatgggacagtcacaggccaaccacatacctggggacagaagtgccctagaaggtgaaattggaaaagatgtctccacttcttacagacattcttggtcagaccacaagcaccttgcacagcctgacaccgcagtaatttcagttgtaggcagtcggcacaatcagaaccttggttgttatccagtagagctggagagaggcccccggggctttggattcagcctccgaggggggaaggagtacaacatggggctgttcatccttcgtcttgctgaagatggtcctgccatcaaagatggcagaattcatgttggtgaccagattgttgaaatcaatggggaacctacacaaggaatcacacatactcgagcaattgagctcattcaggctggtggaaataaagttcttcttcttttgaggccaggaactggcttgatacctgaccatggtttggctccttccggtctgtgctcctacgtgaaacccgagcaacattaaggctttcagggcttttcttggtctttccttaaaaagacttggtgattgggatattaataatccttcgtcttcaaatgtgatttatgatgaacagtcaccattacccccatcttcact

SEQ ID NO: 42225 - DNA, 768 bp, Homo Sapiens
cctgatggaaatatttatttttttaagcgtaattttgccaaataataaaaacagaaggaaattgagattagagggaggtgtttaaagagaggttatagagtagaagatttgatgctggagaggttaaggtgcaataagaatttagggagaaatgttgttcattattggagggtaaatgatgtggtgcctgaggtctgtacgttacctcttaacaatttctgtccttcagatggaaactctttaacttctcgtaaaagtcatatacctatataataaagctactgatttcctttggagcttttttctttaagataatagtttacatgtagtagtacttgaaatctaggattattaactaatatgggcattgtagttaatgatggttgatgggttctaattttggatggagtccagggaagagaaagtgatttctagaaagcctgttcccctcactggatgaaataactccttcttgtagtagtctcattacttttgaagtaatcccgccacctatctcgtgggagagccatccaaataagaaacctaaaataattggttcttggtagagattcattatttttccactttgttctttaggagattttaggtgttgattttctgttgtattttaactcatacctttaaaggaattccccaaagaatgtttatagcaaacttggaatttgtaacctcagctctgggagaggatttttttctgagcgattattatctaaagtgtgttgttgctttaggctcacggcacgcttg

SEQ ID NO: 42226 - DNA, 725 bp, Homo Sapiens
  misc_feature (682)..(682): n is a, c, g, or t
  misc_feature (688)..(688): n is a, c, g, or t
ctggcctcaggtgatctgcccaccttggcctcccaaagtgctgggattacaggtgtgagccaccgcacctggccagaccgcttcacttgtaaaagaaattaggctaataagaaggtgtagtttttgagaaatgaaatttaactttagccttttcactagtaaatagtcacatctcattttcttcctttgtaaaatggggttactactggccctacctcatattctatgagaatgagtttgtagctgtttcaaatcatgaagtgcatagtatcacatgtgatagaatatttataactttttattagatgcttaatgttcaattaagtaattttgatgtgaaaaataaaagtaataaaagtatcttaaaaatagcataagaattttcatatttttaaacaaggcagttttgtagtcccttaagattaaatacaactgctccttttttttttaaactgaggccttgcgatattttgtgtgaatagatatgccctaggagttcagaaaaagttaaaagtatgttttctaattaaatgcagtgcacattcctggatcaatattcaaagactggtcataacctgctgtgttaaaataatcacatatgctctttttcatcagatttgttgatgatgtaaataaaatgtgtaaatatattagtaaatggtaatattcatgtattttaagntaaggntataaaatttgtcacaatggggtttttttattcaagt

SEQ ID NO: 42227 - DNA, 540 bp, Homo Sapiens
ttggttcttagttctcactgttccctctgctcctggagcctttgaataaaaatgcacgtagctgaggccggatgcggtggctcacgcctgtaatcccagcactttgggaggcctaggcgggcggtcaggggttcgagaccagtctggccaacatcgtgaaaccctgtctctactaaaaatgcaaaaattagccgggcgtggtggcgggcgcctgtaatcccagctacttgggaagctgaggcgggagaatcatgtgaacccgggacgcaggggttgcagtgagcggagatcgcatcattgcactctagcctgggccacagggcgagactccgtcaaaaaaaaaaaaaaatgcacatagctatcgagtgtgctttagcttgaaaaggtgaccttgcaacttcatgtcaacttctggctcctcaaacagtaggttggcagtaaggcagggtcccatttctcactgagaagattgtgaatatttccatatggattttctattgttactctggttctttgttttaaaataaaaattctgaatgt

SEQ ID NO: 42228 - DNA, 570 bp, Homo Sapiens
  misc_feature (481)..(481): n is a, c, g, or t
cggagctgtgcatcttgggacatgtagtagcccaggtcggcttgtcactcgctgtgagatggggagattttgtcttttgatttatccctgtagggctggcagggttgtagatgaagggggaatgatctgagccttggttcccctgacacgtcttgctagccccagggttagagtgggcagggcagagccgcgcagcacctgggagcggtacctttcccttgggcagcctggggtcccaggaacaagccagggcgagtggcatgtctgcctgagcagggtgtggccccagaaagctgaggagtgtgggctggcagagagcttcgagggcaaggccacctgcgggggcgtgtgtgtggtggggcttggcatgtgatggcagctccaggcatgccgctgcttgtatggctttctttggcctctgaccctgctgcccattctttccaacatcacagatgaactgcctctcctcctccctgcctgnggagcccagtggccagggaggggagtggtggagccagtcgctgtaacactgagcctcagagacgaaccaaaaccagctgggctgagctc

SEQ ID NO: 42229 - DNA, 582 bp, Homo Sapiens
  misc_feature (539)..(539): n is a, c, g, or t
atagttaaacagatcagggatttgaagagaccagctcagcaagaagcttaatctccaataaacatctatgttaaatccaaattcagcatttgctgttagctattcagcatcaggcactcttattgattcatgaggaacattactgctaatctgctgttaagtgaacggtttttcattttacccttttgtttttcagtccaggttggagatcgtagctgctgctgcttgcacactagggcacatgtgggctttctcttgatctttgtgtcatttcagaattcaaagactgtgctacgggagttctgaacatggctgggttcatgaaggcaaatgtatggatgagagtgtggtttaggaaagagggcactgatatcagattagacctatgtgtttgcacccatctttgttggcgatctgagtgcagtgtggcaagtgcacacctggcatccctgcgtcagatcgcgcaccttcaggtcgcgcaccttcgctgaaggaagatgacgcagagctttatctgaaatcagaggggaactatccanatggggagtttgggggcagctaaagttgacatgcgaataaatt

SEQ ID NO: 42230 - DNA, 647 bp, Homo Sapiens
ccccgcgtccgataaatctaagcactgcttattatagtagtttatacttttgcttaactctgttatgtctcttaagcaggtttggtttttattaaaatgatgtgttttctttagtaccactttacttgaattacattaacctagaaaactacataggttattttgatctcttaagattaatgtagcagaaatttcttggaattttatttttgtaatgacagaaaagtgggcttagaaagtattcaagatgttacaaaatttacatttagaaaatattgtagtatttgaatactgtcaacttgacagtaactttgtagacttaatggtattattaaagttctttttattgcagtttggaaagcatttgtgaaactttctgtttggcacagaaacagtcaaaattttgacattcatattctcctattttacagctacaagaactttcttgaaaatcttatttaattctgagcccatatttcacttaccttatttaaaataaatcaataaagcttgccttaaattatttttatatgactgttggtctctaggtagcctttggtctattgtacacaatctcatttcatatgtttgcattttggcaaagaacttaataaaattgttcagtgcttattatcataaaaaaaaaa

SEQ ID NO: 42231 - DNA, 785 bp, Homo Sapiens
  misc_feature (763)..(763): n is a, c, g, or t
gggtgagtacccgcatggtatcagcctgcctctcccgcccacgccctgctgtctccaggcctatagacgtttctctccaaggccctatcccccaatgttgtcagcagatgcctggacagcacagccacccatctcccattcacatggcccacctcctgcttcccagaggactggccctacgtgctctctctcgtcctacctatcaatgcccagcatggcagaacctgcagcccttggccactgcagatggaaacctctcagtgtcttgacatcaccctacccaggcggtgggtctccaccacagccactttgagtctgtggtccctggagggtggcttctcctgactggcaggatgaccttagccaagatattcctctgttccctctgctgagataaagaattcccttaacatgatataatccacccatgcaaatagctactggcccagctaccatttaccatttgcctacagaatttcattcagtctacactttggcattctctctggcgatggagtgtggctgggctgaccgcaaaaggtgccttacacactgcccccaccctcagccgttgccccatcagaggctgcctcctccttctgattaccccccatgttgcatatcagggtgctccaggaattggagagggagaacaaaccccggaaccaagcacaggggggggaaatcctccccgttcttcaaaaagccccccaaggcccttattggggggggccccctggggaaagggaatgggggccccaanccttttgcacaaggggggtttt

SEQ ID NO: 42232 - DNA, 582 bp, Homo Sapiens
atgatgcatagtaaccagtgattataggatatacctgagaccatcaggaactgtcaacaaatgatacctttggatatccatcctcctcgacttatagtacagtggtgtatagtggcatttctgataaacttgaaaagacttgagtctttccactgggacacatccatttttcagattgttttgatttaggccaggtatattatcttcatttttaagagtttctttaagaaacttcatcagattgttgaaagataatttttgggacatagagctgaaagtttcagggtgccattttctataagatcttcccaaaagaaacatttaaaaagatgacatataccaccacttacttaaaaacaataaaagcaatagatttgattagtaatattattgctgtggagttctttacaaagggcttaggctgcatttccttctatagaggtgcattcttgtagaaatttgtagcatggtagatcagaaaatactcttaggttttaggcaggaaggaatatttaaacattgctttagattttcctaaaggcatttgatttgatctgttagctcccagcaaaaatatctgtt

SEQ ID NO: 42233 - DNA, 923 bp, Homo Sapiens
  misc_feature (825)..(825): n is a, c, g, or t
  misc_feature (848)..(848): n is a, c, g, or t
gagagtaaagatgctggtatcaggactttggttatgttggatgaaaaggagaaaactcgatcgtgtcgaagaaggcatgaaccatatcaaccaagacatgaaggaggctgagaaaaatttaaaagatttagggaaatgctgtggccttttcatatgtccttgtaacaagcttaaatcaagtgatgcttacaaaaaagcctggggcaataatcaggacggagtggtggccagccagcctgctcgtgtagtggacgaacgggagcagatggccatcagtggcggcttcatccgcagggtaacaaatgatgcccgagaaaatgaaatggatgaaaacctagagcaggtgagcggcatcatcgggaacctccgtcacatggccctggatatgggcaatgagatcgatacacagaatcgccagatcgacaggatcatggagaaggctgattccaacaaaaccagaattgatgaggccaaccaacgtgcaacaaagatgctgggaagtggttaagtgtgcccacccgtgttctcctccaaatgctgtcgggcaagatagctccttcatgcttttctcatggtattatctagtaggtctgcacacataacacacatcagtccacccccattgtgaatgttgtcctgtgtcatctgtcagcttcccaacaatactttgtgtcttttgttctctcttgggctctttctttccaaggttgtacatagtggtcatttggtggctctaactccttgatgtctttaatttcatttttcatttcctctcctcggtggcatttgctgaataacaccatttaagaatgctcaatgggctgntgattctttccatcacagtattngtcctggaaaactgggacattcccagagttactgccccggtcctttgagtgtcaggctctgaaatcctccaaatc

SEQ ID NO: 42234 - DNA, 911 bp, Homo Sapiens
  misc_feature (785)..(785): n is a, c, g, or t
  misc_feature (791)..(791): n is a, c, g, or t
  misc_feature (796)..(796): n is a, c, g, or t
tgaacagctggtacggtccggattcccgggatgtttttgcattagctggtaggtgactttctcaaaattcttaaattcagaaagtatttagtaaacttgaggaaggtatgaaatctggaggaggcatccaggacccaggggtttgatagctttacaggtaggatcataccacaccaaaagagcagtggacaataagactatatgagctatatgaagcttttaggaatcatttaggacagacagagccctaaacaacccattcatgacttaagttgttggctcagtgtatgctggggacaaagaaaaactaacaagccgacctgcctttatgataaattctagtgtgcttacaagggatgacttcctgaggtgtgatctgtccaccttgaagaactccacaactgaagaaggggagctgtgagaacgtggattgttctacaacttgcacagggtaacagaggaagtggctgaggcctagagtcacgttttccagttcccttcgcaaactatatttcttggaacgcgaaaggaagctttacctatttcatagaagacctggaatccataacctcagaaggcaatattattgatagaaaatgtggaaggatcaggaagttcttagattcttggatgacagatgcatgttgatgccctatggagatgtccttgtgttttgaggtcactgaggtaggaagacctgtctactcttggtttcaccactagaacagtcttgggctggatgggtatagagctgagcgctgtgatggtctgttttacttttacanacattnaaacnccaaacaaaaaaaaaaaaaaaaaggcggcgcctgatatctcgaggccagctacctacagctctgacagtgtctaatggcgataacagctgcgcttcactcgacgaatgactgatt

SEQ ID NO: 42235 - DNA, 754 bp, Homo Sapiens
  misc_feature (687)..(687): n is a, c, g, or t
cgcttcccgcgtccattccccgccgctccgcgcggcttctcgcccgcccctaccccgaggccaggccggattccccgaggaaagagcctgtcgccgcggcggggacaggagggggctggacgcttccagggaaactgaggccctggcgcgcccagcgtccgcgcgtccgggcgcagaggggccaaggctggctgagggcccgggcctgccagaggcagggagggcggggctggggcaggcgcaggggtctcccctccattacagcagaaaggccccaggtccggcgtgactccccggccgggcgacacaggccgagtcacttcctcgcccgtgcccgggtgtcctcatcgggggatgggtgcgccttccacatcctgcccaggactgaaggagccgggcccagcgagctcccgggaggtgtgtggacatcagccctgacggggaaggcgagccaggagcctgcaggcctgaaccagggtgatgctgaagatgatgaccttcttccaaggcctctagagccatcagcctgtgccaggcaccctcgacttgcctagaggcccccaaaagttgcagtccacatcagaggcagagtcagaggcctccatgtcggaggcctcctctgaggacctggtgccacccctggaggctggggcagccccatatagggaggaggaagaggcggcgaanaagaagaaggagaagaagaagaagtccaaaggcctggccaatgtgttctgcgtcttcaccaaaggga

SEQ ID NO: 42236 - DNA, 566 bp, Homo Sapiens
ttttttttttttttttttgccaatcaggacaaggccttgaaggaacgcagccttagacatcaggtgaggatgatggaggtagacagtcgactgaatgtcagctggaaaatccagtcactagttggggtttggtggccatgttttctacccagacaggccctgcttttctaggatgtggccttagagcaagaacagacccaacagccagcccttcatcctccagcgtctgccataggaatgtgagaggggtgtttgctgagcgctccgggcacggccagagggcaagtgagcatgcacggacctcttccccctgtcctgtttctcacccagcacctggggagatcggtgctaccaaggaagagagcacacagataagacagaggggaggaggtgggcatttcctacattcctccttgtttgccgctgctgagattgcagtatttattgcaatgtaaatgtatcctgaaggtggggaggaatgtttaatctaccatgtccgtgtgtcatcttggtttgtgtttttccctgtttgtagcaagactctgatgatattctcctcgtgccga

SEQ ID NO: 42237 - DNA, 649 bp, Homo Sapiens
tcccgggatccggcctgctctaccgcttttaaggacgcttatgatcacattgcgcctacccagagaacccaggtcgtctttctattttcaggtcagctgattagccaccttagttccatctgcaactttagttcccactggctgtgtaacctaacatagtcacaggctctggggactgtcacgtggacatctttgggaggccgttattctgcccaccgcaccctccgttcatcccctgccctgccgggcacctcgctctaccccaggaaaatgtgagctcgttttcctgctcggcatgtgctccccctaaggctctgctcctccctgggcctgaaagttccttctcagcctgagagggggcccttcgatctcaggcatgactcagcccggctgatgcctctgcagtgctgagtcaggatttggggccggctctcttgggtctgtccccttttcccaggtactgccttacaaagctgtggccaggaagtggccggtataaaggatgcccaaggtctttgtacgtgtgttggagttagcgtgtttgatattgttaatataataataattattttttagagtactgcttttgtatgtatgttgaacaggatccaggtttttatagcttgatataaaacagaattcaaaagtg

SEQ ID NO: 42238 - DNA, 868 bp, Homo Sapiens
ggtgatgaatttgggaacctagattttgagcgatcccagcatggttctggaatgagcaacaggtcaacagcgaaaagatttatttctgctctcaacaacgttgctgaaagaacttataataatatatttcaatttcatcaacttcggcagattgccaaagaactaaacattcaggttgctgattttgaaaattttattggatcactaaatgaccagggttacctcttgaaaaaaggcccaaaagtttaccagcttcaaactatgtaaaaggacttcaccaagttagggcctcctgggtttattgcagattaaagccatctcagtgaagatatgcgtgcacgcacagacagacagacacacacacacacacacacacacacacacacacacacacacacaccacagtcaaatactgtctctctgaaaaatgatgtcccaaaagtattttaataaggaaaaaagcattaaatataataaaactaattttagaaagtgataaaggtctcccgaatgcagtaacctcaccactgttaatcacaggtggactccacgcaggcctgaaggggaaaaggatttccctttgagggccaggggttccgaaaaccaaccctttggggccaacattagccaagaacccccatttttcttttagaaaaacaaacccctaacacatcattccataatacactcgcctggtccgggccgcccctccgggccccctcggaaaaaagttttttttaaaacccctttcctttttgggggcggcgggggccccaattaagggaaagtgggaaacgggggcccataagctgggtttcccccaaggaaaaaccctgggtccatgcccccaaggggctcggaattcccc

SEQ ID NO: 42239 - DNA, 435 bp, Homo Sapiens
ggtgtgggtataatactaagttgagatgatatcatttacgggggaaggcgctttgtgaagtaggccttatttctcttgtcctttcgtacagggaggaatttgaagtagatagaaaccgacctggattactccggtctgaactcagatcacgtaggactttaatcgttgaacaaacgaacctttaatagcggctgcaccatcgggatgtcctgatccaacatcgaggtcgtaaaccctattgttgatatggactctagaataggattgcgctgttatccctagggtaacttgttccgttggtcaagttattggatcaattgagtatagtagttcgctttgactggtgaagtcttagcatgtactgctcggaggttgggttctgctccgaggtcgccccaaccgaaatttttaatgcaggtttggtagtttaggacc

SEQ ID NO: 42240 - DNA, 667 bp, Homo Sapiens
agggaacagcaggagattattctcaccaaagttatgtcaagccccattggtcccagagtagctgaagggaagccaacccccctgcagcacaaataggccccccagtcccagccgtgtgctggcagatagggttgtattatttcttcttaccccatgcctgaccaagggaggtcaaaaggagaaaagtataggctgtggacaataactgatgaatatagggcccagatggaccaagtggggccggggagggatgaataaacaccctaccccgtgccctgtctttggtgagcagcagccctggggtcacagacatggaagggaccaccctggggctgactgcttttctgtgctgttggttcccaaaactagaaagaaggaagcagggagcggtgccccaagcatggctcctgccaacacctatttatttccttgtttgtgctatgctgggcaggccttctcttgtcccttataggtaccttggaggggccaggggctgaggaaggccggacccaggttccaggggcgcaggcagtgcggcttttggctgtgtacatagggtgctttattctccacagagtgatacatgctaaggtgggttgggcttggaccgatgtccccatatgtacagaactgaataaagtgggtctctgagaaaaaaaaaaaaaaa

SEQ ID NO: 42241 - DNA, 800 bp, Homo Sapiens
tctagcgaggtgacagcgtagaaccagtggggagacgcagaaattgtggtaaaattccttaatgtttaagggaaagtaactttaagagatttttggaaaagctttatatacattcttttcaaatttcagtacaaatgaaaaagtggttttaatcagtgatttagtagactttgagcaactgtgcacgcttcagtttaatagcatggtttggccagtgtattactctcaagtccttttctcaatcaacttctatcatcaaagcaattgtttcattatagataaataaggacattttttaatttaaaaattcatgtctgagttgactttcataagggatttcattttttcctcaacattcttaaagccttttagtatttgacggttcttttttcccaggacatttgctaggaataacaacgtttcaatgtttttaatctacttgagcaacactatcgtgtcttacaaaagttgttcatatgtaaatgatcatcacatttcgtgaattgaggccatgttcaggtgctaaggaagttcgccttttacacagaagattgagaaaatttcctagatataaatacagataaatcagacgttacagtggtgacgtagtaaccatcatggcaatggaaaggagtccaattcatagcctaaaacttcaaatgtattcttaggagtcagattttactgaatattttacccacaatagctgcctattttgttttaataaaatatatattaagtatatatataaaacttttcttttaaactgtaaactatggggaattaatttttcttttacc

SEQ ID NO: 42242 - DNA, 710 bp, Homo Sapiens
gtccgaactatgggaattattttctttacatagttgcgcacacacacaaacatatatatatatttaaaatatattttgtttcttttgccacctactcctaactttttgtttggtttttaaattaaatattaattgaatagacttatcttaatcatgtgaactgaaaatgggggcatggtggtcatgaggaggaaacatttagggaaattagattataagtaaaagtgtgggcatattctcctcttttctacaaaggttttcaaatggttcctgaggttttttgttgttgtccgtgttgttactgttgttcttgtcatcaggtttgattttggtccttgccctttccttctagttctccttttattaataggaaggcaggcaaaagccccatttatgtgtgtgttttcccctcagacagctttcatccactgctctgcactagaattgcacaaatcttcatggtgagcaattttaagaaatgttagtgaaaggtagaaattatttcacaaatcagtttctctggtccttcatattaataataatatttggcttcccattgctctttggagttgtttattaaatatgtgtttttgacaacctcctcattagtttcttaaatgagtactggtttgtaaagaattatcaacattatccattccatttatgaagaagaggagaacagctaataaaactgtattgtaaaaaaaaaa

SEQ ID NO: 42243 - DNA, 609 bp, Homo Sapiens
ggaattggatcacaatcatgtagcagaatggcacccagaccactgcccaccagtgacggacatgcacgtggcagatcatgatttccagcccacggagccagcatttgaaccttgtataattaactttcagttatgatttcccatcgacattttctttgccctgtttgtagctgattgttgtgttttataaatcttctgttaaggcagaagggtgattatgagtggttcacagcagcccttataagctgggccagaaaatttcactaggtcagtaatttaaaccttggatcttcaaaaaataaaataatgtgaagcaaaaccaactaaaaagtgattcttgcacatgaactgtcacatgtttaaaaatgtgttttttagagagcctcagtcttactgatttcaaacacttttttcttctgtgtattgcttttaagagagccatcagttagctatcagactctaggttgatgcattttgtacttagctgtactgtgtgatatttttcattattttaggacgccaacatgagacctgtaataaaatatgtaatggggttgaaagctggggaggaggatctactgctgtacagctaataaatcataacggatt

SEQ ID NO: 42244 - DNA, 560 bp, Homo Sapiens
gtgcggccggattcaccacaacatggcaaatctttttataaggaaaatggtgaaccctctgctctatctcagtcgtcacacggtgaagcctcgagccctctccacatttctatttggatccattcgaggtgcagcccccgtggctgtggaacccggggcagcagtgcgctcacttctctcacccggcctcctgccccatctgctgcctgcgctggggttcaaaaacaagactgtccttaagaagcgctgcaaggactgttacctggtgaagaggcggggtcggtggtacgtctactgtaaaacccatccgaggcacaagcagagacagatgtagaccctttccctccagagtcacgcacatactcgtcatcgcatcacttgggagaatggttgtatcttatggaaggaattatcacatcaaggagtcaggggaaagtgactggaagcaaacgccctaaaagttacccatcacgtttcagtgtaaatgagtaactatagaagacattgcgttatcttatttccaaaacgttccaactaaaaaacattttcctattaaaata

SEQ ID NO: 42245 - DNA, 910 bp, Homo Sapiens
atgatcttcctcctgccaggggagagccacccacaggccatgtccagccccacttccctcagcccccagggcttccttctggcccctctgaggattccctagggctgccccgcagaggggcttccccaagctctgttttgaagcctgcaatgtggaaaagtgagaagtcagagggaacaggacaggtgcagccgggctctgaggccacacctcacacctcgctgttccccaacatcccctgagcagtgtgagctcatctcaccagatgagaagaggccctgtgcatttcttttgtttgtttgttgctgttttcccccacccatccagttctcctcagcaaagcaaattccttaacacctttggtggagaatttcttacccagacttggggctgtgatgcccttcagtgcgtggtgagtgcagcgtgtgtgcgtgtgcctgtgtgtgaacctgggggccatcctggtggcctgggagcgtgaggagaggccccctgtgtgctgggtgagtggtgggtgtggggtcaatgcagtgaggctctctgggtgaggctcccaacctggcagtccccagcctcccagcatctgtgagcgtctgttggactttacagaagagcctcatcctgtctgcccctcactctgccctgggatcaacatcttccgagtccttccttgggggaaatagcagagcccccacttaactccataaactgctttccatttccgcagccccatttctgaattgtttgagggtgtccccgttccgttcccagggtcccccccaggtccccctccttttcctccttgggccctcctcctcgggtccctttaaaccttcccaactttccaagcccccgggggtttcagtttttcagggggaaataatggctgggtttccccacaattatagca

SEQ ID NO: 42246 - DNA, 722 bp, Homo Sapiens
tccgtgtcttggtggctgtkgggaacggaaaaggagctgcaggtttttctattgggaaagctactgatcggatggatgctttcaggaaagcaaagaacagagcagttcaccatttgcattatatagaacgatatgaagaccatacaatattccatgatatttcattaagatttaaaaggacgcatatcaagatgaagaaacaacccaaaggttacggcctccgctgccacagggccatcatcaccatctgccggctcattggcatcaaagacatgtatgccaaggtctctgggtccattaatatgctcagcctcacccagggcctcttccgtgggctctccagacaggaaacccatcaacagctggctgataagaagggcctccatgttgtggaaatccgggaggaatgtggccctctgcccattgtggttgcgtccccccgggggcccttgaggaaggatccagagccagaagatgaggttccagacgtcaaactggactgggaagatgtgaagactgcacagggaatgaagcgctctgtgtggtctaatttgaagagagccgccacgtaacctctctggccttgtgcagccagttcctgtgctgccctgcacctaggagagactcagcccctcacagcttgggatgttaccttgccttttgtttgttttgagggaagtttaatctttaaactctttggaaataaataattatagctttca

SEQ ID NO: 42247 - DNA, 913 bp, Homo Sapiens
  misc_feature (607)..(607): n is a, c, g, or t
  misc_feature (615)..(615): n is a, c, g, or t
  misc_feature (770)..(770): n is a, c, g, or t
  misc_feature (799)..(800): n is a, c, g, or t
  misc_feature (803)..(804): n is a, c, g, or t
  misc_feature (840)..(840): n is a, c, g, or t
  misc_feature (906)..(906): n is a, c, g, or t
tttgaagctgcagtcaaatccatcaaggcagcctcctccacggagaagttccctgatggtttctggctaggagagcagctggtgtgctggcaagcaggcaccaccccttggaacattttcccagtcatctcactctacctaatgggtgaggttaccaaccagtccttccgcatcaccatccttccgcagcaatacctgcggccagtggaagatgtggccacgtcccaagacgactgttacaagtttgccatctcacagtcatccacgggcactgttatgggagctgttatcatggagggcttctacgttgtctttgatcgggcccgaaaacgaattggctttgctgtcagcgcttgccatgtgcacgatgagttcaggacggcagcggtggaaggcccttttgtcaccttggacatggaagactgtggctacaacattccacagacagatgagtcaaccctcatgaccatagcctatgtcatggctgccatctgcgccctcttcatgctgccactctgcctcatggtgtgtcagtggcgctgcctccgctgcctgcgccagcagcatgatgactttgctgatgacatctccctgctgaagtgaggangcccatgngcagaagatagagattcccctggaccacacctccgtggttcactttggtcacaagtaggagacacagatggcaccctgtggcagagcacctcaggaccctccccacccaccaaatgcctctgccttgatggagaaggaaaaagctggcaaggtgngttccaggggactgtaccctgtaggaacnngannagagagaaagaagcactctgctggcgggaatactcnttggtcacctcaaatttaagtcgggaaattctggctgcttgaaactccaggccctgaaacctttgnccaccca

SEQ ID NO: 42248 - DNA, 1006 bp, Homo Sapiens
  misc_feature (296)..(296): n is a, c, g, or t
  misc_feature (480)..(480): n is a, c, g, or t
tcccgggatagaaagacacttgtgacttctatagacaatttttttttcttgttcacaaaaaaattccctgtaaatctgaaatatatatatgtwcatacatatatatttttggaaaatggagctatggtgtaaaagcaacaggtggwtcaacccagttgttactctcttaacatctgcatttgagagatcagctaatacttctctcaacaaamatggaagggcagatgctagaatcccccctagacggaggaaaaccattttattcvgtggattacacatcctcttgttcttaaamnagcaagtgtctttggtgttggrggacaaaatcccctaccattttcacgttgtgctactaagagatctcaaatattagtctttgtccgggcccttccatagtacaccttagcgctgagactgagccagcttgggggtcaggtaggtagaccctgttagggacagagcctagtggtaaatccaagngaaatgatcctatccaaagctgattcacaaacccacgctcacctgacagccgagggacacgagcatcactctgctggacggaccattaggggccttgccaaggtctaccttagagcaaacccagtacctcagacaggaaagtcggggctttgaccactaccatatctggtagcccattttctaggcattgtgaataggtaggtagctagtcacacttttcagaccaattcaaactgtctatgcacaaaattcccgtgggcctagatggagataatttttttttcttctcagctttatgaagagaagggaaactgtctaggattcagctgaaccaccaggaacctggcaacatcacgatttaagctaaggttgggaggctaacgagtctacctccctctttgtaaatcaaagaattgtttaaaatgggattgtcaatccttaaataaagatgacttggkttcaagccaatgtgawttwtttgggttggwgcggscgcagcccytcaawtyycgccaagmgrtgtttt

SEQ ID NO: 42249 - DNA, 868 bp, Homo Sapiens
  misc_feature (804)..(804): n is a, c, g, or t
cttttatctgcagaacatcgatatgtatatcattctacagaataatccagtattgctgattttaaaggcagagaagttctcaaagttaattcacctatgttattttgtgtacaagttgttattgttgaacatacttcaaaaataatgtgccatgtgggtgagttaattttaccaagagtaactttactctgtgtttaaaaagtaagttaataatgtattgtaatctttcatccaaaatattttttgcaagttatattagtgaagatggtttcaattcagattgtcttgcaacttcagttttatttttgccaaggcaaaaaactcttaatctgtgtgtatattgagaatcccttaaaattaccagacaaaaaaatttaaaattacgtttgttattcctagtggatgactgttgatgaagtatacttttcccctgttaaacagtagttgtattcttctgtatttctaggcacaaggttggttgctaagaagcctataagaggaatttcttttccttcattcatagggaaaggttttgtattttttaaaacactaaaagcagcgtcactctacctaatgtctcactgttctgcaaaggtggcaatgcttaaactaaataatgaataaactgaatattttggaaactgctaaattctatgttaaatactgtgcagaataatggaaacattacagttcataataggtagtttggatatttttgtacttgatttgatgtgactttttttggtataatgtttaaatcatgtatgttatgatattgtttaaaattcagtttttgtatcttgnggcaagactgcaaacttttttatatcttttgggtattctaagccctttgccatcaatgatcata

SEQ ID NO: 42250 - DNA, 840 bp, Homo Sapiens
gccaagggccacattgcagccttaaggaagctgaaagaacagtgtggctgccggatctacaacctgggcacgggcacaggctattcagtgctgcagatggtccaggctatggagaaggcctctgggaagaagatcccgtacaaggtggtggcacggcgggaaggtgatgtggcagcctgttacgccaaccccagcctggcccaagaggagctggggtggacagcagccttagggctggacaggatgtgtgaggatctctggcgctggcagaagcagaatccttcaggctttggcacgcaagcctgaggaccctcccctaccaaggaccaggaaaagcagcagctgcctgctctccagcctctggcaggaactcagggccctggagctgctggggccaagccaaggcctcccctacctcaaaccccagctgggcccgcttagcccaccaggcatgaggccaagggctccactgaccaggaggccgaggtctctaactcttatcttccacagggtccaagagttcatcaggacccccaagagtgagtgagggggcaaggctctggcacaaaacctcctcctcccaggcactcatttatattgctctgaaagagctttccaaagtatttaacccataaaaacaagttttcttacactgggaacacaaacacaaacgaaccaaaacaaaaacaacagaaacaaaagaaccgcaggggcactatcaacgcgcgcggaaaaagacgagcaagaacagagacagcgggacaaaggggggtctgaggaccagagcatagtgcaacagaggggaaacacgggcgagcacaccagaagggcggcgcgcac

SEQ ID NO: 42251 - DNA, 777 bp, Homo Sapiens
ttcggagaatccacaatggagagtccatggcttcagaaagaatcaaactgatatccacagtctttatctttctgaagccattcggagaatccacaatggagagtccatggcctaccttttccgaaacatcactgtggatgactagctttcacgagggtctcgaccctggacctcctgagggaaacatggaaaaagcagtgccatgagtgatacagtgtttccttgcaagggaggactcgaaacagcctggagttagatatcttcttttgcccggattgatggggaggagggattaaaagagtcaggaagaagacagagctaatggataaatatcataacatggccttacatgtctgctgtcatcagccctgttccttaaaagttctagctgctttcttaaaaataatctgaaaatcttattgatactaaagaggagttaaaggcacataaagtcttaactctataatgttcatttagttgtttcagctccagggaaatggaggtattgatgttgaacctggttagggaagctgagcgcctgtggccctattactatccagttggcctctcccaaatcaacttcaagtcttttatagagaatcgtatttttctttcagaaattgttatgcctacagccattgaaaaatgaagcattcatgttgttacatcttccaaggatgtcagattagaaaatagcatcccacctctgggtatctgagtggctctgaagttgcaaataaaataatttgttgtcaaaaaaaaaaaaaaaaaaaaaag

SEQ ID NO: 42252 - DNA, 834 bp, Homo Sapiens
gggtgtgaaaacagtttggaccctgggggttggactgttattcagaaaagaacagacggctctgtcaacttcttcagaaattgggaaaattataagaaagggtttggaaacattgacggagaatactggcttggactggaaaatatctatatgcttagcaatcaagataattacaagttattgattgaattagaagactggagtgataaaaaagtctatgcagaatacagcagctttcgtctggaacctgaaagtgaattctatagactgcgcctgggaacttaccagggaaatgcaggggattctatgatgtggcataatggtaaacaattcaccacactggacagagataaagatatgtatgcaggaaactgcgcccactttcataaaggaggctggtggtacaatgcctgtgcacattctaacctaaatggagtatggtacagaggaggccattacagaagcaagcaccaagatggaattttctgggccgaatacagaggcgggtcatactccttaagagcagttcagatgaagatcaagccctatttgactgaagaaagacactcgccaatttaaattgacaccagaacttttgtaccttttcagcctcttaaaaatggtaaaatgtttaccatgttttatttactttgggcaccaattttaattttctacaccaataaaaggtttttcttaaaattggaatttttttaaccgcgtaaacttattataaaaggggggaacaccttatataaaaatgggtaagagtttttccattccttgggttccggtctccaatattttaccttgggcccacgaaaaaaaatttttttc

SEQ ID NO: 42253 - DNA, 721 bp, Homo Sapiens
gggtggcaattcggacgaggctgggtttttcttgtggtgaaagctggccctgcctcctgggaagatgaggttctgagaccagtgtatcaggtcagggacttggacaggagtcagtgtctggctttttcctctgagcccagctgcctggagagggtctcgctgtcactggctggctcctaggggaacagaccagtgaccccagaaaagcataacaccaatcccagggctggctctgcactaagagaaaattgcactaaatgaatctcgttcccaaagaactacccccttttcagctgagccctggggactgttccaaagccagtgaaatgtgaaggaaagtggggtccttcggggcgatgctccctcagcctcagaggagctctaccctgctccctgctttggctgaggggcttgggaaaaaaacttggcactttttcgtgtggatcttgccacatttctgatcagaggtgtacactaacatttcccccgagctcttggcctttgcatttatttatacagtgccttgctcggcgcccaccaccccctcaagccccagcagccctcaacaggcccagggagggaagtgtgagcgccttggtatgacttaaaattggaaatgtcatctaaccattaagtcatgtgtgaacacataggacgtgtgtaaatatgtacatttgtctttttataaaaagtaaattgtttataaaaaaaaaaaaaaaaa

SEQ ID NO: 42254 - DNA, 721 bp, Homo Sapiens
  misc_feature (682)..(682): n is a, c, g, or t
gggaagattcaatatacacaattaagtactacaactatgacaatgcttgacctacatttctaaaataaaaattcacattttttgataaataaactacagttttaccagaaattactatctaaatgtgtattagcagtattttttaaggtgaaattgccttggtatctaatgaatgtgtagacagggagataaaatgaaggattgccagactagttagaatagaatttaggattaggttagttttgaaaaatgatgttgtaatatatgggttctaacacatcctaccataaaaactggaggagatatgtgtaacctggttaatttgggatggtggacattttgggctaatactgacaaaatacatcttaggactagtatacatgtgacacggattgctaggaggaatgaaaaactaaactgtatagtttatattccgtaaaccattttataatgttcaaagattaggttttgttattgatagtattaaatacacagtttctcttaacagtgatgggtgaaaacattttaccggattatggaatgtttaccagaacatgttttgattcttgaatgtacataataatgccatctaacttatttacgttcttgtttacatgtgggagcttttgttttcaaaaattattttgttaaaaaatctcaataaagatttattattgttaanaaaaaaaaaaaaaaaaaaggatacgcggcggccgcaagc

SEQ ID NO: 42255 - DNA, 527 bp, Homo Sapiens
  misc_feature (410)..(410): n is a, c, g, or t
gcggccgcgagcggggcgggggctgccggtgccctccgcaggccgggcctcctgggcgcccctcggtgctgcaggctggggggccttgggtacctgcagagccttttctctgaattccttatgtccggtgggccagaagcccgtcctcctatgctggtggaaggcggaggaccggagtccctgcagaaggccccgtgcactcgggggcctccctcacatcccgtgccccctgcgctggccttcacagtaggtaatggctccggcccgggtgttcgctgtccacggaacatggcagaggggcaccccggcccggaaagacgccagagccagcaggggctgtttcgggccgcgtggctccccgggtctcggccgtctcccctcttctgcgtctgttccgtgacttcgcctgngtgggatgtaccgcaggtgcatcgcgtcgaggtggggcacggccgccggcaagaaacccaccctgtccggaggcgggcgtgagacaagcccagcccgcacgcgctcatctttcttcg

SEQ ID NO: 42256 - DNA, 596 bp, Homo Sapiens
tttttttttttgtaaactgtatcaaatctgtatatgttgtaataaaacttatgctagtttattggaagtgttcaagaaataaaaatcaacttgtgtactgataaaatactctagcctgggccagagaagataatgttctttaatgttgtccaggaaaccctggcttgcttgccgagcctaatgaaagggaaagtcagctttcagagccagtgaaggagccacgtgaatggccctagaactgtgcctagttcctgtggccaggaggttggtgactgaaacattcacacagggctctttgatggacccacgaacgctcttagctttctcagggggtcagcagagttattgaatcttaattttttttaatgtacaagttttgtataaataataaagaactccttattttgtattacatctaatgcttcaagtgttgctcttggaaagctgatgatgtctcttgtagaagatggactctgaaaaacattccaggaaaccatggcagcatggagagcctcttagtgattgtgtctgcattgttattgtggaagatttaccttttctgttgtacgtaaagcttaaattgcttttgttgtgac

SEQ ID NO: 42257 - DNA, 581 bp, Homo Sapiens
ttagcagtttatttatgaaaatagcgtattatcacttgtcaaatcattgaaattcatttggggtcaaagacttgagtgacccagtattgagccatgaataatttagtgtaacctgtattacaagtacattgatgaattctgtatcttctttggtttcctgtatctttttaatcaagtctagaaactatgttcatcagtcactcatttttaaggtcgggagttagattttatgatagaattatgactgttagcttttctccttatagcatcttagtcttagaaattggtgggttgtaataatcaagggcttcattccttttatgtcatttctagacagttttgaatctaggttaataacactttatttataaagcacctcaatgtcctgtgaacactaattattttaaatgtgttaatactgtgcctttgatttgttagctttaaagttagtttaagacttttacactgccagtattccacatttggtgaaattaatacttttttaaagggtccaaataaaataattttctaatgtgtatatctgaaatttgtaataaaatcaacttcatattttaaaaatt

SEQ ID NO: 42258 - DNA, 584 bp, Homo Sapiens
agagagtaactcatattctatcaattcaagtattcttactatggttgctttccctatttgttcaatagactgataatactggaatttatagagtttgagccattacaacttttgtgaggatgtgtttcaaacatttctggacaaatcttattttgtatttctggaagaatgtagtaatcttctagaccgcttaaaaccaatgctcccaagctgaatattcttgagaaatttgtttttattatgccatttgacatttcaaatcagtgctcatatacagtaaacttgtgatagaaattgtattttattgctttttggattataattcatataaatataattacttgaatattgtttgagatcattaacatgccagggcagttcccactgatttagatggtccaagataatctcattcaggaggcttgaaacattaatggtttagtcttgtgaattttaacagttctctgtcatcgtttaacaaaaccaacaactgacacaactccttaagctgtggtttcagtctctgctagttcatattgcatgtttattttggacagtcttttgttaagcatggtgcttgtact

SEQ ID NO: 42259 - DNA, 498 bp, Homo Sapiens
  misc_feature (409)..(409): n is a, c, g, or t
  misc_feature (426)..(426): n is a, c, g, or t
  misc_feature (448)..(448): n is a, c, g, or t
  misc_feature (465)..(465): n is a, c, g, or t
  misc_feature (476)..(476): n is a, c, g, or t
  misc_feature (487)..(487): n is a, c, g, or t
  misc_feature (492)..(492): n is a, c, g, or t
atttttttccctggaactcaataactcatttcactcggctctttatcgagagtactagaagttaaattaataaataatgcatttaatgaggcaacagcacttgaaagtttttcattcatcataagaactttatataaaggcattacattggcaaataaggtttggaagcagaagagcaaaaaaaagatattgttaaaatgaggcctccatgcaaaacacatacttccctcccatttatttaactttttttttctcctacctatggggaccaaagtgctttttccttcaggaagtggagatgcatggccatctccccctccctttttccttctcctgcttttctttccccatagaaagtaccttgaagtagcacagtccgtccttgcatgtgcacgagctatcatttggngtaaaagtatacatggngtaaaaatcatattaagcatcngattcaacttatatttncaattcatctnctcccttcccnttctnccactt

SEQ ID NO: 42260 - DNA, 619 bp, Homo Sapiens
ggcacgagggtgtttttaacagcccttcccctggacggtgcggccatgagggcctcatgttacggcattgccttttctttctgtggatccagtatcttcctcggctttttagggagcaggaaaaatgcgtctgagagcaactctttttaaaaacctgccctgttgtatatagctgtgtctgtttcaccgtgtgacctcccaagggggtgggaacttgatataaacgtttaaaggggccacgatttgcccgagggttactcctttgctctcaccttgtatggatgaggagatgaagccatttcttatcctgtagatgtgaagcactttcagttttcagcgatgttggaatgtagcatcagaagctcgttccttcacactcagtggcgtctgtgcttgtccacatgcactgggcgtctgggaccttgaatgcctgccctggttgtgtggactccttaatgccaatcatttcttcacttctctgggacacccagggcgcctgttgacaagtgtggagaaactcctaatttaaatgtcacagacaatgtcctagtgttgactactacaatgttgatgctacactgttgtgattattaaactgattatttttcttatgtcaaaa

SEQ ID NO: 42261 - DNA, 893 bp, Homo Sapiens
  misc_feature (853)..(853): n is a, c, g, or t
  misc_feature (877)..(877): n is a, c, g, or t
tccggaattctcggcataaaagcaactcaacactcatggtcaagtgtgattagactttcctgaaatctctgccattttagatactgtgaaacaaactaaaaaaaaaaaagcttttgttttgtatttgtttactatgagtcgttatttaatttctcttgaaaataatttcctcaaagcccaagtcaataaatgttatcagccagtcttccaaaatggtcataaactttataaactgctttgggtaaactgagcagaaggtgatacacagaagggaaaatgtgcactcatgctagtgtgaatttggtaagttgcgtgactctgcaggctgtttctgtattattttcacactcatattgcttaaatattacatattagggattgtaagaaaactttaattaaaaattaaagactatatataattaaactactctgccctggacactctctgagaaacagatctactgggccctttttcatgagccattaggtggaagacagcaaagagatcttctcaagtgcttaggattacctctcaacacacagcaagcatgtccctgcctcccatgaatcttaccatgtaaatccaaatctctgcaatcctgtggcaccaaccagtggtgctcattctattgtttaaaaatggccttcttggctgggcgcggtggctcactcctgtaatcccagcactttggtaggccgaggtggacggatcacccgaggtcaggagtttgagaccaggctggccaacaaggtgaaaaccctgtctctactaaaaatacaaaaaattagcccgggcatgggtgggtgcggcacctggtaagttccagcctactttggggaaggctgaaagcanaaaaaaatcaactttgaaatcctngggaaaggggggaagg

SEQ ID NO: 42262 - DNA, 772 bp, Homo Sapiens
gggcagtcagcattgcacctgctatggagaagggtattcctttattaaaatcttcctcatttggatttgctttcagttggttttcaatttgctcactggccagagacattgatggcagttcttatctgcatcactaatcagctcctggattttttttttttttttttcaaacaatggtttgaaacaactactggaatattgtccacaataagctggaagtttgttgtagtatgcctcaaatataactgactgtatactatagtggtaacttttcaaacagcccttagcacttttatactaattaacccatttgtgcattgagttttcttttaaaaatgcttgttgtgaaagacacagatacccagtatgcttaacgtgaaaagaaaatgtgttctgttttgtaaaggaactttcaagtattgttgtaaatacttggacagaggttgctgaactttaaaaaaaaattaatttattattataatgacctaatttattaatctgaagattaaccatttttttgtcttagaatttccaaaagaaaaaagaaaaaggtgttctacctgtttgcatcaaaggaaaaaaagattttttttccaagggccaatttttttatcttttcccaaaaaaaatttgttaatggaacatttacaaaaatagaattgacctccagcccggattaggcataaattttggttgggaaattaacccccttcccggggcataaaaaagtctttttttctaaaaaaaaatttggaaaaggcctcgccttttt

SEQ ID NO: 42263 - DNA, 1047 bp, Homo Sapiens
acgcctgtaatcccagctactcaggcgtgtgccaccatgcctgtaatcccagctactcaggaggctgaggcaagagaatcgctttaacctccgcctcctgggttcaagcaagtcttctgcctcggcctcccgagaactggaagaggaggcaacagtatttggggcaagaagtttgaggatgaatacagtgaatatcttaagcacaatgttagaggtgttgtatctatggctaataatggcccgaacaccaatggatctcagttcttcatcacctatggcaaacagccacatttggacatgaaatacaccgtatttggaaaggtaatagatggtctggaaactctagatgagttggagaagttgccagtaaatgagaagacataccgacctcttaatgatgtacacattaaggacataactattcatgccaacccatttgctcagtagctatgatagacctggacaaataacttgacaaattgctggaacacacttattgtggtttacccggttttaattatgtcagagattgcatcatccttctgcttgtttacaactatgatcttctatgaaatggtggtaccaaggggcgcccaacagcttttatccccattcttagagcatattctttattataatgattatccaacatatttctttaattttaatacaaaaaatacatcatttaatttttgttacatatgaacattcatttttaaaggctcagcctccagtgcaggcatttttgaggggcctggataacatattcctccaccgcaaggccgaatcccggaacgcgtattttccaataaaatgtaaaaagtgctcgccgctagccgcgtgacttctcacccgggggcgcggccctgaaatatcccccccgcgcggcgctaatttaccgcggtcaatcgatttttctgtatcccgggcggacacctaaccgatgaaaaacatacgccagactccgcggaaccgcgctcacccctttgttccccccctgccgccgcggcccgtgtatccgcggcgcgtccggcgcggatatttaca

SEQ ID NO: 42264 - DNA, 677 bp, Homo Sapiens
  misc_feature (651)..(651): n is a, c, g, or t
ttttttttttttttttttgcatgggaaaatcttctttacaaaaaggaacctgaatatgattttcaaggcttagaacatggggattatagagaaattcttgaaaaatgtggggagttggaaactaagttggatgatgatagggtgtggttaaatggagatgaagaaaagggttgtctcctaaaaaccaaaggtggaataacaaaggaagttgttcaaaaaggaggagaagctgagaagcagactgctgaatttaaattatctgctgtaagagagagtttggactaccttcttgactttgttgatgccacacctgagtttcagagattccacttcacactgtgtgagttctctgatgactcataagacgggaactccgagagaagctttctccacattcagaacatttatagggtctctctcccgtatgcgttctcaggtggcgaatccgattggagctgtgagagaagctgtctccgcactcatgacaggtatagggtttttctcctgtgtggattctctggtgcctgattaaattggatctatgagagaagttttccccacaaagggtacatttatacggtttctctcctgtgtgtgttctctgatgtctggtgaggtgcatgccctgccggaagcttttccacaagtcanacattcaaagagcttcttctctgcct

SEQ ID NO: 42265 - DNA, 584 bp, Homo Sapiens
ccgtcgaccccgcgtccgggcagctcatctcatgtcctgaagttggaatttaaataattcctatttgcaaattagaatgacagtgttggaatttggaggcagtagttgagcatattctctagtatatagctacacctttaataaaatgaaggaatgtcttcaatcatattttagtgggctatttataaatagtcttgaagtcaatttagtttatttatttaaaagataatgcatcctgaaagggatcatttatgaataacaatctgaagtcttttcataaaaaaaattaataaactttagttgtacatttagccagtgttatttgaagtatgtaacttttaaaatattaagtgtcttgtatgattagaatatgtgaatgagtaacttattttgtatcaggaatgttttggtactgtgttttcactcaaaccactgacttaacagatactgctgtgtataacatgtactaaatattacagttattgtgcataacagattgttcctcttatatttgtgtgtatacaggcaattcatgttttaatgtaaataaataccattttgcagtttgttttttaaaaaaaaaa

SEQ ID NO: 42266 - DNA, 706 bp, Homo Sapiens
gtccggatctcttcccatttatcagattaccttttccacaaaagaaagtctctaaaatatcacagatttacctagagggcaacatttagatacaggaaaattttacatagtgttttgtcttaggattagacgtgaccagattgatcctgtttgattttggagagatcctattctaacaaatactctaaaatgataaaattgaggtacaactctcttaaaagagtatggataactatattttctggattctggaggttgataaccatatgcacttaacattatattctataaacattaagtagtgccagttatgagattcccagttcttactaaattgtattagcaggagctggtaattacttgtattatcacatgtaactaataatttgaactatacttgaaggaccgtgttgatgtcaggtatttacagtgcttggaagatagcagtattattagcataagctgcatacgtaatattcagtaactgccatattatataacaaatttacattcacaaattcagtatcctgttaagtgtcatattcttgtaatctgcattctccaggagttttatgtgtttaatagatgaatttattttatttctaaaggtattcaaatgtttcagcaccatataatagaaatacccaattatattctagttcctttatgtcctgtacatcattctctgcttggatttccattattc

SEQ ID NO: 42267 - DNA, 687 bp, Homo Sapiens
ggaaaagggaggaatatattctgctggaagcccatgaaccatcgctgaggttctgatacaacatagagttttttccaaggagtgaatgtggtttaattactggactctcttagcacaggaaggtggaaacaaaatgccaggcctctgctctgaagagcaaaactgctgtcgctgcagtatctgataccagacatccacatatccacaagaagtgcctcttaggtctgtgacagagagtgtgtctccattcctcagttcccagaaaggggagaggtttggcctaaaaagcatgtagatgggggagaaatgggtggggggagaggaacagccattaacacagtatcatgtttaacaagtatagccttgatttcagtagatgtaatggaagccaaattaaattgatacagaacccatttctcagagtctttttttttttttgagacagagtctcgctgttacccaggctggagtgcaatggcgcaaacttggctcactgccacctctgccccctgggttcaagcgattctcctgcctcagcctcccgagtagctgaaaatacaggcacctgccaccataccccgctaagttatgtatttttaataaagatggagtttcacctggttggccaggctggtcccaactcccggactcggggatccaccgcctcaccccccaagggtgggttca

SEQ ID NO: 42268 - DNA, 844 bp, Homo Sapiens
  misc_feature (41)..(41): n is a, c, g, or t
tgaattcttccctgaagccactcgaagtgaagaagacttanagaaataccccaagtacccctgggggagagaaatctatactttagaaggtgttgtggatggagctccatattccatgatttctgacttcccttggctgaggtcattacgagctgcagagcccaacagcttcgctcgatacgactttgaagacgatgaagaaagcactatctatgctcctagaaggaaaggacagctgtctgcagacatctgtatggaaacaataggagaggaaatttcagagatgcgtcagatgaagaagggtgtatttcagcgagtagtggcaatttttatccactattgtgatgtcaatggagagccagttgaagatgactacatttaattggtccctcctcctttccagctattttgtcagaaagcaagtagggccatccagctgccagagtgctccacagggacttgaggcatgcagttgggaggtcctggctcggtttgctatatagggaatatataaggaacatcgaaattgtatacaaagatttgtacataaaaaatatacaaagacgcttcctaaagtaccaactttatatcatatgtttatacaatttaatttaaaaattcattttaaggaagacagataatttgaaagacttttgtttttcttgacttaattcatgaagtatcattttttgactgagtctccatttacttcattcttaatgattattgtcatccctttaaatctgggccctttttcttctttgagcgaacctggtttgagtaaacctgtttgaaaaggggtttggggcctttttggggctttttttgggggtattaaaaaccc

SEQ ID NO: 42269 - DNA, 633 bp, Homo Sapiens
gcacgagcatcccagaaaaaccggtcagtgttccttcctccctgatccttaggtttctgaaatagggttctgttacatcctcttcgatagcctgtttaaaatgtttagaaggtctggagctcaaaaatgcgttcttccacattgataatttagtaaactgagaacattgacatcactacagggcagcataagaggttgcttacatgtggtagcagctctggtttgattcaagttgctaccatgtacattgacagcacatataccataaccagcgtgttgggttgaattgcactttctacctttgtatgagatttacagactttccttctgggtttgtatcatgaccagaggggtactatagggttggtttatactgcaatatagaggatcagaagccatttgatttggtaggtgtgtcagaagggagaatgatggcagacgaactgctggaagaggtcagaagatagccatgctaaaatgcaattatatcctcatgtttatcccaaactaatcttggacttttccactcattagctttgttttgcccttgtttcccttgaaggtttaagttcaaccatattctgtcaactgttcagtttcagtggaatcttgtatttctggttcattataaca

SEQ ID NO: 42270 - DNA, 727 bp, Homo Sapiens
atatctttttttttttttttttttttttttactttaaaaatggttttattgaatattaatcatttacaagtacagtgagctagacattaagccaaagcacaattgcaggttaaatataatcacaaagatgtcttaaatagaaacccaccaggcaggcaggttaagttccttgatgccctcctttggaaagaagtggagggtgagggaaaaaggacttccatttcaggtgacgagatgatgactagaggactttaacatgctgtaggtgatttcccatgaccacagctgtaggattgccagatttagaaaaaccaaacaatgagaaaaaccagcatgctcagttaaatttgaatttcagacaaacaatgaatgcttttactgtaaatatatgccaaatattgcatgaaacattcttaacgtgaaattgtttctctgaaattcaaacttaactgggcatcttgtacttgatctgacaatcctacaaatagataaatacaaaaaagaaaggagagggggttgtaacccctgccactgttgggtcacacagagactaaaaataaaaacaacacgaataatgaaccaaagagtcactacactggttgctcacacagaccaacatcacaatgagaaaacacaattactactccgagtgctgttgccaggcaacataacattttctcaaagctggttttgtaaatgttttgagaaaccttgataaaagtacctt

SEQ ID NO: 42271 - DNA, 655 bp, Homo Sapiens
  misc_feature (289)..(289): n is a, c, g, or t
  misc_feature (594)..(594): n is a, c, g, or t
  misc_feature (613)..(613): n is a, c, g, or t
gtaaaaactctaaagctttaatatattcggtttgtatgtaatggaagcacggggctagagtttccacataggccccaacataaaggccttccctcgctgttgaggccaccatgccttactgcatccagccaggctgcagggagtgaggcacacggtgaacatggccactgacttttctgccactctaactggacaactggaagacttggaaaggcctccacctgtatctacactctgagggccctggactgggcctgagcttgccacagaggctccgtctgactgtggngctgggaggagggaggcaggggagagccggtcacggtggctggtctttactgcagggcagcactgtggccagctgtctgtctttacactgcatgcagaagtttaaacactgaagtgccgaagtggcccgtgccgccgcacagagaccccgactttagtttgggctgttccacgcttggctcaccattgccgcctgggacttaacctgctcaggcgggccttcgcccagctgcaaatagggatgcgttagagactgttcccaaagcttgttgggctccttaaatggcatgtacaatttaagtgcanagacagggagtgtcaatanagatggaaagccatttccagttaaaaaaaaaaaaaaaaaaaa

SEQ ID NO: 42272 - DNA, 631 bp, Homo Sapiens
ggaaacttctttccaccattcaggaggttatcagaattaataaaagtatctgttatgtgcacttaagccgcagctgctatagatagcactgccttcttgttccagctaggcaatgccttttttttttttttttgaagcagttctctttataaagtgttattttgatagtttgtggattctaaaatatatatatatttatataaacaccatataagtcaaatatgtatttaacaaagcaatatgtattcattcactttcaagatttgttttggtgtcaaaataacatgaaaaggtagatggagttgcttctgttgaattagctctgccaccaatatgtatcttcatacacgtttggaaatgtttcctgcagcattaggtatgacttgttctgagtactgcttccggtgctaaaatgaacaaagaatttgtacttaatggcatggactctggagaatctatgcgaatcaacctttctaccttaatatctccccaaaaatgtatagtgccttgtttttatgtacagtttatatacagaaaagtttgctctgcatttttgatgatggtttggaacattatctacaattttactctcaaatagtcaaaataaaaacatctcaatttctaataccgg

SEQ ID NO: 42273 - DNA, 557 bp, Homo Sapiens
gactgtgctccagtactgcaaaggaaaaaatctcaagaaaccagcccccaagtcttaccttatccacgctggtctggagcccctgacattcaccaatatgtttcccagctgggagcacagagaggacatcgctgagatcacagagatggacacggaagtttccaatcagatcaccctcgtggaagacgtcttagccaagctctgtaaaaccatttacccgctggccgacctcctggccaggccactcccggagggggtcgatcctctgaagcttgagatctatctcaccgacgaagacttcgagtttgcactagacatgacgagggatgaatacaacgccctgcccgcctggaagcaggtgaacctgaagaaagcaaaaggcctgttctgagtggggagacgccagaggagcctcacggtcacgtccaacaacaccactgcaccagggaaatggatatatatttttggactggtgtttttcacaaagtatttttcaatcagagttttcagaacctgacattgttaaagatactgcttgtcccggagttgtgtatttt

SEQ ID NO: 42274 - DNA, 1066 bp, Homo Sapiens
tgtggcgtatccgaaaaggagtcagacaagcactgcagatggtgacctcaaagaagatggaatttcctcccggaaatcaagtggcagtgctgttggaggtaagggaattgctccagccagtcccatgcttgggaatgcaagtaatcctaataaggcggatattcctgaacgcaagaaaagctccactgtccctagtagtaacacagcatctggtggaatgacacgacgaaatacttatgtttgcagtgagagaactacagctgatagacactcagtgattcagaatggcaaagaaaacagcactattcctgatcagagaactccagttgcttcaacacacagtatcagtagtgcagccaccccagatcgaatccgcttcccaagaggcactgccagtcgtagcactttccacggccagccccgggaacggcgaaccgcaacatataatggccctcctgcctctcccagcctgtcccatgaagccacaccattgtcccagactcgaagccgaggctccactaatctctttagtaaattaacttcaaaactcacaaggagtcgcaatgtatctgctgagcaaaaagatgaaaacaaagaagcaaagcctcgatccctacgcttcacctggagcatgaaaaccactagttcaatggatcccggggacatgatgcgggaaatccgcaaagtgttggacgccaataactgcgactatgagcagagggagcgcttcttgctcttctgcgtccacggagatgggcacgcggagaacctcgtgcagtgggaaatggaagtgtgcaagctgccaagactgtctctgaacggggtccggtttaagcggatatcggggacatccatagccttcaaaaatattgcttccaaaattgccaatgagctaaagctgtaacccagtgattatgatgtaaattaagtagcaattaaagtgttttcctgaacactgartggaaatgtatagaataatatttaggcaataacgtctgcatcttcttaatcatggaattaaagtctgaggrcgagagcacgcctgggagcgaaastggctcttttt

SEQ ID NO: 42275 - DNA, 525 bp, Homo Sapiens
cacgcgtccggtccggtgcccgaggggcgggcggcggtgtctgtatgtatgtgtacatatgcacatagaccttagagtgtatagttaacaaacgcccatctgctcacccatgcccacccagcgccgccgccgctggctctcggggcacctggcaggaggcgggtgtgtgaatagcatatatttttacatgtactatatctaggtgtgtgtacaagtgtgtgtaaaaatatataccttgtgtgtaagcagccctttttttttttggtctccacccccctccccccgccccgcactcctaagggcccatctgcccagcctctgagttttctgttctattttttttttaaccccaattatccttctctctctcctgcccccgcatcccactcccagggtgtcacgagccctgagctgcaatggcccgggcctgcagggcggggtaggggagggcaggggctcagccccgaagccagctcagtacctgaggggctgctctatgctgtgtatgcgcctctctggcatccg

SEQ ID NO: 42276 - DNA, 948 bp, Homo Sapiens
agggtgctgtggagctgtcttgcccaggccctcctgggagggggacaggcattgttgccaggggtgaggccgtgccccaggcctccccgaaaccaaaggggaaggcaggggtggggccgtggctgaagccggctccccaaccaaaatgctgcactaaagctcgggcgccgcgggcacggctgctgcagtctcttcccagcctggccctggcaaggggcgggtgggcgctgccaggcgggtgcttctcgacgcacttgctcccggaggctgcgccccggcgcctggaacccgaggtgggaggaccggttggtgtcaccctgctcggccctcagccctgccgcgtggggcgcgtgggcacggagcttcctgcctctctgctccgacacccggcaagcagccggagacaaaacgccttaaagcccccggcccagccctgcaggtatattgcaggggcctgggggcggccctggactggcgggcggttccccagtggggtgccctggaggctgccgggcagagtggagcagcttggggccgtgcccagggcggtggctgtgagtctagtttttgctttaccaagtgtacagaaatggcatttacgtttctctgatgctcccttgaagccatagaaattagggggcttttttaaaaaaataaaagaaaaatgaaaccaaacccaagtgtaaaagggatttggtctgggctttccacggaaacttgaacctgaaaacgggcgtttgcttccatcccccatccctgcctggtccggggaacaaaatccggaagcgggctgggcggccctcccgggaaaacaaaaaccgcacttggatggaggcggtaaaggcaagggcaaaattgtataacccaacggcccaccagcttggtctttttctcctaggggacaaagggcaagccacacaaacaggtcctactcatccactggaagag

SEQ ID NO: 42277 - DNA, 795 bp, Homo Sapiens
aggaattgctcaaagtgctgggggtgaatgtgatgctgaggaagattgctgtggctgcagcgtccaagccagcagtggagatcaaacaggagggagacactttctacatcaaaacctccaccaccgtgcgcaccacagagattaacttcaaggttggggaggagtttgaggagcagactgtggatgggaggccctgtaagagcctggtgaaatgggagagtgagaataaaatggtctgtgagcagaagctcctgaagggagagggccccaagacctcgtggaccagagaactgaccaacgatggggaactgatcctgaccatgacggcggatgacgttgtgtgcaccagggtctacgtccgagagtgagtggccacaggtagaaccgcggccgaagcccaccactggccatgctcaccgccctgcttcactgccccctccgtcccaccccctccttctaggatagcgctccccttaccccagtcacttctgggggtcactgggatgcctcttgcagggtcttgctttctttgacctcttctctcctcccctacaccaacaaagaggaatggctgcaagagcccagatcacccattccgggttcactccccgcctccccaagtcagcagtcctagccccaaaccagcccagagcagggtctctctaaaggggacttgagggcctgagcaggaaagactggccctctagcttctaccctttgtccctgtagcctatacagtttagaatatttatttgttaattttattaaaatgcttttaaaaaaaaaaaaaaaaaa

SEQ ID NO: 42278 - DNA, 778 bp, Homo Sapiens
ggactcgcaaaacagctagttggctggcagcagagctctcaaaagaaggccaccaggtggctctgctgagtggggagatgatggtggagcagagggctgcggtgattgagcgcttccgagagggcaaagagaaggttttggtgaccaccaacgtgtgtgcccgcggcattgatgttgaacaagtgtctgtcgtcatcaactttgatcttcccgtggacaaggacgggaatcctgacaatgagacctacctgcaccggatcgggcgcacgggccgctttggcaagaggggcctggcagtgaacatggtggacagcaagcacagcatgaacatcctgaacagaatccaggagcattttaataagaagatagaaagattggacacagatgatttggacgagattgagaaaatagccaactgagaagctccaccagccactgatgccagccctggcactgcccctgcacaggagacaagtgcatttagggcacaggccccgacatcaccccaaggacaacggcagaagtagagagaaactacctacctcacttcaaattatgtttggacttgacaaaaataggtgccaatgatgggggggcatagaagaaaaaatttgcattttgggaaaatggggtcctttccccacttttttaaagccacatttcccccatctttataataatctggtcacagtggtagtcgctggccccaggacccccctcctgattttggctaggcatcgtggaaacaggctccagcccctggagaaacgatagatgg

SEQ ID NO: 42279 - DNA, 550 bp, Homo Sapiens
ccctggtactcagtcacggcagccaggagaccccaggtgagtttctgagcgcatacgtagttggttcttacccccaggtgtcacacggggccgagagctgagcaagaatttggaatggaagttatgaccaagggaattatgctgttcatttataatagtggacattatggagagctctgattcctacataatatgaataaggatggataggccgggcgtggtggctcatgcctataatcccagcacgttgggaggctgaggcgggcggatcggttgagctcaggcgttcgggaccagcctggccaacatgatgaaaccccgtctctaccaaaaatagaaaaaaatatagccgggcctggtggcgcacgcctgtagtcccagctactcgggaggctgaggtaggaggatcgcttgagcctgggtagaggctgctgtgagctgaaatggcgccactgcactccagcctgggtaacagagcgagaccccgactcaataaataaataaggatggataaattgtagcgtatgcaccattcattatgctaagacat

SEQ ID NO: 42280 - DNA, 636 bp, Homo Sapiens
ggcacttaaaagagccaagattcctgttttcagtttgtggattcatcctgctggttttactttagtccctccatgtcaaagtgggcctgagaaaagctcatacatgcctcatgtgaagtgtccaccctctctgaaaatctttcttgttcaaaacagcaacgacatatcttgttaacttttacggtgacttttggaggaggggagtttggaaattgtaaaatgttatagattgttgcctatttcctgctgaaagtaaatgtttttaaaaagtatcatataaagctgaatacaaattggtttggggggagatcctttcctacccaaagtcataaatatattctttactgccttgtggaaattttatagttttgcctttcacatttgtctttagtctgtcctgaactgatttttgtgaaaattatgagttagaaattcaacttaacatttttcatattcgaagtggttgtctctgcactatttactgaaaagttcatcctttccccagtgatttgtaacactgcctctttcataaattaaatttttgtgtatgtgtgtgggtcttttgatggtttctattctgactgacatcaatttgtctaatcttgtagcagtacagtacagtcctgattattgcaa

SEQ ID NO: 42281 - DNA, 455 bp, Homo Sapiens
ggccgctcgagccggggtaacttgcaaaatgcataaacatccggacagtttgaatttatagtgttgatggaagaaatcatttttaatgtgtactgtaaaacttgaaatactcaggagctgagtgaatatgtttgttgctacttacaatcccgacctgttagtcccagtagttttgttttaacatggtctttttcaactttgtttcctgtttaactacagatgacttctgttgtagactcacaagtttaactgttgtattataacagtattacatgtcaacggtgtggttatgacctttatttatataaaaaccaaatatttagtcaatttaccgtgtcttaatttaatctttgtacaccttccatttttaagtgcttaaatgagtactatattgcaataaaatgtagtgatataattaaccagccattaaaaatttacttctacaaaaaaaaaaa

SEQ ID NO: 42282 - DNA, 914 bp, Homo Sapiens
  misc_feature (844)..(844): n is a, c, g, or t
gtagacatggaaacagatcactactccaatggagttggagaaacttcatccaatggtttcctaaatggtagctctaaacatgaccacgaaatggaagattgtgacaccgaaatggaagttgattcaagtcagttgagacgccagttgtgtggaggaagtcaggccgccatagaaagaatgatccactttggacgagagctgcaagcaatgagtgaacagctaaggagagactgtggcaagaacactgcaaacaaaaaaaatgttgaaggatgcattcagtctactagcatattcagatccctggaacagcccagttggaaatcagcttgacccgattcagagagaacctgtgtgctcagctcttaacagtgcaatattagaaacccacaatctgccaaagcaacctccacttgccctagcaatgggacaggccacacaatgtctaggactgatggctcgatcaggaattggatcctgcgcatttgccacagtggaagactacctacattagctatgcatttcaagagctcacacttatattgtggcatatagtcaacatggaagtagaccagctctgctgatttgaaatttagattttttaaattatgtactggggacaggtttttgtcgctttacattgcttcctagtttacagcatgatgcaaatgattttctaacttagtgttaggagaaattattttccatctttaacctcttagttgtctaagagttaaatattactgaatttcagacgttcaaattgatcatcacaaatcctttaaaacaatttacctaaaagaaaacaaaaattcctgccttcctttgtggggggaaggggggacanaaggggaagggaaatgggacccagttggggtttggggtaaccctggggggtggatgtaaacctttccaat

SEQ ID NO: 42283 - DNA, 712 bp, Homo Sapiens
cgtccgggccgacgtggaagacggagaggaaacctgcgccctggcctctcactccgggagctcaggctccaagtcgggaggcgacaagatgttctccctcaagaagtggaacgcggtggccatgtggagctgggacgtggagtgcgatacgtgcgccatctgcagggtccagatgagggaattggagttcgtaattggtccgaggccctgaacctaataaatgccagtgaaatgggatttgactgtagatctggctccacagccctcgctgtcccctctgtctcactggcttctcaccagccttgtctggatgaccatcggtagcaacctattggaagcatacaaagcagtttattttagaggaactctcaagtgtcttagggtagaaagtaaaaagttgcttcttatgagttgctaaaggaaggcttctgtgtcaatgcctgtcttagatgtcaagctgaaaacaaacaagaggactgtgttgtggtctggggagaatgtaatcattccttccacaactgctgcatgtccctgtgggtgaaacagaacaatcgctgccctctctgccagcaggactgggtggtccaaagaatcggcaaatgagagtggttagaaggcttcttagcgcagttgttcagagccctggtagatcttgtaatccagtgccctacaaaggctagaacactacaggggatgaattcttcaaatagga

SEQ ID NO: 42284 - DNA, 1080 bp, Homo Sapiens
  misc_feature (918)..(918): n is a, c, g, or t
tcagtgatagtttgaaagaagatgccaggaaggacttaaagtttgtcagtgacgttgagaaggaaatggaaaccctcgtggaggccgtgaataagggaaagaatagtaagaaaagccacagcttccctcccatgaacagagaccaccgccggatcatccatgacttggcccaagtttatggcctggagagcgtgagctatgacagtgaaccgaagcgcaatgtggtggtcactgccatcagggggaagtccgtttgtcctcctaccacgctgacaggtgtgcttgaaagggaaatgcaggcacggcctccaccaccgattcctcatcacagacatcagtcagacaagaatcctgggagcagtaatttacagaaaataaccaaggagccaataattgactattttgacgtccaggactaagaagatcatgatgcacttagataaaagaatgattaggtatagtggagacttatttgccagcagataaatcatgcccgttcccctctgcctggcagaatcacagtctcacatactgtcttgtactgacacatccaaagcatgagtgtgtcagaaatcccttgtctattcctgtctgtataaagtgtttcattatgaccagatctctgattgtatggtcactaggtatgcaatcacgcattccgagaggctctttacaccatcactgtgattgctctgagagttgagggactattgggcctttatttggacaaccaaacttttagccttgaaacaactttatgccactaagtcatagcctcagttgtcccagttatttgtcctcctggaaaatgcctgaaacatcagacagacattgctggcttttacccaacttgaatcaaaatcttttagagcccaaatgaattttttaagtctgaaataacccaataaggaattgggnatacccatattccgaaatcacccctgggtattcttaaacccggccattcataccctaagtctttttgcccaaaaccctctccttgggtataatccagcctgaactttattttggccattttccatggggatcaggttttaaaccctaaaagggggggtccag

SEQ ID NO: 42285 - DNA, 1052 bp, Homo Sapiens
  misc_feature (734)..(734): n is a, c, g, or t
  misc_feature (976)..(976): n is a, c, g, or t
caagccaacgtctccgccgtcggctccgcggcgccgccatggccgacgtggaagacggagaggaaacctgcgccctggcctctcactccgggagctcaggctccaagtcgggaggcgacaagatgttctccctcaagaagtggaacgcggtggccatgtggagctgggacgtggagtgcgatacgtgcgccatctgcagggtccaggtgatggatgagggaattggagttcgtaattggtccgaggccctgaacctaataaatgccagtgaaatgggatttgactgtagatctggctccacagccctcgctgtcccctctgtctcactggcttctcaccagccttgtctggatgaccatcggtagcaacctattggaagcatacaaagcagtttattttagaggaactctcaagtgtcttagggtagaaagtaaaaagttgcttcttatgagttgctaaaggaaggcttctgtgtcaatgcctgtcttagatgtcaagctgaaaacaaacaagaggactgtgttgtggtctggggagaatgtaatcattccttccacaactgctgcatgtccctgtgggtgaaacagaacaatcgctgccctctctgccagcaggactgggtggtccaaagaatcggcaaatgagagtggttagaaggcttcttagcgcagttgttcagagccctggtggatcttgtaatccagtgccctacaaaggctagaacactacagggngatgaattcttcaaataggagccgcatggatctgtggtcctttgggactcatcaaagccttggtttagcattttgtcagttttatcttcagagattctctgcgattaagaagataattttattaaaggtggtccttctacccttctgtgggtgtgtgtcgcgcaccacagcttagagtgctataaaaaaaggaaagaagctccaaattgaatcacctttatactttacccatttctatacancagggcagtggaaagcagttttcgaagaactttttgccatggcttaatgggttgatccagttaaaacaagaatgtt

SEQ ID NO: 42286 - DNA, 580 bp, Homo Sapiens
gctggttcactggagacagtgttggacatgctccgggatgccatggtggccaaagtcaatacttccaaaggcttcctgattgatggctacccgcgggaggtgcagcaaggagaagagtttgagcgacggattggacagcccacactgctgctgtatgtggacgcaggccctgagaccatgacccagcggctcttgaaacgtggagagaccagcgggcgtgtggacgacaatgaggagaccatcaaaaagcggctggagacctattacaaggccacagaacccgtcatcgccttctatgagaaacgtggcattgtgcgcaaggtcaacgctgagggctccgtggacagtgtcttctcccaggtctgcacccacctggacgccctaaagtagcaacgctggagccgcttccccagctcagagccccgccccaccccgtcctgattagaggtcctcctggcctgagcgcagcgcctccaccctgccctgctgagcacagacggaggaagccgcttatcctgttttcatggacagctgagcactaaaggaatttctaaggacaaaaaaaaaaaaaaaaaatggc

SEQ ID NO: 42287 - DNA, 841 bp, Homo Sapiens
  misc_feature (50)..(50): n is a, c, g, or t
ggcacaactaatgagattttctctcattccgagttcagggtgacacattntgggacatctgctggtagcccagtgctgaaggacttgcttttccatgaagaagacgaaaacagcaaacaagggcaagaaggtctgagagggaaggagaatgacatttacacattttacagatttttgtttggtttaactccagatttctcttgatatatctctgtgcttttgagacctggagatctaattctgtttagacattttttgtcccagaaatacagaagcttgaaatgctatgaaggcagagcttctattctttatgggatgaaatatttcaaaagaggataaatcctctgtggtaagccatttggaaaatcctaccaagaattggcttatttaattttccagaaccaggaatgagtatctaatagcttttgtagaaccttccagaatatgtggggaaaaagggctattgctaagtgagctttatctaatatcctcctaagagttttactagtgcttttttgaggaattacagggaagctcctggaattgtacatggatatctttatccctagggggaaatcaaggagctgggcacccctaattctttatggaagtgtttaaaactattttcaattttattacaagtattactagagttggtggttctactctaagatttcaaaagtgcattttaaaatcatacatgttcccgcctgcaaatatattgtgatttggtggagaaacaaatagtatattctacattaagaacttacgatttaaccaaaaaaaaacacaaaataacaaaaaattttgcggcggattgggcctgaaaaagtttaaagag

SEQ ID NO: 42288 - DNA, 1044 bp, Homo Sapiens
  misc_feature (59)..(59): n is a, c, g, or t
  misc_feature (61)..(61): n is a, c, g, or t
tgcaggtgctcaagccccgggaccgcatttctgccatcgcccaccgtggcggcagcvancngcgcccgagaacacgctggcggccattcggcaggcagctaagaatggagcaacaggcgtggagttggacattgagtttacttctgacgggattcctgtcttaatgcacgataacacagtagataggacgactgatgggactgggcgattgtgtgatttgacatttgaacaaattaggaagctgaatcctgcagcaaaccacagactcaggaatgatttccctgatgaaaagatccctaccctaagggaagctgttgcagagtgcctaaaccataacctcacaatcttctttgatgtcaaaggccatgcacacaaggctactgaggctctaaagaaaatgtatatggaatttcctcaactgtataataatagtgtggtctgttctttcttgccagaagttatctacaagatgagacaaacagatcgggatgtaataacagcattaactcacagaccttggagcctaagccatacaggagatgggaaaccacgctatgatactttctggaaacattttatatttgttatgatggacattttgctcgattggagcatgcataatatcttgtggtacctgtgtggaatttcagctttcctcatgcaaaaggattttgtatccccggcctacttgaagaagtggtcagctaaaggaatccaggttgttggttggactgttaatacctttgatgaaaagagttactacgaatcccatcttggttccagctatatcactgacagcatggtagaagactgcgaacctcacttctagactttcacggtgggacgaaacgggttcagaaactgccaggggsctcatacagggatatcaaaataccctttgtgctagcccaggccctgggggatcaggtgactcacacaatgckatagtkgggyactgcwttttacykgaccaarctaamccggggtgscmcmwgsaccakggatgcmragtyaaamtgtgckcttkaaawytgggkkgaaaaa

SEQ ID NO: 42289 - DNA, 624 bp, Homo Sapiens
  misc_feature (11)..(11): n is a, c, g, or t
  misc_feature (24)..(24): n is a, c, g, or t
ttttatgaagnttatttctcaagnaaaatgggaataaatttgggatttgttcagcttttttactaaagatgcctaaagccacaggtctttattgcctaacttaagccatgacttttagatatgagatgacgggaagcaggacgaaatatcggcgtgtggctggagccttcccactggaggctgaaagtggcttgtggtattataatgttcagatttcaagaggaaggtgcaggtacacatgagttagagagctggtgagacagttgggaactctttgtgcttgtgatctactggactttttttttgcaggaagtgcattctctggtccttccctattttctgttctggatgtcagtgcagtgcactgctactgttttatccacttggccacagactttttctaacagctgcgtattatttctatatactaattgcattggcagcattgtgtctttgaccttgtatactagcttgacatagtgctgtctctgatttctaggctagttacttgagatatgaattttccatagaatatgcactgatacaacattaccattcttctatggaaagaaaacttttgatgatgaaacaataaagattttaaatatcaaaaaaaaaaaaaaa

SEQ ID NO: 42290 - DNA, 606 bp, Homo Sapiens
  misc_feature (550)..(550): n is a, c, g, or t
gataccccggtttcttccttgttttggcttcttttcagaatgccgggagagtacatgcagggattccatctaatcaccctcagcactctttctctggtcctgctggatagatttagatttcctttctttttttagggcctcagtctgctatctcctttggtggctaccaccactcactcccttgatatcttctactcccttgccttcaccttgcttaagactgagaagggagttagattttgtcactagctcttctttttcctcactgtgtaccccaccaaacaagattagttcaagttaaaaagaacctactggaggtaaactgggagagcaagtgttggatctgggctggtccctttcccataaaattaggtccctggttgtatgttcccatagcaccccatacttcctctctcagaataatcatttcccttgtaatgctcagcatccgcatcctgcttgactgcaaacttgctgaaggtagggactgtttgtcttggacttcgctgccagtccttagaacagtgtctgggacacagtgtgttctcanatatttgttgctggaataaatgaatgaactaaaaaaaaaaaaaaaaaaaaacgcgg

SEQ ID NO: 42291 - DNA, 1029 bp, Homo Sapiens
tctgactgaactgatagatcgttttaagagatggaaggcagaaggacacagtgatgatgaatctgattccgagggctctgattcggaatctaccagcagggaaaacaatactcatcctgaatggagctttaccaccgtacgaaagaagcctgatccaaagaaagtacagaatggggcagagcaagatcttgtgcaaaccctgagttgtttgtctatgataatcacacctgcatttgctgaacttaaacagcaggacgagaataacgctagcaggaatcaggcgattgaagaactcgagaaaagtattgctgtggctgaagccgcctgtcccggcatcacagataaaatggtgaagaaactaattgaaaaatttcaaaagtgttcagcagacgaatccccctaagaaacttattattggcttctgtttcatatggacccagagagccccaccaaacctacgtcaagattaacaatgcttaacccatgagctccatgtgccttttggatctttgcaacactgaagatttggaagaagctattaaactattttgtgatggcgtttatcattttatattttgaaaggattattttgtaaggaataacttttaatactatagtttcacctgtattctagtaaatgttgagacaccgttttgcttttaagtatccctatttcttaagttacgaggatgaatacctttcacattttgatctttagttgactctacagtcatgaaacatacaggtctttcaaagtcattctcaatattcagctttttgtaattatcaagctttcaaaaagctttttttttaaaaaaaaaacatgcatattctaaaaatgacatttggggggggggaggggtaaaataagtcatacccttcttaaaaacggaaatttaaagtaaagttccttttaaatgacaccctgctaaaagtatttgactccttctaccacaggtggggatgaaaaattcccggccaggctcaagtgataatacccattttggagaaccccgtgtggttttgaac

SEQ ID NO: 42292 - DNA, 583 bp, Homo Sapiens
  misc_feature (569)..(569): n is a, c, g, or t
  misc_feature (575)..(575): n is a, c, g, or t
  misc_feature (579)..(579): n is a, c, g, or t
actctaccccatctccttgccgggtcagccctgacaaaggtcagctagccccttgaggacatcagctttggcctcagggtcctaatggcagcagaaccactgacagagctagaggagtccattgagaccgtggtcaccaccttcttcacctttgcaaggcaggagggccggaaggatagcctcagcgtcaacgagttcaaagagctggttacccagcagttgccccatctgctcaaggatgtgggctctcttgatgagaagatgaagagcttggatgtgaatcaggactcggagctcaagttcaatgagtactggagattgattggggagctggccaaggaaatcaggaagaagaaagacctgaagatcaggaagaagtaaagccgcctggctgagatggggtgggcagggcagagctgatcagggccgagcagaaccgcactcttcccaaataaagcttcctccttgaaaaaaaaaaaaaaaaaaaaaaaaaaaagggcccctttgctccaagtttggggggggggccctttaaatatcttaaaaaaaactcccccccacacagctcnggctantccncgcc

SEQ ID NO: 42293 - DNA, 896 bp, Homo Sapiens
tcgcgctaacgataaagaaagaatcagaataaaatgtacctgccatccagttttggatctttttaaaactaatgagtatgaacttgagatctgtataaataagagcatgatttgaaaaaaagcatggtataattgaaacttttttcattttgaaaagtattggttactggtgatgttgaaatatgcatactaatttttgcttaacattagatgtcatgaggaaactactgaactagcaattggttgtttaacacttctgtatgcatcagataacaactgtgagtagcctatgaatgaaattcttttataaatattaggcataaattaaaatgtaaaactccattcatagtggattaatgcattttgctgcctttattagggtactttattttgcttttcagaagtcagcctacataacacatttttaaagtctaaactgttaaacaactctttaaaggataattatccaataaaaaaaaacctagtgctgattcacagcttattatccaattcaaaaataaattagaaaaatatatgcttacatttttcacttttgctaaaaagaaaaaaaaaaggtgtttatttttaactcttggaagaggttttgtggttcccaatgtgtctgtcccaccctgatccttttcaatatatatttctttaaaccttgtgctacttagtaaaaattgattacaattgaccggaagtttgatagatcctttaaaacaaagcagatttccattttttgtattttaactactttactaaattaaaactcctccttttacagaattagaaaagttaacatttatctttaagtgggcttcctgcaaaagtttgaatatttcaagaaaattggttttttcacaagaagcaaaatggggctttttctttggcaa

SEQ ID NO: 42294 - DNA, 590 bp, Homo Sapiens
ggcgggccggggggcggcggggcgcgagcagagcgcggttgacctccctttctctgctcagctccagcgtcatttcggcctcttagttcttctgaaccctgctcctgagctaggtaggaaacatgagcggcaccaacttggatgggaacgatgagtttgatgagcagttgcgaatgcaagaattgtacggagacggcaaggatggtgacacccagaccgatgccggcggagaacccgattctctcgggcagcagccgacggacactccctacgagtgggacctggacaaaaaggcttggttccccaagattactgaagatttcattgctacatatcaggccaattatggcttctctaacgatggcgcatctagttctaccgcaaatgttgaagatgtccatgctaggactgcagaggaacctccacaagaaaaagccccggaacccactgatgccagaaagaagggagaaaaaagaaaggctgagtcaggatggtttcatgttgaagaagacagaaatacaaatgtatacgtgtctggtttgcctccagatattacagtggatgaatttatacaacttatgtccaagttt

SEQ ID NO: 42295 - DNA, 582 bp, Homo Sapiens
ggaagaggatgaagatatgcagatgaagaggggcttgaagctgctgataaaaaggcggaagaaggtgatgcagatgaaaagctgtttgaagagtcagatgacaaggaagatgaagatgcagatggaaaggaagttgaagatgctgacgaaaagttgttcgaagatgatgattccaatgagaagttgtttgatgaggaggaagattccagtgagaagttgtttgacgattctgatgagagggggactttgggtggttttgggagtgttgaagaagggcccctatccactggcagcagctttattctcagtagcgatgatgatgacgatgatatttaatcccttaaacttgctttttagggagagtcctccatctacatttgcctgtgcttcagggtaattactagtagtgttacatgaacatgtgcatagtggtaggatgccatcagattaaagcattgaagtgtttcattgttacctgtacctaatggttttaaatatatgttaattgattgtttagttaaaatgtcatagttacaatgcaagtaaactggatacttgttcttttgtcagatttgttaaatg

SEQ ID NO: 42296 - DNA, 866 bp, Homo Sapiens
cacgaggcaaatgggacacatgagacgctaactgcagcttttgccttggttcttcctagtgcctacaatgggaaaacttcactccaaagagaaacctattaagtcatcatctccaaactaaaccctcacaagtaacagttgaagaaaaaatggcaagagatcatatcctcagaccaggtggaattacttaaattttaaagcctgaaaattccaatttgggggtgggaggtggaaaaggaacccaattttcttatgaacagatatttttaacttaatggcacaaagtcttagaatattattatgtgccccgtgttccctgttcttcgttgctgcattttcttcacttgcaggcaaacttggctctcaataaacttttaccacaaattgaaataaatatatttttttcaactgccaatcaaggctaggaggctcgaccacctcaacattggagacatcacttgccaatgtacataccttgttatatgcagacatgtatttcttacgtacactgtacttctgtgtgcaattgtaaacagaaattgcaatatggatgtttctttgtattataaaatttttccgctcttaattaaaaattactgtttaattgacatactcaggataacagagaatggtggtattcagtggtccaggattctgtaatgctttacacaggcagttttgaaatgaaatcatttacctttcgttcgatgagttgtttgatctcatttttcttatccatgctgcacggcacagtgacaactgagacacgttatgtgtgcactgactacccatcactcgatcagagaagtcgtcgtaccttaactcatcatctttataaggatttcgtgaattgcgagtttttacta

SEQ ID NO: 42297 - DNA, 2095 bp, Homo Sapiens
gggaccgggaagcatggcccgggggtcggcggttgcctgggcggcgctcgggccgttgttgtggggctgcgcgctggggctgcagggcgggatgctgtacccccaggagagcccgtcgcgggagtgcaaggagctggacggcctctggagcttccgcgccgacttctctgacaaccgacgccggggcttcgaggagcagtggtaccggcggccgctgtgggagtcaggccccaccgtggacatgccagttccctccagcttcaatgacatcagccaggactggcgtctgcggcattttgtcggctgggtgtggtacgaacgggaggtgatcctgccggagcgatggacccaggacctgcgcacaagagtggtgctgaggattggcagtgcccattcctatgccatcgtgtgggtgaatggggtcgacacgctagagcatgaggggggctacctccccttcgaggccgacatcagcaacctggtccaggtggggcccctgccctcccggctccgaatcactatcgccatcaacaacacactcacccccaccaccctgccaccagggaccatccaatacctgactgacacctccaagtatcccaagggttactttgtccagaacacatattttgactttttcaactacgctggactgcagcggtctgtacttctgtacacgacacccaccacctacatcgatgacatcaccgtcaccaccagcgtggagcaagacagtgggctggtgaattaccagatctctgtcaagggcagtaacctgttcaagttggaagtgcgtcttttggatgcagaaaacaaagtcgtggcgaatgggactgggacccagggccaacttaaggtgccaggtgtcagcctctggtggccgtacctgatgcacgaacgccctgcctatctgtattcattggaggtgcagctgactgcacagacgtcactggggcctgtgtctgacttctacacactccctgtggggatccgcactgtggctgtcaccaagagccagttcctcatcaatgggaaacctttctatttccacggtgtcaacaagcatgaggatgcggacatccgagggaagggcttcgactggccgctgctggtgaaggacttcaacctgcttcgctggcttggtgccaacgctttccgtaccagccactacccctatgcagaggaagtgatgcagatgtgtgaccgctatgggattgtggtcatcgatgagtgtcccggcgtgggcctggcgctgccgcagttcttcaacaacgtttctctgcatcaccacatgcaggtgatggaagaagtggtgcgtagggacaagaaccaccccgcggtcgtgatgtggtctgtggccaacgagcctgcgtcccacctagaatctgctggctactacttgaagctccgtatgtggatgtgatctgtttgaacagctactactcttggtatcacgactacgggcacctggagttgattcagctgcagctggccacccagtttgagaactggtataagaagtatcagaagcccattattcagagcgagtatggagcagaaacgattgcagggtttcaccaggatccacctctgatgttcactgaagagtaccagaaaagtctgctagagcagtaccatctgggtctggatcaaaaacgcagaaaatacgtggttggagagctcatttggaattttgccgatttcatgactgaacagtcaccgacgagagtgctggggaataaaaaggggatcttcactcggcagagacaaccaaaaagtgcagcgttccttttgcgagagagatactggaagattgccaatgaaaccaggtatccccactcagtagccaagtcacaatgtttggaaaacagcccgtttacttgagcaagactgataccacctgcgtgtcccttcctccccgagtcagggcgacttccacagcagcagaacaagtgcctcctggactgttcacggcagaccagaacgtttctggcctgggttttgtggtcatctattctagcagggaacactaaaggtggaaataaaagattttctattatggaaataaagagttggcatgaaaaaaaaaaaaaaa

SEQ ID NO: 42298 - DNA, 888 bp, Homo Sapiens
  misc_feature (727)..(727): n is a, c, g, or t
  misc_feature (800)..(800): n is a, c, g, or t
  misc_feature (806)..(806): n is a, c, g, or t
  misc_feature (834)..(834): n is a, c, g, or t
  misc_feature (861)..(861): n is a, c, g, or t
gtttaaatatggcttttctaattggctattgtattttttttaagtcttcttgaaggcactctaattgctgctaaatgatgttgcttctttgctaaaaaattaaatgacctagaaggtgcaagttgactgtacatcatagatattaaaaagcagacagtcattaacaatcaagatgtaaaagtgatccatgttggacataattgagtttttaaatcagtttattgggttctagggctgtagaacacatagatactagatttttaatttgttcatggttattctacatttctagaaagttcttatcagcaagatggtcccataagcaaatttcttgtggtttgtacagatttgttaaaatgtgaacgttttctaactgcctcgtagggtagaaaccaatatttttcaggatgctgtatttcactcctgtaaggactttttctttattgtcacattcataatgctgatacttacatgtaagttgttcatgttgcagaaaaaggttatacgtaccacggattctctttaatattgtacagttaaactgtatttctgatgttgcaagccattttgttttttcattgtacatagacacattgtctctttaaaatgctgctgaaattgtagagagtatagccaaaacagtaataaacaatgacagttaaaatgtaaagactatgaaaattacattggaagggagctttcaagatggtaggatattgactaactngagctcttcacttaaaatcagctgaataaaatccttagtatacttcaagacaagtgtaaattgtttcagctgntaaagntaaacctaataccattatcaaggcactnctggttagtaacacttagaacatcagnagtgtttaggggctggctataccattc

SEQ ID NO: 42299 - DNA, 673 bp, Homo Sapiens
  misc_feature (673)..(673): n is a, c, g, or t
ggatttaaagttcttaatgccaacagtttaaaaaaaaattaaaacatttgaatgaactgtaaagtacagccataccttggacatgcaaatataaatctatggagcattctcaagacagtttgtcatggctctgttgattgcaactccttgtatagcttgtattttgatttagtttatattctgcttattatgtatactgtgttcttatatatgagaaagcacaaatgcgaaagaggtcatgtcttctcaaaatctagcaaaggaagtagtctgcattggtgtgcattacagtattttgcttaatgaaagcctcagttctgaatgttgatatgagtagttaaaaggaagtggggccattttatgtgtttatctgtgtcaagtatttctggtaataagaagcacttaatttacacatattttaatcctgtgaaagattccacatagagaaaagaaagatacctaaccttcaacaaatgttatttttggaaacacaatttttgtcattaaatgttatattatttcacatatataaaacagatgttatgtaagaatgttgtatattttaacataaatcatttagagaaattatctagattcattaattttcatagtgcctttttcacatgagtcagctggaaaagtctgcaataaacagttatttggctgtctgtcn

SEQ ID NO: 42300 - DNA, 892 bp, Homo Sapiens
ttccaatcatttatgacatggcttcaggtacaacccagcaggcagacattcccagacagcagaactcttctgttgctgctcccatgatggtcagcaacattctgaagaggtttgcagagatgaatccaccacgacaaggtgaatgcacaatatttgcagctgttcgtgatttaatggctaatcttacactgccccctggtgggcgtccatagacactattgtttttaaaccaggaaggctgacagatgagacaacaaaaaaaatctgaattcagccttcagtttaaaaaaggaaaaggacttttttttaaactttaagagctaaatattctaaactggcaaaaattttcagggtgcacttctttcatcaaaatgatcatccatcttttgtataatgaacttgtatagtgtgtttaaatgggacacatttcaaaggaaataaatcagtgtccgtttgccagtaataaatttaatattctgttttatactataaagttatgaaaatgccaaacttgtttatttaattgttttcttatgttttgggtgtaatagtccttttttggtttttgttttgttttttaaggcaggtctgtcatttttgaatactgtaaaactgtgataaactttatattgaagctgtattttaatatgaccgctttgaatccttacatgaaatgttctgggagttgttataaacacaccccaaggaagcaatatttaataaaactaggtcaaaaacaaaacaaaacagtgacactcacttgtgtgtatataaactctagagacatcttaggccctcccttcatctttaacctgggtggatggagcmagttattaatttataataatacatgtctgaaatttgaccaaaacatcttctttatgtcaggtta

SEQ ID NO: 42301 - DNA, 595 bp, Homo Sapiens
tcgctttcccttggatacctagaccgttataaagtgtgccacatggacttaccgagcatggagagaggattttagctaggatttgaacacttggtgctgggaacctcagggtattgcttgccactaagccatgaaaccagagacaaaatctctatactgccctgagttggggggaattctcagtgccaactgtggctggtcctcattcaaagggacggtcagtttggtgtcaacatgaaacaccaagatgtctgtctctgaagcgtgattttaaaatccccatgcctgtggctgcgcttcctatttctagggctgggaaacactccttgcatcaaggggtcacttacagaacaaagaatcttttgggggaaacttcctctaaaaccctctcatatatagacagctttgactggagggtccatttttcttccaggatggtgttactgcagttgaaagggcaatatgaagttactttcttaatgtgacctagcaataggcatagctacgtggcactatattctggccagactcgatgtgtactctaacttaagaaataaatcagtaaggcagaacaagaaaaaaaaaaaaaaaaaaa

SEQ ID NO: 42302 - DNA, 669 bp, Homo Sapiens
ggccaggagaaatgtttggaattctatatgtgcaatttttcaacaaatgcaaaaaaaatacagcacatgtattgacaagcttctgtcaagcagcttgagttgaaatttgatttaagaaaataaatcatgattgttcaaagctgctgggacgttagaattaggccatgatactggtctcattttaactacagtggtatttggcactagtgtaaacttccatataaatcactcttttggaacaacaaagggggagggagaaaaatcacggcctgttaaatgagtaccaaagccgcccaacagtaatgagatgttctcatccttgattctcccagcctcaaacaacacagcttactttttttttcccttgctcagaaagtacctgtaatttaacaaacagactgcctgtaggtatagtgcaattacaaatgctctaatcattgtacatacatctctcttgatattgcagcatccatactggctttgtaatcattaattttttggcagattgaatgtgctgtattgatatgtatctatgtaattgtattgtatgtctatagctaattcacgttttgataatgttatttatttacttttttagagaggagaatgtaattgtcagttatttctgacagggatatttctttcatttaaaaagagaaaaaaaaaact

SEQ ID NO: 42303 - DNA, 722 bp, Homo Sapiens
gggctgcagtctctggctgtcacccgatcgccagggagacttagatgtgagaaaaccccttcccattccatggcgaaaacatctccttagaaaagccattaccctcattaggcatggttatgggctcccaaaacacctgacagcccctccctcctctgagaggcggagagtgctgactgtagtgaccattgcatgccgggtgcagcatctggaagagctaggcagggtgtctgccccctcctgagttgaagtcatgctcccctgtgccagcccagaggccgagagctatggacagcattgccagtaacacaggccaccctgtgcagaagggagctggctccagcctggaaacctgtctgaggttgggagaggtgcacttggggcacagggagaggccgggacacacttagctggagatgtctctaaaagccctgtatcgtattcaccttcagtctttgtgttttgggaccattactttagaaaataagtaggtcgttttaaacaaaccaaaaattattgattgcttttttgtagtgttcagaacacacggttctctgtgtatagccaaatgactgacaagcactgatatctttaacaacaaaaggcaatttatctaaggaaatttgtcaccatcttcagtaaacctgtctgactgtacctgtatacgtttcaaaaagcacccccccccattgaatccctgtaacctattttattatcttcac

SEQ ID NO: 42304 - DNA, 882 bp, Homo Sapiens
aggagaaacagaaaggaatagtgctgagcctgctgctgtaattgtggagaagccactgagtgtaccaccagcccaaggactttccattccagtgattggcgcaaaagttgactctacagtaaaaactgtatcaccccccactgtgtgtaccattcctaccgtagtaggacgaaatgtcattcctagaatcacaacacctcacaaccctgcccagggacaaccgcatctgaatggaatgtcaaatataactaagactgttacacctaagagatcccattccccatccatagatgggactcctaagaggttgaaagacgtagaaaagtttattcgacttgaatcaacatttaaggacccccgcactgctgaagaaagaaaaagaaaatcagtggatgccattggaggagaatctatgcctattccaactattgatacatcacgcaaaaagagactacccagtaaagaactaccagattcatcatctccagttccagcaaacaacatccgtgtcatcaaaaattccattcgactgacccttaatcggtaaaagcagtgcctcctcacttaagtgaacaagcaatcatttagtggcatagatgcagccacttgttttttaaataaaagtggctgtcatacgtgaaataaggtgaaagtgacagccttcagtctaataaccttgaagtgggttttgaactgtcaaactttgacctgtaaatgctgtaacattctctcactgattgctaaataaacttcttctgaggatcacctggcttgtcaaattgccactctacaggtattaccaggcttttgcaattgtggggggggttttacctggcccttaaactttttcaataggctttggtttatgggggaaacccaacc

SEQ ID NO: 42305 - DNA, 676 bp, Homo Sapiens
gcaccagttacactgaaggtctttgcaggctattatacgaagggatttgcactactgaattttgtagtaaaatactcccctgaacgacagcgttctcttcgtcctcatcatgatgcttctacatttaccataaacattgcacttaataacgtgggagaagactttcagggaggtggttgcaaatttctaaggtacaattgctctattgagtcaccacgaaaaggctggagcttcatgcatcctgggagactcacacatttgcatgaaggacttcctgttaaaaatggaacaagatacattgcagtgtcatttatagatccctaagttatttacttttcattgaattgaaatttattttgggtgaatgactggcatgaacacgtctttgaagttgtggctgagaagatgagaggaatatttaaataacatcaacagaacaacttcactttgggccaaacatttgaaaaactttttataaaaaattgtttgatattgcttaatgtctgctctgagccttaaaacacagattgaagaagaaaagaaagaaaaaacttaaatatttatttctatgctttggtgcctctgagaataatgacaatttatgaatttgtggttcaaattgataaaatatttaggtccaataacaagactaataatattttcttatttaaaaaaa

SEQ ID NO: 42306 - DNA, 715 bp, Homo Sapiens
atttacagtagttactaagggaacacacaaagaattacacaacgttttcctcaagaaaatggtacaaaacacaaccgaggagcgtatacagttgaaaacattttgttttgattggaaggcagattattttatattagtattaaaaatcaaaccctatgtttctttcagatgaatcttccaaagtggattatattaagcaggtattagatttaggaaaacctttccatttcttaaagtattatcaagtgtcaagatcagcaagtgtccttaagtcaaacaggttttttttgttgttgtttttgctttgtttccttttttagaaagttctagaaaataggaaaacgaaaaatttcattgagatgagtagtgcatttaattattttttaaaaaactttttaagtacttgaattttatatcaggaaaacaaagttgttgagccttgcttcttccgttttgccctttgtctcgctccttattctttttatggggggagggttatttgcttttttatcttcctggcataatttccattttattcttctgagtgtctatgttaacttccctctatcccgcttataaaaaaattctccaacaaaaatacttgttgacttgatgttttatcacttctctaagtaaggttgaaatatccttattgtagctactgtttttaatgtaaaggtttaacttgaaagaaatcttaatcacggtgccaaat

SEQ ID NO: 42307 - DNA, 583 bp, Homo Sapiens
cccacgtaacatggcccacgtacctcaggctcatgtacagtcaggaatggttccttctcatccaactgcccatgcgccaatgatgctaatgacgacacagccacccggcggtccccaggccgccctcgctccaagtgcactacagcccattccagtctcgacaacagcgcatttcccctatatgacgcacccttcagtacaagcccaccaccaacagcagttgtaaggctgccctggaggaaccgaaaggccaaattccctcctcccttctactgcttctaccaactggaagcacagaaaactagaatttcatttattttgtttttaaaatatatatgttgatttcttgtaacatccaataggaatgctaacagttcacttgcagtggaagatacttggaccgagtagaggcatttaggaacttgggggctattccataattccatatgctgtttcagagtcccgcaggtaccccagctctgtttgccgaaactggaagttattcattttttaataacccttgaaagtcatgaacacatcagctagcaaaagatgttacaggagtgattcttgctgctattac

SEQ ID NO: 42308 - DNA, 2851 bp, Homo Sapiens
cctctgcaaaacgctggagctggcggcagggccagccacactgagtagtgtggagaactcagggcggcagctgtcccatccccagggcccctccacctcctgctgtctctgaatgccaggccctggggaggccctgaggatagaggaggaggcctggccgtgcctttctggagttcacagacccctaaagacaggaggcagggatggcgtcgtaggcctggagagcgcctggggggcgggagggcctgaggctgtgcttaaggcccagaggtcctggagcagggcatgtcttgtcctgaggcttaggcagggcccccaggggagttggggcaggaggtggggaggacaggatcgtggaggcttcgcatgtcatggtgtctgttggtttttaggctttcttgggaagtctggtgtttcctatgtagtttggggactaggccacacctctccctcatgcttgtcaccactgctacaccttgtctgcccactttctctccttcccgcccctggaggtgagaccctcacctctctcgtgagcatgctgcctcatgtcttccgtgccgtcgttctgtggctgggtgactgtccctcaggccgccaaccctagttggctctcacagcaacttccagtgctcctggacggggacttcctaagcagcatgggggccacacgggccggccacgcacactggcctgggtccgcattccctatttcaggctgttgtctcgggtcagatctccggaagcggcaggagcgctgggtctcctggtcgtggccgggcagcgtctttcttcttcagggtctggatgccacttcccgcctcctccctgtgcccagtggaaggagaaacatcctagagggtggagactgccctgtttttcttttgccattgagtcccagtgtgactcaagcacgaggccacctttctctgccagaggacagaaagcttcagtgactggcccagggtcacacagttctgccgcccagcccagcagcctgagccagcagtcaggatggggtggggacactccgtctctcttgagaccccactcagagaatggggctgacactgtaggagaaatataagcaggactcctgctggctgctcccctcctgcatgaggcatgttagagggactgggaccgccagcccccagctcccatgccgggcctcggcccagtctcagctcctgtttgggagggggggcagaggggcaggggggcagaagttgagtctgggagctggggcagggcacaggctctagggtccagctgtcctcctctcccctcccctgctggccactcctgctgccgtctccacagctctggaatgatgaagtggacaaggccgagcaggagctccgcgtggcccagacagagtttgaccggcaagcagaagtgacccgtctcttgctggagggaatcagtagcactcacgtgaaccacctgcgctgcctccacgagttcgtcaagtctcagacaacctactacgcacagtgctaccgccacatgctggacttgcagaagcagctgggcagctcccagggtgccatatttcccggcaccttcgtgggcaccacagagcccgcctccccacccctgagcagcacctcacccaccactgctgcggccactatgcctgtggtgccctctgtggccagcctggcccctccaggggaggcctcgctctgcctggaagaggtggccccccctgccagtgggacccgcaaagctcgggtgctctatgactacgaggcagccgacagcagtgagctggccctgctggctgatgagctcatcactgtctacagcctgcctggcatggaccctgactggctcattggcgagagaggcaacaagaagggcaaggtccctgtcacctacttggaactgctcagctaggcaggtgcccccatcccccccgcattctggcctaggcaggagaggatgggcgcagccctgccacttaacttgtttgttggtgacacagttgttcagagtggggagaattcaccccattctgtccctgcccctagtcacctagctgtgagggtgcctgaggctgaatggctccacccctcccccagccctgcttctgacctgtggctctggagcccctgcccctgcctgcatccccgagcaccccaccctccaggctccactaaggagggaggggctgtctgcagcagctgcactcagcacctaggccagggtggggccgccgcagatgggctcaggaagccccaggtgcactcagcgagagccctgcctttcagttgccaaaagctgcatcaggggaatgcggcaaggcacacagggctctggcagcccctggggactgggcgctgcccctgggaggggagagcctggccagggctggtgttgggcccggagcagcatcttccggtgctatcctcccctcccacccctcacagctcaagccaagtccagcggccgcagtcttcacctctccacactcactttttatctggtgtttttacttctgcctgcgtttgctctctagccaataaaccgtccttgtgtgcgagtcacctgggctcctgtcagggcctggccctgagggtggtaaagggaaaggtagactcaccctctgccccactcttccacagagtgagcaggggccctgtggctgccccggcccccagctctctagttgggaagaagtgcagccctccctgtcttctgcggggcctgtgcctctcagagggcagtgctgttcctggacatgaagccgcacaaggaacgttttattcctaagaaaaagtttcctaaaaaaaaaaaaaaaaaaaaaaaaaaaaaaaaaaaaaaaaaaaaaaaaaaaaaaaaaaaa

SEQ ID NO: 42309 - DNA, 671 bp, Homo Sapiens
ccacccaccccaaccctgctctcccccaaaggcagcatctcggaggagaccaagcagaagctgaagtcagccatcctttctgcccagtctgctgccaacgtgaggaaggagagcctatgccagccagccctggaggtcctggagacatccagccaggagtcctcgctggagagcgagacagacgaggacgacgactacatggacatttgaggggccactgcagccccaccgccacgccccaggggaccagccaggcctggaatgccccctgggcaggaccctgggcaggaccagaggcccacatggatgccactccccacacagcccccaggcctgcccagcccacctcctcatggcatcctccctgtacccaggtcaggctgtccacaccacatgggagcccagaggaggaggggcccgccttagccatgtgaaggtggattggtcgccatctgcacgccaggcggcatccttttctatgaagtgttgactttgtaaatctgcccacacccagctggccatatccacccctcgacgccgggatgagccggctctgcctgtgtcacagtggaggggtcctttagggccaggctcacccctcaccctttttttggttgcttttctaataaagatggaacagttaaaaaaaaaaaaaaaaaaaaaaaaaaaaa

SEQ ID NO: 42310 - DNA, 871 bp, Homo Sapiens
  misc_feature (756)..(756): n is a, c, g, or t
aactcccttaaggtctccaaaccagacggtgacgcctgcgggaccatctggggcacctgcttccacccgtctctctgcccactcgggtctgcagacctggttcccactgaggccctttgcaggatggaactacggggcttacaggagcttttgtgtgcctggtagaaactatttctgttccagtcacattgccatcactcttgtactgcctgccaccgcggaggaggctggtgacaggccaaaggccagtggaagaaacaccctttcatctcagagtccactgtggcactggccacccctccccagtacaggggtgctgcaggtggcagagtgaatgtcccccatcatgtggcccaactctcctggcctggccatctccctccccagaaacagtgtgcatgggttattttggagtgtaggtgacttgtttactcattgaagcagatttctgcttccttttatttttataggaatagaggaagaaatgtcagatgcgtgcccagctcttcaccccccaatctcttggtggggaggggtgtacctaaatatttatcatatccttgcccttgagtgcttgttagagagaaagagaactactaaggaaaataatattatttaaactcgctcctagtgtttctttgtggtctgtgtcaccgtatctcaggaagtccagccacttgactggcacacacccctccggacatccagcgtgacggagcccacactgccaccttgtggccgcctgagaccctcgcngcccccccgcgccccccgcgccccctcttttttccccttgatgggaaattgaaccattacaatttccatccctcccttccgggggaatccaaaaagggaacggaaatggggggga

SEQ ID NO: 42311 - DNA, 1030 bp, Homo Sapiens
  misc_feature (60)..(61): n is a, c, g, or t
  misc_feature (100)..(100): n is a, c, g, or t
acacaggcaggaagaggaaaagaaagaagagagacggggcacgggacgggaaaacagggnngggaaaagcagggctgggtaccggggtccggaattcccngggataaaatttcatgggagaaaatataataaggtaaagaggtagaatcactttcagacttaagaataatgttgatttcccaagtgctttaccttatctgttaaagcgtaagatgaattggtatttgcttcataggcagtttgactgcatgtattagagaatgaaaagaagatatttgtagtaatgcctggaaacttggtgctttaaattaaggtactcctctgctgctgtagaatggattccacacagtggatagctatgggtgattcagaatattatgtttagattcccatttgttaagtttataagttttgtggggaattatgaacttactgtgtactacctgcatttgtgctgtgtgaaaaataaatacaaggattcgtttagctaattcaacttactacaaagacaaatgtctgtttttatttgcctgctaggattgtcttttttaaaagtcatttttatttataggaatatgggtgtttctataggaagaaacaggttttttgttttttgttttttaagataaatttgacaaagttaactgaaatttatctggtccattttattcatgctactaagatgggaatctttaaacacaagggtcagcaagctttggcccatggattggccacctgttacgtaaataaagtttctttgaaacaagcctacactcattcatttatgttttgtctgtggttgctttccacaactgcagagttgtatggcttgcaagtctaaaaacatttactatttgggccctctaagaaaaagttaagacccctagtctaaatggcctttttggggaaaaaaccaatcactaaactcataaatcattttatatcccattatttttcctgcataaatggtaatgcctatatttgaaacaaggggttttggggctaaaaaaaaaaaaatattccgccaact

SEQ ID NO: 42312 - DNA, 524 bp, Homo Sapiens
ccccgcgcccctctttttccccttgatggaaattgaccatacaatttcatcctccttcaggggatcaaaaggacggagtggggggacagagactcagatgaggacagagtggtttccaatgtgttcaatagatttaggagcagaaatgcaaggggctgcatgacctaccaggacagaactttccccaattacagggtgactcacagccgcattggtgactcacttcaatgtgtcatttccggctgctgtgtgtgagcagtggacacgtgaggggggggtgggtgagagagacaggcagctcggattcaactaccttagataatatttctgaaaacctaccagccagagggtagggcacaaagatggatgtaatgcactttgggaggccaaggcgggaggattgcttgagcccaggagttcaagaccagcctgggcaacataccaagacccccgtctctttaaaaatatatatattttaaatatacttaaatatatattthtaatatctttaaatatatatatat

SEQ ID NO: 42313 - DNA, 756 bp, Homo Sapiens
  misc_feature (675)..(675): n is a, c, g, or t
agcggaggggaaaaaaatctaagctgtctgccacattgagtacagaaaagttgtagatttcaaattttattaatattttaagcacttttttgaacttcccaaccttgtttgaagctgttatttgcagtcctattagttttgagccattgcatttaagttccctaggagggggttggttgggggatgtactgaaagagatgaagcaaacccacaccctaagatggtaactgtgtgatttagaaacctgagtttactcctcaaatcgaattattttctttttaaattttggaaagagtaaattgacgtacttgcagtttatgaagctgccccccacccctcagttaattgcagtctaatgtcaagaggcacttctttattaattaccaaatagtctttgtgaccaaggactaacatttttaagttactcagctctatcctcatgggcctatatatttaatacctccaaagatattttcaggataggctttgtatacttttattggttatttagaatccagtggtatgtttgtggtataggaatgtcatggtaaatcgtttttcaataaatattttgaaacatgtttccatatgaagttttttttcaatctgtatttttggttttgtgcacatacagcatttcctagcgataaaacataaaccaaatgacttaccagnctcatcctccctaactccatttgaaactcaacttagctcacactcagtgataaaacaaatggtattgttgaagcctaggat

SEQ ID NO: 42314 - DNA, 591 bp, Homo Sapiens
caaacattaaatgtttttaaaaattgaaagcctgaatgtgactgtgatagatttgggtagtaatttaaagatgagtacctgaagaattctgcttcagagtataatgatgacccttcttgagttttgaacacctgaaattgtaatcactgaaatattaactgtttcttaataaaaagttacctgaaataacaacaaaatacaactcctcagctagcttgctgttaaaccacatgaagtctgttaaaagatatttatttttcttgtaaatatctgaagctgtagcttagtggaaattttagcaaggtaatggatttgctttaaaatgtctgccttacaaattcataacaacaagattgtcagtcagcatttattcatgttttccctgatttttatcttctcaccattttacctcttttaacaggagcctgagcacaaggtttaatgaggaagctggggctataaatatgtgtgtatatatgtatatgtatgtttgtacaaatctccatgatgtttgccaagtttgaatgcgcaaaacttggaaaatgtgacaataaagaataaaagtagtaactcaaaaaaaaaaaaaaaaag

SEQ ID NO: 42315 - DNA, 439 bp, Homo Sapiens
atggataagaagtccactcacagaaatcctgaagatgccagggctggcaaatatgaaggtaaacacaaacgaaagaaaagaagaaagcaaaaccaaaaccagcaccgatcccgacatagatcagtgacgtctttttcttcagatgatcctatgtttccttcttcctcatcatcgtcttcaggaagccagacagattcaagtattgaagatgctgccaagggaaaaattaagaagaagagaagagagaaaacaaataaatgggaaaaaagaaaggacaaaatatgcccaactttcttgtacaaagttggcattataagaaagcattgcttatcaatttgttgcaacgaacaggtcactatcagtcaaaataaaatcattatttgccgtccgggtgatatccccgatggtgagtcgtattacatggtcatagctgtttcct

SEQ ID NO: 42316 - DNA, 603 bp, Homo Sapiens
cgattttgcttacagtagttcccccttatcttcgggagatacattccaaggcccccagtgaactcctgaaacctcaaacagtaccaaacctttatacactgttttttccatatatatatacctatgataaagtataatgtataaattaagcatagcaagagattaataataatgtaatagaacaatgataacatactataataaaagttatgtgaatgtggttggtctctcttgctttcaaaatatcttcttgtacagtactcacctattttagaatgtggttgactacaggtaaccaaaaccacagaaagggaaactttggatgaggggggcactactgtacttaggaatacaactatatacatatgattttatttttaagaccatattatatttgggtatctactaatattttgtataaagcaattttttgttccattacgtgactttttgttttattgtatatgtaatttaacacacaataaagggtaaagttgcttccccaaaccacacttttaatcaaaacctagaatcatctgcagtccttgttaaaaatgcaggtttctagaaacctctgaagttctgattaaataaatttattgc

SEQ ID NO: 42317 - DNA, 788 bp, Homo Sapiens
  misc_feature (656)..(657): n is a, c, g, or t
gggagcaccttcggtccggttgaggttgtcaagtcggaccaaacaggttgtttctctgcagtttccaacatggcagggaggtttaatagacatggataagaagtccactcacagaaatcctgaagatgccagggctggcaaatatgaaggtaaacacaaacgaaagaaaagaagaaagcaaaaccaaaaccagcaccgatcccgacatagatcagtgacgtctttttcttcagatgatcctatgtttccttcttcctcatcatcgtcttcaggaagccagacagattcaagtattgaagatgctgccaagggaaaaattaagaagaagagaagagagaaaacaaataaatgggaaaaaagaaaggacaaaatatgaaacaccaagaaaaagagaaggaaaaaaaggaggaaacaaccacatatgtcacctttccaagagggactgaaactgggctgacccttttgatttccaaactcagcgttttggtgtaaggcggccaaagaaggatgcggagcccagcactgtgaagcctacaaaaacattgatgcgctggcttggggatttgaatttgaacatctttcacactaagttcagactcatgaaaccaatcttcagatgctctgtaaaccccataataaagagtttggaaacttcnnaacgaacgcgaaaagaaggaaaccccctgtcggcccccctcggcccttcaaaaagctttccagaacatttcctttggggcgccgggccccttaggtaaagtgaaactgggccatacctggtttccaaggaa

SEQ ID NO: 42318 - DNA, 565 bp, Homo Sapiens
aattttgaaaatggatgtttgctaatggggttgccttgtggtcatgtgtttcatcagaattgcattgtgatgtggttggctgggggccgacattgttgccctgtttgccggtggccttcttataaaaaaaagcagccatatgcacaacaccagcccttgtcaaatgatgtcccatcttaaccatgtgcaatttgtcctttataagctttgagtatcttacagcttgcctttttaatgttagtcacaatgtttttgtggtttgaagtttagtttaatgttagtgcagtgacgggaaatacacattatgctaatgttgatgacagaatttatttggttgccttgtgtgttaattgaatgcatacctaattgtaaaatttttttatttacaacattggaaattcagaagttaatgtttttttgtaagcacaaaagaagtattatagaaatttatcctagcaagactttacaagataggatcaaattctaatggaattgagccggtttcttatcctaaatgtttcctccctttttacaatctctgtccagcacctcttggttaaataat

SEQ ID NO: 42319 - DNA, 783 bp, Homo Sapiens
  misc_feature (664)..(664): n is a, c, g, or t
aaaaagggacccccatgaaaccgaacacacaagccacgcctccctgaacctatcccgggacagggcctcttcctcggccttcccatattggtggcagtggtgccacactgaacagagtggaagacatatgccatgcagctacacctaccggccctgggacgccggaggacagggcattgtcctcagtcagatacaacagcatttggggccatggtacctgcacacctaaaacactaggccacgcatctgatctgtagtcacatgactaagccaagaggaaggagcaagactcaagacatgattgatggatgttaaagtctagcctgatgagaggggaagtggtgggggagacatagccccaccatgaggacatacaactgggaaatactgaaacttgctgcctattgggtatgctgaggccccacagacttacagaagaagtggccctccatagacatgtgtagcatcaaaacacaaaggcccacacttcctgacggatgccagcttgggcactgctgtctactgaccccaacccttgatgatatgtatttattcatttgttattttaccagctatttattgagtgtcttttatgtaggctaaatgaacataggtctctggcctcacggagctcccagtcctaatcacattcaaggtcaccaangtacagttggtacaggtttgtacacttggcaggaagaagtgccttggcaaaaaagaatccaaaatggggggcttggggaaccttccttccatttgggccccaaccctggcccctttttt

SEQ ID NO: 42320 - DNA, 964 bp, Homo Sapiens
  misc_feature (655)..(655): n is a, c, g, or t
ggcctcacggagctcccagtcctaatcacattcaaggtcaccaggtacagttgtacaggttgtacactgcaggagagtgcctggcaaaaagatcaaatggggctgggacttctcattggccaacctgcctttccccagaaggagtgatttttctatcggcacaaaagcactatatggactggtaatggttacaggttcagagattacccagtgaggccttattcctcccttccccccaaaactgacacctttgttagccacctccccacccacatacatttctgccagtgttcacaatgacactcagcggtcatgtctggacatgagtgcccagggaatatgcccaagctatgccttgtcctcttgtcctgtttgcatttcactgggagcttgcactatgcagctccagtttcctgcagtgatcagggtcctgcaagcagtggggaagggggccaaggtattggaggactccctcccagctttggaagcctcatccgcgtgtgtgtgtgtgtgtatgtgtagacaagctctcgctctgtcacccaggctggagtgcagtggtgcaatcatggttcactgcagtcttgaccttttgggctcaagtgatcctcccacctcagcctcctgagtagctgggaccataggctcacaaccncacacctggcaaaatttgatttttttttttttttcaaagaagggggtctcgaaaacactgcccacacccccccttgcggcaatttataacagttttccaacctgccctcacaaaaaaaacaacaaaaccccgatggccttctacctgcggtcgtccgcaaaaccacgttcttggaaatggcacaccggcggccatcaaccggttttccccgacacccatttcttcttgcacacatacgcgcccctattttcgcgaggccccccccccaccagtttcgccgctttattttacctctcgcgccttgatccc

SEQ ID NO: 42321 - DNA, 500 bp, Homo Sapiens
ccagggccaggggcttctgtgagaggcagagggggaccctcaccaaatcttggtggaagagcccaggggctggtcccagaacaggcagtctcacaagcacgcagcacactggagtggacgcctgtgcccacccgagcctggagcatggccaagagccagcttgcaccacccacctgggaggccgaggaggaggtcccctgggcacagggcctctttgggacttcagaggaaatctcccagtcccactctcggagggttaagagaaggcctcctgcagctgtgccgtccacacctctaggtcgccagagccctggcccccagcccccagcaagcctgagcccgggaagaaccagaggccctcccgagagacccagtcacacgtctctgctttaagccttagccagctagtgacgagtacaacgagataacgcccatgtgttttggaacatttatgtaagattgtcatatgaaatgtatttgggaactacattaactttaac

SEQ ID NO: 42322 - DNA, 683 bp, Homo Sapiens
  misc_feature (459)..(459): n is a, c, g, or t
  misc_feature (619)..(619): n is a, c, g, or t
gagagataaaagaaaaaacaaaattcctaaacatgtgaaaaaaagaaaggagaagacagccaagacgaaaaaaggcaaatagaatgagaaccatattatgtacagtcattttcctcagttccttttctcgcctgaactcttaagctgcatctggaagatggcttattggttttaaccagattgtcatcgtggcactgtctgtgaagacggattcaaatgttttcatgtaactatgtaaaaagctctaagctctagagtctagatccagtcactgactctgtctggtgttgacagaggatttatttaagctattattttaataaagaactttgtacatttttatttttatatttttttctcttacaaatatgtttttggaagcatgataaatgtttaaatgtagtcaacatctgtaactcttacatgagtgtccagaggcactcatgggaaaattggttntgctttctttgtacacaccagagacccatctgaggtcatctgattataaggccatgtttatataaagggaatttcacccacagttcagctggcttgtgattttcactgcaactctgcctttggtgtatttgcgatcatttgtaatgctcttacacttcgnctttatgttctttttgaagtaggacctttaggtcataaagtttttacaattaaaaaaaaaaaaa

SEQ ID NO: 42323 - DNA, 918 bp, Homo Sapiens
gcacggtgcccagctttttgcggctctgcattgctgctgtggataaaagaggtctagatgtggatggcatttatcgggtgagcgggaacttggcagtggtccagaagcttcgctttctggtggacagagagcgtgcggtcacctccgatgggaggtatgtgttcccagaacagccaggacaagaaggtcggttagatttggacagtactgagtgggatgacattcatgtggtcaccggagccctgaagctttttctccgggagctgccccagcctctggtgccaccactgctgctgccccatttccgtgctgcccttgcactctccgaatcagagcagtgcctctctcagatacaagaattaataggctcaatgccaaagcccaaccatgacactctacggtacctcctggagcatttatgcagggtgatagcacactcagataagaatcgcatgacaccccacaacctgggaattgtgtttggaccaaccctgtttcggccagagcaggagacatctgacccagcagcccatgctctctacccaggcagctggtccagctgatgctcaccaacttcaccagcctcttcccctgatgcagggaaggaagaagagaaaacatatttccggtcatctctggtggtgagaggctggtgtcctgttttgaggatatccctttaaatctcccaaatgactgtctctatcttcatgagtgtgacttgaggtgttgggatgggtgagggagccttctctaacagaggaaagtgagtggatttaacccctgttctcttcttgttcccctgttatcattccttcccaacattatagtaccttaagtggcatggtaaacaacaaacatcacaccaccaacaacaaactcaaataaacacctcgacactattcaccagcaaaaatactg

SEQ ID NO: 42324 - DNA, 612 bp, Homo Sapiens
ggattctccggtctggaatttctgagtgagtcctttttttatggtgtcctccctctgtgaatgtacaggcggaactgtacgaacagctcccttccatccatttttaactctttcggaaataacacctcacagcagcttcgtgcttttgtacagacctttgtaacaagtgtacagaaaactcattttgtttgagaaacaggagttgatgaacccatcatgctggtttttctctgagcacaaagttttaggctgtacacagccagccttgggaatctcgttgagcgttcggcgtggatccacggggccaggccaccctgcgggagcgccacacgcatccacttcggattcagtgggtgaagacagaactctgagagtctgcaggcggctcctgtgctttttatttctggctcttcggatgtcttctagacatttactatcactgcacctgaagaaaaaatcacttttaccttcctaatttaaaaagacaaaacagaaatgtacgttccttcgctagctttagtctttctgttcccatttttataaatctgagcattgataatgttctatctaaatttgtacagtgtgatttttttttttagaataaatatttta

SEQ ID NO: 42325 - DNA, 618 bp, Homo Sapiens
  misc_feature (420)..(420): n is a, c, g, or t
  misc_feature (447)..(447): n is a, c, g, or t
  misc_feature (457)..(457): n is a, c, g, or t
  misc_feature (475)..(475): n is a, c, g, or t
  misc_feature (590)..(593): n is a, c, g, or t
  misc_feature (595)..(606): n is a, c, g, or t
  misc_feature (608)..(609): n is a, c, g, or t
ggcacccaatggaagtggatacttgtaaagtctacaccactgtacttggcgttaaatcttgctgaattcgtggtaagctgttaccatgtctacattttgtagaatgattttggtctgcagcaaaattcgatttcacttctcatacccctttccttccacttgaaatgcaatttagacagaggccctgtggtgaaagttgcaatattaagtttacctttagaagatcccttctcaaactcagaaccctagcagtgttaccttaaacaaaaatgagctcgagaaaaaagtagctcagttacagagaagcaaatcgagttatttcccacataaaaagtttcccagattctaagaattgcagtatcctgtaccctaaaatttttcaaggtgactcctgttgtcgtctgttgataactttaatanaggtcattttaagacataagtttttanagactcccanagtgaaacttaaacattnttcgggattatcgattgcatatatcagtttatgctgtgtgctgaaatactatgccatgtgctattttagtgtttggggaaaatgaaaaataaaatttgttctttagctcaaaaannnnannnnnnnnnnnnannaaacatgtc

SEQ ID NO: 42326 - DNA, 651 bp, Homo Sapiens
attgacagaaaaacaagctgccctttataatatgcaccttttaaaaaattagaatattttactgggaagacgtgtaactctttgggttattactgtctttacttctaaagaagttagcttgaactgaggagtaaaagtgtgtacatatataatatacccttacattatgtatgagggatttttttaaattatattgaaatgctgccctagaagtacaataggaaggctaaataataataacctgttttctggttgttgttggggcatgagcttgtgtatacactgcttgcataaactcaaccagctgcctttttaaagggagctctagtcctttttgtgtaattcactttatttattttattacaaacttcaagattatttaagtgaagatatttcttcagctctggggaaaatgccacagtgttctcctgagagaacatccttgctttgagtcaggctgtgggcaagttcctgaccacagggagtaaattggcctctttgatacacttttgcttgcctccccaggaaagaaggaattgcatccaaggtatacatacatattcatcgatgtttcgtgcttctccttatgaaactccagctatgtaataaaaaactatactctgtgttctgttaatgcctctgagtgtccta

SEQ ID NO: 42327 - DNA, 683 bp, Homo Sapiens
  misc_feature (568)..(568): n is a, c, g, or t
  misc_feature (599)..(599): n is a, c, g, or t
  misc_feature (622)..(622): n is a, c, g, or t
ggggggggctgggaagtcccctgcatcccatggtaccctggtattgggacagcaaaagccagtaaccatgagtatgaggaaatctctttctgttgctggcttacagtttctctgtgtgctttgtggttgctgtcatatttgctctagaagaaaaaaaaaaaaggaggggaaatgcattttccccagagataaaggctgccattttgggggtctgtacttatggcctgaaaatatttgtgatccataactctacacagcctttactcatactattaggcacactttccccttagagccccctaagtttttcccagacgaatctttataatttctttccaaagataccaaataaacttcagtgttttcatctaattctcttaaagttgatatcttaatattttgtgttgatcattatttccattcttaatgtgaaaaaaagtaattatttatacttattataaaaagtatttgaaatttgcacatttaattgtccctaatagaaagccacctattctttgttggatttcttcaagtttttctaaataaatgtaacttttcacaagagtcnaacattaaaaataaatttatttagaacaaanaaaaaaaaaaaaaaaaacatgtncgccgctcggcctcgagagctttcagacattctttgcgcgcggccatagtaatgacatgta

SEQ ID NO: 42328 - DNA, 621 bp, Homo Sapiens
cttctcccagaatcccagccggccaatggaaacctcacgctgggtcctaattaccagtctttaaaggcccagcccctagaaacccaagctcctcctcggaaccgctcacctagagccagaccaacgttactcagggctcctcccagcttgtaggagctgaggtttcacccttaacccaaggagcacaggtcccacctccagcccgggagcctaggaccactcagcccctaggagtatatttccgcacttcagaattccatatcttgcgaatccaagctccctgccccaaataacttcagtcctgctccagaatttggaaatcctagtttcctctccttcgtatcccgagtctgggacacaaaactccgcccccagcctatgagcatcctgagccccgccctcttcctgacgaaactggccccggatcagagcaggacctcccttccgaccctctgggaacctcccagaggtccagcccatctcggagcatcccggaggaaatctgcagagggttaggagtgggtgacaagagcctgatctcttcctgttttgtacatagatttatttttcagttccaagaaagatgaatacattttgttaaaaaaaaaaaaaaaaaatggc

SEQ ID NO: 42329 - DNA, 942 bp, Homo Sapiens
  misc_feature (762)..(762): n is a, c, g, or t
  misc_feature (915)..(915): n is a, c, g, or t
acgggcttcatgaactcaggtctttcccgcggtgacttcccttgggctgaatgaacaggagctgttatttctcacccagtcagcctctggacctcactcttctctctcttcctggaacggtgttcctgatgtgggcatggtcagtgacatcctcttctggatcttgaaagaacatgggaggagtaaaagcagagcctcggatctcaccaggatccatttccacacgctggtctaccacatcctggcaactgtggatggacactgggccaaccagctggcagccgtggctgcaggagctcgtgtggctgggacacaggcctgcgccacagaaaccatagacaccagccgagtgtctctgagggcaccccaagagttcatgacttcccattcggaggcaggctccaggattgtattaaacccaaacaagccagtagtagaatggcacagagagggaatatccttccacttcacaccagtattggtgtgtaaagaccccattcgaactgtaggccttggagatgccatttcagccgaaggactcttctattcggaagtacaccctcactattaggaagattcttaggggtaatttttctgaggaaggagaactagccaacttaagaattacaggaagaaagtggtttggaagacagccaaataaataaaagcagattaaactgtatcaggtacattccagcctgttggcaactccataaaaacatttcagattttaatccgaatttagctaatgagactggattnttgttttttatgttgtgtgtcacagagctaaaaactcagttcccaaatccccagtttatgcagcgccatcaggtatttttagctaaacttcttcacccctgaaagcatgtcagctgggagaaaacagttcctccctgccccacttgaaaatgnacgcccactcacccacatcctggtctt

SEQ ID NO: 42330 - DNA, 572 bp, Homo Sapiens
  misc_feature (484)..(503): n is a, c, g, or t
  misc_feature (507)..(512): n is a, c, g, or t
  misc_feature (519)..(526): n is a, c, g, or t
  misc_feature (528)..(528): n is a, c, g, or t
  misc_feature (531)..(531): n is a, c, g, or t
  misc_feature (535)..(541): n is a, c, g, or t
  misc_feature (543)..(545): n is a, c, g, or t
  misc_feature (547)..(556): n is a, c, g, or t
  misc_feature (559)..(562): n is a, c, g, or t
  misc_feature (566)..(566): n is a, c, g, or t
  misc_feature (568)..(570): n is a, c, g, or t
aaaagttgtgcctgaaatgaatcttgtttttttttataagtagccgcctggttactgtgtcctgtaaaatacagacacttgacccttggtgtagcttctgttcaactttatatcacgggaatggatgggtctgatttcttggccctcttcttgaattggccatatacagggtccctggccagtggactgaaggctttgtctaagatgacaagggtcagctcaggggatgtgggggagggcggttttatcttcccccttgtcgtttgaggttttgatctctgggtaaagaggccgtttatctttgtaaacacgaaacatttttgctttctccagttttctgttaatggcgaaagaatggaagcgaataaagttttactgatttttgagacactaaaaaaaaaaaaaaaaaaaaaaaagggccccttttcctcaacctgaaggtcgggccccttaaattatttaaaaaaaaccccccccccccccnnnnnnnnnnnnnnnnnnnntttnnnnnnttttttnnnnnnnntnttntttnnnnnnntnnntnnnnnnnnnnttnnnntttntnnntt

SEQ ID NO: 42331 - DNA, 728 bp, Homo Sapiens
gctcttcccggcacctgcggcccgccggaccctcacctacctgtcccaagtgtactgccacaagggctttggcaaggacatggcactgtactcgctgttgagggccaagggagagagggcctatgtagtggagccgaacctcgtgaaacacatcgggctcttctccagtctccggtacaactttcatcccagtctcctctagggtgccaagagatgcctttctgaagttggccacttcttgaagattcaaatatttatctctttatttagacatggttgcctgcaggtatttcactgtttactgttgttagagatataggcactggggcagctgaggaacctcaatatgttaagagccttggctttggtagcctcctggcaggagcagcagtttgccacaggtccggacctctccctccacacagccacactgcctcatgcagtctgacccacccagtgagggtgcatttgaacactgattatattctccatttgtttttaagctctgctttgtgttagagcttgtgactgccaaaaattttgtgcacagtgatatgactgttttaggatcttaagggtagaatttgtgaaaggtgagatcctttggaattgagttctttctcattgggtatgaaaatggatgtatgtttagaatatatgcccaacgaggcaggaccatgttggatagattccatttgtttccttgacctgatgtaataaaaactgat

SEQ ID NO: 42332 - DNA, 761 bp, Homo Sapiens
  misc_feature (6)..(11): n is a, c, g, or t
  misc_feature (737)..(737): n is a, c, g, or t
  misc_feature (744)..(744): n is a, c, g, or t
cttaannnnnnaaacaggcggtccgggtccggattcccgggatgccagacccatttctgacaggggagtttgtatcatgaatgtttccaggtttgctcctgcacccgtggcactggaaacccagctccccgtgtcagaccccgctgtcttcctgagccctggggctcactgtggaggagctgacggcctgggcccttggccagtcctggctcttccctgggcctcaccagggacactcttgaatgtatggcctcaggcgctccctagagggggcctaaaccccctcacctgtgagctaccccctttagggatcccttgcccccttggagatcccttgccccccagtgcctctgctcgtgggtccctggacacggccttgaagccaaccttctttggaggagcaacagcagcagccttggccgacgcgtccaactcccaaggctgccgtggagggcaggggggtggtgcttgcctggatgtggccccgagtgcctcccctccctccctctgtgggggagtctcccgcctgaacctgaagatggagcagggcccccgcttcgccctggagcctcttcctgtgcctggctcaagctggctgcctgtcagtcttggggaatctggcccaggtctcctcagcctctgccccagttctgggagaagtttctactggtgtatattttttactggaaatgagccttttaggaatgaatgtagactggtttgtattaaaatgtgtncattgcntagaaatacctgtggct

SEQ ID NO: 42333 - DNA, 624 bp, Homo Sapiens
aagagcaaacgttttttaagtgtattctagttgcaaagtatgcacacatatcttgaatggctttatttttattgtgtaaaactgttgaacacatgactgtgatgcacaaattctttacgtgtaaggagtctatgcattttacagtaacttattttatgatcgggtgatgagacagttatactttcaactgccattatttttattaagtgctttcattttctttacagttattataaaattgtatttattttatacagatgggttttcattttcctgatgctgtaatgtttacttcagcttgttgacctttctttgtgttatctgcatgttgtaacgtgtgataagaatgaatgtaaaggctgtggcaactgtaattaatttttgtaaagggctggtcacacgtggatctggtttatgaatgcatttgggatgattttggtaaccagatcaccttttcagaaatttagatgtgaacaccaaaagaagcattttctcaacaaaaattaatagctggttctattttttttaaacctagaaaaaataaagttgatttttttcaaaaaaaaaagaaaaaaaaaaaaaaaaaaaaaaaaaaaaaaaaaaaaaaaaaaaaaaaaaaaaaaa

SEQ ID NO: 42334 - DNA, 624 bp, Homo Sapiens
  misc_feature (49)..(49): n is a, c, g, or t
caaagcacatagtggccaccaattggtgattctctgcaccggcatcaanatcaacagctccgcctaccgcaagcatttgagagcagactagccagcagtggtgctctgagagtgaacgagcacctccaggtggagggccacagcaacgtctacgccattggtgactgtgccgacgtgaggacgcccaagatggcctatcttgccggcctccacgccaacatcgccgtggccaacatcgtcaactctgtgaagcagcggcctctccaggcctacaagccgggtgcactgacgttcctcctgtccatggggagaaatgacggtgtgggccaaatcagtggcttctatgtgggccggctcatggttcggctgaccaagagccgggacctgttcgtctctacgagctggaaaaccatgaggcagtctccaccttgatggagaggccaggcgggagaactaccgcagcaggtgggcgtacggactgcttggcgcatggcacccgcctggcaagtgctagaactaatgctattcttctggaataagatgccaatgatgtggtggctagaaatgcaacttgtataaaacaaaaatgggagagagagaggtattaaacaaatacccccctta

SEQ ID NO: 42335 - DNA, 633 bp, Homo Sapiens
ccaatgcggccagcctctcagaggctgtgcaggctgcgtgcatgcttcgctaccagaagtgtctggatgcccgttcccaggcctccacctcctgcctcccagcaccccctgctgagtctgtggcacggcgtgtagggtggactgtccgcaggggtgttcagtcgctgtggggctccctgaagcccaaacggctgggggcccataccccatgaagaagcccccaccttccctccacctgcttgtgttgggccccagggaactaaagggtgtgggtcagggaggggtctagaggctattcctaggcctcaggcctcccaaatatgcccctccccagtagctacggttccctgcctaggagctggggagggagagatctaatcccttcaaggaagtgataacactggagtggtaacaagaggagcaggaagcaaggccagccctggttctccatccccatgtgtttcaggtggaacaggaggaactggtccaggccaggcctcatcctcctggacccagcaggggcagaaggaggaagggactggtccaggcatgggtcccttccccctgctccatgggcacctctgctgtattgatatcactaataaagtctgtctgcactaaaaaaaaaaaaaa

SEQ ID NO: 42336 - DNA, 600 bp, Homo Sapiens
gatttttgtattgatttgcaaaatgcagattatatttgataggctatagtatgtagatattccttttaggaatattacagctgtaaattatatgagacttgccagtcaaatgctatttggtttaaaaaaattattgcaatctcaagttaatggaatatttttaaatcccacattcagagtttaaaacactggttttcaatgtgttttttagtgttgtcacttgtttatagataaatatataaataacctgtttggatcctggtcctttttaactgttccttggtaattctgagcatttatttgatgacttaatatttttcactacctttggagaacagatgaacattattcaccatgaatggatctatactgtgtggtcatgagttgtgtatacttccataacactgtatttttcttctgtcagtacccttaggatacactttaaaacaccttaaggtctgatgttatggcaacaaactactttttcaaacctaaataggaaccatgtaatttctcaaaagtgattgaacagtttgcccacacttagtttgttggtcttatgtaaaacattggctcaaaataaagtacacactgatttat

SEQ ID NO: 42337 - DNA, 687 bp, Homo Sapiens
ctctggtctctacctagtggtgttattgcacttgtgcgaacaaagcttttctgatatgatgggaaatacaaatgaaccaagcacacgtgtccgatttattaaccttgcaagaactcttcaggcacatatggaagatctcgaaacttcagaggatgattccgaagaagacggagaccataacaggacatttgatattgcctaacttcatataagacagatggatgatctgtgaacataagtgtttattaaaaatggcaattaaatataaattacttttgtgggggaatgcctaataaatacattgactatatataaaatgaatatatacatacacatgtatgcctgtatatatatattcattctccagtgttgctgaattaaaattctgctggactttttaacatagcaaatccgatgtttataaactggtaatcaaaaaggttttttcttttaggtgagtgggaaagtattacccttgttttaaatatctaagcaatgcctatcaacccttttttgtgttatgattactgtagtcatatttatgaaaaaaggtttgtgttttactcttgctagtgagaaaagtgggacaaaatatacttttgaaataaaatgctatatggcacctaattattttttcttttaaaatgccttaagttgcagtctcattttgataatcatttgcttcca

SEQ ID NO: 42338 - DNA, 637 bp, Homo Sapiens
ttttttttttttttttttctgtgtaaatatatttattttactggtggagcgctaacatctggatcgtaacatgtgcagaatgtatggtaggaatgtattctcttgtaggaatgtaaatctgtattaaaagggggtccaagccaggcccccaggtcttctcattgtatgcacagtccgcattcatttttactcttctctaatatgggtctatttgaaatatgcaaaaggtatgaggaatgttttaatacctccaaatttttaagaaaagcatcaaagggttgatattttttaaagtttttttagtagcactttctctggatgacagaaggggcaaccacatgggcacccttgttcataccaaagggtgagcagtggccagagcctcctctgcacctctcgagtgtctttaccaattgagctttttatcgccatagccccttggagtgccccagctgccctgaggtcaatcaaggaaaatttcttaatgaaataagctccaaagagccaaagtatcaacttacagatcgtttttaaagcttaaatttatgaaccacctttgtggtaaacaatgaattatgaataccgcagggcagccttcttaaatgacaaatgtaaaaaaaaaaaaaaaacctcgtgc

SEQ ID NO: 42339 - DNA, 702 bp, Homo Sapiens
gggacaaatgtaaaaaaaaaaaaaaaaaaaagactctacttcgtgcagcaattgctactctatacgaattgtcttaatttgaaaaccttgctgttacaaattggacctttatacattttctgaaaacaatgaaaagagtatatttaaccttttctggctgtaaatggttaccttcctgtaactgccccgcacctggaggcatggagttgtgtgcatcctgcttatgtacaattgttttcagtgtttctaagaatgagtctgaatggttcttgaaaattagccaggatcaaatgctattgcagacaaagccaataaaaagttggacttcttttggggataacaagttttggaagagaaatgcaggccatatgtgcgcatgaccgagattttgaaaaaagatgtacatagtgacatgtttggtgcatggtttttgaggagggcttttgtcaaaaaggaggtataacctttcccccacagacctgagagctgtgccttttctatgcaatattacagacgttacatcggaacccagatggctgtattcacatgtaggtttgggctgtaatctaaacattggacagattaatgtacatggaatgagcagtcttactttgtagtttatattatacataacagttaaagataaaaaaaaaaaaaaaaaaaaaaaaactgtcgccgctcgcctcagacttctgacatctt

SEQ ID NO: 42340 - DNA, 697 bp, Homo Sapiens
ggcacgaggagcaagtaaatattgcacaggcatcatgatgtaatagttgatggaccccagagatacccctcacccatgcagagaacaaagctgtgtggaagagcaactaccataagatggtgtgttccttccagcggctgttaaagccatcctgaataacaaatcagctattcctacctacagacccattccaatatgctgtgatacacgacacggtgcaccgcagaggagacagacatcttcagcacaaacacagatgcctgcaggagcttggcaagtcactaaattgcatgaaattgtgaggtgcacaccaaatgcagggatgggggaggccgtgggaagctctgtattctcaaaatttgacagctaattccggtttttagaaaatgcctgaggccagtagaggccctctagtcactcactgctgctgtttctgatataattattgagaaagctatctcacttaatagaagaaaacacgcactatcaaaaccagatagcctaacgtgcatgtgaaaattgagaaagctgaaaacaaatccaggtacccttctctgaactggagtgtttccacagacttgaataatttatgaaattatcacaccagtatttctcatatcaccaagaagactttctctcctgcagtagaggattgttatatttgcctaaaaaacacgattccaatatatgacaaggg

SEQ ID NO: 42341 - DNA, 656 bp, Homo Sapiens
tcagaatccttggagctgaagagagaaatcaaaagagcatgatgatggctgcctggtttcaggtggaacttaatgcattgatctttagaagctccttctgttggaagttgagtacctgtgatctaaaatgtcctggaggcagatgacatctaaaatatgtgctttccaaccagcacagctggcgctcttagctcctgattggttgtgtgttttattaaggatcagtgcagttaagtcgtattttaaagtgttacctcccctcctaacccttccccttcttggacactgaaggaaaaggccaactagggtgttagccctctgggcaccaaggaaactaacagctttctcaaagcggtgaccactcaggccagcccagacaaatctgagggatggccagtgcactccaatgatgggacaggcctaacaacacatgtaagcttccccgagagctttcagctggttcacctctttgttctctagactcttaagtactgactgctttgacttttgtgattatgttatggtgatgtgtagtcagtgtaccaatatgttcacaacctaggatcatgataatggagtgtgttttgggttttttttaactgttcagaaaaaaagtaaattacaaatataagattaaagtgaaaaaaaaaaaaaaa

SEQ ID NO: 42342 - DNA, 755 bp, Homo Sapiens
  misc_feature (674)..(674): n is a, c, g, or t
  misc_feature (688)..(688): n is a, c, g, or t
tgttcaggttattcttagagactacacatttggaatagcagagcaaaatatggataatgaaagtgttgggaaaaaagtgatgtgacagggagtgaagacacttgataccagactctgggagatactctgcaagttgacctggcctctcccccacaggaacaaaacactgcctccagagtctttaaattctcagttatcaacgccaaggtttaaggtctagatagggtttgctatagggtttgctctgacaatttttaaagcttttggattgttctaacatagcttaagctattggttcctaaaaatcccaaatcaagatctatgtagaatataaaggaagcctgaaccaatccttccacatactgttaagatgtagacttggaacaaagctgttgggacccagagcaatgaatttttgaactgaagctactggtactccccagcaccacctcatactaagaattcctcactctgacatgacagtattttttctgaccaggagctgaaagaccctgacattcatgatccaaagatataagaaattttgatatgtctgcatgcagcacagaactttgaacctaggaggcagtcaataaatacatgagaaattcagctgtcattcagttactcttaattctttataaaactttaaatgataccacatatttgtttgnttaaaatggctttnccaaaatcaaagtagactaaagcagccatctttaaaatccaggatcatcaatgctattaacagtatc

SEQ ID NO: 42343 - DNA, 510 bp, Homo Sapiens
cgatttgagttggtgggcaaaactctaaaaatctaaatctgatgcttatgtaagggttgagcgaattagggagattgctagtggaaattggagggaatttgttttgcatcatttgtctaggatctatgcaaatatagctccactaaaggaccatagggaagagccagccttgccttttcttatatgattttgtttacaaaattttactgggacttttaaatctagctatagagttgggaaaaaatatttccacttagatattttacatggttttgtttaaaattaccattacttgttttttaaaaacacatgaccacatatgtatatgtatatctacctaaacattgtatcatggtttcagtatgttattcatgtattactgggagatgctaccaagaaaccaacccaaagaaaattctgaaaaatacatttctatttatagaataaatgtttcatttatataaaagcaaaagaacttagagttctaataaatgggatgtctaataaaaa

SEQ ID NO: 42344 - DNA, 591 bp, Homo Sapiens
taaaatcttaaactatggaaaattacaaaaatgaatttttcttccctgaaatcagagcttacatgtgtgtttttttataacattttcagataaatgtattcaacatgtaatacagtattttcacattcacctcttattttatattgaaatgtattacagtattaaaactcagtgttcagtatttatttcactatgcattttatttagtaaaagccaggagaaatgtttaatccaatggtgccttactttgtgatttaaaagaaatcaacttttttttatgtctaagtagtagattatttgcatatttgtaaaaactgttaggtctttatattttaaagtgtaataccagttttgttattttagtagcagaaatgggatgattgttaaagttccccaaaaatgttggcatgaaattaatttttccctccttatagtcaaggaccgtagaggaagaaaaacttttttttcatatcatgcactatgtaaacagacacattttgctatctgtgtcatcaggatagtgtaagtggtagggtagagactaccctagacatctgcatctttgtaagttagccagacaataaagaaaag

SEQ ID NO: 42345 - DNA, 744 bp, Homo Sapiens
cttgcctacgtcagtaacagccaccaagggaagtttggttggcttagtggattatccagatgatgaagaggaagatgaagaagaagaatcgtcccccaggaaaagacctcgtcttggctcataaaatatttattaggggaccctcaacatgtggtcttacaatgctgcaactgttcagtgagctgaaaatctgaatcagaaagctttctcaattgaacttataaaatatacaaggagtagcaaaagacagtatatcagctaagagagtttagttctaataaaaatcaggcttcccaggaacttgattgcttgctagtaattaaggggtttgccttttaggctgtcaaaacaaacattagtaaccagaacctgggagatagcttctcagcaaggaaaagtcacaggtttggggacggtttaggggaggggaaaaggttgatataataatgcagggttgctcctcggggtgtcgatctagaaacaattttacagaacttcagttgtaaactcaataacattacttgtataatggtgctggccatgttgttgttttaatcagttgcctctttttaaaagaaatttttatggaaaacacattcaactatcattaaaaaaatgaagttaagctgttgggaccatttctttaagatttaacaaaagttcagccttttaggtagttgaagggaagtacaccccgtattcagcacatgttgagttttctacaccaggaattttcaatatgta

SEQ ID NO: 42346 - DNA, 564 bp, Homo Sapiens
  misc_feature (126)..(126): n is a, c, g, or t
  misc_feature (174)..(174): n is a, c, g, or t
  misc_feature (258)..(258): n is a, c, g, or t
  misc_feature (478)..(478): n is a, c, g, or t
tctggaggtgctggggctgctggggggagtcatcatgatggtgctgattgcccaccttgagtgaggggtggataaactacccctgccccaaacctctacccctaactccaggtcaggggtgcgtanaggttgggggccctggccagggacatctgccaaaggaaggaactgtancctgggagaatggttactttggcattagggccttcaagggctggcagtcttacagaggctggagcggtgagaatgagaggccanagggaccatagtgttgggcactgtctgaccatgttgcatttggaaggctaaatggggccatgaagaaggctggaagggacaggtggtgatggcagcctacctggtgtcccctaccccacctgttctcggagaaccaagttgctacacaggaagttctccaaggtccagtttcctttctcccaccagttggtggaggcttcagggaagaccagagtcctgnacagagagggtaacaggaggagtcggggataaacatcaaacatcaatcgtgtgtcctgatttgggagtgattggggggatggggtg

SEQ ID NO: 42347 - DNA, 500 bp, Homo Sapiens
agcccatcctctcaggcagagcagggtggtccgggcacactgggcctgcctctccagcctcaggatgctcttgtttattctgggctcagaccctcctcttgtacgtctcatcacagctggtagagacccaggagtgcctgattgtcccacaggggtggcgcacagctctgggaccactcagaagatgggatgtgtgggtggaggatgccttgtctcggtcagctcattcctgcctccttcctgagccagttcagggcctgggggagagccagcttggggtaggaagttaataatactgttaatttgggttgttgttggatttactttgctagattttctctttcaccacgtgtgaactgtgggtgaggtttcaaagtagcttcaccccacgtggcttggttcccagggacagtcagggcctcgggggcccagctatgtacaacgaagctgtcgaaggagaagacaataaagtcgctccgcagctgctctgtgtgtttctc

SEQ ID NO: 42348 - DNA, 747 bp, Homo Sapiens
  misc_feature (701)..(701): n is a, c, g, or t
  misc_feature (703)..(703): n is a, c, g, or t
  misc_feature (707)..(707): n is a, c, g, or t
ggtgcgtctgtttgtgtctggtgcagaatatgacaatctaccaactgtccctttgtttgaagttggtttagctttggaaagttactgtaaatgccttgcttgtatgatcgtccctggtcacccgactttggaatttgcaccatcatgtttcagtgaagatgctgtaaataggttcagattttactgtctatggatttggggtgttacagtagccttattcacctttttaataaaaatacacatgaaaacaagaaagaaatggcttttcttacccagattgtgtacatagagcaatgttggttttttataaagtctaagcaagatgttttgtataaaatctgaattttgcaatgtatttagctacagcttgtttaacggcagtgtcattcccctttgcactgtaatgaggaaaaaatggtataaaaggttgccaaattgctgcatatttgtgccgtaattatgtaccatgaatatttatttaaaatttcgttgtccaatttgtaagtaacacagtattatgcctgagttataaatatttttttctttctttgttttattttaataagcctgtcataggttttaaatctgctttagtttcacattgcagttagccccagaaaaatgaatccgtgaagttacattccacatcctgtttcaaactgaattttgtttcttaaaaaatttaaatttttttttcccancngggnacgactatagccaaaaaaaaaaaaattgtcgggccgccct

SEQ ID NO: 42349 - DNA, 675 bp, Homo Sapiens
ctcctcggaagagcccgtcgcgctggacagcttacctagtcttgtagcattcggccttggtgaacacacacgctccctggaagctggaagactgtgcagaagacgcccattcggactgctgtgccgcgtcccacgtctcctcctcgaagccatgtgctgcggtcactcaggcctctgcagaagccaagggaagacagtggtttgtggacgagagggctgtgagcatcctggcaggtgccccaggatgccacgcctggaagggccggcttctgcctggggtgcatttcccccgcagtgcataccggacttgtcacacggacctcgggctagttaaggtgtgcaaagatctctagagtttagtccttactgtctcactcgttctgttacccagggctctgcagcacctcacctgagacctccactccacatctgcatcactcatggaacactcatgtctggagtcccctcctccagccgctggcaacaacagcttcagtccatgggtaatccgttcatagaaattgtgtttgctaacaaggtgccctttaaccagatgctaggctgtctgcgaagaaggctaggagttcataaaagggagtggggctggggaaagggctggctgcaattgcagctcactgctgctgcctctgaaacagaaagttggaaaggaaaaaa

SEQ ID NO: 42350 - DNA, 696 bp, Homo Sapiens
cgagggacaagtcgttcctggccatggtggtggacattgtgcaggagctgaagcagcagaaccccaggctggtgtacgtgtgtgatccagtcttgggtgacaagtgggacggcgaaggctcgatgtacgtcccggaggacctccttcccgtctacaaagaaaaagtggtgccgcttgcagacattatcacgcccaaccagtttgaggccgagttactgagtggccggaagatccacagccaggaggaagccttgcgggtgatggacatgctgcactctatgggccccgacaccgtggtcatcaccagctccgacctgccctccccgcagggcagcaactacctgattgtgctggggagtcagaggaggaggaatcccgctggctccgtggtgatggaacgcatccggatggacattcgcaaagtggacgccgtctttgtgggcactggggacctgtttgctgccatgctcctggcgtggacacacaagcaccccaataacctcaaggtggcctgtgagaagaccgtgtctaccttgcaccacgttctgcagaggaccatccagtgtgcaaaagcccaggccggggaaggagtgaggcccagccccatgcagctggagctgcggatggtgcagagcaaaagggacatcgaggacccagagatcgtcgtccaggccacggtgctgtgagggccccgcc

SEQ ID NO: 42351 - DNA, 335 bp, Homo Sapiens
  misc_feature (325)..(325): n is a, c, g, or t
gcggccgcggctgtaggcttttttaaatgtttacaagtaaatagtttgaattcagtaaatattattggttgttgtattgatcaatgcatgttacccattcaaccattttatagactaccaatttcttttatgttaactagaatgcttttgttaaaagttatttgttcattatttgtgctacccctttgattatgcagacaacctcatcagctgcctaacttatccatctttgaacttctgactacttgttgtatctgctggatatttagttcaactgtatagttttatttacttctgtatgtgtatttttgtgaagtattcacanaggttaagtt

SEQ ID NO: 42352 - DNA, 932 bp, Homo Sapiens
agccgaggcgggcacggtctccgagtcgcggacgccagctccgagctccctctctccgccgcgcctcctccaggtcgcgccttcgtcgggaccacttcgggcaggagtcgcgtggcgaaggcctgcggccgcggcacaaagttgggggccgcgaagatgaggctgtccccggcgcccctgaagctgagccggactccggcactgctggccctggcgctgcccctggccgcggcgctggccttctccgacgagaccctggacaaagtgcccaagtcagagggctactgcagccgtatcctgcgcgcccagggcacgcggcgcgagggctacaccgagttcagcctccgcgtggagggcgaccccgacttctacaagccgggaaccagctaccgcgtaacactttcagctgctcctccctcctacttcagaggattcacattaattgccctcagagagaacagagagggtgataaggaagaagaccatgctgggaccttccaggaaatctggggctccatgtggcagatctccccagtgaccctccagcgcaggtgcttcaagacaggaagtctaagcagccaccgtaacggtgtatatgctcattatcctaattatgcagcaagcaacagcgcctaagagtatcttttcaaatttcaactgaagtcacatgaagacccagattactaaacagtatgcgtgactacctggtcactccgggacacaaacacacggttattaccacacacaacaccacaaaaacacgagcgcactacaagacacgggacggcggcaaaacacaagtacacacaccgtgcaccaagggacataacaatgatcacaagaccacaaacgttcaggtcacacaaggcgcaaaacacagaccgaacacacccaaacgtgcgaccccataacatgcaaaagacccggttacg

SEQ ID NO: 42353 - DNA, 746 bp, Homo Sapiens
cacgagggcttctaaatttctagccctctcgcaggcatcctgactgaactgtgtctaagggtcggtcggtttaccactggacgggtgctgcatcggcaaggccaagttgaacaccggatggtgccaaccatcggttgtttggcagcagctttgaacgtagcgcctgtgaactcaggaatgcacagttgacttgggaagcagtattactagatctggaggcaaccacaggacactaaacttctcccagcctcttcaggaaagaaacctcattctttggcaagcaggaggtgacactagatggctgtgaatgtgatccgctcactgacactctgtaaaggccaatcaatgcactgtctgtctctccttttaggagtaagccatcccacaagttctataccatatttttagtgacagttgaggttgtagatacactttataacattttatagtttaaagagctttattaatgcaataaattaactttgtacacatttttatataaaaaaacagcaagtgatttcagaatgttgtaggcctcattagagcttggtctccaaaaatctgtttgaaaaaagcaacatgttcttcacagtgttcccctagaaaggaagagatttaattgccagttagatgtggcatgaaatgagggacaaagaaagcatctcgtaggtgtgtctactgggttttaacttatttttctttaataaaatacattgttttcctaaaaaaaacaaaaaaaaaaaaac

SEQ ID NO: 42354 - DNA, 854 bp, Homo Sapiens
  misc_feature (779)..(779): n is a, c, g, or t
gaagctatgtcaagaggctgttttatttttatttttaaacaggtggtgagaaatttctgtgaaacctgtgaagttaaaacggggtgggatgggggtactcaatggagtatgtctgatggatcccgaagaatggagaggaacacaggcgctgagtatggagcagcctggagacccaccccacctgcagggctgccctgagcgcctggatttctggttctgatgccaatactagtcaccccaagtagtctgctcacagtaacccaaacctcaagtaaactcccctttccctcgctatgtgcactgatatgggtttataattttctgaaagttacccactgaagcccatttctccgttgagtcatcttgtaatttccagctttctccccgctaaggaagatatctagtgttggggatcctggcccctcaacctcctgtggaacccagcagttctgttatatcccctgctaccctagatgaattaagacggttaaatactgtgtggaacttttattagataacacactttttattagataacgcttaaaggaagtcagtacataaaactgcccggtgctgtgtcccgtctagttgtttccatgttggcttgagaacagaaatctttgtgggagttagccgggaaagggctccagttcatggcgatttagggtagtaatacattttggtgttacccagatgctttctagaacgggttctttcctcatccctgccaagactcttcccggggcccccatttcaaaagcccggtcccactcccacgngggggccagccgctgcgtgtggggcaagccctttaaggaaccgggacgtatggggtccggggattttttggtctg

SEQ ID NO: 42355 - DNA, 376 bp, Homo Sapiens
caactgaatggtaaatggtattactttgatgatagcaacgtgtccctggcctctgaggatcagatagtgactaaagcagcttatgtgctattttaccaacgtcgagatgatgaattttataagacaccttcacttagcagttctggttcctctgatggagggacacgaccaagcagctctcagcagggctttggggatgatgaggcttgcagcatggacaccaactaatgctgactccacgatcctgccaccctgtagcgccagtgtaatcccccaggagaacatctttgacactctgcagactgctagtgttctgtctaaaaaccagacaaggaaatacccttcttttatgagcagaaggaaacaaaaaaaaaaa

SEQ ID NO: 42356 - DNA, 469 bp, Homo Sapiens
  misc_feature (10)..(10): n is a, c, g, or t
  misc_feature (13)..(13): n is a, c, g, or t
  misc_feature (17)..(17): n is a, c, g, or t
gcccgtagtngtnggtnggaattccatgcagtaaagtacatgaagaacagtcaagtaaggttacctttgggaaccttaagtaaatcagaatgggaagctacaagtatttacttggtgtttgcctttgagaaacagcagtgagcacataggcagtagtcccagaggggccgtgttctgtcctgcacaaatttgaacaactcatctcgatatatttgatatttctctgtctgttgattttaattctaaatgtgcaggatgctgccagaaactccaatgtagaaattcaacatttgctgtctgtgacagatgaacttttgcatgtgtatataagaatgagttgggacctctgtctttaaaaatctatttttaggtaatgttctaagatttccatttgcctctatgatctaagctcataaaaatatattatgactttgataaaggcaacttaaacttcttaaaaaaaaaaaaa

SEQ ID NO: 42357 - DNA, 701 bp, Homo Sapiens
  misc_feature (661)..(661): n is a, c, g, or t
  misc_feature (669)..(673): n is a, c, g, or t
  misc_feature (676)..(678): n is a, c, g, or t
aagacttactctaagatcttagattctctgtgtctaagattctagatcagatgctccaagattctagatgattaaataagattctaacggtctgttctgtttcaaggcactctagattccattggtccaagattccggatcctaagcatctaagttataagactctcacactcagttgtgactaactagacaccaaagttctaataatttctaatgttggacacctttaggttctttgctgcattctgcctctctaggaccatggttaagagtccaagaatccacatttctaaaatcttatagttctaggcactgtagttctaagactcaaatgttctaagtttctaagattctaaaggtccacaggtctagactattaggtgcaatttcaaggttctaaccctatactgtagtattctttggggtgcccctctccttcttagctatcattgcttcctcctccccaactgtgggggtgtgcccccttcaagcctgtgcaatgcattagggatgcctcctttcccgcaggggatggacgatctcccacctttcgggccatgttgcccccgtgagccaatccctcaccttctgagtacagagtgtggactctggtgcctccagaggggctcaggtcacataaaactttgtatatcaacgaganaaaaaaannnnnaannnaaaaaaaaaaaaaaaaaaaaaaa

SEQ ID NO: 42358 - DNA, 570 bp, Homo Sapiens
  misc_feature (531)..(531): n is a, c, g, or t
cacgaggtttcccttgacgtttactttcaagtaacacaaactcttccatcaggccatgatctataggacctcctaatgagagtatctgggtgattgtgaccccaaaccatctctccaaagcattaatatccaatcatgcgctgtatgttttaatcagcagaagcatgtttttatgtttgtacaaaagaagattgttatgggtggggatggaggtatagaccatgcatggtcaccttcaagctactttaataaaggatcttaaaatgggcaggaggactgtgaacaagacaccctaataatgggttgatgtctgaagtagcaaatcttctggaaacgcaaactcttttaaggaagtccctaatttagaaacacccacaaacttcacatatcataattagcaaacaattggaaggaagttgcttgaatgttggggagaggaaaatctattggctctcgtgggtctcttcatctcagaaatgccaatcaggtcaaggtttgctacattttgtatgtgtgtgatgcttctcccanaggtatattaactatataagagagttgtgacaaaacaga

SEQ ID NO: 42359 - DNA, 591 bp, Homo Sapiens
cgcgtccgcgcgcgctcttgacgtccggagcccctggagtaggcgcttccggccattcatactgcagtcggtcagtgttcggttgaaggattctgtgtgctgtcggacccagagggtgacggcgccgctaggatgaagctcgtgagatttttgatgaaattgagtcatgaaactgtaaccattgaattgaagaacggaacacaggtccatggaacaatcacaggtgtggatgtcagcatgaatacacatcttaaagctgtgaaaatgaccctgaagaacagagaacctgtacagctggaaacgctgagtattcgaggaaataacattcggtattttattctaccagacagtttacctctggatacactacttgtggatgttgaacctaaggtgaaatctaagaaaagggaagctgttgcaggaagaggcagaggaagaggaagaggaagaggacgtggccgtggcagaggaagagggggtcctaggcgataatgtctctcaagatttcaaagtcatatgagatttgggatattttttgtacaggttgtgtttgtttatgtcagtttttaataaacataaatgtgggacaga

SEQ ID NO: 42360 - DNA, 750 bp, Homo Sapiens
  misc_feature (553)..(553): n is a, c, g, or t
  misc_feature (717)..(717): n is a, c, g, or t
ggcctggacgcccgtgtgcctgcccaaattcaacgcagccggcttcttccacgcacacatctcttacctagagcctgacactgacctctgcctgctgcttgtctccactgaccgtgaggacttctttgcagtctctgactgccgccgccgcttccaggagcgccttcgcaagcgcggagcccacctggccctgcgagaggcactgcgcacaccctactacagcgttgcccaagtgggcatccctgacctgcgtcacttcctctataagtcaaagagctcgggactcttcaccagccctgagattgaggccccatacaccagtgaagaggagcaggagcggctgctgggcctctaccagtacttgcacagtcgtgcccacaatgcctctcgcccactcaagaccatttactacacgggccccaacgagaacctcctggcctgggtgacaggcgcctttgagctctacatgtgttacagccccctggggaccaaggcgtcagccgtcagtgccatccataagctgatgcgctggatccgcaaagaggaagaccgnctcttcattctcacgcccctcacctattgatgggaatgtgtgcgggctcagccttcctggacacactaggtgtgggaagccataggagcctccagatgggggctggcctctcttgcccagccagcgggcagggactgtgggttggtgaatgcattaaagtgctntggggaaaaaaaaaaaaaccaaaaaaaaaaaga

SEQ ID NO: 42361 - DNA, 757 bp, Homo Sapiens
ggcttcagcccagctgcatagttgaagatttatggacagaaggaaagtgatgtatggaaaatggaagtgagatacagcaacagccggattagttacagttcagcgttgccttatttgaatatggtttgaacagttcgctgtcttggttggctgaaacttagtgattgccacaagagtagggtaccgtctgtttacacgtccagttaggctacagttctatgtactgagaaacctttaagctgaacttgagatatgtaaagagactttaggctaaacttaacaatatatataggatatatacccttctacttcacatgcactgaatatgcattttattgctttactcttcattctgtggcacctacccacaggggaagtaagaagttcgtctggtatttcggaaactaaagtccttatgggatggggtctagaattgattctcctttcctgagttttactccacggagtcttaggtacctggtaaaaagttgtcttctaaattaagggtcattgctttgttgtctagctgctaatgtcttacttttgtttcttttgctttttaatcagttcttaataggatatagtttatgttttccaagttataactttggagttaatggtcactagattatcagttatgagcagtgttaaaaatctcctattaatgtgtaatgtaccttgtcagtgcctcctttattaaggggttcttgagaataaagagaaaggacttaggaaaaaaaaaaaaaaaaaaaaaatg

SEQ ID NO: 42362 - DNA, 916 bp, Homo Sapiens
  misc_feature (718)..(719): n is a, c, g, or t
  misc_feature (730)..(730): n is a, c, g, or t
agtccgagggcagcagctccacgctcctcctcctcaggggactcctcagaatgctgactccaactgaggctcagccccaccccagggcagccagggagagcccgggagctcccctccccaactgaccacctttgtttctcccccatgttctgtcccttgcccccctggcctcccccactttctttctttctttaaaaaaaaaaaaaaatacggtgggggtagggggctggaggagcccaggccaggactctgcagcctcagagacatcagcccttgggggtcctcctccagggacagcaactatcagactaagccagcaccggaccagcctggcccaccccacccacttctgcacttgcggttccggcatggacaatggaccggagagtgggggtggggggtcccaaagagtttgatgaggccctccacacctgcggcccaatccaaggtggggtggaagcttggggaagacccattccttcccagaggggcctgccacctggacccctgcattggaactggaggcagggaacatggggaggaggagggtcggtgccttcaagaaaacaggcactgccctggtggccctctcccctgccccctgcaggaaagagctgcctggacccgttcatgggggaaggggcagaaatgttttttatatatgtgtatatatttttttttaagctctgaactgtcaacgagaacttttcctaccggnngaataaactcnacaaaaaaaatacaaaagggggcggccccctctaaaataacccctcaaggggccccaaacttaacccctacccagcttttctttgtacaaaatgggccccctaaaaggggagtcgttattttaaacctaggcccctggccctttcttttttaaaaacccctgtgacctgggaaaaaacttgcttaa

SEQ ID NO: 42363 - DNA, 583 bp, Homo Sapiens
tatgccacagaacaaacactactctagcagagcctttcttgcactttaaagtgagattaatttagctgtaatttggttaaaaacttcctaagagagaaaattaagtctactgatttggtataggtaaatggacattaaacttttttaaagtaaaggagatggtagataccgttagattatagtcttgaggttcatgtgaagccagtggtgttaacttactttgatttccttgttcaggtcagggcctggaacgcctgtgcggggaggtcactcaattcaaaattttctgtatgaaagcatttttcaccaaaatgagcctcatccctttatgcaacacataaccttactgagggagggaaatacggaagccacctttttatttctcttcactgtgtacaagttcacttgttgtcttgaacactgtctcaaatacctgctttttgttttggatagtaccttgtctgtataagaagctggcctttccatagagaggccctggagtctaaaattatgagaacaattaatttatttgtgtcttctattatgatctcgttttgacaataaaaatccttactactttctc

SEQ ID NO: 42364 - DNA, 490 bp, Homo Sapiens
ctcttgagctgcttccctcatcacaccacactcacatgcatctgttctctctcacactctatacccctgccacttcctggcacctccccccatgcttgtcatttaattttggccacttgtaggtatcagtgtgatctgatcaacactctggttaccttggtcagtgaaaagatgctactatattgcttttgtcccaaagtgagtaaaatcccctagagcagagagagagagagagagagagagtgtcttcatgccaaccacagcctgtttctgctgagtttcttatcagccctcaagctatgctaggaaaagttataaaatgccaaaatatttataaacatttactttgtccataaaatatttacattggatactctgtaagtaggaggtactttgtcccaaaaagatgtataagaatgtactaatagttttatttgattaggattgaacagttcagttgtatctatgccccacagtgaccagtaaagtc

SEQ ID NO: 42365 - DNA, 817 bp, Homo Sapiens
  misc_feature (772)..(772): n is a, c, g, or t
cgcttaccttagagttttgttttttttttttcaaacccatcaaaatctacttatttatgaatccaaggggtggcagcatcactctgttctagcattctttgtggagatggtctggtgcctagctgggagtgagcagcagcccatcccctgttcactttctctagcccatcattacctgtgaactgcagtggggcagtcatggcaaatagaattgggctggggtttctccttcttttcagttcattgtttgccctgctaggaattagaagacagacaccatgtcccaggacagtgttacttcttctgcatgatgtgtggtagactccctttgctggcttgtgcagtgatactgagaaaatacatgaacagaaactgcccaggtggaacagcacgtaacctagtgagtgactgtactcctttctaggaatgctgattcagagtgcacctctttgactaggtcccaggatccccttgtccctggagtagggactaactatagcacaaagtaatatgtgccaatgctatttgtgaaatgtttggtctttctaaacgactaaaggatttgttgggtttttgcttaagttttgaaccaaatcctagagccagctgataatatttaataatctggaggagagaataatgatgtaccaataagtggagattcctccttatgatgtatgctaggttatggaagatgtaaaatattcaactttttcctcctttttttggactttgtattttactgcatgtttttcttcatttttaaatcaantaaagagtaaatttgtcctttaaaaaaaaaaaaaaaaagggcggc

SEQ ID NO: 42366 - DNA, 657 bp, Homo Sapiens
  misc_feature (628)..(628): n is a, c, g, or t
  misc_feature (636)..(636): n is a, c, g, or t
atcatcatgactgttgagttcttggctgtgcccatcacgccacagcacgacgcctgccaaaatgcccccaacctactgcctgatgcaggtgccattgccattagcggtcatcgacagcttagggcagcactttccaacgggtgcccatgggacaccagcctgcgagatgcttttgtgggaaaggggttttgtggttcaataactttcggaagtgctgcacactctgtccccaagttggacattcacaaaggccgttattgccgtaaaggctctgacaagccctatagaaaagcttcttgctaaaccttctttaacccatgttttctaaacttatttgaccacagaacccttttcttggggaacagctattaacccccaaggaattattggttcctcaagtgcgttttgggagctgctgccagagagctaaagggcctggggtgtgagctgactctccgctggggaggccgggtgcacacgccacagcccgaggaaagtgctggccaccgcccgtgggcatcgatgaggctttggcccccaggggccggactccgtgtgacctaataggtcgtttccaagtcacccgttttggatgtgcatttcatgtgacaatacagatgacatgcanatggccanaaaaaaaaaaaaaaaacgcgg

SEQ ID NO: 42367 - DNA, 895 bp, Homo Sapiens
ttcaagcacctcagccctctgaactacaaaacagaagagcctgcaagtgacaaaggaagtgaggcagaggcccacatgcccccaccgttcacaccctacgtgcctcggattctgaacggcttggcctcggagaggacagcactgtctccgcagcagcagcagcagcagacctatggtgccatccacaacatcagcgggactatccctggacagtgcttggcgcagagcgccacgggcagtgtggctgctgccccccaggaggcctgaggctgggtctcactgctctgaaaagacacaaccagaatggcctggggctcaggcccttggctgagtgggaatgcgttgggactgcccagctgagctatcaggtgcccatcttttctggtcccagcagtggtgaggagagcacaggcaggcctcgcccctcccttgctcacccagtttcccctccggcacaagcttccagctctgcagctggggtgacatccccagtggtttgtcgccaagaccatgtggtggacttttcgccccccaaactgatgagtccgggagaatatatggagagagagatgtaacaaggggaaggcctcctcccttctgagcacacacacaaccgataaccaaagagatgctgcagtccaggtctgaggtcccgctggcatccagctccctgctccatggccagtccctccccagcccagcagtccctccaggctacatccaggagtaagctatggggaacaaggtggggaggtggccagtgcctcctgccagctgtgcacacatctctgtatcccgcttagaggtccgggggtttttggaatcatggtggccaggggagcctaacttgggtccaggggttacccccataacagggaagggaacagggaccccc

SEQ ID NO: 42368 - DNA, 885 bp, Homo Sapiens
tgggtcattgtggccgaggaaggctacggcgtggagctcgtgttccagacctttgaggtggaggaggagaccgactgcggctatgactacatggagctcttcgacggctacgacagcacagcccccaggctggggcgctactgtggctcagggcctcctgaggaggtgtactcggcgggagattctgtcctggtgaagttccactcggatgacaccatcaccaaaaaaggtttccacctgcgatacaccagcaccaagttccaggacacactccacagcaggaagtgaccactgcctgagcaggggcggggactggagcctgctgcccttggtcgcctagactggatagtgggggtgggcggaaggcaacgcaccatccctctcccccaggccccaggacctgcagggccaatggcctggtgagactgtccataggaggtgggggaactggactccggcataagccacttccccacaaacccccaccagcaaggggctggggccagggagcagagcttccacaagacatttcgaagtcatcattcctctcttagggggccctgcctggtggcaagagggaatgtcagcaggaccccatcgccatccctgtgtctctacacgctgtattgtgtatcaccgggggcattattttcattgtaatgttcatttcccacccctgctccagcctcgatttggttttattttgagcccccattccaccaccccagtttcctggggcacaagtgtctgtgcatgtcccccaggagccaccgtggggagccgatggggaggggatggagaaacaagacagggcttctctcaggcccagtggcsggtcagccacaccagggcacgcagccaataaaccgaaagtgttacagccaa

SEQ ID NO: 42369 - DNA, 1114 bp, Homo Sapiens
  misc_feature (668)..(668): n is a, c, g, or t
gtgcagaacctctcctggatgtttgtcttggtgtttttggatgtgctgatcaagacaaacatccagtggagcagaacctctcctgcctcgggagttctgaccaggttccccagcagggtgttaagcctctgtctctggccctaccagcatccaggttccactttcctaggagagagtggagatgggaagacagggaaaggaaggcagcaggaggccacaagcccaccaggtcttcatgtcaagagagggagtaacatgtcttctcattgcccacggacccaacctctgtccaggtgcccctcatcatcacagtttaacacaagctcccctgctccagccaaattgatctcccagtcttgtccttacccattccaagtgctctgccagcccctgttcatccaagttttaagtcctccaccctgttctaagagactgttccaacggctctgggcctcagtggtcacttgaccaccattgtctcagagctgcccactttgtgtgtgtcacatgctgcctgagtcacacgtacatcttatttctgcctctagttttgtaagctcctggagggcggataacatcttatactactcttgtattctcatggcacctagtgcagtgctgggcacagagtaggtgctcaataaagacttgttgaatgaacaccccanctaatcccccctcacccctacttccccgtcccccacgctttcctccacctccccatcaaccctccgcctgtccacatcacactccacactctcatcaccctatggggggggcccgctctaaaaaaccccctccggggggcgccacttttatacccccacccagtttttttttgacaaaaggggcccccttaaaggggggcggctattttaaaccttaggcccccggccgcccttttttacccccccccggtgccggtggaaaaacgtgccacctgtggggttccttttgaaagggaaaactctatttttttggggggggggggcacatatattggggcacccctcccttccccaagaatttttacggctctcctgcgcgatatacaaacaatttcttttccggcgctacaaaggggcggttcacatattctgttcgcccctctcgc

SEQ ID NO: 42370 - DNA, 541 bp, Homo Sapiens
tcagctcggtccttcccaccagcaagacaagtgggtaaaaggtcatccattgcaggaatatatatccgggagagctaggtcccttggggctctggatgctgggtaacccagaggtaatgtgggtaccctttctgaagctgtcagggctgtgactagcacccttatcacccctcactgccttgtgggaatagtagagggttttttttcctccagaccccctggcctttcagttcttaactatttccctccaggccagaaagttttctttgaggaaggagaggagagggtggcaatgatgcctttgatctggaattggacatttctctgtcagagcacagaggaggctcatatcacctcttccctctcctacttggcccagctgcttggaggaccgaccccatggctgagaatatgacggcaagaggaacagagtttgctccaagtgggaaagggtcccaagcagtccagagaagatgtctgtgtggctttccctccctgcctcccccagctcccacactggcctttgtaaataaatggcgtg

SEQ ID NO: 42371 - DNA, 620 bp, Homo Sapiens
agcgcctggtgggcgccctggcgtctggccctgtgccagctgccgctgcgcgtggccgtagacctgtggagccgtcgtgaactgagcgcgcaggggcccgtggcttggtttcacgcgcagcggcgccagaccctgcaggagggcggcgtggtggtcttgctcttctctcccgtgtgcggtggcgctgtgcagcgagtggctacaggatggggtgtccgggcccggggcgcacggcccgcacgacgccttccgcgcctcgctcagctgcgtgctgcccgacttcttgcagggccgggcgcccggcagctacgtgggggcctgcttcgacaggctgctccacccggacgccgtacccgcccttttccgcaccgtgcccgtcttcacactgccctcccaactgccagacttcctgggggccctgcagcagcctcgcgccccgcgttccgggcggctccaagagagagcggagcaagtgtcccgggccttcagccagccctggatagctacttccatcccccggggactcccgcgccgggacgcggggtgggaccaggtgcgggacctggggcgggcgacgggacttaaataaaggcagacgctgttttctacccaaaaaaaaa

SEQ ID NO: 42372 - DNA, 650 bp, Homo Sapiens
gacaatgcttataccagttcccaaatccgagaaatggaaactctaattttgaaagaattgaaatttgagttgggtcgacccttgccactacacttcttaaggcgagcatcaaaagccggggaggttgatgttgaacagcacactttagccaagtatttgatggagctgactctcatcgactatgatatggtgcattatcatccttctaaggtagcagcagctgcttcctgcttgtctcagaaggttctaggacaaggaaaatggaacttaaagcagcagtattacacaggatacacagagaatgaagtattggaagtcatgcagcacatggccaagaatgtggtgaaagtaaatgaaaacttaactaaattcatcgccatcaagaataagtatgcaagcagcaaactcctgaagatcagcatgatccctcagctgaactcaaaagccgtcaaagaccttgcctccccactgataggaaggtcctaggctgccgtggcccctggggatgtgtgcttcattgtgccctttttcttattggtttagaactcttgattttgtacatagtcctctggtctatctcatgaaacctcttctcagaccagttttctaaacatatattgaggaaaaataaagcgattggtttttcttaa

SEQ ID NO: 42373 - DNA, 676 bp, Homo Sapiens
ggagttaatgcccgggcaaaccaggatcttgcccttctgtgtgaggtccgtgacagcaatagacgggcacataagatacaaggagaactgaagaatcttaagtcgaaagtgtttggtctggagaatgaacttagactctgttaatgtctacttttggaaatggcccccatttagaagaggtgtgcttcttgaaacctgaggacaaggtcatctgctgccagaaaatgtaaacctgagttgactagagtggtggtattcattattgtaaagacagcttgaagaatcggggaccactaggaaagcttttcttgcatactcagcttgctttatcatttttgctgtccttttaacatttgcgaggagtaggggcctggtcctgaatgacttggaggctttcattatttatcctgtctgtattgaccggtttttgttttttcagaaggcagtgatgatgaaaacttaggaagaaggtattttgcaataagcttggctgagtgtccatgggaagaatactttccctaaagagagagaagcactcacagaggctgcctttctcctgagctcggggagaaggcagcacatcacaacctgtcacattgaaataggcgctcattctgctatttcaccttccgtcctgagcagagcctgatttacgtttttgggcaatttcatggtg

SEQ ID NO: 42374 - DNA, 637 bp, Homo Sapiens
  misc_feature (598)..(622): n is a, c, g, or t
  misc_feature (624)..(629): n is a, c, g, or t
  misc_feature (631)..(636): n is a, c, g, or t
gccctcccctaggttgagatatttttgatactgaaggcccaggccccccagtatggcttgctgccagcaagcagcaaggattctctcgtgggtaacgctgtagccaggcaggaccagcctcttctgggagacccctctccccacgtagggtttgtgtagtgctcccacatcctgcttattgcctgccacccctgcttctcgcctggacctcttggtattccgtgtacaccatccttgctgtttcttgcctctgtgccttcaacctgctgctcctggcctgggataccttttattttcttttatttcttcttccttttttttttttttttttttttttttaacctacaactagctctcagttcaggcactgtctaaagccccaggctgggttaggtggtctaggataccaactccccctcaacattttaccttaatccaacagtacagtaattagccgaaacttgcctggtttttcctactagactgtaagccctctagggacagggacagtgtcttattcatctctgtgttcttagtgcagagcctggcccgctgttggtgtttaataaagtgtgttgatctgaaatgccccagaccnnnnnnnnnnnnnnnnnnnnnnnnncnnnnnnannnnnng

SEQ ID NO: 42375 - DNA, 635 bp, Homo Sapiens
acgtggttggaaaacccgttgactcgtggcacataccatatgatgaagacttggtagaaatgatgttcctgtgaagtaccaaccaaatggctttgcctccaccaaaagacatagagattcttacctctatgctaagtttgtgtttgggtaccctctaggttggcatcagaggctcctgagctggtgtttgtttagggcattgcctctgtcctgaagataaaaggattctattaacagcattgacattgattttttaatgaaatgagatatatcttttcataaccagctgcgttttcttcccctaacatttgttcttggaggcttatcaagagttggagaacttagtgtagagcaaaacctgcatttctcctactgggccagctattccacttagcttgggtgactaatagtgcttttggtatccattttttgctacttctgaccttgccttccaggcctaccaatagcagaatcaatccatctgtccctgagatactcgtgttgtttcaaatgcctcctcccatttctagcatagtctcattctctgtatgttatgccctatccacatggaatcatttatcgtcctctgtaatatactgggccagatactaaaggcttactagtcctagctgttc

SEQ ID NO: 42376 - DNA, 809 bp, Homo Sapiens
  misc_feature (575)..(579): n is a, c, g, or t
  misc_feature (581)..(583): n is a, c, g, or t
  misc_feature (592)..(593): n is a, c, g, or t
gggaggaattcgagagcattgaggaggcgctgcctgacactgatgtgctctacatgactcgaatccagaaggaacgatttggctctacccaggagtacgaagcttgctttggtcagttcatcctcactccccacatcatgacccgggccaagaagaagatggtggtgatgcacccgatgccccgtgtcaacgagataagcgtggaagtggactcggatccccgcgcagcctacttccgccaggctgagaacggcatgtacatccgcatggctctgttagccaccgtgctgggccgtttctagggcctggcttcctcagcctcttctctttaggcccagctgctgggcaaggaattccagtgcctcctacgggggcagcacacttagatattcctggacatccagatagctcacatgtgctgaccacacttcaggctctggactggagctctctggcatgggggtggggcctcagatgctggggcccagtctgccccatcttcattcctgcaccttaaacctgtacagtcatttttctactgacttaataaacagccgagctgtcccccaaaaaannnnngnnnacaaaaaannaaaacatgtcggccgccctcgggccctcgaggaagcttttctagaaccattttcgttttggcggcgccggggccccagcaagggtaaagcggaaccatgggtccaataggcctggtttcccatagggaagaaacccctgggtccaatggaactaaggtggcttttggagaatctcctccaccccaaataaaaaaaaaaagggccccgggggcggga

SEQ ID NO: 42377 - DNA, 370 bp, Homo Sapiens
ggcacgagggtatagatgatttttggcttggacataaaagccaagccacccatttgcttttaatccaaagaacatgtatagtttttgtacccagagactatgatttatattgattgcacttgcctgccatgatttagataagattttttttgcatggtttttattctttcctaatggatcctgttttataatacttccaagcctgtccatggatatatcaaatgtcttcacttgtatgttttcatggctaggtatttctaatgtttattcttccctgtgtacttctacacatagctatgcactatgaaaattaaatggaatgaatgatatgtatattactcaaaataaagtttctttcactttaaaaaaa

SEQ ID NO: 42378 - DNA, 527 bp, Homo Sapiens
gcacgagatgtatcccagtgagcagtaaatcaatggaacatcccaagaagaggataaggatgcttaaaatggaaatcattctccaacgatatacaaattggacttgttcaactgctggatatatgctaccaataaccccagccccaacttaaaattcttacattcaagctcctaagagttcttaatttataactaattttaaaagagaagtttcttctctggttttagtttgggaataatcattcattaaaaaaaatgtattgtggtttatgcgaacagaccaacctggcattacagttggcctctccttgaggtgggcacagcctggcagtgtggccaggggtggccatgtaagtcccatcaggacgtagtcatgcctcctgcatttcgctacccgagtttagtaacagtgcagattccacgttcttgttccgatactctgagaagtgcctgatgttgatgtacttacagacacaagaacaatctttgctataattgtataaagccataaatgtacataaattaaa

SEQ ID NO: 42379 - DNA, 936 bp, Homo Sapiens
agtttcggtccggaatcccgggaaatttctctctccttgttgaagacacgttgggaaatattgaccagccacagtacagacagatcgttgtagagttacttatggttgtatccattgtactggaaagaaaccccgagctagaatttcaagacaaagtagatctagacagactggtcaaagaagcatttaatgaatttcaaaaagatcagagtcggctaaaggaaattgaaaaacaagatgacatgacttccttttacaacactcctcccctgggaaaaagaggaacatgcagctatttgacaaaggcggtgatgaatctgctgctggaaggagaagtcaagccaaacaatgatgacccgtgtctgattagctagtggggaaggtgtaggaagctctgttgagacacatgttctgaagtgtgttgtgtttcatgttcaagcttaatcaaggcagccattaatatacgaactgagcatgctggggaggtgaatgccacatccttggcggggttatggacctcttgcatgtcatagccaatctaacggtaatggtaaatgcttttaatcaagcaggaaaaagttctcatgattatgccaactataatagtaatcctcactgagtgataaaaatagtttatgaattgaaaatttgccgctgcatgttgtatgatcaaatagttcatcaaaatgaatctttgctctttggactgaattcttaccatactgccattaaaataaatttgccaactagtaatgcatactggaaatcaaaagatactgaaagaatggtgaacttctcttagtggtattgtcatgctaaaagatgttaatatacatcataaaagcaaagtcagccagctgatattttggttctcaaaaactgcattattaataatattttagtatacagagctattctacagtttttacattgtaa

SEQ ID NO: 42380 - DNA, 791 bp, Homo Sapiens
agttctcaaaatgaatctttgctctttggactgaattcttaccatactgccattaaaataaatttgccaactagtaatgcatactggaaatcaaaagatactgaaagaatggtgaacttctcttagtggtattgtcatgctaaaagatgttaatatacatcataaaagcaaagtcagccagctgatattttggttctcaaaaactgcattattaataatattttagtatacagagctattctacagtttttacattgtaaacatgactgtggttttgtatttgctaaatataggggttggactaaaatataataaatctgtaccttatcaaacattttctttgagctcctgctaaaaataggacatgtctatgattgttcaaaaatatgttaaatttaggctcagcacagtagctcacacctgaaatcttagcacttcgggaggctgaggcaggtggatcacttgaggttaggagttcaagaccagcccagccaacatggtgaaaaccctgtctctactaaaaatacaaaaattagccaggcatgatggtgcatgcctttaaacccagctactgaggaggctgaggcatgagaattgcttgaaccaggagacggaggttgcagtgagctgaaatcctgccactgcacaccagcctgggtgacagagcgagactccatctcaaaaaaaaaaaaaaaaaagaaaaagaaaaaaatatgttaaatttaaggactgttaacctacgttctactagtaaaaacaacattaagggtcattaaattttatttctgaat

SEQ ID NO: 42381 - DNA, 724 bp, Homo Sapiens
tccttgatgaacattgatgcaaaaatcctcaataaaatactggcaaaccgaatccagcagcacatcaaaaagcttatccaccatgatcaagtgggcttcatccgtgggatgcaaggctggttcaatatacgcaaatcaataaatgtaatccagcatataaacagagccaaagacaaaaaccacatgattatctcaatagatgcagaaaaagcctttgacaaaattcaacaacccttcatgctaaaaactctcaataaattaggtattgatgggacgtatttcaaaataataagagctatctatgacaaacccacagccaatatcatactgaatgggcaaaaactggaagcattccctttgaaaactggcacaagacagggatgccctctctcaccgctactattcaacatagtgttggaagttctggccagggcaatcaggcaggagaaggaaataaagggtattcaattaggaaaagaggaagtcaaattgtccctgtttgcagacgacatgattgtttatctagaaaaccccatcgtctcagcccaaaatctccttaagctgataagcaacttcagcaaagtctcaggatacaaaatcaatgtacaaaaatcacaagcattcttatacaccaacaacacacaaacagagagccaaatcatgagtgaactcccattcacaattgcttcaaagagaataaaatacctaggaatccaacttacat

SEQ ID NO: 42382 - DNA, 1545 bp, Homo Sapiens
  misc_feature (170)..(170): n is a, c, g, or t
cgacatccggcctcggccacgtggtgggcggaccggggcggtcctgagcctgcgacctcgcaggcgacctcgctggaccctaagtccaggccacagtcagggaagggcgctgagaggcgagcgtgagcccagtcggatcaaggggtaagggtaagggtggaagcctcacncacgcgcagcgccatgaccagcaagggtcccgaggaggagcacccatcggtgacgctcttccgccagtacctgcgtatccgcactgtccagcccaagcctgactatggagctgctgtggctttctttgaggagacagcccgccagctgggcctgggctgtcagaaagtagaggtggcacctggctatgtggtgaccgtgttgacctggccaggcaccaaccctacactctcctccatcttgctcaactcccacacggatgtggtgcctgtcttcaaggaacattggagtcacgacccctttgaggccttcaaggattctgagggctacatctatgccaggggtgcccaggacatgaagtgcgtcagcatccagtacctggaagctgtgaggaggctgaaggtggagggccaccggttccccagaaccatccacatgacctttgtgcctgatgaggaggttgggggtcaccaaggcatggagctgttcgtgcagcggcctgagttccacgccctgagggcaggctttgccctggatgagggcatagccaatcccactgatgccttcactgtcttttatagtgagcggagtccctggtgggtgcgggttaccagcactgggaggccaggccatgcctcacgcttcatggaggacacagcagcagagaagctgcacaaggttgtaaactccatcctggcattccgggagaaggaatggcagaggctgcagtcaaacccccacctgaaagaggggtccgtgacctccgtgaacctgactaagctagagggtggcgtggcctataacgtgatacctgccaccatgagcgccagctttgacttccgtgtggcaccggatgtggacttcaaggcttttgaggagcagctgcagagctggtgccaggcagctggcgagggggtcaccctagagtttgctcagaagtggatgcacccccaagtgacacctactgatgactcaaacccttggtgggcagcttttagccgggtctgcaaggatatgaacctcactctggagcctgagatcatgcctgctgccactgacaaccgctatatccgcgcggtgggggtcccagctctaggcttctcacccatgaaccgcacacctgtgctgctgcacgaccacgatgaacggctgcatgaggctgtgttcctccgtggggtggacatatatacacgcctgctgcctgcccttgccagtgtgcctgccctgcccagtgacagctgagccctggaactcctaaacctttgcccctggggcttccatcccaaccagtgccaaggacctcctcttcccccttccaaataataaagtctatggacagggctgtctctgaagtactaacacaaaaaaaaaaaaaaa

SEQ ID NO: 42383 - DNA, 582 bp, Homo Sapiens
ctcagtaaacagaatgtctgatcgatcatgcagatacaatgttggtatttgagaggttagtttttttcctacacttttttttgccaactgacttaacaacattgctgtcaggtggaaatttcaagcacttttgcacatttagttcagtgtttgttgagaatccatggcttaacccacttgttttgctatttttttctttgcttttaattttccccatctgattttatctctgcgtttcagtgacctaccttaaaacaacacacgagaagagttaaactgggttcattttaatgatcaatttacctgcatataaaatttatttttaatcaagctgatcttaatgtatataatcattctatttgctttattatcggtgcaggtaggtcattaacaccacttcttttcatctgtaccacaccctggtgaaacctttgaagacataaaaaaaacctgtctgagatgttctttctaccaatctatatgtctttcggttatcaagtgtttctgcatggtaatgtcatgtaaatgctgatattgatttcactggtccatctatatttaaaacgtgcaagaaaaaaataa

SEQ ID NO: 42384 - DNA, 515 bp, Homo Sapiens
gcaaatgttaagccttctaaaaggaaagtgtagattggaaaatgattttttttccaaatgatgtttttgccttctaatatactgtaaggtaatgagcttcagaacaggcaacctgaccctgcagaggtcgcgtgctgtgggatgacagcgggacgggagctcacaagtgctttcactgaagatttgttcatatactgtgtattgattgttgtgtaatatatcatcattgcttttgtaaatacgtaaaactgtaattttttaatggtgtgcttcccttatacttttttgatcagagaattttggaaagtaccaaagaagcaggggaatcattggccagtgttacgttttcacattgtctgtctcccaccctcactgatcacgcctgccccagagcagtgtgtggcgggacaccgtcacccagcatgcgccacgccgtggctcccaccagcagtgccaccgccaccacaccccagatcccacccaccttgcagtggcctttccttgtcatcagagta

SEQ ID NO: 42385 - DNA, 653 bp, Homo Sapiens
gaagatgtcaagcagggaacattttctaaaccaggaggttaccgtctctttactcagaagctgcaggagctgaagaataagtactaccaggtgccaagggaaggggatacaggccaaagaggtgctgaaaaaatatttggagtccaaggaggatgtggctgatgcacttctacagactgatcagtcactctcagaaaaggaaaaagcgattgaagtggaacgtataaaggctgaatctgcagaagctgcaaagaaaatgttggaggaaatacaaaagaagaatgaggagatgatggaacagaaagagaagagttatcaggaacatgtgaaacaattgactgagaagatggagagggacagggcccagttaatggcagagcaagagaagaccctcgctcttaaacttcaggaacaggaacgccttctcaaggagggattcgagaatgagagcaagagacttcaaaaagacatatgggatatccagatgagaagcaaatcattggagccaatatgtaacatactctaaaagtccaaggagcaaaatttgcctgtccagctccctctccccaagaaacaacatgaatgagcaacttcagagtgtcaaacaactgccattaaacttaactcagaatcagaaatggagagaaaaaaag

SEQ ID NO: 42386 - DNA, 684 bp, Homo Sapiens
tttttttttttttttaagctagaaaaaggccaaaaagcaaaacctgagaaaacaatacgtgttgttttctcaggaaaagaaaaaccttcatgaccctactgaagagcattggagatcagcttccgctaagatgctagcttggccaagtctgttatgttcacctgaaaaagtcttagcagagaatttttgcattcccacccaaaagccctctcagccactcaaatgcctatcttctccagtctacaagttacatgttcccacccagcattacagttcttgaacatgttatttctccacttactggtttaagttggttttagtcactggataagtattataatagagctacttagctgtggttttaatacccttctgttaacaatttgcaggcaaattaatggccttttctaacatagttcaacccaccaaagacctcgacaccatcgttaccttgaaaccgattatggatcatgcccacaaggatccaagctactggctgcatcgaggtgaggggtgaagggtctgtgctagatcaaaaggcacggggtggcgatgtggcagagaagttgcttgtggggagaccttgcttttaacaggcttctggaaaagctagggaaaagtggttgcccgctttccccctttccctccccttcaagcaccgcttgagatttgggctttattatt

SEQ ID NO: 42387 - DNA, 864 bp, Homo Sapiens
  misc_feature (611)..(611): n is a, c, g, or t
  misc_feature (840)..(840): n is a, c, g, or t
tggcggaggccatcaacgccctccaggacaacagggacacgctcacggccaaggtcatccaggggtgcgggaaccccaaggtcaacccccagggccctgggcctgaggagaagcggcgccggggcaagctggccccgcgggagaggccaccttcaggcacgctggagaagctggtctctgaagccaaggcccagctccgcgacgtccaggacttctggatcagcctcccagggacactgtgcagtgagaagatggccctgagcactgccagtgatgaccgctgctggaacgggatggccagaggccggtacctccccgaggtcatgggtgacggcctggccaaccagatcaacaaccccgaggtggaggtggacatcaccaagccggacatgaccatccggcagcagatcatgcagctgaagatcatgaccaaccggctgcgcagcgcctacaacggcaacgacgtggacttccaggacgccagtgacgacggcagcggctcgggcagcggtgatggctgtctggatgacctctgcggccggaaggtcagcaggaagagctccagctcccggacgcccttgacccatgccctcccaggcctgtcagagcangaaggacagaagacctcggctgccagctgcccccagcccccgaccttcctcctgcccctcctcctcttcctggcccttacagtagccaggccccggtggcggtaactgccccaaggccccaggggacagaggccaagggactgactttggcaaaaaatacaaacaccggacgatattttaaattcaccctccaccctgggagaaggccctgtgggtggggaacaagganaaggggcccgggcgggcttcctta

SEQ ID NO: 42388 - DNA, 609 bp, Homo Sapiens
  misc_feature (587)..(587): n is a, c, g, or t
gagtcgcggccctgctcagccggaagaggctcccggacctggatgtacagggcagtctctcttcccggggctatggctgggcctgtcctgccgtcatggccccctgcttcctgctccttggagctggctcccggaccttgcccaccatccatgcagtggctcccagggcagagcctctccttgtactttggcagccatagaaagcgtgctcattttctgttttcctgtgttaggaaaaaaccacctgttttccaaggggagagggcggggcctgagggtgggggcggggcctcttcattggcccagcttggcgaaagcgaggcacactgcttactgccttggggttgtggagatggacccgtgacctcgtggaggccgtgtgggggcagcagcctggcctgtgccatggtgggtgtcctggggcctgtgcggagggagccacctcaccctgcagcccaggttgcaggtgtggccttgtttctccttgcccagcagtgctgccttcagcggccgtgacggggccagctggacacacggtgagattttctcgtatgtaaataaaaggcaatttggtaaacgtgaaaacnaaacaaaaccaataacaaaaag

SEQ ID NO: 42389 - DNA, 860 bp, Homo Sapiens
  misc_feature (794)..(794): n is a, c, g, or t
  misc_feature (818)..(839): n is a, c, g, or t
  misc_feature (841)..(850): n is a, c, g, or t
  misc_feature (852)..(852): n is a, c, g, or t
gcctcagaacttggggaccctgaagaccccggagaggaggctgcagatggctcagacactgtggtcctcagtctctttccctgcacccctgagcctgtgaatcctgaaccggatgccagtgtttcctctccacagggcagctccctgaagcactccaccactctcaccaaccggcagcgagggaacgaggtgtcagctctgccggccaccctagactgtgacaacctcgtcaacaagccagacgagcgcggcttcacccccctcatctgggcctccgcctttggagagattgagaccgttcgcttcctgctggagtggggtgccgacccccacatcctggcaaaagagcgagagagcgccctgtcgctggccagcacaggcggctacacagacattgtggggctgctgctggagcgtgacgtggacatcaacatctatgattggaatggagggacgccactgctgtacgctgtgcgcgggaaccacgtgaaatgcgttgaggccttgctggcccgaggcgctgacctcaccaccgaagccgactctggctacaccccgatggaccttgccgtggccctgggataccggaaagtgcaacaggtgatcgagaaccacatcctcaagctcttccagagcaacctggtgcccgctgaccctgagtgaaggccgcctgccggggactcagacactcagggaacaaaatggtcagccagagctggggaaaaccagaactgacttcaaaggcagcttctggacaggtggtgggaggggacccttcccagaagaaccaatanaccttctgtgcagaatgaggggannnnnnnnnnnnnnnnnnnnnnannnnnnnnnnanaaagggcg

SEQ ID NO: 42390 - DNA, 708 bp, Homo Sapiens
tttttttgtgggggtgggggcaaaatatgttttcagttctttttcccttaggtctgtctagaatcctaaaggcaaatgactcaaggtgtaacagaaaacaagaaaatccaatatcaggataatcagaccaccacaggtttacagtttatagaaactagagcagttctcacgttgaggtctgtggaagagatgtccattggagaaatggctggtagttactcttttttccccccacccccttaatcagactttaaaagtgcttaaccccttaaacttgttattttttacttgaagcattttgggatggtcttaacagggaagagagagggtgggggagaaaatgtttttttctaagattttccacagatgctatagtactattgacaaactgggttagagaaggagtgtaccgctgtgctgttggcacgaacaccttcagggactggagctgcttttatccttggaagagtattcccagttgaagctgaaaagtacagcacagtgcagctttggttcatattcagtcatctcaggagaacttcagaagagcttgagtaggccaaatgttgaagttaagttttccaataatgtgacttcttaaaagttttattaaaggggaggggcaaatattggcaattagttggcagtggcctgttacggttgggattggtggggtgggtttaggtaattgtttagtttatgattgca

SEQ ID NO: 42391 - DNA, 497 bp, Homo Sapiens
acagcagggagctagtggagaggtctattgtcccagtggggaaaaatgccctcttgtgggctccaatgtcccctgggcctttatgcaaggggaaattgcaaccatccttgctggagatgtgaaagtgaaaaaagagagagactcgtgacttttccggtttcagaaaaacccaatgattacccttaattaaaactgcttgaattgtatatatatctccatatatatatatatccaagacaagggaaatgtagacttcataaacatggctgtataattttgattttttttgaatacattgtgtttctatattttttttgacgacaaaaggtatgtacttataaagacatttttttcttttgttaacgttattagcatatctttgtgctttattatcctggtgacagttaccgttctatgtaggctgtgacttgcgctgcttttttagagcacttggcaaatcagaaatgcttctagctgtatttgtatgcacttatttt

SEQ ID NO: 42392 - DNA, 857 bp, Homo Sapiens
  misc_feature (716)..(716): n is a, c, g, or t
tgggaataaaataaggaggtaagagatactatttttgctgagcaaccagtgtgtttcaggatgatacaaagaaaaatatagaatagaaataagtgcaggcttggaatcagctacaaatcctaaagatggggtgtgtgtggatgtgtgtgtgtgtgtgtgtacaccattgtgtgtttgtaaaatgtgtatgttcatgagtaagggtgtgtgtgtgtgtgtattaaaattccagagtgaccgtggcacttgggtgtacaggtaattcctccagagctgtttgctggcttcaggagtggagtgagaatttcttttttatgaaaagggatataaaggcaccgagctgatgcagtatttgtaatattaagttgacctaacaaggtatttgcatgagtcacaattacaaagttttgagcggttttgtaatttgacatttaggaaagtctcctatttattctcatactttacattcatgcttagtatactatagaggatgccagctttaatctttctgtcatttaaagcaatatgataagggtattcaataattgggtgccctaaatttctggatgagaaaattttcaattctggccatgagaaagaaaaaaaaataaacagccttctttttttttcctttgttttaaaactgtggttttttaaaaaagcaataattaactcagacctcactaaaaatcatttttgtttttatattgttatgncataagctctattatgttattctaacaagtagcaatttcacaaaatttgtatggagatgttaacgcacatttcctttgcttcttttattagactagtgttgactttggggggggggacttttatttcccaaatgagaaagc

SEQ ID NO: 42393 - DNA, 800 bp, Homo Sapiens
ggagttggttacataagatacaattccagtgatggaaggcggttataatggatggtggtgtgtacaagatggcactgccatctttgagcagagcccagctctgcagcgccacttcatctttttaaacaccctagaggtctgtttgttgttgctgttgtcccttattttgaaagagttgcaagagaagttacagtccaggtgaacttggagattgtgggattggttttgtttctgttttgttttgtttatcatttacctgtagtgctattgctgttgatactatcacctataccctgtttctagtgagtgctgaatacagtatggtacaatgacagtaacagccgcgtggtgctgccaggactgcccttgggcatatcagtgacagcccaaatgtgggtggaggaaacctgtaatttccttcttaacatgtgtttgaaataccaagtgaataatactgttctggaaaaaaatgataaactagtggaaattaaagaaattaagggttttatataatagacaggccccacctctcaaaatatttttagaagtctttttgtaaactaatttcttttgatcactatttttgcatccataaaaatgatttttttttaaaacccaataaaatcatcaattttattaagaaaatagttgttccccccagttggatacctgggttttttccctttttggggcctggcttatgaattttcaaacattttggaacccagggaaaacacccttaattttttttaaaaatatcccctttttaacccgttttcaaaaggggggggggtttttta

SEQ ID NO: 42394 - DNA, 1119 bp, Homo Sapiens
  misc_feature (662)..(662): n is a, c, g, or t
  misc_feature (740)..(740): n is a, c, g, or t
  misc_feature (905)..(905): n is a, c, g, or t
ggtccggaatttccgggatgaagagcaagcactttgtgaattctggtttgtttgtaaaacagcattattataatgtaggtatggtcaatgagcagtggtgtccatcacatatattatagaagcaagcgaggacattccaccctagaaatggttcagaaactcataggcacccttagctgatggaaacaatcaatcatatttaatacgcttagaatcagttttactccaatcagctggcaattttgagctgccggttatacaccaaaatgttctgttcagtacctagctctgctcttttatattgctttaaatttttaaagaaattgtattgcatggatgtggttatttgtgcatattttttaacaatgcccaatctgtatgaataatgtaaacttcgatttttttttaaaaaaattagattttagctggagcttttgactaatgtaaagtaaatgccaaactaccgacttgatagggatgtttttgtaagttaattttctaagactttttcacatccaaagtgatgctttgctttgggttttaactgtttggccacggcgggggtgggggcggggggttggtacagaaacttgaagctgtttgtgatatgtacaactcagatgtttctcattaaaaaacaaaattagccagaacacaaaccncaacaaaaaaaaaaccaaccacaaaacacacacccccccaacacaaacccacccacaccccccacacaccccacccancacccaaaaccaaccccaaaaagaggggggccctctcaaaaaattcccccgggggggcgcccattattccccaccaccctttttttgttgcaaaggggggggcccccctagagggggggcgattataaaaacaggggggcgggcgcggccttttcaaccaccccnccgggtgggggaaaaaaaacctcccttttggggagcacttcttagaggaagacacacccatctctttgtggggggggcggcaaccctttggggcccacccctctcccccacgaagatctatataccccctcgccaggggagaccacaaaaaaactatttttcgcggagccgatagggggtggacaacaaaccgcgggcgcataaaagtggtgtg

SEQ ID NO: 42395 - DNA, 546 bp, Homo Sapiens
  misc_feature (531)..(531): n is a, c, g, or t
tcttaaacagaaatactctaggttgccacaccacagttttaagaagttatgctgctgctgttactctcttctaggattctggtggtaaagtagagaaactcggacactatattaaccttactgaaacatgctttaaatcgtgtctaaaatctgatttgagcaagtcactgccgagcttctgagtctgcattgacactgctactgactcacctctccttccctggaataaggcttcagcttccctatgctgtgaagacaccatttgtaagcactttgaacataagcactgtgtgacagcgctggatatcatgcttgggggggggcctctccctgactcccatccccataataatgagttttgtttggaattgtaataagtaatgaactgcatggtttagaaaattataaatatttgatcagctgtcctctctgaaaaaaattgcacccctttttcttttttaaaattttgttgcatcttcgtagtaatgtaattgtattttatgcctgcttttttataaaaaaataaaatanaaaaaaaaaaaaaaa

SEQ ID NO: 42396 - DNA, 764 bp, Homo Sapiens
cgtccggcaagaacagcaaggaaaaggaagccctctccagaaccagaaggtgaagtcgggccccctaagatcaacggagaggcccagccgtggctgtccacatccacagaggggctcaagatccccatgactcctacatcctcttttgtgtctccgccaccacccactgcctcacctcattccaaccggaccacaccgcctgaagcggcccagaatggccagtcccccatggcagccctgatcttagtagcagacaatgcagggggcagtcatgcctcaaaagatgccaaccaggttcactccactaccaggaggaatagcaacagtccgccctctccgtcctctatgaaccaaagaaggctgggccccagagaggtggggggccagggagcaggcaacacaggaggactggagccagtgcaccctgccagcctcccggactcctctctggcaaccagtgccccgctgtgctgcaccctctgccacgagcggctggaggacacccattttgtgcagtgcccgtccgtcccttcgcacaagttctgcttcccttgctccagacaaagcatcaaacagcagggagctagtggagaggtctattgtcccagtggggaaaaatgccctcttgtgggctccaatgtcccctgggcctttatgcaaggggaaattgcaaccatccttgctggagatgtgaaagtgaaaaaagagagagactcgtgacttttccggtttcagaaaaacccaatgattacccttaattaaaa

SEQ ID NO: 42397 - DNA, 708 bp, Homo Sapiens
ggaagacatcaatgaatgtggctctgcgcaggccccctgcagctatggctgttccaataccgagggcggttacctgtgtggctgtccacctggttacttccgcataggccaagggcactgtgtttctggaatgggcatgggccgaggaaacccagagccacctgtcagtggtgaaatggatgacaattcactctccccagaggcttgttacgagtgtaagatcaatggctaccccaaacggggcaggaaacggagaagcacaaacgaaactgatgcctccaatatcgaggatcagtctgagacagaagccaatgtgagtcttgcaagttgggatgttgagaagacagccatctttgctttcaatatttcccacgtcagtaacaaggttcgaatcctagaactccttccagctcttacaactctgacgaatcacaacagatacttgatcgaatctggaaatgaagatggcttctttaaaatcaaccaaaaggaagggatcagctacctccacttcacaaagaagaagccagtggctggaacctattcattacaaatcagtagtactccactttataaaaagaaagaacttaaccaactagaagacaaatatgacaaagactacctcagtggtgaactgggtgataatctgaagatgaaaatccaggttttgcttcattaattcaccatccagagaccaaatatttaaag

SEQ ID NO: 42398 - DNA, 628 bp, Homo Sapiens
gtcatatgtgttgattcttgaaaactgggacgtgtatttccattgggggttggccatttatgctgacatgccatccttccagcaaacgtatgggaatgtgctttcaattgatggactactctattttttgcaaatttgtaaactttgcttctccaaatacaagtactaggttgtccatttatggtacctatttggtgctagtaaattttcaaactagatttataaatgcactgtaatatgtacacaacttagaaaccaaattacaagtattcagttccaatacttcattaatttcaatcaaccaaagttagttcagtagcttatctcagttatgagtataatacattacatgtaaattaagtgtgtgtatactgtaatcgtgctattttttatcattgaaacatttataaactagaataataatgcccttaatgtgagggtttgtaatggtgcttattaagaccaaagacttgttaaatgtatacaccaagtggtaatgaaatttctgtgactggcccacacgtgcatagaggtctgggatgaccaggaaacagcctcagtggccagaggattcacagtgcatccttcatcacagcatgtgcaatatgccaagattaccctcggtcat

SEQ ID NO: 42399 - DNA, 541 bp, Homo Sapiens
gctcctccctttcgtcctgaaagggtggaattaatgcctggaccattgctcctccctttcaggacaaaagggaaaggatgaagaggagcagcagggtagggacccacctcaggagcaggtggggcaccctggagctgcctcaggggctgggcattaattccacccagggaattttagctatgccctcatgtcccagggagagagccacacgcctgttttccatttatagcaagattgtttgcatacttttgtaatgaaggggagtgtccagtggaaggatttttaaaattatcttatggatagctcaagtctctgccatttgtaatttttggctctaagctccgattggagacgcttctccttgtgcatgtgagttgactgatgttgtgagtgtaaatgcatttggttatttctggtatcggtggccacttggatggatttttttacattctgttccccagttacaggaaggagtccctttggtgtgtgaatatgtgtggcatgcacatgagttgaaattcttttatgcatttttttgaag

SEQ ID NO: 42400 - DNA, 901 bp, Homo Sapiens
gtggttgggcaacaccatttctgggttcccactggccagtatctcccaccactctgctgggatctgcagtggcagggagtgggggttgtgtaaaggggaagtcatcttttgagatccagatagacatggtttgtgcacttacgtccagatgggaagcatccttcctgcaaccctaaaataatcatgcagcctctcagacggacgccatcggtcccaaggccttaggtggaggaagcaaagcaggccaggcctgtcctgtccgtggacctctaccttctggactccctacgggtgcagagcacttgggtttctctacagccatcgtggcccacttgacactgtgctcctccatcagctggtcacatgccaacacgttcccagcccctgaggcagctccagggtgccccacctgctcctgaggtgggtccctaccctgctgctcctcttcatcctttcccttttgtcctgaaagggaggagcaatggtccaggcattaattccacccagggaattttagctatgccctcatgtcccagggagagagccacacgcctgttttccatttatagcaagattgtttgcatacttttgtaatgaaggggagtgtccagtggaaggatttttaaaattatcttatggatagctcaagtctctgccatttgtaatttttggctctaagctccgattggagacgcttctccttgtgcatgtgagttgactgatgttgtgagtgtaaatgcatttggttatttctggaatcggtggccacttggatggatttttttacattcttgtcccagttacaggaaggagtccctttggtgtgtgaatatggtgcctgtaaaggttgggcaggtgggggtgggaaaccccaaaattaccctgcacaccagagaaattc

SEQ ID NO: 42401 - DNA, 918 bp, Homo Sapiens
tgttaaaatgccaaaaatgatgtagttgttgttgcttttttccctattttccaccccagtcgctccttaccgtgactcctgcccttggagggcatgtagcagtgtctgtcctgccagtcccaaggccctgtgggaggagactggcctgcatctctctaagacttagtctgacgccacgcgcatctcttgttctgtgttcaatcagtagtccaggggagaagcttctgctacttcagagctttgctaaactaacctaatttgtccaaatcaccccaaaaccaccatctctgacgtaagcttccatgcgacagcctgatccgtttccctggacaggtctctttcctggaatgcagcccaggcacctgtgctcctggcacccttgaggtctctcctttgagccgtggtcaccgagagggttgaggacgcagcacccgaggtcccagcctttgcaggagcctccctgggcttagctggacttagatcttcggtggcctcatgtaaacgtggcagccagcctcttctagaaccctagcccagggactggagcaggaaagggaccttcaaagtgaagactgccttgtcccgcagctccttctggcttagattgaaaaatgggcttcctaatgggttaaatcctttaaaacaaggagttgtgggggaagggtgtcgtgcactcctagagaaaggtacacagttgcccggttgggaatgtgcttggcgctgaccctgcgggcatctgactggtcttccagctcaggaaaaagaatttgaaagaggcttagcgtgaaggggaatcaaagaggaggttgtgatttggtcgaaggtgcctggtttagtgctgtaattgtcttattattttttttatatatatatttcttggagtaaacattttaaataaacammacattgtctactgtc

SEQ ID NO: 42402 - DNA, 774 bp, Homo Sapiens
ggcacatttttgttgttttgttttttaaatgatcagtgtctatttgatgtgatgcagatcttataaatttgggaattataatattgacatttctgtgatttttatatatgtaatgtcttaattgagatttctgttaaggcagaaataattaggctagggctcttagttttcattcctattgcccaagtattgtcaaactatggtattattttaatgttactttaaaaatccataatctgctagttttgcatgtacttatatgaaaacagtgcagtaagttgaaaactcagtatctatggaattgataaatgttgatctggtgtagtatattttatcgcattttcttatattaaaaaatgtctgcatgattacattttatttcctttgtaatttacatttcagaatagtgtattgctatatgggtgccaagattgaatatgaagaacccgagtgtttgtagtattatagttttaagcaaatctgtgtggtgatacagccataagaatggggcttatataaactctgtacatgtaagattttgtacagagaatttttaactttataaattgtatatgaacatgtaaatcttttaaaatgtacataaaatactgtatttttttaccttgtgtgtgatagtctagtcattgcatgtaaatataatttattatggattctgtagtataaatcatacattgatgacttacatttttactgggtaagtcaacatcccgttggatgttttctgaagtggctctttttgaaggggataataga

SEQ ID NO: 42403 - DNA, 790 bp, Homo Sapiens
ggaacgcggacggtcggattcccgggatcccatctagtcaggaattaatatactggaatacctaccttctatttgttattcagatcagatctggcctattttcatatttatcctaagccatcaaatggggtagtgcctcttaaaccattaacagtactttagacattggcactttatttttctcgtagatctttagctactttggggaggagggaaggtgctgataccttcaatttgttacttttcaagatttttaaaaataactagtgtagcttatcttaaacattttataaaaccttcagatgtctttaagcagattggaagtatgcaagtgcttccttagcagggacagtggataatccttaatggtttatcatagatttcaccctccccccttctcagaagagtgagtatgctcttaaatgtcaaacacatttttgttgttttgttttttaaatgatcagtgtctatttgatgtgatgcagatcttataaatttgggaattataatattgacatttctgtgatttttatatatgtaatgtcttaattgagatttctgttaaggcagaaataattaggctagggctcttagttttcattcctattgcccaagtattgtcaaactatggtattattttaatgttactttaaaaatccataatctgctagttttgcatgtacttatatgaaaacagtgcagtaagttgaaaactcagtatctatggaattgataaatggtgatctggtgtagtatattttatcgcattttcttatatttaaaaatgtcc

SEQ ID NO: 42404 - DNA, 957 bp, Homo Sapiens
gttaaagaaaggcttttagacttgccaggttaagcaacagccaagttctcagtaattgtttgccttgatttatcttttagacttcattttgccagctctaaaactcccagtcttccttgattttagtccttaatcttttatgttctgagcaggaagggtaaaagacaggaacctgcttcactgtattaactagtccatgggctgagaccggggcatctcttttcttcatactgcaatgttgctagatacatgatcagacaccagagggttgggcattcttgcaataccttaacagtgctgaaatctgcagcatggtactaaggaagttaaagtttgaatgtaaccactttatttaaaaggtttttttctttaatttaaatgaaatggggttgaagtgaacatgattttgttgaccatgttcgtgaattacagatgcaacatgcattggtagaatcgtgtgatggtcttttgtgatacttaatttttacatatcccagtctctgtatgtatctgcatagacaaagaaaaaacaaactcctgctttgcttttattgaagggtttccaggactgcgtgtctgctcctgagctctgttttaagtatgtgtatcctttgcttgtatttggtattacaaaaacatagaaaaagaagcctttatgttgagcatgtggcattgtcccttatttttctcttttgggacatatgaagcaagtattctttctgtatcttaatactttgtaactatatatagtaagttaaaatgggttataaagggtttatacccaaataaataaacacaggggagcgccataagtactccatagggggcaagattaccagtatcccggtgtgttcacagggtccaaagagcgcataaatgcacgcagggaccgttacagctgcagtgaacgccacgcaattgggagaacatctgggggcacactgtaacacacgagta

SEQ ID NO: 42405 - DNA, 696 bp, Homo Sapiens
  misc_feature (666)..(666): n is a, c, g, or t
  misc_feature (673)..(673): n is a, c, g, or t
cagaagcttctggaagctggaaactttatctgtcaagccctgaacagaaaaactagctccaaagtggctcaggctacctgtaaactctgagccccttgcccacctgaagccctggggatgatgtggaaataggggcacacacagatgattcatggatggggacatggaaatgagaataggttaaatggtgcaggtacctcatagccagctctacacagaggtctctcctggcagaaagcaggcgaagggcaggaggagctgcttggcagaaggacctcctgcccagacctgaggagtgagaggctttgagggctgaagtctccctttgttacggaccctggcccaggagttgaatgcctgaggacgtgtgggaaccccgttccctacttagcatgatccttgagtctcctctctggatggaatccgcgagctggccacctggccaccctctacacggctccaccctgccatggccgtggggcccttgctctctgacttctcaggacacaggtcatggaggttcttcccaagctggcagaggccatttgtggaaagtggagagctacgtggtggccatctgccaactccagcatctctggaaaatctccacgctgaatgtgatttttgaaaacagcttatgtaattaaaggttgaatggcacatcantaaaaanaaaaaaaaaaaaaaaaaaaggac

SEQ ID NO: 42406 - DNA, 632 bp, Homo Sapiens
ttggcttattgtttgaatattgggacatcaagctatctatagccaagtttcagtcgcaaccagttttccctttgtctggggtaaattcgatacaaaatgattctttttgaatcctgaatccataaattacacttttttttttcaaattcacaaaattcacagtggtgctgactgtgtaataaccactattgggaaacatcccgtaaacctgcctgttgccatgccaatggagtgactgaactggtgacatctgtttgagcatgctttgtgtggctggtagaatgccaccgttgtgcatacactttgtacatcaggggtgaagggagggttttctagattattgggggagggtaaaattgggatttttttgttgttccttttttgatggggtgtgggggtatagtactcagcttatgccctaaaataacatgtataaaaacccctgaagtattgtgtgggtgtgtacgtgtgagtgtgtgtttgtatacgtctggcaattaaagctttgtcttctggaacttagtgaattcttttctctttttcctccagaagtatttgttacaagatttgtaaataagagctctacttagtttgtttaccatgaacatgttgcagcaaaccttatgcatcta

SEQ ID NO: 42407 - DNA, 686 bp, Homo Sapiens
ggacgcgtgggcagcagcatagaccctggtctgagtatcaagcagttgggtggtttgtatattaattttaatgtagataaactacagtctaacaagagaaccctaacacagatcaaggagaaaaagaaaaatgagcttctgcagaaagccgtcattacacctgattttgaaaaaaaccactgtgttccaccatatagtgaatcaaagtatcaacttcagaaaaaacgcagaaaagaacgacaaaaaacagcaggggatggctggtttggtatgaaagctccagaaatgacaaatgaactgaaaaatgatctcaaagcactgaagatgagagccagcatggacccgaaaagattttacaagaaaaatgatagagatggcttccccaagtacttccagattggaaccattgttgacaatccagctgatttctaccattcacgaattcccaagaagcaaaggaaaagaactattgtggaagaactgctggctgattctgaattcagaagatacaaccgaaggaagtactcagagatcatggctgaaaaagcagcaaatgcagcaggaaaaaagttccgaaagaagaagaaatttcgcaattaagatttaccaagcaaactgcaacattttacattgctcctttatttacttattaaagacgtttggaaaactaaaaaaaaaaaaaaaag

SEQ ID NO: 42408 - DNA, 785 bp, Homo Sapiens
  misc_feature (28)..(28): n is a, c, g, or t
ttggaacgcccttcccttcgaacccccntttggggaagcgcgccattgagttggtacccgggaattcggccattatggccgggggaccaagagggtgttcgactgctagagccgagcgaagcgatgcctaaatcaaaggaacttggggcttcaagctcttctggcagtgattctgacagtgaggttgacaaaaagttaaagaggaaaaagcaagttgctccagaaaaacctgtaaagaaacaaaagacaggtgagacttcgagagccctgtcatcttctaaacagagcagcagcagcagagatgataacatgtttcagattgggaaaatgaggtacgttagtgttcgcgattttaaaggcaaagtgctaattgatattagagaatattggatggatcctgaaggtgaaatgaaaccaggaagaaaaggtatttctttaaatccagaacaatggagccagctgaaggaacagatttctgacattgatgatgcagtaagaaaactgtaaaattcgagccatataaataaaacctgtactgttctagttgttttaatctgtctttttacattggcttttgttttctaaatgttctccaagctattgtatgtttggattgcagaagattttgtaagatgaatacttttttttaatgtgcattattaaaaatattgagtgaagctaattgtcaactttattaaggattactttgtctgcccaccacctagtgtaaaataaaatcaaagtaaaaataactatcacctaatgttctgtcggccgcctcgccc

SEQ ID NO: 42409 - DNA, 552 bp, Homo Sapiens
aaaagaggcacattgcatagaagccattggggagttcagtggaagttctgtaagatgtgcatgtactatttgatgcgttttctttgcttcactgcttttaatacttagcagtattgttggtctaagtcaatttgattattgaggagtctcagagcaaggtgcgttctagatgtcatcctaaaaaacacttcatatataattaatcactattttgtataattacatattgctgcttgtgtgtttttttttttttccatttagttgggcgttgtgttttacacaaaaccatttttgaattaaggctatgatattaagatagaaatttggactgttgttctgcttttcctggcactcaaattcatgactagttttgaggtcaaacctatgttcgtaatgagagattttataaggatcaactaagaaatggaaggcaggtgaagatataaaaccctagaatgcttaaatgtgctgtaaaactattgtagatgtcactggattttaccaagtaatatcctttcttttttttttccccccatctgctgtggcttttca

SEQ ID NO: 42410 - DNA, 787 bp, Homo Sapiens
  misc_feature (777)..(777): n is a, c, g, or t
agggtaatccctgcccaccacctagtgtaaaataaaatcaagtaatacaatcttaactgttgtggccttttttgatcataagagttggtactgtttaaggccaaaagtaacagtttttatagatcttttagtttcaactcagcttttacaataaaaaggatttgtattgcattgagtttataaacttttggtttgtgaacttcatatttgatcttttctcttccaatcaaatgtctaggcttgtttgacttccacccccaatggtttttcactctttttatttacttcattttcctttaataacttaatctcttcatgttcagtttttacttcactctttattcttttctttgattatggtatgcttatttggaaagtcagtgaaactgtcaaaatgttatctcaataagatacttatatgagaactacaatcaccgaatctactgtattcaatattagcagatctaatttgataaacaacatggcttgtgtgaaaactgagcaggtgtttgtttacccatagtgttctgtgtagttattgcttagtctgcagaaaataatgacttagatgagatgtctgacttgctttcacttattaaacatgttcaccatgggatgatgtctgtaacatcagatattgttcaactagactaggatttaataaaaattgtgaaagcttactggcctaacattttattttataatattgggtatgaattatatgtagccagagatgtcattaagcttttactgtatagtaggtaatatggttagttngtaggggaag

SEQ ID NO: 42411 - DNA, 841 bp, Homo Sapiens
  misc_feature (781)..(781): n is a, c, g, or t
ggacccacgctgggtattaccatgtaaataatctgtgagtgaaagttgccattattctatgtagtggttttaggatacttaacaaatacattcaaattctttttttattattatttatttgattaggtatgtttgtaactttttacattacagaatatgaatgagaatgtgccatgtataatttttttcttgtagtaagaaacatccatattgcacaactctactgttgcaaagcttccttggaagggggctcttttactgggttcttaaccagatggttgtgtatgggtagcactactaaaagtttagaacttgcagtgtctttcggaatttttaaaataaactgtaaactaataggctggggtttttgttttgttttggggttttgttttgtttggttttacattttagttactgaagccttacaaggttatgtagagagataccatcttctgtaccaaaaatagacaagagaatgctgtcaatattggtgtactgtaatgtgaatctatgctggtgaaaacaattttttgttccccttattaaaaccttagggtccttttctcatttgtggctttctgcatcacccaatcaataaaaaaccaatatatatatgtatatatatgaatgcatgtgtgcgcgcctatatatatatatatatattatatatataaaagggttgcgaggttgaaaaccagatcctccaaagacatttccctttggaaacaaatggctgggcggaaaagtataaaaaaatcctggctttcccttccaatgcccncggcccataagaatatcctggaaaatcccctccttccctttttaatacaaaggggttttc

SEQ ID NO: 42412 - DNA, 805 bp, Homo Sapiens
cgaccacaagcctgtctccggcacgttcgacttggagctgaagccattggtgtctgctccgctgatcgtcctgatgcccgaggacctgtggaccgtggaaaatgacatgatggtcagctactcttcaacctcggacttccccagcagcccgtgggactggattggactgtacaaggtggggctgcgggacgttaatgactacgtgtcctatgcctgggtcggggacagcaaggtctcctgcagcgacaacctgaaccaggtttacatcgacatcagcaatatccctaccactgaagatgagtttctcctctgttactacagcaacagtctgcgttctgtggtggggataagcagacccttccagatcccgcctggctccttgagggaggacccactgggtgaagcacagccacagatctgagccaggatgggagtgaatcccaggcggaggccagagctggcagccagctctgcctttccactgccgggagtgctgggggcccagcctggccccctgaagagacagccaagtgtcgtccacatactcctcccagagtgagctctaaccaggctcatttgctctctccactactcatctctggaattagccgcttatatacaggtttttgtggctgagatgtgagtgaaaccagctagtgttgtcaacaagtgaagacctggggacagttctgcgtctcatttctggattcctacccctcttctagtcttgcacaagtagtcctgccaggcaccttgcccatttggcacaggcctgcattcttgtcgtgccgtcctggggcctcag

SEQ ID NO: 42413 - DNA, 667 bp, Homo Sapiens
  misc_feature (65)..(65): n is a, c, g, or t
cacgaggcttttttataaggaaatggttggagagttacatcattgctaatgtagaaatgttaagntggaaaaatatacagtttggtaaaataaactagattctacatttatttgtgggtttttttcccctcctttctttccacagcacttttgatatcaagcaagtggcttcctttttgagatattaaaaaaaaaaaagaaaaggaaaaaagtaaatgaagcccaactacctaaccctttcttatttgtatttgttttagtattgtgaagttgtgttaaatagtactagctagaaatacaaatttctggttatcatttctcttccctgtggcacttgacattttaattgtcttaaagtttttgaagtacatcttctggccccttgagtactgccagaggcaaaagatgtttgtttcttattcattccacttttgtctcctgggatcccttctgtagcctaaagtatggctgggaaatggacttgagaagattggcttgaattagatcataatcatgtgtgatcccatcatgaattcattggaatttgtgttgcatgtaaggcaatctttcctgttgtaaatcttccttttttaatgtacatatatttttgaaaaaatatgaataaacatgaaattttaaaaaaaaaaaaaaaaaaaaaggctctctc

SEQ ID NO: 42414 - DNA, 475 bp, Homo Sapiens
  misc_feature (262)..(262): n is a, c, g, or t
cacgaggggttcgcttccgttggtagcttgagtcccatgcctccaccctgccatctgaggaaggggtgacaagtggtcaaggagctgtggccacagacttttccagggtggtccttggcaggtgaggtgcgtctgtgccacccttgtcaggagtcattgacgacgggccccccctggaccccccgggacctcagagtgggggcaggcagaagggagaaccagctcaagacattttggaggatctggccctggggttcttcanagaacaccctctaggggctttggggacatggcctgtccccacatccagcacttgcctccgccatggtcactcggcagcccttttcccaggagaagacacctctgggagcctgctcagtgcttgtcctgccatcctgtgtcctgggactgagggttactccagttgctctgtgttgcatactctcccccgcaagcctgtgtatgaagaattgtc

SEQ ID NO: 42415 - DNA, 556 bp, Homo Sapiens
  misc_feature (556)..(556): n is a, c, g, or t
aaaacctaacttgcgcagaaaacaagatgagattggcatggctttatttgttttttttgttttgttttggttttttttttttttttggcttgactcaggatttaaaaactggaacggtgaaggtgacagcagtcggttggagcgagcatcccccaaagttcacaatgtggccgaggactttgattgcacattgttgttttttttaatagtcattccaaatatgagatgcattgttacaggaagtcccttgccatcctaaaagccaccccacttctctctaaggagaatggcccagtcctctcccaagtccacacaggggaggtgatagcattgctttcgtgtaaattatgtaatgcaaaatttttttaatcttcgccttaatacttttttattttgttttattttgaatgatgagccttcgtgcccccccttcccccttttttgtcccccaacttgagatgtatgaaggcttttggtctccctgggagtgggtggaggcagccagggcttacctgtacactgacttgagaccagttgaataaaagtgcacaccttn

SEQ ID NO: 42416 - DNA, 646 bp, Homo Sapiens
ttttttttttttttgactttagtagcatcctccacacatttgtgtgcctgatttgaaaggaagctggggcacccagcgagtttagcctttaagtttctgtgtattgatttgcagattaagtaatgctgagaggaataaagaagggacagaaacatggaacataaagcattgaaaattccggtgcttgggcttcggcttcagagtaacgtcagtggcttagggttaaacggccattttattcaaatgcttgctatacaatctgaaaacacactggcaggtgctcctctccttggcaattcattgagtatccagagttctacgatgtttaactgaagaattggctaatgttttgatcctccagtgtgactgttgtttttgtttgggggtgggtttggggttttttgcttttttattcctgaagcttaccagatatgaatggctaatactccattgttctgcttgttgtaatggtgaatgctttaagaaaaaaaagtgtaatttgctaagaataattcatgatctgtttatgcgataactcctttttgttacaatttttttaaaaaaagctatttttgttaatgtaaagtaaatatttcagagcaaattttttaaacttattgcactaaatacaggctctgcctcgttc

SEQ ID NO: 42417 - DNA, 438 bp, Homo Sapiens
ccaggtggagtgaaaattggaagggttttgtgcaatgactaaaaggtaaaacgctgttaaggttcaagaatcaatactttcaacccaagtagccctctgcttgactgtatattatggaactagtaaaccttaggattttgaaaattggagtctaatctttcaaggaggtgggctcccaggatggtaccattgctctttcctagctaaccctagatatggcagctctttaatgtacttcaaaaagcaaatatatattactaaggaaaaaaagttatttataattgccttgtcataattgttaaggtgttctagagccatttgcatacaatttaatgtaatttcattccattctattgtttacacaacgattactcgaagatgactgcaaaggtaaaaggaaaataaaagtgtattgcacaatgagaaaaaaaaaaaaaa

SEQ ID NO: 42418 - DNA, 835 bp, Homo Sapiens
  misc_feature (707)..(707): n is a, c, g, or t
  misc_feature (737)..(737): n is a, c, g, or t
agaggtaatccgcaataagagtctgggattttaaaaaacacatgcatacacacaattaagagctcatgtcttagcaagatctgggaaaccaacattgcgagagtagctattttgaaagaataattctccagaagttaacatctaatatctagtatcaccaaacagtatcgctgttctcttttattcatttgaaatgaatataattatataactaacaattgtccaaatagatgagagagcaaatcatgtgagaaaattcagaataccatctgtttcatagccgcacagattttggactttcacaaacattgggaactaaatttagaattggcaaaagtctagaagatgggtatcaaaacagaagacattccaggagctagcaattttaagaggtgtccctccaaagtgacctgatggaagtcctgaacttggaaattaggttctactcacttggacatccctgcatcatggactgttgctgctccctgttccatatgctcgcaatctcagctatttggaagctaccaggaatgctttctaattatcatttgcaactagaactgtaatcagaaagaaattttgtatttttgtataacttgattgtgtgccattttatataacaggtcctgttttacaaataaattttgttttactaacattgtgtttagaattataatctatgtgtaaccatgtcatttgagttgcanattaattgccaggctgttttccttagtaantcatgtgcgtgtagaatagcagattgcatacacggcaccacgagagaattatatgggatacctcttcagagcttatctgatattgatagctccgagat

SEQ ID NO: 42419 - DNA, 574 bp, Homo Sapiens
gccatcccctcactattcccgacccaaagggtgacttttcatctgaacttaaggtgggagatatttttaacttttttccactttggaaaatgtcactgtgacaaaagccagcatactttccctgcacccatctgctcaccagatctcaggcaggaaagcccctctctgttgaagtcaggggctatcttttggtatacttgtgtgaaagtggctggttgggagcagagctaagtggcttcccattaacctgaggtctctttctttactctgggtcagacctgaggttggggaaggcgactgagccatgctcagaatgtctggtcctggcttgggcctgagtagggcagagagggcctttcatggctgatcagagcttaccagccccaccccaccatggtagccttagggtgctgagtgcctgatactgcctgacaagtgcctgacacgcagcctagttccttcctggcccctctctcactggctgggaaaccctagaccatgtcagataggacaacactgctgggttttacatccagatagtaataaacaccatttcatcattttaaaaaaaaaa

SEQ ID NO: 42420 - DNA, 533 bp, Homo Sapiens
  misc_feature (505)..(505): n is a, c, g, or t
agcagccttcagacgggactcccctggtgtgggtgattctgagcgagatcttcctgaaaaaggccgactaagctgcgggcttctgagggtaccctgtggccagccctgaagcccacatttctgggggtgtcgtcactgccgtccccggagggccagatacggccccgcccaaagggttctgcctggcgtcgggcttgggccggcctggggtccgccgctggcccggaggccctaggagctggtgctgcccccgcccgccgggccgcggaggaggcaggcggcccccacactgtgcctgaggcccggaaccgttcgcacccggcctgccccagtcaggccgttttagaagagcttttacttgggcgcccgccgtctctggcgcgaacactggaatgcatatactactttatgtgctgtgttttttattcttggatacatttgattttttcacgtaagtccacatatacttctataagagcgtgacttgtaataaagggttaatgangaaaaaaaaaaaaaaaaaaaaaaaatgg

SEQ ID NO: 42421 - DNA, 754 bp, Homo Sapiens
gcactgtcaggaatgtagggcctgcatggagaagggttctgccctgcctgaggaggaggacacagcacaagggcacattgcccatggctgggaacatgacccagcctgaaagatacaggggatcatgttaaaaatagcagtattatttttcgtctcaatggtattgtaactaagttatttactcctcctgctcctcacccctgtagggaaaccttggagaggagagtggcaggtgggctgcctgctgtgttaagaggacttagtttgtgatgtaaggcactgtcaggaatggggggcgggccagggtgggaagagaagaaatagcagagcctattttggtgaggttttttgtttttaagtcaaagaagactcagtatgctttccctgaggaatgaaaaagggattgaggagttgcctgactcctgggtgggtggggtacaggcagttaggtgctgaatgaagctgccatccttgctgcagcttctaactggtaaaaagatccagggatggagatgggaaggttagaaaggcagccctcacctctgaggacagaggccggggtccaggcccgtgggcgcaaaggtgcctcatagcatagccagcattcagcacacacaaacctactgcccacatttgggctcagggttggccattggctagttctgctgcctcttaaatctgactgccaataaatcatcctcatgtctttaaaaaaaaaaaaaaaaaaaaggcggccgctaatacctcgagagtg

SEQ ID NO: 42422 - DNA, 583 bp, Homo Sapiens
  misc_feature (85)..(85): n is a, c, g, or t
tgttttatccattatcatctttgattaagactttaaaaaaatgctatttccagttaatgcatttggccctattgaattttcaggngacccagaaaacattaaaaagttctgcatcttataatggtaaccaattaagcttgagattgttctgaaagtatcaattgctttaaaactgttgtaagtacagttggcaagatctccaagctgaaacttacacgttaaaacttttgcctgtaagaatttgcacatgaatgttaatggaaaacacaaaacttaagatggcccaaaacaaaagccacaaacagttcatcatttggtgcttagtctttgtaagggctctctgtggtttgacttactccagctaccgttaaatgagggcaaatcaccttaaaacatgttcatttgattcataacaaggaaaattgggtctatgattttttgccaatcttagcctaaaagaaattgctttagcttctggtcagcactgattaaaatgtgaatagtgaagtggctatcctaaactggtttatctccacccacactatcatagatttcttaggtaaatacaattcttatctagtgg

SEQ ID NO: 42423 - DNA, 613 bp, Homo Sapiens
cgcgtccgaataattcatatttaagttttacgtagttactactgatttgataatcacttaaattttatatatcttaatgtattttttcagactcctaattaattcccacattcactgtaactaggggcatagtccattctgttaggattatatcctctccttagaaatgttttccatcctgttgtggggatttggtattaatgtttcttcattgattatggaacttttgttccctgaagctagttaactgtgtctaaagttaaataaatacagcagaatgattgttttagcctgctcgaactgatacaaatccctgaaaccatgattggcatatgttagataacaaatgaggatgtctaagaggcatatgctgctttggaggtgtagtgaacgtgtgtacagaagttttcaatcttaactatatagtgttagtgtgatgctatactattggaaaaatagcagcttttttctattttataagttgtatgcataaacataagatttgtaatgtttcatttataaactgccttcttcaacacatgttaatagtgttttctcaaagtattgatagtatgtcttccagaatttcacaatatgcttacagtaaatattt

SEQ ID NO: 42424 - DNA, 609 bp, Homo Sapiens
ctccgctcagtttccggtgcggcgaacaccaaagtccgggaacttaagcattttcggtttctagggttgttacgaagctgcaggagcgagatggaggtggacgcaccgggtgttgatggtcgagatggtctccgggagcggcgaggctttagcgagggagggaggcagaacttcgatgtgaggcctcagtctggggcaaatgggcttcccaaacactcctactggttggacctctggcttttcatccttttcgatgtggtggtgtttctctttgtgtattttttgccatgacttgttcgctgatatctaaattaagaagttggttcttgagtgaattctgaaaatggctacaaacttcttgaataaagaagacaggactctcaatagaagaatttcacatctccaagggacccttcctttcattttacactttgttactaatttgcagaactctattaattgggtaggatttcacccattcctagctaagttcttaaaattaaaccctttggttcgtgtttaaaaactttcaaacatctgatggctttacaggggctgaatataaaagcatttgtacttaaaggtcttgtgtattcattaagaaatata

SEQ ID NO: 42425 - DNA, 521 bp, Homo Sapiens
agcgagctgagaggctttgtcctcgtgccagtaactctgaaatctctcttaattcctgctgtccaggcagcagaatgccatggtttccccaagtaggtagctgctttagcagttaaagcccaaatgtctgttctgttgatcagaggtctctgaatttctgaagtggtgtttcgtttctggtgactgagttaatcctttacaatccctcttgtaaagtgtgctaatagaaagaatccacctttcaaagctgcagaaccagaccgtgccctaaattgaccaacgtagctgatgtgcctcaggaagtctcttgccagctgtccctgtgaagacccccctcctcccccccagctgctgccttgcacactgaagcatctcagactgtgcaaagccgtgtagtcatcaagacagtaaatcccagggcttggttaagtgctgtgtgataacttgtttggatgagacttaacttaaaaccacttacaataaacttgggaaactaccgtcaaaaaaaaaaaaaaaaaaca

SEQ ID NO: 42426 - DNA, 585 bp, Homo Sapiens
ggcacgaggcgtgtgtgtggagatcgcatatttggggcagctggggctggttataagagcctatgtgttgtccaaggcctcgttgacatttacatcttttcagaagataccacattcaaatgggactcttgtgctgctcatgccatactgcgggccatgggtgggggaatagtagacttgaaagaatgcttagaaagaaatccagaaacagggcttgatttgccacagttggtgtaccacgtggaaaatgagggtgctgctggggtggatcggtgggccaacaagggaggactcattgcatacagatccaggaagcggctggagacattcctgagcctcctggtccaaaacctggcacctgcagagacgcatacctagaggaactctaaccccggtgtacctgtataaactgaactgtgaaactgtttcggttatctctgtcttttgaggatggctttgtcctgttgctggttaacattcaccttcctcttttgaggagtatttttccattatgtattcataataatgttaatttcaataaatgacattcatgcagcaattaaaaaaaaaaaaaaaaaagataat

SEQ ID NO: 42427 - DNA, 501 bp, Homo Sapiens
  misc_feature (427)..(427): n is a, c, g, or t
tctaacgtgggcaacagagaccctgtctcaaaaagaaaatattcctgttagccctaaaggctttacatgaggaatggtagaagtggtcttttgtttaaattagttgcattcagcatatatgaattgtcttaaatattttggggatactcccccgccttttaaacagggcataagatctggtaaactctctgtatatcttcctacctttcaaaatcgttcttagggttagtcaagtctggaatataattgctgactataaagttagcaattatgcttttaaggtgttgtcacatcaacctaaagagaaccatctatggaaggtatggttgaaacatctgtaggaacacagaactgggatttcactgagtttaccaaatcaactgtgtgaactgtttctgcactgcttgctaatggtttcatctaatanatgtttacttatatagctgagtttggttttattctaacaaattacctggtggtgtgattgtgaggtgattaaca

SEQ ID NO: 42428 - DNA, 614 bp, Homo Sapiens
tggaattggctgaggatcaaacgtatgtaggtgaaaggataccaggatgttgctaaaggtgagggacagtttgggtttgggacttaccggggtgatgttagatctggaacccccaagtgaggctggagggagttaaggtcagtatggaagatagggttgggacagggtgctttggaatgaaagagtgaccttagagggctccttgggcctcaggaatgctcctgctgctgtgaagatgagaaggtgctcttactcagttaatgatgagtgactatatttaccaaagcccctacctgctgctgggtcccttgtagcacaggagactggggctaagggcccctcccagggaagggacaccatcaggcctctggctgaggcagtagcatagaggatccatttctacctgcatttcccagaggactagcaggaggcagccttgagaaaccggcagttcccaagccagcgcctggctgttctctcattgtcactgccctctccccaacctctcctctaacccactagagattgcctgtgtcctgcctcttgcctcttgtagaatgcagctctggccctcaataaatgcttcctgcattaaaaaaaaaaaaaaaaaaaag

SEQ ID NO: 42429 - DNA, 558 bp, Homo Sapiens
aagtggcctgaacagaatgctggaacccaggctggactcggacacactaaggttttgattttgaatttcagccttattagaagatctaacctaagagtaagctaaccacagggattcttttgtagaacactttttatgcagatgaagctattttttccagcaagtagattcttccagtttttccaaggagtaatttccccgaattggcataccacggcgtggacagctgatatttcacccagctgctggcttgtgggtgtggctctttgctttatatatatatacacacatgtgagtctggctgggctggtattttgtttgatcttcctggaaatgagcagtgactaacgctcacataactggtttttttttttatctgggctgatgaatacatttacctaagaaactcatttcgttttacttaagaggggaagtgcagttttcttttggcagttcagaatccaagcacttgatttgctgggtttggaaaactccttttttggccttctatgtgcttagccataacaattccattaagcaagaaggtaagcaaaagac

SEQ ID NO: 42430 - DNA, 863 bp, Homo Sapiens
caaattgtaattaagagatttaaatattagaacggtatgtaaggtagtataattaccactattttaaataattcagttaaacactgctgcaatatttcagtgttgtgcttgaaaatatgtacagttttttttccaatattaataccttatgttgtccttaaatatttctaaaagcgcctttatttcagcattacctttttttcatcactatcttttataaaacattaatataagtcgttacttttagaaactaaaggaaataatagctggaaaaccctctgtagtttaaaatcagtcattaaactcacaatagggtaagtaaatatagccacctgttaacatgtaaataagcataatttgttccaaagatggaatattgaaacttagttcatgtctgctgtaaaatattatttaaatgctgctgggcatttcacttaaagaacttaatgtcaacagctacaacaaagaccaaatctgaactgctaatgtggctgctttgtagggaatggactaatatcagtgtgttagatcttaaggtatcagtatttcagaatcctgcgacgattttatttctaaattcatgtactgtatgtccataagtgacactaccatgtcatattcttttctataaaaaacccacaaaaaaaaaacttttggggcgctggggccctgaaaaagttttttaaaccctctcgttgggacgcgaggccccatattgtttagtgaccatgtgcaaaagcagggtccaaggaaacccgcgcaaaaaatgctgggttcccaccaattaaaacgcgggggaaccgagcgtttgaaaaccaaagaggtcgaggcacacgggcacacaggggtcagagccgataatg

SEQ ID NO: 42431 - DNA, 610 bp, Homo Sapiens
  misc_feature (560)..(560): n is a, c, g, or t
  misc_feature (571)..(571): n is a, c, g, or t
ccccttgaggacaagttggaacagaagaccaagagtggcctcactggatacatcaagggcatctttggattcaggagctaaccaggctcttcctcgggggcgggggagattctgactcttaatctgtattgtgagaaaatcccagcaagttccatgatattaaatccaggtctgcattggcccggggcaagagtttaacatcttcggccctgcattcctacatcttgtgtctgtacacgttcttaagcagcgtgtcaggagagcaccctgttgtcttctggtaaatgtgtgcagggtcatcctgtctcctgtacctcctgggaagggggccgctgctgtctggtgccctgtgagctgtgattgattgcctttggtcagtaatgcgttcaggagtccacaccaggcacagatggggccttgaaacgctttgtcatgcttcttcagtaccatggatttgaaatgaactcatccttgctgtgagcatccaggagcccttgagaagtttatctatgactatgaaactggcaacgtcaccccagaattacggtcagccttattcnccttcacctcncagtgaacgctaagaatttcagacaagcagagagctcta

SEQ ID NO: 42432 - DNA, 542 bp, Homo Sapiens
aacgatgatgctgtttcaccaagtatattttgaattggtttctacacatttccagtagtatggcagtacagtgctctgttcattgcaagctggcaaatttatgtagctatgtggaatgatatgtcataatgtaaaattagataaattcttttttcttataattaatataacatttctggacttgaactctggcaagagatgccaaaaggcattggtaccgtgttatttgtttatatgaattactttttaacaaggaatgtttcttattcattaaatgaattcaacattttctctgtaaaaacaatagagtttcagtacatgaactatagaaaaaaatctatatataatgtacataaatgttacatttgtaaagaaaatgtaaaaatgtaactatagcatatgaattgcttaaactgtgctgcattgttggatgacaactctttttgtcacagttagagaatgaggttgactaatgcatattatgaattgagtccacaaaggaacacaaaactctttgtaattctgttaaatcttttatgtag

SEQ ID NO: 42433 - DNA, 581 bp, Homo Sapiens
gaaaaaaacagcaggggcattagtttcaggcaaggcagctcccaggtttagagattaatttttaccccctaaggaatatccagtcaaagacgctgagtgggagctgtcaggcagtagcagctgtgtttgagtttctggctgaaaatggtgaagaatggacttaattatgctaacaaactgaaaaatctagacatagatcctctgatatacaattagagatatttttatatagaccccaagcattctgtgcataaaagttaacattaggctgtggtgcagtaaccatttaatgtcgaggctctatttcggaaatacactacaaatgttaaagtacgtggctgtcctcttaagacactagtagagcaaagacttaatcatatcaacttaattctgttacacaatatgtgttttttaatatactaaccatttcttatggaaaggtcctgtggggagcccatcctctcgccaagccatcacaggctctgcatacacatgcactcagtgtggactgggaagcattacttggtagatgtattttcaataaagaaaaaaatagttttacattaaaaaaaaaaaaaaaa

SEQ ID NO: 42434 - DNA, 805 bp, Homo Sapiens
agggccagcaccttctctctaaagcccaagaggagtttgaggaaaactaggtgtctgtgttcactccaggctgaagttacaggtctgagcaaataaggtgtataaaaaatggaatctgtcttggaggacatcagaaggtgaattttccaagttcttggacaacctagctgttgaaaagctttctgggtttggggggtatttcagatgtaccttaaagtgttagcagacacagattaagacactgggagccaatgaaacagcagttgagggtttgctgtgtatcacatttctgtattttatcacccccttcctgcaacattatttatctggaatctacctgcccttttgttttttagatacaagggcttggttttgttacccaggctggtttcaaggccatagctttaagagatcctctcaccacagatttccaaagtgctgggattgcaggtgtgattcatggcacccagactttgctgcctttcttacatgatccaggcccagaacccaaactcaggcactgtatagatgaccactttcgtaaactactgacctagcttgttgccaattgttgattgaacttcccataactccacttcgtgtctgttcctctgtatacagccaccttctgttcccgtcatgagcctttaggtctccatttgcatattgcaaatactatgttccatgtaggtagctcattcagggccttgctcttcacttcaaaaaaggttcccttgaggactggctgtcaatttgtgttgctgtgttggttgttgatgaaaataataaaatgattgattacata

SEQ ID NO: 42435 - DNA, 1299 bp, Homo Sapiens
  misc_feature (598)..(598): n is a, c, g, or t
ctgcagggtggggtgcccatcctgggggctgtgtgtcatgctcacctgacccaggtgtgtgtcccggtgtgaaatcgaggaggggactggaagcccttccctgccttgaaacatgaaagctgattttctgagcagcagatacggtcagtggcaaagctgcatctgaagggcggcctgggaaggggccctgtgctggccccgggtccgccccagaggagtccacacagcaccacctccagaaggggctgggcctggggtcctgcaggcggcaccttttggtagagtttgtttccctggaaaatggggaaaatgtttcaagccaggtgaggggggaagttaacactgaaatatgtattgtttttaaaaatcaaatgcacacgcatggaagctgcttgtccatgcactggttttgtcactggcgtcctggaatccgaccgtgttggggtgcaggcgctgtcagactccggctgatcctggctcgagcacacacatctaagggccaggctggttccgcatggtgatctccgtcttgtatgtctgaatgttggcctaaaataaagattactgttgtaaaataaatgttttcactgcgggaacnaaacaaaaacaccttaaaaatactaaaaaagggcggcccgctctaaaagatccctccaggggcccaaggcttacgcgaacccagcttttctttgtacaaaaggggcccctatagtgggagccctaattataagtctaaggcactggccccgccggttttatacacgatcggggactgggcaaaaatggctaagcttggggaatcttttgtgcaaggggaaccctcaactttcttggcgcgtgggaccctcacattctgcgcccaattcaccctaccctagaatctttctcccgtctcttagtggtccactataacaactctttttacagcgggactacaacccgcttgcacctacaaacgcgcaaatggcctttgcgctgcctttcagaagtcttcgctcttacatccgaactcattctttatctgcgagaaattgtcgtctctacgtgggaactctagggtgacattcttgaatggagcatcgggggactgcgtgcaaaattgtagcacagcacctacaggggatgccctcactctctggggccccgcgtcaactcttctcctcccttccgcgggattacccttcgaattatagtccacccccgccgcgctcatacctcccatctcggactcgaagggcgctattctttctttctttttttttgcattaaaggcagccctgccagtcacgcccacccgcg

SEQ ID NO: 42436 - DNA, 823 bp, Homo Sapiens
  misc_feature (667)..(670): n is a, c, g, or t
  misc_feature (680)..(680): n is a, c, g, or t
  misc_feature (687)..(687): n is a, c, g, or t
  misc_feature (691)..(692): n is a, c, g, or t
  misc_feature (694)..(694): n is a, c, g, or t
ggtatttttaaactgctttagatattactgctcagtgtttgtgaactttcctagttctctatgttgttagtgcagccagcacccagtggggacctactagaaaaaggaactggcatgcacacgtgcccagcaggaaaagcttcgtcttcacgtcggctgctgccatccagaagaggccctggagcctcacgccgtcgaggctgctctcaggcgttctgttccgggcgaggcttgtgctgcaaggaagggcaccagcatgcaggctgccactggagggtccgggtgctgcgggcagagttcagcgcttgtccaccctcccttagctctgactcagtgcatcctactgtggggacatctcgtgaggggacacgaaatgactgatctcaccctttcccagtattcagagctgtgaacccctgtggcgcaggactggcctgtgtctgttattttggttgtaaatcattctcctgtggaattggcaaaagctacatttttactgtccttaccagcaacagtttgcgtcgtcacatgctgtgagtgtgggctgtggtgtgtccgtgtgtgtacatatgtgtatatgtatatatcacgcagccagagtgccattcatgctgctgtccccttggtggaagtgacaaagtacaatttaaagggtgggttcctaacnnnnaactcccccnatacatnaaannantttttcctttgttcgggcccgccctctcgggccccttcggaaggaaagcctttttccttaagaacccattttcccttttggggggcgccgcgcggggggccccccagtaaaagggggtaaaggtggggt

SEQ ID NO: 42437 - DNA, 566 bp, Homo Sapiens
gaccgctacctcatctatgtggatgagagccgagagtgtgtggcaggccccaacatcgccgccatcgtcgggggcaccgtggcaggcatcgtgctgatcggcattctcctgctggtcatctggaaggctctgatccacctgagcgacctccgggagtacaggcgctttgagaaggagaagctcaagtcccagtggaacaatgataatccccttttcaagagcgccaccacgacggtcatgaaccccaagtttgctgagagttaggagcacttggtgaagacaaggccgtcaggacccaccatgtctgccccatcacgcggccgagacatggcttgccacagctcttgaggatgtcaccaattaaccagaaatccagttattttccgccctcaaaatgacagccatggccggccgggtgcttctgggggctcgtcggggggacagctccactctgactggcacagtctttgcatggagacttgaggagggagggcttgaggttggtgaggttaggtgcgtgtttcctgtgcaagtcaggacatcagtctgattaaaggtggtgccaa

SEQ ID NO: 42438 - DNA, 692 bp, Homo Sapiens
cattgtggagaacttgatatttagttactgatgctcttccaggacacgaaaagaacccatctttgaatatcaatgatttttttttttttaagtactgttccggggagaaaaacagtctcaaaacttgaacttcttgggaagagaagtgttgggctgagaagtaacattcccaggaaatagtgagaagctcgccctgtgtttgaaaccgtgttggtctctgtgttcctggaagaaaacagggaagcagcatcttttaaagcctgttctttaaggtgtctcgttagagcccaaagtggaatccggaaggcagccagagctgaggctgccccaagactcagacttgctaagaattacgccgccgacttcaaacccagagagcatctttcttttaggcgaaaacgcatatatttatttttggtaagttataccattctttcacattagataaactaagtttggggggatccttttgtaaatgaaccttacacctggggaaatatggcggaaaccatttttggccagctaacacacacaattctctttctctttttcttacagaaaaaaaaaaaaaaaacagaacaacacagcaaacaaaagaaccagacacccacccaacacgacccgcaggagccacgcaaagcgccaacggcacaccccaacgataccaacaaggctcccacaccggactcccc

SEQ ID NO: 42439 - DNA, 768 bp, Homo Sapiens
gggaatgataattgtggtatagtgaccaatagatgccaaacagcttgtggcctcactaaaggtggggtcgcttagtccccgggagtaaaatgagtgacctcagaaacaagaattcctggaaaggcacatgccgaagaggaatatggtataattttaaattttaatgcaaaattttaatttgtctttattttttatcatttgaactgataagcactttttgtgtcaatataaaatatactaaaactgatgaaatgctaagacatgtcttgtgaaggaaggtttcttggagaccacttttatttactcatgagaagtggaagctcctagtatcagaagaagctgatacatagtgtcatgtgctcagtggttgccaaagtctaccaactttggggagctgcagggttctttttgggaggtgggaggaagggagatgagttttgttattttggggttttcaagcattggaaccaaaggccaaataataaacagcctttagtttttaaagtaaaattcattttatttgcagagtacacttgtatggtagactgttaaagacaattttatgactatttatgcccattataatggttacatctggctttttgtctttttaaattaaaaaaaaaatcaggagaaaaacccccccttttgaatacgtggcctgaaagataacagccaaaaaatttgggccttttccctaaaaatgccaacagaaaaaagtgctgcctaagaaatggttaatcttgggctggccccttttttttttgg

SEQ ID NO: 42440 - DNA, 691 bp, Homo Sapiens
  misc_feature (27)..(27): n is a, c, g, or t
  misc_feature (634)..(634): n is a, c, g, or t
caagcctccagagatcgacatcacatngctgggatgcagacccagttccagaagaggaggagggcttcgagggtggtgattagcggtggcgccagccctaggctacccttgccaaggccgcccacctgcatcagcctctggccagacggcccgccgtgcctgcattcgcagcagctccgcctggcacccactccggattccggccctggctggggacttggccgcttccctacccacagggcctgacttttacagcttttctctttttttaaaaagttgataggagacttgtacagttgactggctttcctctcgttggtagttgagacgctgttgcaaattccacccctccttccctggtccagattgtagctcttagtcctccctgctcagctggccgggttggaggcctcaccctgcttggggcctggcgtggggggagctctggtgggaaaatgtcccccacctcttttcctagttttatgtttcttgggaaaatatcactttgtattctctgtccagggcttcagatattttgcacgaattttaaaacatggcaataaatggctcgtgggctctggctccctgggaccccctccccgcccttcttttgaccccttcctgtctggcccanaggaagtagcaggcccagctggggcccctcggctaccccccgtctcctgccgggcag

SEQ ID NO: 42441 - DNA, 988 bp, Homo Sapiens
ggggggacaggtctgcgctgcagtgggatctggctgctctgcctcctttcccaccccagctgaccatgagactttgctgagaagtggaggccccaggacaggctggctggctggctggctgcttgacccagtgtgactctccttcactgagtgataccctgctccgggcccatgccccaaggagcccttcagagcccacactgccagtcgaggcctggctggaggctggccacagtggaaattctgccgagcctcttgtcccttccctgctctgctgcatggggccccatggctttggctggccactgagggtagggtgtggaggtgtggaggccccctgaggagctgcggcggcccaggtacgaagctgcaactctgcgcgcagtgggcgagatctcatcagccccaggctgcaggtgaggcttcaggggatgctggggccccactgcccctccgctgccttgccctccatccttcctctgttccttctggccgggcaccacagcactggggctcacctcttggttgatcctcttgtactgggagaggtgccttttgtatccccaattaaaggtagaaaaccaccctgctagcagcattgtcaaaaaaaaaaacacaaaaaaaagaaaacaaaaaaaagagacaagacaaaaaaaaaccgcgggggaatattccgacggccgacaaaaacagcggccaccaaaagggccacacggtgaccaccggtgcacacacccactttatagcaccagagcgggaacagccgcgggcccccaatagggcggcccgaaaacaaccgcaacccgcggggcaccacgtaataaccatgcagcgaaggaaagccagagcatgacgcaacagccgaggcgcagacacagcgaagcgcaccagacacggacgcacaagaagcagcaaaaacaaaagaggagcgcgacagaccgcacgacccgcgcgacgcacaccccacacacgcaacagcagcacccac

SEQ ID NO: 42442 - DNA, 706 bp, Homo Sapiens
  misc_feature (623)..(623): n is a, c, g, or t
  misc_feature (671)..(672): n is a, c, g, or t
  misc_feature (700)..(700): n is a, c, g, or t
  misc_feature (705)..(705): n is a, c, g, or t
tctgggcctttttctcccccttactgttgtttcccagatcttttaaaaattcatcccatatccagaaagtaccagttataaagattgctgaccaagcaaagttttgcatcaaagtgtcacctcattgctctgaccaaagactgactgttgtggttttaactcctctctgtaaagcattttgcattttccccaagctcctttctgaaagaagacccagtgcagagcggcctttactttcaatttctactgctgaatagactacttagagaaaatgtgagtttcagtgtgaacagaatggattaggatgacgagtttgatgggcattttcagtactgtatctaagaaaaaaaaaatagcacagctaggagcctctgacattgtctggtgttttacgtggtctgttcatcaaaattccccttttcagtttttaagaatgttcgtctaacagaagaaaatgctgtaaatatttgtaacaacattttttttaacaaggccaaaaaagaaaaaaaggtttttgggaacaaatgaacttataaagtggttttatataaaacatcaattgtcttgtatattttggataagcagcagtaccagctttcatttgtaacagtctgtggcattgngaaaaaaggagtctgtgattgttgaagtgaattatgttataaatgcannagagaagataaatattaaaaacatattntctana

SEQ ID NO: 42443 - DNA, 604 bp, Homo Sapiens
tttttttttttttttttaagaatcccaaataactcactgaagtgtctcaaaggcgaacaagttttaccaaaatgaatcctttttcagttaacagatcaaatggatgagttctgagcctctcaagttcctttccccagttagagtggggaactgggcaagtgttaactgtgggactcactgcagcgtcctatcctaaaggcacgagaagacggaaatgcaacctgcggagctgggcttggttcccaggtcacagtttggcccccgctacaggatgctgccctgctcagagagagatttaatagggagctgaaggaatcgttagggggccagggagatgtgactgaggctggctttccacgtgaatgagacggggtcggtggagggtttggtgctacagccagtcagaagatttgcaaatgcgaacacattcctgtgtgaggcacgttaccctttgtcagttattgtgaatatgtgtattttaagcaataagattcagctggtcagacttttctgggcagtctcagtgacgcatttcctgtgctgtgattgttctgaagacagagtggctctaaccactgtgagaagcccaaataaacctcgtgcc

SEQ ID NO: 42444 - DNA, 807 bp, Homo Sapiens
ggtaaagaaacaggttgttcacttgctgaggtgcaaaaattcttaagacttctgtttgaaattgctcaatgactaggaaaagatgtagtagtttactaaaattgtttttctaccatatcaaattaaacaattcatgcctttatagggtcaggcctacaatgaataggtatggtggtttcacagaattttaaaatagagttaaagggaagtgatgtacatttcgggggcattagggtagggagatgaatcaaaaaatacccctagtaatgctttatattttaatactgcaaaagctttacaaatggaaaccatgcaattacctgccttagttcttttgtcataaaaacaatcacttggttggttgtattgtagctattacttatacagcaacatttcttcaattagcagtctagacattttataaacagaaatcttggaccaattgataatatttctgactgtattaatattttagtgctataaaatactatgtgaatctcttaaaaatctgacattttacagtctgtattagacatactgtttttataatgttttacttctgccttaagatttaggttttttaacatgtatttttgccctgaatttaagtgttaatttcgatgggaaactctgcttttaaaatcatcatttactgggttctaataaatttaaaattaacttgaaaaaaaaacaacaagaacaacccaaaaaaaaaaaaagaggggggggcgcaaaatacccccgggggccctttacctcccctttttttaaggccccaaggggtaaaaaagcgggggcgtgaaaacg

SEQ ID NO: 42445 - DNA, 742 bp, Homo Sapiens
  misc_feature (24)..(25): n is a, c, g, or t
  misc_feature (721)..(721): n is a, c, g, or t
ggaatttccgggatgttgttgganngcaatcccaagtttaacgggaaatatttgttgtaaatgtaatggttttgaaaatctgagcaatccttttgcttatacatttttaaagcatttgtgctttaaaattgttatgctggtgtttgaaacatgatactcctgtggtgcagatgagaagctataacagtgaatatgtggtttctcttacgtcatccaccttgacatgatgggtcagaaacaaatggaaatccagagcaagtcctccagggttgcaccaggtttacctaaagcttgttgccttttcttgtgctgtttatgcgtgtagagcactcaagaaagttctgaaactgctttgtatctgctttgtactgttggtgccttcttggtattgtaccccaaaattctgcatagattatttagtataatggtaagttaaaaaatgttaaaggaagattttattaagaatctgaatgtttattcattatattgttacaatttaacattaacatttatttgtggtatttgtgatttggttaatctgtataaaaattgtaagtagaaaggtttatatttcatcttaattcttttgatgttgtaaacgtactttttaaaagatggattatttgaatgtttatggcacctgacttgtaaaaaaaaaaaactacaaaaaaatccttagaatcattaaattgtgtccctgtattaccaaaataacaccctnaaaaacccatccccccctaaa

SEQ ID NO: 42446 - DNA, 635 bp, Homo Sapiens
cccgacaccaaggtcctggacatctgtgtctcgctgttgatgggagagcagtttctcgtcagctggtgttagccgggcggagtgtgttagtctctccagagggaggctggttccccagggaagcagagcctgtgtgcgggcagcagctgtgtgcgggcctgggggttgcatgtgtcacctggagctgggcactaaccattccaagccgccgcatcgcttgtttccacctcctgggccggggctctggcccccaacgtgtctaggagagctttctccctagatcgcactgtgggccggggccctggagggctgctctgtgttaataagattgtaaggtttgccctcctcacctgttgccggcatgcgggtagtattagccacccccctccatctgttcccagcaccggagaagggggtgctcaggtggaggtgtggggtatgcacctgagctcctgcttcgcgcctgctgctctgccccaacgcgaccgcttcccggctgcccagagggctggatgcctgccggtccccgagcaagcctgggaactcaggaaaattcacaggacttgggagattctaaatcttaagtgcaattatttttaataaaaggggcatttggaatcaaaaaaaaaaaaaaa

SEQ ID NO: 42447 - DNA, 781 bp, Homo Sapiens
gtacataaagatgttccttaagtcgtacagaaggtggcgcggcaaagggcctcgtgcagtgtgttcagattgcccctggggatcttctgtgtcttcagcgcccagccctgcgtgttcctggtgaagcagtttcacatcagtctctccagatagcactacgatgtattccgcttctgaacaggatcccatgccagtgtggaacaccttcccaatcttagttcagaagtggcttgtatgacctgttcaggggtcacatgaggtctcgccagtttcctgggtcctcttcagaggccagaaagttctaagttctgagtccccggccagggtcccttaacacctcggcacagaggctgttggcaagtgtagaggctgcctctgtgtgtggtttaagtaaactggaaatgagacattgacgtgctgctcctccagaggtctgcacactccacttcacatgccgttgactctcacagtctaagacttcagggccgggacctttgtccagcctgcacagtagagtgaggctgcctctcccgccaggcattgggatcccatttagaaacggcattcacttcagaaggtactttttaactgctcagtttttgactattttaaatagtttgctgaaaactcctgataacacttgctacatatcatgttttaattgcttgtacagttaacctttaattttatttagtaaagtgtatcaaagtaggactttttgaatcgtcaatagggtgggttattaattaaagtccatggtaaatgtcaaagaaaaaaaaaa

SEQ ID NO: 42448 - DNA, 821 bp, Homo Sapiens
caaaacaaaaaaaaaaagctatccacctttccatgtgggtcaaactaaaattagaaatgtcccctcactgcagatcaaattgtaaagcttccagttaaggagctaaatgaggtcctcagctgaactgaggaacccgtgtacatcccctttgcacagcccttattctaaatcgcttaaactatgctgatagctgcttaggttctggagtagttctgctcttaaacgtagggaggccctgagaactaaatttggccccaaaataaaaacagaaattatgagattgcctcctgtcatttgggttaacccagtccttcacctgccctgtgtcagtgtcttctgagggcaattggcgtggctcaaatcactagcacagaggttccttaatttgggggccttagaaaccatggtgggcctgggggtccatgaaccccatgaaattattggtagactggtatgtacatttttctggggagaaggttcaagagattcataagatggtcaaactccttgaaggttcagaacctctgcagggaagggggaagaaaaccctcccattaggaagcatgctttggcagttaaatggcgatggtggaggtgatagggacttcaagagtaaaaatgcaccttgtatggcataagaagcatacacaaatcaataaatcaagggagattataccagtaggactgaatcagggccttcaagctggactgagtggtctgtacgggcacatatggtccactgtggaaccatgtctgatggacgtttccatggggactagagttttttaacaatgtatttgagaatagtaaaacaaaaaaag

SEQ ID NO: 42449 - DNA, 740 bp, Homo Sapiens
attagcagccatattgtcacctcagcactgtggacacctccctgtgaagagatccttccattccatctagtttttggaaaaaccttgtggataagtggctgtttcatcagtaagcagcctttgtggtttagttataaaaggctttagtagctcaaaaatactcttgatttcacatttctactctagatggcaacattggacagaaaatgcaatgacataaccaatttgtaatgattttggaactgtgtttcaaatggactgttacagactgaaaggtgtgaacagctttgtatgtttatgaagggtaagggaatttaatacttttccacagatttttttgtaaggggaagagggaaatgtacactttttacagcagcaatattttgtatattatgtttatttcatgtggtgaatatgcaaggcggtacactacgcactggacagcatcagaaatcctctgttaatgtggactggagcatggtagatgcttgattgttttggtctcaaaatggtgtgctataaagataaaggtgaggggaagacaaagcacaccatatgtccactgttctgttctcatagaggaaattcaaatcccttttatctattagataatcaagggcactgtgatacagttttgagtaaaaagacattttttaaaagccttccagttttgtggattaaacctttttataaagatcatttataatactgttttaaaatgtgaggcaataagattactt

SEQ ID NO: 42450 - DNA, 506 bp, Homo Sapiens
gtggcgtgggcctgtggtcctagctactcaggaggctgaggcaggagaatagcctgaacctgggaatcggaggttgcggggccaggatcgccccactgcactccagcctggcaatagaccgagactccgtctccaaaaaaaaaaatacaatttttatttcttttactttttttagtaagttaatgtatataaaaatggcttcggacaaaatatctctgagttctgtgtattttcagtcaaaactttaaacctgtagaatcaatttaagtgttggaaaaaatttgtctgaaacatttcataatttgtttccagcatgaggtatctaaggatttagaccagaggtctagattaatactctatttttacatttaaaccttttattataagtcttacataaaccatttttgttactctcttccacatgttactggataaattgtttagtggaaaataggctttttaatcatgaatatgatgacaatcagttatacagttataaaattaaa

SEQ ID NO: 42451 - DNA, 1019 bp, Homo Sapiens
  misc_feature (713)..(713): n is a, c, g, or t
  misc_feature (716)..(716): n is a, c, g, or t
aaacacaacttccagccatttttttagttagtaaaaatcctattaatgtgaaccagccaggaataacagtgttatttctattggatatggtttgggcttctcttgtcaaatctgtgtcggctgccccctgatccttccattatcaagttttgaagggtgttggggaaattatggcagctgctagggagatcagggaaacactgatgtaacctcaaagcctctcaccattcctcttggcttggaaaggctttattttttcatatacatttctagaaatattgctattctaccttagtatttcacatttgtagttcaaacaagcgattgtccatctgttgcctagagctatagtacatgtgtgttatgaatgaaatatgacagcatgttccatacccctgctttagccatctgtgggaaaccagcaaactgaaaaagacacctctgcaaaatgtgcctcaagtccatttcttgggatcgctcgtttggtgcactctcgtgggagacaatcagagaacaacatatacttgtgccttattttcaaagaatctatttacactactatgaatattccactgaagagtcaatgatgtaaatgataaccaccaaatctcaaaaatatactcaccaaaaagtaaaaaagtaaaaaaaaaaaaaaaaagaaagaaagaaaagaaagagagagaagtcaacttttcatcttaatatattctagnagnatttattttttccttgtcttggaagtatctcataggtctttaaatgagtaaaacatttttatgccagaaggtgatataatggatgttagtgttttttattggattttacaggagttttagtcagataatgaggacagagacctccacttgaattctttaccaccatttcagcaatatttttttaatggcctttcacttggattttggcttaaataagggccccgaacaagatccaaaactttgtgtcctcagggaagggccattaataaggggggccaaccccttgaaaaatttttcaaggcc

SEQ ID NO: 42452 - DNA, 850 bp, Homo Sapiens
cctcttcttctctggtgagagtctgaggatagagacttttttctcaccatgaatgtcaccccagaggtcaagagtcgtgggatgaagtttgctgaggagcagctgctaaagcatggatggactcaaggcaaaggcctcggccggaaggagaatggtatcactcaggctctcagggtgacactgaagcaagacactcatggggtaggacatgaccctgccaaggagttcacaaaccactggtggaatgagctcttcaacaagactgcggccaacttggtagtggaaactgggcaggatggagtacagataaggagcctttctaaggagaccacccgttataatcatcccaagcccaacttgctgtatcagaagtttgtgaagatggctacattgacttcaggtggagagaagccaaacaaagacttggagagctgcagtgatgacgacaaccaggggtccaagtccccaaagattctgactgatgagatgctgctccaagcctgtgaggggcgaacagcacacaaggctgcccgtcttgggatcacaatgaaggccaagcttgctcgcctagaggcccaggagcaggccttcctggctcgtctcaaaggccaggaccctggggcccctaactgcagtcagagagcaagccccccaaaaatagaaaaagaaaggaggcagaaagagaggaagagctacagctctgaaagatgatgcgatagaacaccagacctgctgacagactcagataaccaaagagagaagcactcaaaagaagctcgataaaaaggtcactaaagatgaagagactcagacatgcttggattatacaacaacacttctagaggaaaaa

SEQ ID NO: 42453 - DNA, 964 bp, Homo Sapiens
ataaaagccatgttgagtggcccaggtcagtttgctgagaacgaaaccaatgaggtcaatttatagagagataccttcacatgtgctatcgaaagtatgcatgtattttacgtacaaggttcgctacactaacagctccaccgagattcctgaattcccaattgcacctgaaattgcactggaactgctagatggctgcgaacttcttaaattgttaaataaaataaattataataaactgttaactcttttcagtatttaatacctgtagttcagttagtaactttttcatatatagcatgttgcctgtatgcagttgaactatataaagttcattgcaaagcagattatcttgtttttttgcatagcaatcaaagttgaaatttgtttgctacatcaacaaattaaggacattttcacaaactgagaaataaacaaatatgccaattcgtaggtggttttgccttatcctttgaatgtgamttaaaatcagcaatgatgatatagtaaatactgaaatttaggtgtaaatcaatacgttctacagggaaataatgaggctaagtatttttatgtttttagtggtttttaagaaacctaatcttatagccgccattagcattactagagttatgcaaataattgcattataaacatgtttataacttagccaaaacattgatttttataactctccaagtatgagttgaaatttcttatgtcttttgataaactgcagtattctttaagtgtactttgttcttttgtttattgctacaatttaagaactttatttaaaaacaatttttggaaggtacctaggtacagcttttgcagaagaaactgaactgtagccagatggtcagcaagtaaactacatgacttagagtcctgtgcatayacattttgggtaatccamagtmccgtatctgcaytgaccaaaagcgcskttgcaawattwtat

SEQ ID NO: 42454 - DNA, 730 bp, Homo Sapiens
atgcagtgatggaagaagcaggaaaagcaagaagaaaagacagcagcatcaagaggaggaggacatcttggatgtaagggatgagaaggatagcggggctagggaagcagagagcagagcacacactggctcaagcagcagaggtaagaggaagaggcagcagcatcccaagaaggaaagagctggagtcagcactgtccagaaagccaaaaagaaacagaagaagagagactaaaggtctggtaaaggtagggctcaattgattgattttcaggagttgaagcctcaaagaccagggttgatgcaggtctgcaggtcttctgcacccccctcaatgaggagtccctcccagaaaggaaactgatctctgggatgtcagctgctgagaggagcaagcggtagtaccaccccttagttgagggagtcagcacagtcctttctgcagcttctaacccaggaccatgaactcaggtgcctagagaagccaggcagctaaaggacaaggaatgctgggggctgtgggaacaggaatgcagataccctttgaaggagcattcctgctaaaagaagctgaaaatgtagacctatgtgaagtgctctgatttctaaatattgtgaaggttaagaaaaacataaatttaggtctatgggctagatttagcccacagttgccagtttctagcgctaccaaatgaatgaataaacatgagcttgcgctcctagcctagag

SEQ ID NO: 42455 - DNA, 666 bp, Homo Sapiens
ccggctctcacctggccctgcttcctgcttgccaaggcagaggcctgggctgggaaaaactttggaaccagactcttgcctgtttcccaggcccactgtgcctcagagaccagggctccagcccctcttggagaagtctcagctaagctcacgtcctgagaaagctcaaaggtttggaaggagcagaaaacccttgggccagaagtaccagactagatggacctgcctgcataggagtttggaggaagttggagttttgtttcctctgttcaaagctgcctgtccctaccccatggtgctaggaagaggagtggggtggtgtcagaccctggaggccccaaccctgtcctcccgagctcctcttccatgctgtgcgcccagggctgggaggaaggacttccctgtgtagtttgtgctgtaaagagttgctttttgtttatttaatgctgtggcatgggtgaagaggaggggaagaggcctgtttggcctctctatcctctcttcctcttcccccaagattgagctctctgcccttgatcagccccaccctggcctagaccagcagacagagccaggagaagctcagctgcattccgcagcccccacccccaaggttctccaacatcacagcccagcccgcccactgggtaataaaagtggtttgtg

SEQ ID NO: 42456 - DNA, 747 bp, Homo Sapiens
tatagactttatatttttccttttgataaagggatgctgcatagtagagttggtgtaattaaactatctcagccgtttccctgctttcccttctgctccatatgcctcattgtccttccagggagctcttttaatcttaaagttctacatttcatgctcttagtcaaattctgttacctttttaataactcttcccactgcatatttccatcttgaattggtggttctaaattctgaaactgtagttgagatacagctatttaatatttctgggagatgtgcatccctcttctttgtggttgcccaaggttgttttgcgtaactgagactccttgatatgcttcagagaatttaggcaaacactggccatggccgtgggagtactgggagtaaaataaaaatatcgaggtatagactagcatccacatagagcacttgaacctcctttgtacctgtttggggaaaaagtataatgagtgtactaccaatctaactaagattattatagtctggttgtttgaaataccatttttttctccttttgtgtttttcccactttccaatgtactcaagaaaattgaacaaatgtaatggatcaatttaaaatattttatttcttaaaagccttttttgcctgttgtaatgtgcaggacccttctcctttcatgggagagacaggtagttacctgaatataggttgaaaaggttatgtaaaaagaaattataataaaagggatactttgcttt

SEQ ID NO: 42457 - DNA, 621 bp, Homo Sapiens
gaaaattggactgtaatcatatcgctactggcatctgttatctagtatgcatttctggtgtgtatctgaaaggaagacattttctaccctagatccaattgcatttatttatcaataagtgccattaaattgaaattatattacattttacactttctcaatgaatgaacaaattagtctgtagaatctagccacctgtttagcctagtcatgtgccttgaacatatatgtgtcccataatctggctcatggtacctgttcttctatccaaacctttcaattcatgctacctgattcatttatttgacatagatcttaggcccacttgaactcttttcttgtttatctagcatagcacaaacgtttttccagtcttctttatcaacactaatgcctcttaattgcatcagtatttcctattggaaaatacatctgttccagaaaaacatttggcattcctgaataatttccaaatgtttttaatccaaagaaaaaggtttaaagcttatttccctttcttatacacacctgaataaaattgatgtgcatgttttagggatcaattacctaactgttccttggtctatttatgtataagaatgctttttaaagcacatgtct

SEQ ID NO: 42458 - DNA, 478 bp, Homo Sapiens
atatatatgaataaacaaaaatgaaatcctgctaagatcacgctgtgtagctgacaggggcttgctgtcgttttgagcatgtcgagcagtttactgtggcttccttgtatatggataagctgctgtccttccccttcacaactgaccccgcagttacaaactagtatagcatttgtgctgattgatgatagactcatggacttcaggagcccttacttggttttgatcagtgtagcaaattagggatgaagagttcaaaccttttggccctttctttcttttctaggcttctccctcgcagggtgttccgtagtttcttctcgagccaatgcatgtattatagcagcaggtgtctttgtgctttctcatcatagtaacgtactacttgtaaatacatttttctattttctatttttttgtatttttttttttgacattttgtttcattggtgtgctgtatattttccatgccctcact

SEQ ID NO: 42459 - DNA, 529 bp, Homo Sapiens
cacgcgtccggcacgctctgcggggagaaaaggaggggcctgcctggctagccctgaacctttcactttccatttctgcgccttttctctcacccgggtggcgctggaagttatcagtggctagtgaggtcccagctccctgatcctatgctctatttaaaagataacctttggccttagactccgttagctcctatttcctgccttcagacaaacaggaaacttctgcagtcaggaaggctcctgtacccttcttcttttcctaggccctgtcctgcccgcatcctaccccatccccacctgaagtgaggctatccctgcagctgcagggcactaatgacccttgacttctgctgggtcctaagtcctctcagcagtgggcgactgctgttgccaatacctcagactccagggaaagagaggaggccatcattctcactgtaccactaggcgcagttggatataggtgggaagaaaaggtgacttgttatagaagattaaaactagatttgatactgaaaaaaaaaaa

SEQ ID NO: 42460 - DNA, 815 bp, Homo Sapiens
gggattcctgtggggcccctggacctgccaacatctccgggcgcatgcagaaggtctcctactttcactgcaccctcatcggatactttgtaggcctgctcactgctactgtggcgtctcgcattcaccgggccgcccagcccgcccttctctatttggtgccatttactttattgccactcctcacgatggcctatttaaagggcgacctccggcggatgtggtctgagcctttccactccaagtccagcagctcccgattcctggaagtatgatggatcacgtggaaagtgaccagatggccgtcatagtccttttctctcaactcatggtttgtttcctcttagagctggcctggtactcagaaatgtacctgtgtttaaggaactgccgtgtgactggatttggcattgaaagggagctcgtttgcaggagagaggtgctggagccctgtttggttccttctcttcctgcggatgtagaggtggggccccttccaagagggacaggcctctccccagcgcgccttcctcccacgtttttatggatctgcaccagactgttaccttctgggggagatggagatttgactgtttaaaaactgaaaacagcgaggagtctttctagaacttttgaacactaaaaggatgaaaaaaattagcaaaccgaagtttcttcaatgacccctcgagaactttgggaccagtttcctatgggggactcagtttcagagaactgagacagaagctcttctgtcgttatattcttctttcctttttttggatttattaaatattttctgtggtgtgaagtga

SEQ ID NO: 42461 - DNA, 861 bp, Homo Sapiens
ccacctgccacctctgacggagtgggagaagttagtctgtgctaagatagtactgagtccccagatgttgtatactgtaaattacagtataatgccaaatgcagcaaaatcttccagctgtacgttacaagtttggtcattttgaagcttgacattttagtttgccattatgttaaaaacatctaaataggtgttagtttctcaggagtagattgttagtgttgacttttcctgtaaagcagacatcgttcttggcctgccctgcattgtatactagatttcattgttgtctctcatgcttcttgagttgcttcatggtttatgctcgccatggaaagctatcagtaacagtttcatgcttataccaaagaattaaatctgatctttaatatctgatattttcctggtactcgtactgataagggattattggaagtcagtcacagaatttggaaataaattctagtctctccttagctatttgatgcttttcatataggccaagaactcattgcaaaacatttttgcaaggatgaatgcctgtatttggtctaggaacagtacatttagtctgatttagaattactggtagcttattttaaagcaaggaaaagcagctgagctcaagtttgctgtctttagaatggtttgtgaaaatatggtataaaggtgttttcattttcctgttcttacctattattgtatagagctattcatgccattttttgggaaaactttaaaaattgccccaaatactgacattgagtgcattaaataacaaattatctttgatacattaaacttttattcttcatgcatctggtaatttaatttttagtataatgttttgccctttggtac

SEQ ID NO: 42462 - DNA, 1103 bp, Homo Sapiens
ttatttttatgatagcggtattcaggatctcatcacctttgcccgtgttttagactttgtcatggtaaatcctggtcttcataaacatgagtaggtcccttggttgctgtcacttgccctttaatagtgttgatgtagtcagtgccgttgccttttcttcattagagacacagaacaatgtattagaatttccagctgtgggtttgaagacttagggggacatccagaacgtgcttcctctttcagacggtgtaaagtcccctggaattacacagctttagtgctgagcttttaacaggaaatgtggccctaggtattagtcttagtttaaaatgttggtgtttagagactgtaaatgcatattcacaaagttatctgatagggccttggaggagaaggtccagttttaaaaaatgacagtttgtgtttaataaatgaaggcatgagaggaagtaagtagcaagttgaaggacaggtagttgagatgaaacacttcaaaaccctggttatagatgtactgtttggatgtagcatagtcttgagtctagcgtccacaaagaattattcaaatgatatttagaagaattataactattacattgaatggagtcccttggatattttgatagtaaaattaatagccataaagtcctagacttcttatttgaagttaaaatttcttatttgaaaagttgaaatttatgagctttgaagattgctaaattaaataatttatagctccaaaaacaaaaatatacttgtatatgtcacagagaaaaaaatgcaaatttataatagagttactttaacctggtgtttaccttttactgatttcttatatgggataaatttaaagttcaggcattttatggggaaaaaaaggcccttcccaccgaacccgccacctggcacctcttgaccgattggggaaaaattactctggggctaaaaaagtactggatcccccaaaaagttttatatccgcgcaatcccccgtaattgcgcccatagccaaataatttttccacttgttccatctcaatcctgggcctttcgttcaaccctccacctcttcggtgtgcgattcgggatccacacctctc

SEQ ID NO: 42463 - DNA, 633 bp, Homo Sapiens
  misc_feature (29)..(29): n is a, c, g, or t
cctcgcgtccgaaggaaacaaagaatgcnggaaaaataatttaatatcaacctcagttgacaaggtgctcagattattcaattcgggatcctccttttgttaggtttttgagacaaccctagacctaaactgtgtcacagacttctgaatgtttaggcagtgctagtaatttcctcgtaatgattctgttattactttcctattctttattcctctttcttctgaagattaatgaagttgaaaattgaggtggataaatacaaaaaggtagtgtgatagtataagtatctaagtgcagatgaaagtgtgttatatacatccattcaaaattatgcaagttagtaattactcagggttaactaaattactttaatatgctgttgaatctactctgttccttggctagaaaaaattataaacaggactttgtagtttgggaagccaaattgataatattctatgttctaaaagttgggctatacataaattattaagaaatatggatttttattcccaggatatggtgttcattttatgatattacgcaggatgatgtattgagtaaaatcagttttgtaaatatgtaaatatgtcataaataaacaatgctttgacttaaaaaaaaaaaaaaag

SEQ ID NO: 42464 - DNA, 566 bp, Homo Sapiens
aaagcatcaagtgcccagtgagtgagacccaggtgttcttcctccacccctagtggtcccctgggcaggtctttttttttttgtaacactcaccagtctgttctgtagtcaatcattgattgacttgtctgtgaacttgcaggaactgtttcatagtttcattagcacagagtaaacatgtttgccatgcaaggttattttgcatctgcatttaagtgataatgttgaatcaatgaaaagtgttgattaagcagtagttgtagatatgctaagtttttcaaattactaatatcaagtggagattgtttttacttttaagggtattgcttttgtgatagcataaataatggttttccttttttgtaatgtaaattaattgctggcaacttttgtattcccatagactggggaagcttaattgcctttacaagtacttatgtacaactttgtatcaaattttctgtaatagtttatgctttagtactatatatgtactaataattttatctgacttctgtttatatcatttgtacaattacatggttgtaaaataaacttttaaacct

SEQ ID NO: 42465 - DNA, 821 bp, Homo Sapiens
  misc_feature (614)..(614): n is a, c, g, or t
ccacgcgtccgcttaattagtcttgaatcatacacctgatccccaacattgcctgctctcaatgaaacatgctttggaaatggaagggactcagaaagtcgaaatcccaagaactccaagccaaaagtgttaggttttagtgaaatttgtgtcaggtataagcatacctgtttgggccagaattattatcacagcctttctgacccaaactttcaaaagcaaataaacagcatataaaacgttaattatctttccattgtaattgtgatgatctactctgtatgggtaccaaaatcaccttctctcttcaagtcaaagttgaatttagaactttgaatacaggtcaaaaaatgtagaaaatatcattttatattccctaatctatatagctgaaaaagggttgtattttcttagctgaatatgaatacctcttaaacataaattagttcctctccagtgaagtatcttattttaccaatccatttcaggaaagaggttctgctgccgtaaaggcagaaattttatttttatcccttttatttgaatgagagatttgaaaatcgaattatgtaaatatttcaatgcatctgctattattttgtggagtttattanactactttaaaaaaattgtatagtctatttattgtatgtatgtacatacagtctgatacctaaaatttaaagtggattccataaaaccagactcaagtcttgtttagactactgaatactgttttagcctgtgccctggattctacctctgtataggaaaattttccatattcatttaattagtgttggatctggaataattgggtt

SEQ ID NO: 42466 - DNA, 771 bp, Homo Sapiens
catcactgcaacatttctctgactagcaatgtgacgatgtaacaaatgagattttctcatttaataataaaaaattgtgtaatgttttgcaaagcttctgtcttaaaatgtccaggtcttaagaaaaaaggcagcttacactgttttgcttgcagagtcatatctttttcgtacaatggaaatcctcaagtccactttgtgcggtctccctctccttcccccaaaaaacaacaacaacaaaacaaaaaccaaaaaggaaaatgtagcatgttggctaaaactggagcaaagtgcactaaaacaatttcctgaactcacctgttgtactattcaccttttaaaccataaattgctctttagccatttgtagtgcagtaaatgttacaggaaaagacttggcacattttcttccaaattttaagaggtgattttcaaaagctttattggggtatgttgtcagaccagggttttcagagttgatggaaaagagtcttgtgagaaaacttattttgataaattattacacacgcagaaaaactgatcacactgactggatctgtccacgacatggaaaataaactggattttcagaatattgttgttttctgtagtgttcaaggtattgtttctaaacataaacatactctaaacatgctttattcacttgttaaagtcatacttttaaaagtaataccttactaaagatggtgattacttttccgaggtcagaaaaggaaagctaagcgttttcattatcaaatacacaagctt

SEQ ID NO: 42467 - DNA, 710 bp, Homo Sapiens
gtctatttattgtatgtatgtacatacagtctgatacctaaaatttaaagtggattccataaaaccagactcaagtcttgtttagactactgaatactgttttagcctgtgccctggattctacctctgtataggaaaattttccatattcattaattagtgttgatctgtattaattggttatgtttcttgcactaaggatgtttaaaactccgctgtaagtgtagattttagttttactggcaggatgaatcacttgacacataggtagatacttgaggttcattttcttttctttttctacatgatgatgaatagttatgttttcttctctgatatgttcaaagtttgccaaaagaaaacacaaaaccagtacagtacttactgataaatcgtagtgactgtaatttgtttgtaaggcgaattaatgctctacaattaaagctggattactattgaggaaaaaaaaaaaaaaaaaaaaaaaaagaaaaagaaacaaaaacaacacaaaaccaaacacgacaccacgaagaagaaaaaaaaaaaaagaaaaaagaaacgaggacaacagggaagaacagaagaagaagcgatgcactcacaccacgataagaagatgaacagggcggcagcgacatgacgccggtgccgaacggcaagcaccccagcagcggccccagacgatgcaggagcacagagggcgaacatga

SEQ ID NO: 42468 - DNA, 688 bp, Homo Sapiens
cggccctctggagtccccatgggggcggtagctgaagttggcgagcgcagcggtggatgcagagctggctgcacccagggctgggccagtgtgtcctgtaagacttcttgcattccttctgctgcttttttgggatgggggtatttttgttcatttgtttttgccctgttttgattttggtcccacagagcaggggatgtagtttgtacccaccatggcgcagacttccaaataaatagtactggtcatttctctctgcactatttctgcgcgctgtcttctgagctttcttcctcaccagtgggctgtgcttgttccatttctgtacacccttattttataccgtttttcttcaacaatggcgaaattgactgtagtgctgaaccaaaagtatccctttccctccttattcctcaccccaagaacattctagatcacatgggtgcttgtgccttccgattttcttgcatttgtttttttcctgacctgaagttgttgttacaaaatcagtcagactttgtgggctgaaggacacggtgcagcagagggtgtccctgtgagagttctgcagagtgctgggcatgtgcctggaactaccgagtaggagccatttctttgtacccctgcctaatccattcctctccttccaagtccattgttgcaagcaatattcttctcaatttttata

SEQ ID NO: 42469 - DNA, 670 bp, Homo Sapiens
acctgagctttcccttggagcccctgagcagggagagggctcacaagcttgaggccatctctcgcctctgcgaggacaagtacaaggacctaagaagatccgcgaggaagcgctcagccagtgcagacaacctgactctgccccggtggtccccagccatcatctcttaactacggaggcccgccggaggccacaccatcccttagtttctcctttagtttgagaaaagacagacttggggtgggtttgtttttgttttttctttccttttctttttttacgcatagctccgtcaagctgcctggatgagcgcccatgcagcaaggcttggaggaagcgtcagtgccctggagatcccagctcgctctccccactgtcagcaacagcacttccttcgtggaggaagtggactcgaatcctggaggaggaaataaagggaaagggaagtcgtggagaggcagggaaaatggttaagcagcccggccctctggagtccccatgggggcggtagctgaagttggcgagcgcagcggtggatgcagagctggctgcacccagggctgggccagtgtgtcctgtaagacttcttgcattccttctgctgcttttttgggatgggggtatttttgttcatttgtttttgccctgttttgattttggtcccacagag

SEQ ID NO: 42470 - DNA, 603 bp, Homo Sapiens
aagaacactagcagggagctaagaggcaggttgctgggtaagccatcctgctcctacctggtgcctgtatctacattgctgagtgctgtgcgccagtgcctttccttcatctgcagatggagcccatctctttccacctgggtgaggagaccctctgctactccaggggtaaaccttaaagaaggtgtcttgaagagcccaaaggacactcacgtgctaaggtgtccattttatgcatctttaaaatattttatttaaaaaaaaaaatagccctgccctgtcttagtgccactaacggcccagttccatccattctgaatggaaaagcggagactgccagcactttccttggtcttccctttgtctcccatgatgtgttgttccctcatccctcccatccatttcactgtgtgtggatggatagcagagggtaccacgcagtccttgaggcagtcctgtgtgattccatgatcagttgtttttgtattttaactattcttccaaaccagcagatgtttggaaattaaggaaaaaattaaattctcatcaatggttgctgttatagttaaatcagtaaagatcttgagtatcaaaaaaaaaaaa

SEQ ID NO: 42471 - DNA, 573 bp, Homo Sapiens
  misc_feature (47)..(48): n is a, c, g, or t
  misc_feature (63)..(63): n is a, c, g, or t
  misc_feature (70)..(70): n is a, c, g, or t
caattataattagtaaacaggtgtaccaataaaaagaatttacatgnnataggttaacaaggnaccaggnaaagtgagtttcctgaaggagttctttgttcctgatcaaagaaattgatacctgttagcattcactgccaccatattttaaggagaaagaactctattggtgtcgtctgagcagccatttaaaaattggaatctaaaggatggttgctgatgtactgtgtggtctggtagaagtggggaaatatgagagatggaggaaaaacttgattatgtcttccatggcatatttactcttactttacttcgtgccaaatcaaatgaaacaagccgtcttacaagtcgttattgcctttaaaaatctgttccgtttttttcccaggtacttaaaatacaagtgccagtaagtggttcttatgtgttttggggggaaaattttatttcccttttcttctgatatttaaaaaattcatcgatctttcaagatgaaccaaggttttttaaaagaattataggaaacacttcattctttataaaactttctataatgccttatttgaatgttaa

SEQ ID NO: 42472 - DNA, 636 bp, Homo Sapiens
cattgtatccagcacactatccttgaacatggccatctttgcttctgtatgcttggcatcacgtcttccccggtccctgcatgccttcatcatggtgacatttgccattcagatttttgccctgtggcccatgttgcagaagaaactaaaggcatgtactccccggagctatgtgggggtcacactgctttttgcattttcagccgtgggaggcctactgtccattagtgctgtgggagccgtactctttgcccttctgctgatgtctatctcatgtctgtgttcattctacctcattcgcttgcagctttttaaagaaaacattcatgggccttgggatgaagctgaaatcaaggaagacttgtccaggttcctcagttaaattaggacatccattacattattaaagtaagctgatagattagcctcctaactagtatagaacttaaagacagagttccattctggaagcagcatgtcattgtggtaagagaatagagatcaaaaccaaaaaaaatgaaccaaaggcttgggtggtgagggtgcttatcctttctgttattttgtagatgaaaaaactttctggggacctcttgaattacatgctgtaacatatgaagtgatgtggtttctatt

SEQ ID NO: 42473 - DNA, 483 bp, Homo Sapiens
tgccagtgttaggatgtcagttttacaaaataatgaagcaattagctatgtgattgagagttattgtttggggatgtgtgttgtggttttgctttttttttttagactgtattaataaacatacaacacaagctggccttgtgttgctggttcctattcagtatttcctggggattgtttgctttttaagtaaaacacttctgacccatagctcagtatgtctgaattccagaggtcacatcagcatctttctgctttgaaaactctcacagctgtggctgcttcacttagatgcagtgagacacatagttggtgttccgattttcacatccttccatgtatttatcttgaagagataagcacagaagagaaggtgctcactaacagaggtacattactgcaatgttctcttaacagttaaacaagctgtttacagtttaaactgctgaatattatttgagctatttaaagcttattatattt

SEQ ID NO: 42474 - DNA, 895 bp, Homo Sapiens
  misc_feature (586)..(619): n is a, c, g, or t
ctgcctggacttggagagatgggaggcagacccccaccaccatacatgctgtctgtggcccctcagacattctgtttcatctcccattcatctccctcctcccaccgtgtcagtttttctgcctttccctgctctgttcttccccctccttaggccccagcctgggcccagacccatcctcccagccaggtttccctccagcaggctccttccctccctgtcacctccctctcaccaacccggggtctgagcccctcattcctgaccgtccgtgttctcaggagtggttgaggacacagggccccagcccagccctctgcaccccccagcccggccatctgcgccccacagcccctttggagcttttctcttgtcctctcactccttcccagaagtttttgcacagaacttcattttgaaagtgtttttctcattctccatacctcccccaagctctcctccagcccttcccagggctcagccctgctgtcctgagcgtctcctgggccagagagaggagatgggggtgggagggactgagttgatgttgggtttttcattcaataaattggtgatttcttaccgnnnnnnnnnnnnnnnnnnnnnnnnnnnnnnnnnnctcgatgccaatgggtggagaagaaaacttcggttcgctcccaggaccccgggcagcggcgggtgctggaccgggctgcccggcagcgtcacatcaacccggcagctggaggccctggagaatgacaacttccaggatgacccccacgcgggactccctcagctcgggaagagactgccctcagttttgatgacgatgcgggacactggaaagaaaaagaaggaacccccgaggggaatcatttttaaaacttccctttccgaaaaaactttcagt

SEQ ID NO: 42475 - DNA, 583 bp, Homo Sapiens
tgatgaaacttgagtctcagggaagtgaagtgacttgcccagggtcactcaggtagagttgagattcaaacccacatgtggctccaaagtctgcatctggatttgggggtgttttttggcatggcaccctcacctctctccctgcctgttttccccaaagtggaaaggaaggcctttcaaaccagagtgtctcactcccctctgacctccagaccagatggggcatgagccagccagctcagccaggctccctgtgtcctgggaggaagtgtccccatcccccatgccccttatggggagggagggcgtctgatgctctctctctgcctcccccccatcctgtcaggcacaggtgacgggggcagcccatgcgagcccttctcctgctgctctgggagggccagttccacattgagccagcctggtcccatggaaaatgatggcctgggctttctgaggccttatctgatgcctctgcagttcatgtcccccaccaggcctcgaggctcagggtgggagagggccccgggctgccctgtcactcctctaacacttccctctcctatccccaacatgccctgta

SEQ ID NO: 42476 - DNA, 652 bp, Homo Sapiens
aaacacaaagtccttaacatgccaggctcaaggtcttataagagttctagatttttaagagaattagacaaatttgtgtgtgttagaagcccattcattagaagtgtggtggttatttggtattaaactccaaatgagccataggaaggcactacatgaaataatgcactgagtatgcaatgctatcactgtctttgactgtgattttatgtttaaaaagtatgttctaaaattattatatatacatgggtgaattatgtttccgaggcactgttttatctctgtgaatcttgaataacttttttatatttgggttatgatgtcaaacgatcctaagcgaagatgatttcagttcatcaaatcatcattaatgactttatgtattatttgcacagggagaattgaaactgagtataatcaataagctagatacgaaatcagtttctcaaactgagcttcagaaaggggcattttgtactcttgtttttgcataactggttttgtttttttgcagaattaactataacaatcactggctaccgaagtaaactgatgtactgaattccataatacataacattcaatttttaccacttctgtttagcgaacttgtatacttattttctgttcagattaaaaaaaaaaaaaaaag

SEQ ID NO: 42477 - DNA, 640 bp, Homo Sapiens
aggttcgtagctcctctctgcccttccaagcctgtaacctcggaggactatcttttgttctttatcctttgtcttgtttgagtgggtcagccccagaggaactgataagcaaatggcaagtttttaaaggaagagtggaaagtactgcaaataaaaatccttatttgtttttgtagactttgtaatgcatatcattagccctcactgtgatcattactgctgtggctctgaactggcacatagtacagtggatggaaggtgcccgcacaccagctgagaactggttctggcctaggtgggctctagaaccatttacacagcatgaaagaaacaggttgggttaggagcagaaagaaataaggctcacacccctccagacactaccttataagcactgcagaacctgaaacagatggcagaaggaatggaatgctacaggggccagcaggagtgaccacagggaggggacagctcagtgactggagcattcaggaagaggctttccagggaacactggacattgcttagtgaccttttgttccttttttttttttttttcttttactgttctgaaagactttgagtctgtggttcaccacgagcccatcagtgtttctttgaggtgattgcattagggaag

SEQ ID NO: 42478 - DNA, 933 bp, Homo Sapiens
aaaggaggcagctgcagaattgatgtgagctatgtggggccgaagtctcagcccgcagctaagtctctacctaagaaaatgcctctgggcattcttttgaagtatagtgtctgagctcatgctagaaagaatcaaaaagccagtgtggatttttagactgtaataaatgaggcaaaggatttctattccagtgggaagaaaacctctctactgagttgtgggggatatgttgtatgttagagagaaccttaaggagtccttgtatgggccatggagacagtatgtgataacataccgtgattttcatgaagaaattcttctgtcttagagttctcccctgctgcttgagatgccagagctgtgttgttgcacacctgcaaaacaaggccatttccccctttctctttaaagccaaagagagatcactgccaaagtgggagcactaaggggtgggtggggaagtgaaatgttaggcgatgaattcctgagcaccttgtttttcttccaaggttcgtagctcctctctgcccttccaagcctgtaacctcggaggactatcttttgttctttatcctttgtcttgttgagtgggtcagcccagaggaactgattagcaaattggcagttttaaaggaagagtggaagtactgcaattaaaaatcctttatttgttttgtagactttgtcactggctatcattggccctcactgtgatcataactgtcggggcctgaactggcatagtcacgggttggagtgccgccccactgggaaccgtctggcacggggtctaaaccattacgctaaaaacggtggttcggcaaaagtgtacccctcaatcttaatggacctaaagcagaggattaggcgagacacgaggactgagggagggacacgtcaactcttacaggacagcagccttggaggaacacg

SEQ ID NO: 42479 - DNA, 720 bp, Homo Sapiens
ataaatttatttatttatttttttaatagtcaaaaatctttgctgttgtagtctgcaacctctaaaatgattgtgttgcttttaggattgatcagaagaaacactccaaaaattgagatgaaatgttggtgcagccagttataagtaatatagttaacaagcaaaaaaagtgctgccaccttttatgatgattttctaaatggagaaacatttggctgcatccacatagacctttatgttttgttttcagttgaaaacttgcctcctttggcaacattcgtaaatgaagcagaatttttttttctcttttttccaaatatgttagttttgttcttgtaagatgtatcatgggtattggtgctgtgtaatgaacaacgaattttaattagcatgtggttcagaatatacaatgttaggtttttaaaaagtatcttgatggttcttttctatttataatttcagactttcataaagtgtaccaagaatttcataaatttgttttcagtgaactgctttttgctatggtaggtcattaaacacagcacttactcttaaaaatgaaaatttctgatcatctaggatattgacacatttcaatttgcagtgtctttttgactggatatattaacgttcctctgaatggcattgatagatggttcagaagagaaactcaatgaaataaagagaatatttattcatggcgattaattaaattatttg

SEQ ID NO: 42480 - DNA, 550 bp, Homo Sapiens
cactactctgggaaatggtttgtcttcaagatgcaatacttttcttagtaaaggaaaaacagcataaaaagatacctggtctgccttgtacaagaaaaggcaatattagaggaagaaaatttaaagaaaagctagaggaaaaaaaaatttttttaaaaatacttattagaagcaaactgcccttgcatggaaaactgtttatttttttcagtgaaaaggaattctgctttcgtgtttttgggaaagcaggaactgagttcattacatctttaatttggcagaaattagcctttctgtgaaccagatgtggtttggggcagatctgtagtaaacaatggtgattttatttatttttactctctggaaaaggagataatacaattccagaaagtgaactcatatttctaaggttaagattcccttttattgcacctagaatagtgctatgcacagagcgggtgcttgagttgttgtcgttttttgtttgttttttaaatgtaaactggtaaattttgtgcttatcttcaaggctggcttaagtataaaattg

SEQ ID NO: 42481 - DNA, 545 bp, Homo Sapiens
  misc_feature (540)..(540): n is a, c, g, or t
  misc_feature (542)..(544): n is a, c, g, or t
tgcaaaggcataagctaattgaatgccttgaaagtattatccactggtcagatggtcaacttttttcagtattatttatagttggcacttgattgcagttctgtgaggcttgagcattcatacacctcacctgccttggcaagcctattttagtgatatggcagcacggatataacactatgcattaaaagcactttttgtaataagtttaatatcctaaaaggaatgccaattaagttttgttaactgtgtcatcaacttatcctagtacctcagtgttcattcctgttacctgcatatcttcttaaaagaaatagctgttattaatgcctttttgttttccattgagtgtacactactgaataagtgtaggagttttatgtttaccatgtgagtcctgcaacactaaagatattttgaatatcagtcatgatggcaatttctgtataaaagagccttaaatggaacattgttttgagatcaaactccccaccctcacaaaaatggccacgttgcaataaaaattgtggcatatttcanannnt

SEQ ID NO: 42482 - DNA, 500 bp, Homo Sapiens
attgggaatcagattaagacaatcagtttcagagaaccaggaggtttggggttaagagatactcaaaaattttcacaagccaagtagggcatatatcagatttggccaactgaatggcgtctgtcctgtcatccatatggtgcctggaaatatttaccagtcaaggtcaaggtcagcatctgtggttaaaaatatagcattctgacctaaaaaagttattttgcagatgaatgtgttttcaactcaggacctatccaaatgaggaatttttaaatattcttttttttttcctatttttagacatcaattctatagattctgactttttctaacctcttatagacatgccaaatgctggcaaaaagaagtgctttttggatatggcagcacttgtaaaaataaagcagtaagcaaaatccttttaaacacagaaatcctgagttcttctcattggtggactcaagcaattctgtagcaaataaatcctttgaaagagctcc

SEQ ID NO: 42483 - DNA, 500 bp, Homo Sapiens
ctagagaggaaatggctgcttcatcatcatcctcctcagctggtggggtcagtggaagttctgtcactggatctggtttcagtgtctcagaccttgccccaccacggaaagcccttttcacctaccccaaaggagctggagagatgttagaagatggctctgagagattcctctgcgaatctgtttttagctatcaagtggcatccacgcttaaacaggtgaaacatgatcagcaagttgctcggatggaaaaactagctggtttggtagaagagctggaggctgacgagtggcggtttaagcccatcgagcagctgctgggattcaccccctcttcaggttgatactgcctggatggtcacctctggtgcgcagcaagtgcaaagccagtgggggactttctcacagcttacatagccatccagagatccacagctacgtcactgaattgttaatgcacatttgtacttggtttctctgtatctattcacaggcaacaa

SEQ ID NO: 42484 - DNA, 953 bp, Homo Sapiens
gtataatcatttattacgttgtatgcaaattttgccttagacaacatttgtctggttccttattaataacttgcatctgatctgcttagagttgcttaattataagtaaatataatcccagtagcatttagccttaatctcaagagttcaaaatgtttaacacattctacctgacgggaggtggtgacctcattcagtcggttaagagcctgagccctgtgaagttaaacacctgctcatggtcacatagcccaggcagaagaaaatctcggacttggaatagatcccagttgcctgataattcatctcattattgcctctaaagcaaattggagactgggcacagtggctcccacctttaatcccagcacctggggaggctgaggtgagtggatcactagaggtcaggagttcaagaccagtctggccgacatggtgaaactcagtctctattgaaaatacaaaaattagcccagtgtggtggcacacacttgtaatcccagctactcaggaggctgaggcatgagaatcgcttaaacccaggaggcggaggttgcagtgagctgagatcacaccattgcactctagtctgggtgacagagcgagactctgtctcaaaaaaaaaaaaataaagccgggcgtggtggttacgcctgtaatccgggcacttgggaggctgaggcaggcggatggctgaaaatcgcgagttcgagaacagctggccacatggtgaacctgtctctactaaactagcaaaaaaatagccgggtggggggggcgtaatccagaacaggaaggggggggcaaacgttgaacgggggcggagttcgacgatgggaaatcctttgtccccgcacaaagacgtcttaaaagacatatttactgcgcgagacgccccctttttatttaaaactccgtttgttacctccgaaacagcctaaagagcggtttgt

SEQ ID NO: 42485 - DNA, 535 bp, Homo Sapiens
cttataacggactggaactgcccgggaagatatgggaaggttctagggtgaggcacctcagtaactcatggtaccttggccaagttggaaggaagcagtttgttaatgaggcacagtaatcctggctgcagggtctaggaggtaagaccagctgggatgaccttccctgggttaatcaatttccctctagacaacacaaactgcaggcatgtgactaactttgaaagaacacccatcatgtggctgctgtcacccttgaccagctgtggtggtggttactccatctgtggttggagcgcctctttgggattcacttcaaggtcttgtgcctattttctgcatatcttctgtgatgacaaatctctgtcccctgagtgttaatttgatttttagaaatggccaaaagtaacgtgatccaaactttttttcagtaatatggagactgagctgcatggtagttggggatcaaaaatatgtgaccttaatgagatttttatgatttctaaagtaacaataaaagcagtttttagagttg

SEQ ID NO: 42486 - DNA, 869 bp, Homo Sapiens
  misc_feature (21)..(21): n is a, c, g, or t
tccgaaaaaaatcaaggatantctgattgggagcaaaccacttctttagtcatctgtcttacctccctgggacagctgttacctttgcagtgttgccgaatcacagcagttacctttgcaatgttgccgaatcacagcagttctgttggagaaacgcttggtttccggatccagagccacagaaagaaatgtaggtgtgaagtattaggctgctgtcagggagaggatggcagatggaggcatcaagcacaaggaaaatgcacaacctgtgccctgttatacacacgttcatgtgcacccaagaacctatgactttcttccagttccttctaccaggtccccatcctgctgccagctctcaacatagcaggccataggacccagagaagaatcccagtgttgctcaaagtctaaccatcataaagacactgcctgtcttctaggaatgaccaggcacccagctcccactggactccaattttttttcctgccttatttagaattctttggcgggaagggtatgatgggttcccagagacaagaagcccaaccttctggcctgggctgtgctgatagtgctgagggagataggaatttgctgctaagatttttctttggggtggagtttcctctgtgaggggcttgcagctatccttcctgtgtatacaaatacagtattttccatgggttctgcctgcacttacttttgtaatgccccggtttgagattgagagagatcagggcagcccaggcaagggaacttttaaggatttattaaggccaccttctcccttttcctggacccccagagtctttcctccatttgggtaaaatactcaggggcggggacctccttacctcctggtctc

SEQ ID NO: 42487 - DNA, 943 bp, Homo Sapiens
  misc_feature (840)..(840): n is a, c, g, or t
  misc_feature (916)..(916): n is a, c, g, or t
ttttagaagtttttgttttacaaaacaactgggaaagatgcagagctactgagcctttgccctgaatgggaggtagggatgtcattctccaccaataatggtccctcttccctgacgttgctgaaggagcccaaggctctccatgcctttctacctaagtgtttgtattttattttaaattatttattctggagccacagcccccttgcttatgaggttcttatggagagtgagaaagggaagggaaatagggcaccatggtccggtggtttgtagttccttcaaagtcaggcactgggagctagaggagtctcaagctccccttaggaagaactggtgccccctccagtcctaatttttcttgcctgccccgccttggggaatgcctcacccacccaggtcctgacctgtgcaataaggattgttccctgcgaagttttgttggatgtaaatatagtaaaagctgcttctgtctttttcaaaaaaaaaaaaaaaaaaactcgcactctgttcttccgccgctccgccgtcgcgtttctctgccggtcgcaatggaagaaagatcgccgcgctggtcattgacaatggctccggcatgtgcaaagctggttttgctggggacgacgctccccgagccgtgtttccttccatcgtcgggcgccccagacaccagggcgtcatggtgggcatgggccagaaggactcctacgtgggcgacgaggcccagagcaagcgtggcatcctgaccctgaagtaccccattgagcatggcatcgtcaccaactgggacgacatgggagagatctggcaccacaccttctacaacgagctgcgcgtggnccccggagaaccacccagtgctgctgaaccgaggcccccctgaaccccaaggccaacagagaagaagatggactcngaattatgttttgagaactttcacacc

SEQ ID NO: 42488 - DNA, 643 bp, Homo Sapiens
gcggccgcaccagctagactccattctgggaccatctccaggagtccatgagaggctttcttctcctatgtcccaattctcagaactcagatgtggctagaccaaccagtgggaaactgccccagcttctcccaccatagggggccggacccccatcaccagcctaggatccaggggctgcctctggcctcttagggagcagagagcagaactccgcagcccagcccagaggagtgtcacctcccacctttggagaggaatccttccctcccctggacaaagttgctgacaagctgctgaagtggcctctccatattccagctgagcctgaatctgactcttgagggttggggctgcacttatttattgcggggagacagctctctctcccacctcctccccagatgggaggagagcctgaggcccaagcaggacccgggggttccagcccctagctgctctggagtgggggaggttggtggaccatggagtccctggtgctgcccctcaggtgggacccaggcgttctcagctgtaccctctgccgatggcatttgtgtttttgatatttgtgtctgttactacttttttaatacaaaaagataaaaacgaaaaaaaaaaaaaaaaaaaaaaacctcgtgcc

SEQ ID NO: 42489 - DNA, 627 bp, Homo Sapiens
ttccggactcgtagccagcctgtttagccagccctgcgcataaatacactctgcgttattggctgtgctctcctcaatgggacatgtggaagaacttggggtcggggagtgtgtttgtcacttggttttcactagtaatgatattgtcaggtatagggccacttggagatgcagaggattccatttcagatgtcagtcaccggcttcgtccttagttttcccaacttgggacgtgataggagcaaagtctctccattctccaggtccaaggcagagatcctgaaaagatagggctattgtcccctgcctccttggtcactgcctcttgctgcacgggctcctgagcccacccccttggggcacaacctgccactgccacagtagctcaaccaagcagttgtgctgagaatggcacctggtgagagcctgctgtgtgccaggctttgtgctgagtgctgtacatgtattagttcctttactgctgaccacattgtacccatttcacagagaaggagcagagaaattaagtggcttgctcaaggtcatgcagttagtaagtggcagaacagggacttgaaccaagccctctgctctgaagaccgcgtcctgaatttcttcactagagct

SEQ ID NO: 42490 - DNA, 845 bp, Homo Sapiens
  misc_feature (508)..(509): n is a, c, g, or t
  misc_feature (515)..(515): n is a, c, g, or t
ggccgcctcgtctcaagttgtataaagttgtctccgtgtcccctcctccctctgcccccagtgtttcttctgattttttttttcccctttccctccctccctctccgcattcttcccttggttcagcacaggtaaaacggttcccctccctccctgccttcatggatcaccagctcacgtcatgttgccttctcttttctttgtgtgtgtgtttatttaagttatttttcttcctcctctcccttttctttttggccctccctccctccctcttctgccatgtaactggaggatgtgctatgagtttgcaaacagctggactgtcaggctgctttttttccagatgttcctcctctgcctccccttcccctcctctcccctccttttccttccttccttcctttccttggagcactgagcaccatttggaagcttgagagaaaccaaaattaaagagagaaagagaaaaaaaaaaaaaaaaaaaaaaaaaaaaaaaaaaaaaaaacgnngggcgnccacgaccagcaaaaaaacttcctaaaccattccatttggcgcagcgggcaccccccaggaaaaataaaaaatgaataaaattttaaaatattttggggccacccccggccccccccaaaaaaaattttttaaaaaaaccacttcttttggggccgcccgcggccccccaaaaggaaaagaagaaaacgggggccaaatcctttttttctcaaaaaagaaaccccccggcaacagaaagaaaaggggctgggaggatctccccccaaaaaaaaaaacaacccccgcggggtgaaccaccccaagctttttttaaaaaaaaaaaacaaaac

SEQ ID NO: 42491 - DNA, 716 bp, Homo Sapiens
  misc_feature (638)..(638): n is a, c, g, or t
cccacctcagtaggtggaggggagcgcctgccattggttgtatttttgttctgagttttcggtgccgtgttcctaactactccatcccatgacctcgccacacctactggggcatctggctggtgcctgctgccatggccagcccccactctcaccctgcacagggggtcttgcagcccccaggcccacagcctcgttgggaggacagggtggccctggggacaagagggaggagcccaggggcttacctcactgagagtgctccccagcaggcatccactaccccagggccccccacatgtcatggcaaggttggtagtgaatgggcctggttgggagcagcccctggcccattgcccacccacccatctcactatgcaattcgagttccaagcaacatttgctcctgccctggggccagctctgccccagccctgagaggggtggtgaggcagccccctggaccccagaaccccagacaagggggcaggcgggggaccagggcctctcctgtgggatctttgttttgtgtttaaccataatggttgtgtactgaaccacttcatatttgttatatataatatatatatatataatctccttaagactcagcctcctggtttacccccccggcctgngcatctgacctcccccaccccagtgtgatttaacatccaggaactgaggcctgaatcattttgcatttccccctcctc

SEQ ID NO: 42492 - DNA, 500 bp, Homo Sapiens
ctatgcaggaaatgcggagaatagaaaatatgtcacttgaaatcctaagtagttttgaatttctttgacttgaatcttactcatcagtaagagaactcttggtgtctgtcaggttttatgtggtctgtaaagttaggggttctgttttgtttccttatttaggaaagagtactgctggtgtcgaggggttatatgttccatttaatgtgacagttttaaaggatttaagtagggaatcagagtcctttgcagagtgtgacagacgactcaataacctcatttgtttctaaacatttttctttgataaagtgcctaaatctgtgctttcgtatagagtaacatgatgtgctactgttgatgtctgattttgccgttcatgttagagcctactgtgaataagagttagaacatttatatacagatgtcatttctaagaactaaaattctttgggaaaaaccctcaattgtgattttaataaattaaaagtagcacattaaaa

SEQ ID NO: 42493 - DNA, 973 bp, Homo Sapiens
cgcgatggcaggtgtcggggctgggcctctgcgggcgatggggcggcaggccctgctgcttctcgcgctgtgcgccacaggcgcccaggggctctacttccacatcggcgagaccgagaagcgctgtttcatcgaggaaatccccgacgagaccatggtcatcggcaactatcgtacccagatgtgggataagcagaaggaggtcttcctgccctcgacccctggcctgggcatgcacgtggaagtgaaggaccccgacggcaaggtggtgctgtcccggcagtacggctcggagggccgcttcacgttcacctcccacacgcccggtgaccatcaaatctgtctgcactccaattctaccaggatggctctcttcgctggtggcaaactgcgtgtgcatctcgacatccaggttggggagcatgccaacaactaccctgagattgctgcaaaagataagctgacggagctacagctccgcgcccgccagttgcttgatcaggtggaacagattcagaaggagcaggattaccaaaggtatcgtgaagagcgcttccgactgacgagcgagagcaccaaccagagggtcctatggtggtccattgctcagactgtcatcctcatcctcactggcatctggcagatgcgtcacctcaagagcttctttgaggccaagaagctggtgtagtgccctctttgtatgacccttcctttttacctcatttatttggtactttccccacacagtcctttatccacctggatttttaggcaaaaaatgaaaaagaataagtacattggttcatggscacaaacattcagatcagcacttgctgacctggttcttaaggcacatgaawtagtcaatctttmaaatctgtcttagggstgtgaggawcagactamcmagactcagtctkcttyttttctcgagtgatttctytgttttyacwaaaaarmaataaaaactytc

SEQ ID NO: 42494 - DNA, 640 bp, Homo Sapiens
cacgaggcttagaactatttttggataaattatatattttccttcctagtagaagtgttactgcctgtaactagctcaaaataccaatgcagtttctgcattctgggttttgtttttccttttttttttttttttttttgagttttgctctcgtcgcccaggctggagtgcaatggcgtgatctcagctcactggcaacatctgcctcccgggttcaaatgattctcctgcctcagtctcctgagtagctgggattacaggtgcccgccaccacgctcagctaatttttgtatttttagtagagatggggttttaccatgttggccaggctggtcttagacttacctcagttgatccacctgcctcagcctctgcattcagtttattcacatatttttggtaactcccatggcagctcctaggatttcagcggtctgtgggccagaaagcaggcaccagggctgacctcaaggccgtatcagagggccaagcagagttcttttggatacctgcttttcatcccacagggccttagagtcagaggtaaggtagcaacagagctagaatggggcaatgcactcttaccctccttctcaacttttatttaagctgtgctaaatgttttcttcaagggaaccag

SEQ ID NO: 42495 - DNA, 507 bp, Homo Sapiens
ctcagctgagtgcaggtggggttcgaggggaaaggacgatggggcatgacctcagtcaggcactggctgaacttggagagggggccggacccccgtcagctgcttctgctgcctaggttctgttaccccatcctccctcccccagccaccaccctcaggtgcctccaattggtgcttcagccctggcccctgtggggaacaggtcttggggtcatgaagggctggaaacaagtgaccccagggcctgtctcccttcttgggtagggcagacatgccttggtgccggtcacactctacacggactgaggtgcctgctcaggtgctatgtcccaagagccataagggggtgggaattggggagggagaaagggtagttcaaagagtctgtcttgagatctgattttttccccctttacctagctgtgccccctctggttatttatttccttagtgccaggagggcacagcaggggagccctgatttttaataaatccggaattgtattt

SEQ ID NO: 42496 - DNA, 648 bp, Homo Sapiens
gcctgtgtgtgttagaatccagagcccagaggaagtgcaagcgggtcctccgccaacggggagagcctcttcgcggcgctgttggcgacagcagcgctgtgattcgcgtagcaggggagttgtttgaaacaccttcctgagtagtccggccttgtcaatgagtgcttgttttcctttaaacagtctgacatatttactcgtcactttcaaaccagaagcatgagaggaaggagatattgtggggtccgtttaactcgatagaaagcgcagggggatggcccccggcgcgggctcttgacccgctcagcgctgaccccagccgccctggccgaggcacttggccttgctgagctggacttcctcctcctcctcctcatgaccggggtgaattataacgtttttaaagacacccccttccaaattctgtaacacattgtaattggagaagaaggaaactctgcaaggctaaactgtcattcacaacttggctacacatagactctagtcagttttgtctccagaaccttaggcttttgtattttttaattttaatttcactgttaatccttattgtcttttttattaagatgttggaaaagcaggaggtagttgtgcctcaattattgcaaaaatgtaacaataaagttc

SEQ ID NO: 42497 - DNA, 541 bp, Homo Sapiens
ggtccttgtgtttgtgtgtgctaacagaaataagttgcagtatggtcgtacttttaactctagtatcctttgcttgcttcttaccccctttcctaggtgaattctcccacagtggtctgtatctcaacattttctttttaaaggaaaaaatatatatatatagtttctttttattgatcaggtctgtaaatgtgtactaaaaaaatcagagtttatttataaacaaaatagtttatttaaagagaaggtctcttccttattgatatcatggtatgcattaattccatttgttactattgtgcacaaaagccctgttcacaggggaatggtgtaaacatttatactgttttgttcactgtatttagtagacataactgttgaatagttactgaatcatgatgtaaagaatatgtgaccatcttcaggtatgggatttctgaacgtttcaaatttcaatcaatgagcactgtcaacacccacaggagagaataaaattacctgtgcaaaggtgaaaaaaaaaaaaaaaaaaaaaaggccacat

SEQ ID NO: 42498 - DNA, 560 bp, Homo Sapiens
gtattagaatatttaatattccccagatcctcttaggataaactgtgggaatcctcctatgccatggatatcaaaggtccacattagtttttatttctccagtgatcagaaacattgatatcaatccctattaaattagtggggggaatattaactttatctacagtgtattactgtatattaaactgaaatagtccattaaaggatttttttataaatttattttggattaaaaatatcaacaccaataagtttttagaccaagttgtaatttttccaatatagagtctttgcatcacactgaggcatcttgcacagctgcagttaaggtgagaaagaatgctctgtgtgaagacagtgtacacaatgggttccggtttccttgcaccttgtgcagtatcctttatttctgtgctgttctctcctgagcatgaaaaatgatcattatccaatttgtatttccttggtacatattttaaaaacaacacagtcattgactttacaattcagtaatgaagtttggcaaagcctattttgtaaacaagttaattttataatgt

SEQ ID NO: 42499 - DNA, 658 bp, Homo Sapiens
atcagaaaatttcggttcttgtctttagcacatgtactttgagtcttagtatctgtaacgtggcgctactctctctatcatgggggggcatgtttggacattccagattgacttttaagaaaaacatgtcactaacctgaagctcagccacacagtgacttttaaggttttatttagactttactgttgttctcatgagagtaggtacagactgcataaggtttagaatcccagcatatgtctgaaacgacgggactttcactgtgatttccaccagagaaattatagcagagtggctgagcatgtgctctgaggccaggccccagctctgtctgctgacgagctgtgtggtcctgggcagagtggtctccgagttccagtccctcctctgtaaaatgggcatgattagagtgcccaccgattagggatgtggggtgagtcagtgtgaccccacgtgcacagaaagtgctgcgagtggtgcatggtgagaggttgatgcaggtacttagcccttggggaacacaggtagttccttttcactgtgtttagatcgggaaaatccagatccacgatcatgtagagtctggagggttaagaaggaagtccttgtgtctaacataacaaagaggagcaggttgtgtactgagtccagtcgtgg

SEQ ID NO: 42500 - DNA, 570 bp, Homo Sapiens
ggatgaatggaatttactgtatgttgcagtaactcgagccaagaagcgtctcatcatgaccaaatcattggaaaacattttgactttggctggggagtacttcttgcaagcagagctgacaagcaacgtcttaaaaacaggcgtggtgcgctgctgcgtgggacagtgcaacaatgccatccctgttgacaccgtccttaccatgaagaagctgcccatcacctatagcaacaggaaggaaaacaaggggggctacctctgccactcctgtgcggagcagcgcatcgggcccctggcgttcctgacagcctccccggagcaggtgcgcgccatggagcgcactgtggagaacatcgtactgccccggcatgaggccctgctcttcctcgtcttctgaggacaaggcgcacgttctccgcagtgcagagcagcttgccgaggaccccgcgtgaagaaagccagcgaggggggcttctgctccctgagactctgggttcacccacagcactttctgaggaagaggacaccagcccaagctggacctgccatttctccactccctacagacag

SEQ ID NO: 42501 - DNA, 904 bp, Homo Sapiens
  misc_feature (904)..(904): n is a, c, g, or t
atctgtgtaatgtcaccttgtttaggaaggcagttgatgacttcagacacaaagccagagaaaacaaattcattgttcgtgacttccagtataatgaagaggagatgaaagcagataaagaagaaatgaacaggctttctactgataagaaaaaacaatttggaccacttgtacggtggctgaaagtgaattttagtgaagcatttattgcatggattcacgtgaaagcattacgggttttcgttgagtctgttttaaggtatggcttgccagtgaacttccaagcaatgctacttcagcccaataagaaaactttgaagaaactgagagaagtattacatgaattgtataaacatctagacagcagtgcagcagctattattgatgctcctatggatattccaggtttaaacctgagtcaacaagaatactacccctatgtgtactacaagattgattgcaacttgctggaattcaagtgaaaatgggctcctcccccgacaatcctgtccttgtgtttgtgtgtgctaacagaaataagttgcagtatggtcgtacttttaactctagtatcctttgcttgcttcttacgccctttcctaggtgaattctccccacgtggtctgtatctccacattttcctttttaagggaaaaatatatatatatagtttctttttttttgatccgggctgtaaatgggtacttaaaaaatcagaagttatttataaacaaaatagtttattttaaccgaccccgcccccgaatcccaagcgggccccccgacacctaaaaaggggggggccgccctcaaaaaattcccctcagggggccccaagttttaccgcggacccccgttttttttgggaaaaagggggcccccctataaggggagccgctaatan

SEQ ID NO: 42502 - DNA, 746 bp, Homo Sapiens
atttagtgctgccacagggcagaagcacacaaaccaaccacacagtctctgacttctcctaagcactttgagttgttgaatggggctcaggggcaagagtttttgctgccctccccagcgtggtcacagggttattgaactgcctgcacttgtttctcatgcaactccagcattttccccagaagttgaactatggatagcagcttggtatggatttcctaaatcttaacatttgaagcagcttcttgaggctggcaactatcctggtttctgtcttggagggggtggtttgtttgctggggcccaacgtctgtcccaagtggtggggtgagagtaagttaactttggtgccaggtgagaggtgggggctctttgcttagactccctatcatggaaagattggagttttctatgcagggcactgtggaaaaggattgctgattctgactgaccctgatcagagagattaggattgtattttgacataggatttggaacccatctaaatgttgaagttccctgagacagctctccagctgctgagcctgcgccaggggctaagcagcccctaatgagaggctctgctccctttcccacctcgccaatgttgttgttgctgcctttttgatttgtatcctctgttatagacattttttaaaaacgatttcctctttcattgtgcacaagtgctgagagtctgaggccccatttctgctgtgtatatatatcctgactcggggctttta

SEQ ID NO: 42503 - DNA, 859 bp, Homo Sapiens
ccgggatatcactccgacactcgatggggccaggtggctatggggataacctcgggggaggccagatgtacagcccacgggaaatgagggcaaatggcagctggcaagaggctgtgaccccctcttcagtgacatccccaacggagggaccagggagtgttcactctgatacctccaactgatcttgcccctcagggtcacaggggtgggggctctcacaaggcgacttgaagaggacgcaggcttccagaggacaaaccccaatacaggagaagcacaagacagagaagggccaatggggtcatcccctccctaacgagactctctgtgctgggggtgctaattacatggcaggaagaatggggcctctaaggggagtgtggggtctgtctctcccttttttccatctttttcctctctcgctttctttcttacacagaaacatacacataccgagaaacctatttctcagacccctttttctcctctgtctttctctctccctctcccacacctcacacacacatactcccacttgcaactattctgtttctctcctgggctcccccactttcccttccccaccccacttgtatgctctggaatctgtggagacgccagccctgcccaatcagagatgccaaaaatggggacatgacttctggacagaggacatgggccacgcccccatgcatccccacccccgcccctccggacggcttacttacctcatacgcagctcatcttaaaccaatagaatcgctcggtggacgagagtgtctgactcagatatctacctcggagggagtttctgctactttagggaattattgactgggctttggggttgaactttttt

SEQ ID NO: 42504 - DNA, 767 bp, Homo Sapiens
  misc_feature (624)..(624): n is a, c, g, or t
tatgttaggaaaatagacacattttcaaagagaatgttctcttacatatgttaggaaaataggcacactttcaaagagaggtataggggctttttactgccttcgaaatcacttttaataaaagttgtatgataaatcattaaaaatgcgagtgtaaatatttttttttacctctatcagggtttttatttgaaagtgtgctcttaccatttccttgtttgagtaagagagtgaatggttctgagtgtttaggaaggatttgcttgcttgcagcagaagttctaggaaaagcaggcacctcccaaatatcttgaggacactggcagccttatggtgactaaatccacactttctttaaagagatgcagatgaattacttttctgttaatatatagaaaaatacacaggagaacatgcagatacatgtaaatatctacatacagggatatttgtatgtgtggttgtgaaacccatacacaagtggatttggccatctttgggcagtgaggtcaaatgtgaatatgtgtaaaagtgcttttcagaactgcattactatgagaaaacatcaaaactgctgtagttttccatttctactgtatttcagttgcaacctatttttaatanactttgtatgtatttaagtgtatttgctattgttttgaaagtgctgacaaagtttatatttgtaacatcaagcttcctcgcccatctctttccatctgtctcttcttcattaaacacttactgagtatgaaaaaaaaaaaaaa

SEQ ID NO: 42505 - DNA, 585 bp, Homo Sapiens
cctgtccttcaggaagtaaattttacagggcaccaagctttgccccctaaaatcccttaggtgttctttgttcatgcaggcaggtttctgccgcatttgatgtggaggcagtgaagggcttgccctgctggcctctcatcccccttcttcccacaacccttgggcagggctggactcagtaattttgaggaaattgaagatgccatcttcccctgtgagtgacatgtctttaattttttaaaaaactactatttgaaaattggagggggaagaatgggaagggagttattgccaaatatgttaaatatgggttggggtgcttgtatatgtatcttcctcaatttccccataaatgaggtatctttttgtcacaccaaaatcaaggggtagggagagggaggaggttgcaaaaagccagatgtgggggaaaagtaacatcaacactgtcccatcctcagccctgaactagctaccatctgatcccctcagacattctcaggattttacaagactgtcagagtggggaacccctcccattaaagatccgggcaggactggggacaggttggaagtgtgatgggtggg

SEQ ID NO: 42506 - DNA, 765 bp, Homo Sapiens
tacggctatcgtgaccagccgctcggatagatcctcagtctggcatgcgctccaccctccccattctctgctcccacatatcgtagccccatcacagaagatgcgacatggaaaaaagcactgtgtccaccctagttcttaaatttgggcagggatttggggtgtatgttaagagtttttcaaatttgccagattggatgcctatgttgttaaatacacagtgaatctctggtatgatagcagtttctggataaacattacttgaggtcctaaaatgcagaagggaaaaagcaacttttgtcagatgcctactttgctttcatttcatctctaatattttggatggggaatcagccaaagcttctgactgcatgaaggtcaagtgtgccagtgtgcagctgggtttcttttccagaattaaaagtattttgggtggtggtgagggtcagaggaagaagtaaagattgtgagaaagtggaagaagcatgggcttggggagaacccagaattggggccagaagacctggcactaggctacagcacttagcacctctgatcttgtttttcttcatctgtaaaaggaggttaaacaaagcttattcctgcccactttcttgggggagaagggaactcatataacttggttaaacacacaaacataaaaaaccgttttgacacaaatacgcacaccctgacctttatgtaacccaaggcattattaattctccaccccatatcctggtagatacctgttattcaactatt

SEQ ID NO: 42507 - DNA, 639 bp, Homo Sapiens
cgagggtgaaggatgtggaactggtgctgccagaagattcaatgtttgaagatgccagtgtcagtgaaggtagaggaacccagatagaagaaaatcctttggaagaaaatattctggcgggggaagcagcatctcaagctggtgacagtggtaacgaggcagccaacagaggagatggttcagatgtttcaagtcaaacacctcaaacctcaagtgactggcttgaacaagtacatttagtgtgaactgcacacatctgggctctaaatgaattacaggtacagatggtatgctaggtggagtatgcttgatagagactttgattcacttaattccaactcagtgataaaccactgacattagggttgaatacagagaagttcccttgaatggtagcttcattttttattttaaccttacagggaatttcctttgtacttaattgaatagcttttcccctttttgctgacaaaaagaagagcaagagaaagagaaacaaaaatgaaataaataagttgtattccacactctaagaaaatgcagtcctctatttagcctaggcttgacaatacttaaattgaacatttaaactaaaggcttactccctaatctttgggtggctttcctttaaaaaaaaaa

SEQ ID NO: 42508 - DNA, 635 bp, Homo Sapiens
  misc_feature (620)..(620): n is a, c, g, or t
atatggtttgtgcattttctcaactaaaaatagagatgataatccgaattctccatatattcactaatcaaagacactattttcatactagattcctgagacaaatactcactgaagggcttgtttaaaaataaattgtgttttggtctgttcttgtagataatgcccttctattttaggtagaagctctggaatccctttattgtgctgttgctcttatctgcaaggtggcaagcagttcttttcagcagattttgcccactattcctctgagctgaagttctttgcatagatttggcttaagcttgaattagatccctgcaaaggcttgctctgtgatgtcagatgtaattgtaaatgtcagtaatcacttcatgaacgctaaatgagaatgtaagtatttttaaatgtgtgtatttcaaatttgtttgactaattctggaattacaagatttctatgcaggatttaccttcatcctgtgcatgtttcccaaactgtgaggagggaaggctcagagatcgagcttctcctctgagttctaacaaaatggtgctttgagggtcagcctttaggaaggtgcagctttgttgtcctttgagctttctgttatgtgcctatnctaataaatcttaaa

SEQ ID NO: 42509 - DNA, 769 bp, Homo Sapiens
acagccctcctgggaatctacattgtgttcccccgcattccaggctcagggtctgaggaggctgtgacgccctatgaccgcagagatctagacagtcgtaacagtccccaggctccagctgggcaatccaccacttcctcttccttctgcttctgtgacggtttagagtcaagggggctgaaacacactgtgagcatagactgtattaggtttgttcagaagccgggtcagctcacagaatcacattttcttgcttagtcatgtgtccctccttgagttgccccctccttgtgggtttacactacattttggagtcattgtctaatgctgacaagcacaccctctcccattatttgtgcactacagatctcctcctgatcagtcacctttgttgctgctgtgtagacagagccaggcctcacctgtttgtttaggccaagatgccatggacatgcagcgttagtgatcccactagctgtgacagccaggcccagaaaatgcctggcgtgagagccagcagacagccaggccagggtaggcagtgcctgcttctgctccatcaggtgcaggggatttggctgaaggcgtgcatatttcctgggcacaaacttcctgagcctctgaaatgggaggctcgtcaatttcagaccaacctcttttcaacccatcatagcacgttcaaggtgtgccttttacttctacctgtacatcccccatcccttcaattctttcattccctgaccagtgagagggttcctgggggaagtat

SEQ ID NO: 42510 - DNA, 615 bp, Homo Sapiens
gttttcacagggccgcgtcgccacggctcctctgatcctttagggttggcgagcatctctggaaatagcttttgcagaggagtggtgggaggaatagagggggacagtctgtcacctccctccccgccactttgtgtagatcctacctggagggaatggctttaggcacttttgtgccagagcttgtgagggtgacagaagagggtccaggctggaaacctgaactttctgggtgggagaaccaggtggtgcctgccgaggtctgggcgtgtttgggccggtgctggagcctgtccagctggcccgggccctggcctggttctcaagtgtttcctagacagagaggcacctgggtcagtattagtctatttatcagaggtgtaaataatctatgtatagtttttctccttttagattattttgtatttgtttaaaagaagttttgtcaaaatacaaaaatataaagaaatgactgaaagttgttgacagggtttttaagaaataattattctaattgtttttgtttgtttgtttttgccttgtaaactagcgccaaggaactgcagcaaataaactccaactctgcccaagccaaaaaaaaaaaaaaaaaaaaaa

SEQ ID NO: 42511 - DNA, 656 bp, Homo Sapiens
attgaagtaattctgtcctgcggggttcagcatcatgcacgttccccctgggccattctctgatgcagggcacttgctccacactctgggaacccagattcaccagtctgccctgtcacgtagttgaaggagttgcatttatctttctggctcctaattcctttaaaattacatttgttgcagaacctccacaaggctaaataaaattacatttgtgaccatcagagaactgaataaaccattaactggccatcctggttttgcagagatcaggttgttgacagttcctggttgacccacagctacccatgtcagttatctccactaacatatccaagaatctttgtaggacaatttctccacctgcaaggtctttcaggtagaactcttcttttaaggcaattagcccattgccaaaaggttttactgtcttaaagctgtctttctgagatctaattccaaggacttctccacagctaagtgagatgcctcacaccattaggtgatgctttggacagaacagagtattttcatcttgtgtttaaagcaattccttggcttcggctcctcaccactttctatgccagtctcccatttatgtccctagtaatgcctatgcaaaaaaaaaaaaaaaaaaaaaggacgcggccgcaagc

SEQ ID NO: 42512 - DNA, 721 bp, Homo Sapiens
  misc_feature (698)..(698): n is a, c, g, or t
  misc_feature (701)..(701): n is a, c, g, or t
ttttttttttttatttttaagcttttattttatcactcttatcaaacacacatcagaaagcattatcaacagtgcatcttatggtaagtcagtttacaacaaaactgaacaaggcaattgtgtttacagaaaaagtcttcagcaaaaaagtatgcaatacagtcaactgaaacgcattgttcacactttttaggaatataggaaagtggaaaataaaagttctttgctattcagcaggaaagagtttaaaagacttgaatggaaatcagaaatttagggatttgagaaaataactttttggtactgacacacatctacatacatagtcccacttagtttttgttttttctttaaaaaaaaaacaaaagctcacaaacaataagacatcacaaataatacagcagaaccacagtgccaagaaatgccaagaccaatatgctactgaaacaactggtagaaatgttacagacaactattcactatgtattgtaatattcttgtagttctgaggtgaaggtaaaccaacaggagagattactccttgtaactggctttggtttaagtgatctttcacatttttttctaaccataccttcttataaaaaatgtagcaattacatgttactgagggaaaatagtactaggttttaatattcacaaccaactactccagctgacacaggatgccatcaaccatntanatttattgatcatacttaga

SEQ ID NO: 42513 - DNA, 736 bp, Homo Sapiens
  misc_feature (724)..(724): n is a, c, g, or t
atagggagcacatttacaggatggtctaataacatgaaaacaggctagtttcaagcaacagcaatgtcggttggaaagcaggcgtcatttgccttgaaaaaagccttttgacaacatacaggcattcttttaaaaccaggctgaaacattttatttccgagacttaacgttgtgtttcctgtttcttaaacctagcacctctgtgtatttgaaaataatgagacatctttcattggattttggaaaattgttccccatgggattctaacctcactaccaaatgagtgaaagcttgattaagagttcttccatatactagcctccttggaagaagtgatcagaaggtgataagaaggacagaaaggactattttaaagttggactgaaggagaaaaaagcaaaattcttgtttcatcccaattctagttagaacaaagttaaacccccgtaatcttaaagagaaaatctttggaggttttaattaaacattttatacatttaaagtcttgttaatggtgctttaagtgtcaatgtagcatgtaaaaggctttgtacagacaggtaaaagttccatttctgagtgatgaaatgtaacacttcttcatctttaacttgaaatcaaaactatcagattttatttttgtataatttaaggaaggtaaagttaggggactagaagactctaaattggcttctacagatcaataatttaaatgtaactagntgggattttata

SEQ ID NO: 42514 - DNA, 893 bp, Homo Sapiens
  misc_feature (823)..(823): n is a, c, g, or t
  misc_feature (860)..(860): n is a, c, g, or t
attattctgtaaacattttaattttagtttcatgagtctttattttttgttacctgcaagttatgttcttcttcattgaatttcatatttgagagacatttgtcttcatgaagcagatttgcactggaaccattgctttactctggttggaaatgccattgttttggggacagacttttaaaatgcccttgtgtctcccagtgaggagccctaagcattgacttctctaccctaaaactgtttgagagagggagagtgggccctggctttctcaagcatgggtcgggggttcagcggggcctctgtcttttgtggtgacccctcaggggtttcattgtttccttctgacttaagcaatagagagagaatttgttttggtactcttcagaggaattgtgctttggctcataacttggccatgttctccatgaattagttctcctattttttttttaactaccttaaacttaagggaaaagttctcctatcttgatttcactggaatataggctttaggagctctgtaaggctggtatttttgtctgttttatcttctactgtatcgccagtgcctggaacagtgtctggtgcacataataggtgctcaataaaaatgtgttcaatggatgaatttctaaaatatcctccaatgtgtgcatggaacaaataatcaaaagaaccagactgtgtcttattctcccactgacagaaagattttcctgctttcaggaaaccagctttatgtggccccttttctggtcccctggcttagactacaggtctgtgggggatttggcctgaattgcttcagacatggaaaggntggttttttcattccttgggcaagcttacaatcaagntggtttggtttggattaaaaaaaaatggagcct

SEQ ID NO: 42515 - DNA, 673 bp, Homo Sapiens
cagccagctcacagtttcttggcctgaagcttggtgcaccctccagtgagacacaagatctctcttttaccaaagttgagaacagagctggtggattaattaatagtcttcgatatctggccatgggtaacctcattgtaactatcatcagaatgggcagagatgatcttgaagtgtcacatacactaaagtccaaacactatgtcagatgggggtaaaatccattaaagaacaggaaaaaataattataagatgataagcaaatgtttcagcccaatgtcaacccagttaaaaaaaaaattaatgctgtgtaaaatggttgaattagtttgcaaactatataaagacatatgcagtaaaaagtctgttaatgcacatcctgtgggaatggagtgttctaaccaattgccttttcttgttatctgagctctcctatattatcatactcagataaccaaattaaaagaattagaatatgatttttaatacacttaacattaaactcttctaactttcttctttctgtgataattcagaagatagttatggatcttcaatgcctctgagtcattgttataaaaaatcagttatcactataccatgctataggagactgggcaaaacctgtacatgacaaccctggaagttgctttctttaacaaaaactataatt

SEQ ID NO: 42516 - DNA, 509 bp, Homo Sapiens
agcagctgaatgtttctgaaccatcaagaggcaaacaaacaggagtttgtttcttgaacctgcttatgcacacagctcttaactcctcatgaggcacacagctcttaactcctgatgaaccaaggatttactcataactttctccttgtcatggaggcttaatagacaacagaataaatgcatttcttgggcctcttataaacttgggaattcttagaaagctgcttctattaccaggctgtaatagctggtatagttttttttttttctcttaagatgttctgttattagtctgagacagccatttttttgttttaaggaaaaatatcagtcagtgctccgggaggtaatttcctgtggggtctgcaccctcctgtctgggtggtggatgtgggtttgagaagtaggagagcagggtggtaccgtgtgggctcttaccctttatgtgattttggacaacagtgccttccattaaagttctttttatcaacaaaaaaaaaaaaaaaaag

SEQ ID NO: 42517 - DNA, 740 bp, Homo Sapiens
aaaatggcaggagaccaagtagcaaatgttcgcttcaatgtggccaaatctctacaaaagattggaccaattctagataccaatgctttacagggagaagtgaagccagtactacagaagttaggtcaagatgaagacatggatgtcaaatactttgcacaggaagctataagtgttcttgcattggcataatgaggagcaggagggaaaaggcctttactagattcttgtcacaaatttctagtcaatgtgttcttaactgggtggagaaagaatggaaaaccttcaagatctcatccaagcaaatggcaacaacttagaagaaatcatttagtgacttaattctttctaaagatgaaatgggattgttttttactcgtcttccttgttaaatcattatttaagccgttcttattgaccaattcctgacacttgattgtctcctaatgctttatccatcaccacctgggctcctgcatcctcactgtggaatcaggcaccagccacataatgttccagacaaagcctggaagggtgtggacccagacgtggagtggagtgattctcttgacgtttacatatatctctgtgtctctccatcattccaaagctaaatgtacatgtttagaataacttattttataaactcttcgggagacatgttgagatttgaccgtaatgaaagccacattttcctgaattatgatggtctgcattagtctcatgtgaaaaggggaatg

SEQ ID NO: 42518 - DNA, 617 bp, Homo Sapiens
atgaaacaaaggcttaggggccacaaggcttccagctggatgtgtgtgtagcatgtaccttattatttttgttactgacagttaacagtggtgtgacatccagagagcagctgggctgctcccgccccagcccggcccagggtgaaggaagaggcacgtgctcctcagagcagccggagggaggggggaggtcggaggtcgtggaggtggtttgtgtatcttactggtctgaagggaccaagtgtgtttgttgtttgttttgtatcttgtttttctgatcggagcatcactactgacctgttgtaggcagctatcttacagacgcatgaatgtaagagtaggaaggggtgggtgtcagggatcacttgggatctttgacacttgaaaaattacacctggcagctgcgtttaagccttcccccatcgtgtactgcagagttgagctggcaggggaggggctgagagggtgggggctggaacccctccccgggaggagtgccatctgggtcttccatctagaactgtttacatgaagataagatactcactgttcatgaatacacttgatgttcaagtattaagacctatgcaatattttttacttttctaataaacat

SEQ ID NO: 42519 - DNA, 650 bp, Homo Sapiens
gggtgaggagcagaatgtggtactatattcatttaactcaacccagaaccattggtcagaattggtgggactggcatcttccctcagacttgcagttgatagaggctgtggtgttctcactagactttgcagagcagtaggcatctcaaggtaacagattcttattgagtaggtctattaggagtcagaaggtgttggggaggagtctctggcttatgactcctggttcccattagtcttaagtcttctggttcccataaaagactcagttttattgaggtagatacaggtttagaagagaaaagagcaacagattttcagcgttgcagtcactcggttatctatgaagggttgtgcaaaacaggaaggtctgggaatgaccagatatcttgttggcataaatgttatgaaaaggcagaatactggcaagaaatgaggaagagagagaaaaacaatataactttcttgagtgcaaaggtgctagacaactaggagcccagctgggattggtgtagggagggccgaacgctgactagtgtggcctcactgccccaggcttcctttcagaggaaggcctgtcctgctggaactggagccaaggggaggctgcctatgaaggcagaagatgtggatgaattcaggcactgggg

SEQ ID NO: 42520 - DNA, 582 bp, Homo Sapiens
agcagttcaagaaggacaacgaggaaacaggcttcggctcaggcacccgggccctggagcaagccctggagaagacgaaagccaacatcaagtgggtgaaggagaacaaggaggtggtgctccagtggttcacagaaaacagcaaatagtccccagcccttgaagtcacccggccccgatgcaaggtgcccacatgtgtccatcccagcggctggtgcagggcctccattcctggagcccgaggcaccagtgtcctcccctcaaggacaaagtctccagcccacgttctctctgcctgtgagccagtctagttcctgatgacccaggctgcctgagcacctcccagcccctgcccctcatgccaaccccgccctaggcctggcatggcacctgtcgcccagtgccctggggctgatctcaggggagcccagctccagggccagatgagcagaagctctcgatggacaatgaacggccttgctgggggccgccctgtaccctctttcacctttccctaaagaccctaaatctgaggaatcaacagggcagcagatctgtatatttttttctaagagaaaatgt

SEQ ID NO: 42521 - DNA, 514 bp, Homo Sapiens
caagggagctctcactggaggaacagaggtgtctgcacttccatgtacaacaaacgctccgggaaatggaaagccagttggcagcccacatgtggttacctcacaccagtcaaaagtgacagtggagagcactcccgatttggaaaaacaaccaaatgaaaatggtgtatctgttcagaatgaaaattttgaagaaattataaacttacccattggatctaaaccatccagattagatgtcaccaacagtgagagcccagaaattcctttgaatccaattttggcctttgatgatgaagggacacttgggcccctgcctcaggtagatggtgttcagacacagcagactgcagaagttatatgagtgtttcttctgaagaaccaaagctgaaatttaatgagaatttctacaattaatggaattcctttcctgctataaaggagcatcccctccacccgttttctagagttcttgaccatcattttgaaaagatttattaaaactagctaaaga

SEQ ID NO: 42522 - DNA, 635 bp, Homo Sapiens
gaagatgggacgaggcctcaggcgatgacatagccgcagcaggcaggaggcgtcctcttcagcgtagctctccacctctacccggaacacaccctctcacagacgtaccaatgttatttttataatttcatggatttagttatacataccttaatagttttataaaattgttgacatttcaggcaaatttggccaatattatcattgaattttctgtgttggatttcctctaggatttcgccagttcctacaacgtgcagtagggcggcggtagctcttgtgtctgtggactctgctcagctgtgtccgtaggagtcggatgtgtctgtgctttattatggccttgtttatatatcactgaggtatactatgccatgtaaatagactattttttataatctttacatgctggtttaaattcagaaggaaatagatcaaggaaatatatatattttcttctaaaacttattaaattcgtgtgacaaataatcattttcatcttggcagcaaaaagttctcagtgacctattttgtggtgtttctttttgaaaagaaaagctgaaatattattaaatgctagtatgtttctgcccattatgacagatgaaataaagtattcaaaatattaacatttg

SEQ ID NO: 42523 - DNA, 695 bp, Homo Sapiens
  misc_feature (625)..(625): n is a, c, g, or t
aaaccaaaggaagtaagcaggggtatggggaatttgctaactcctatctattgaatggtgaagttttaaaaatttccccaggtaagtttaagattcaaacaccatctattgagcacctacattgtgtgcctggtagtaaaataggtgctttcatacacattgtctcaattcctgtgagggcgagggtatctctgcatttgaaacttgaggaaacatgctcagagtgcaagaagcttccttgcctgagatcacctagaaaggaaccctcagagccggcaactgaatcttggtccctgtgatgtcaagcccattgctctcccactgcagaacatggcctctagattaatgccaccgattcaggaacacctccgacagtcttgaaatacccccatgttgccttgtttgttttttccttctggcttcttctattacagtctcttcattggaagctctgtaggccaaggccagagctgatactgacacggagccaatgcagatagcacatcagatgctaggggtcgctgggaggattaagggacttaatctgctaggaacacctgtacttgaagtggaggaggctagggggccacagttgctgcttcattaacatagaggttttggattnttttctcttgtggttggttttttaagtggatcggcagactccttgttgcttaagagtggctttctaggca

SEQ ID NO: 42524 - DNA, 573 bp, Homo Sapiens
gcacgaggataatttcacggacatttggaaataacattggtgattatacagacaagaataaactcacttcaagctggtctgttttaataaattttcaacgtaattgtctatttttttccctcccatctgcaacagaatacatttttttcagcctttatctagatgaggtaaagggaatcattcttatggtgctcttggagagtttcaggcctgtgcatgtgtgtacagcaggaggtaatatgctataatgtctgctgtaatatatttgcacagtagatgctatggatcattctgagctcagggtccagactttattcttattcccagaattttgtgttacgtttttacctcctaacatatgacacttcatcttatattaaggaaggtttagaatatctaatacgacttgaattcatttgttactaagccttctcaggcaagctgtatactagttactggtctccactgccatgccttttcaaggttcccatggtccagaatgatgtttgattcttaatttttctgtcccttttataatttgttttaatgattttgctacatttggaattcaat

SEQ ID NO: 42525 - DNA, 734 bp, Homo Sapiens
ggctattagtatatgaacaccttggttaaaaagcaggctggtaacggtccggaattcccgggatatcgcttattttggactaggaatacagtagtatactttccgaagacttgcctgaatagtatataaggtggaggcaactgactagttaggtcagtatttttagaaactcttaatagctcatactcttgataccaaaagcagccctgattgttaaagcacacacctgcacaagaagcagtgatggttgcatttacatttcctgggtgcacaaaaaaaaattctcaaaaagcaaggacttacgctttttgcaaagcctttgagaagttactggatcataggaagcttataacaagaatggaagattcttaaataactcactttctttggtatccagtaacagtagatgttcaaaatatgtagctgattaataccagcattgtgaacgctgtacaaccttgtggttattactaagcaagttactactagcttctgaaaagtagcttcataattaatgttatttatacactgccttccatgacttttactttgccctaagctaatctccaaaatctgaaatgctactccaatatcagaaaaaaagggggaggtggaattatatttcctgtgattttaagagtacagagaatcatgcacatctctgattagttcatatatgtctagtgtggtaataaaagtcagaatgaactctcaaaaaaaaaacacaaaaaaag

SEQ ID NO: 42526 - DNA, 785 bp, Homo Sapiens
ggagtatggccagggcaggagtacacagaatagaatttagactgtcccttgagtagaatccactgattttctgtggctccagtgagaacaaggctttgaaactgaacaagataacttctagaaatgaactgtactaatccctttccccagattgtatcatgagtagaatcaggttcacgtggtgcttcaaagccctgagaagaatatttctttggaccccaggcactaggggccacctgcctgggagtctccctgcctcactcctctaggcaggggagtgatgcttcaggacgtgacaggctgttctaacatgtgtctacctgagggctagttgaaggatccaggaatattttcttcttgggtgggccctgaacaaagccaaaaattgtagaaaccagtctagaaaaagtcctgctcatctgtggccactgccttctagccgtcctccaccttgcagaaagaatctagcctttggtctctctctctctcatcggggtcatttgctattcccctctgatattcaaccctatagaaggagcctggactctgatccctctgtacaggctggatggaaggggccctccacacttcctgggaggtcagagacaaactgtttcagagagtcagatggacttcccaagacttgttgagagatgtgacatggttcttggatttcctctgtagcagcctcctggacttcctgaggactcgacattgtccacagatgtactggcccattacatgaaacaagaaaccaagcatctttgctggtggtaattattata

SEQ ID NO: 42527 - DNA, 399 bp, Homo Sapiens
gctgctgccttcatattgaaggtttttgagttttgtttttggtcttaatttttctccccgttccctttttgtttcttcgttttgtttttctaccgtccttgtcataactttgtgttggagggaacctgtttcactatggcctcctttgcccaagttgaaacaggggcccatcatcatgtctgtttccagaacagtgccttggtcatcccacatccccggaccccgcctgggacccccaagctgtgtcctatgaaggggtgtggggtgaggtagtgaaaagggcggtagttggtggtggaacccagaaacggacgccggtgcttggaggggttcttaaattatatttaaaaaagtaactttttgtataaataaaagaaaatgggacgtgtaaaaaaaaaa

SEQ ID NO: 42528 - DNA, 911 bp, Homo Sapiens
  misc_feature (642)..(642): n is a, c, g, or t
ggacacaaatgatatcacatatgcagacttgaacctgcccaaggggaagaagcctgctccccaggctgcggagcccaacaaccacacggagtatgccagcattcagaccagcccgcagcccgcgtcggaggacaccctcacctatgctgacctggacatggtccacctcaaccggacccccaagcagccggcccccaagcctgagccgtccttctcagagtacgccagcgtccaggtcccgaggaagtgaatgggaccgtggtttgctctagcacccatctctacgcgctttcttgtcccacagggagccgccgtgatgagcacagccaacccagttcccggagggctggggcggtgcaggctctgggacccaggggccagggtggctcttctctccccacccctccttggctctccagcacttcctgggcagccacggccccctccccccacattgccacatacctggaggctgacgttgccaaaccagccagggaaccaacctgggaagtggccagaactgcctggggtccaagaactcttgtgcctccgtccatcaccatgtgggttttgaagaccctcgactgcctccccgatgctccgaagcctgatcttccagggtgggggaggaaaaatcccacntcccctgaacccccacacctccagggccaccgcgacgaccaccgcagtacgcccgcccccccaactggcgccccacccggggaaaaaattcaccttaggaatcaggctgccccttccctgggacaagtcgaaccacgccccgcggagccatcggccagggttggaggacgcgcatcgccgaccgcgccgtgtccgctccccccacctgagatcatcagcccagagaaccccggagcggccagcggatacccggcggaggcggagggggg

SEQ ID NO: 42529 - DNA, 743 bp, Homo Sapiens
gggtttaaaaaaaaaaaaaaaaattccttgtagtttcttagaggaaaaaaagaaaaaccccaacttttagcactgatactacatattgctctgttaaagaattttctctgccaaaaaaaaagaaaaaacaaaaaaacgcttaaagctggagtttgacattctgctttcagatgctgtctttttattagtgagtgatgatggtttgctaataatcaataggtaataattttttgtaatcccatcaagtggctccatatgtttctgctctctcgtgactgtgttaatgtttaactgttgtaccttaaagccgaaatcagtaactatgcatactgtaaccaaggtattgggcttacagagttgtttgttgtataaagaaaattttaaatgttgttgcaaactaacgagttacaccattttaaactttctttcctcccccctttttttgcccacaaatggtattataatgcttgcttagtcaaagaagagagactaaacaagggtaaaaattttaacagtacagaatttgccatcatatcattgccttgattctaactgtttgtgtcctaagatgcaaaagaagtcagtggcttttaactgtttacaaatagaatgtgattgtaaaatgtacagtttggttgtgtttgaattatgaaattttcttcagatataataaaacatgacttttttggctgctccacatttattgtctccctttttgggaatttattttgtaggcctctttt

SEQ ID NO: 42530 - DNA, 908 bp, Homo Sapiens
  misc_feature (680)..(680): n is a, c, g, or t
  misc_feature (682)..(682): n is a, c, g, or t
ctggccttgggatgcccaagggatttctggctcaggctgtaaaagtagctgagccatcctgcccattcctggaggtcctacaggtgaaactgcaggagctcagcatagacccagctctctgggggatggtcacctggtgatttcaatgatggcatccaggaattagctgagccaacagaccatgtggacagctttggccagagctcccgtgtggcatctgggagccacagtgacccagccacctggctcaggctagttccaaattccaaaagattggcttgtaaaccttcgtctccctctcttttacccagagacagcacatacgtgtgcacacgcatgcacacacacattcagtattttaaaagaatgttttcttggtgccattttcattttattttattttttaattcttggagggggaaataagggaataaggccaaggaagatgtatagctttagctttagcctggcaacctggagaatccacataccttgtgtattgaaccccaggaaaaggaagaggtcgaaccaaccctgcggaaggagcatggtttcaggagtttattttaagactgctgggaaggaaacaggccccattttgtatatagttgcaacttaaactttttggcttgcaaaatatttttgtaataaagatttctgggtaataatggggaaaaccncngcaccacccaaagccacacaaacaaacaaaaaaaaggggcgggccgctctcagagtatcccctcggagggggccccaaggtttaacgcgtaaccccagcttttctttggaacaaaaggggggctcccctaataggggaggcgcggaatttattaagcctaggggccctgtgggcccgcccggttttttaaaaacacccccggtgggaccggggggaaaacaaccga

SEQ ID NO: 42531 - DNA, 678 bp, Homo Sapiens
agaccctctgcctcatggggtaggagtggctgcctcctgtgttctctggatttcttctcccaacaactacaaccctggacttgcctccccaggcctcttgcctgtaaatagaagcccgcaaactgtacagatttacagaggcatcgagactgggccctgggagttgccatctgagagccgatggccccagcatcccccaggtgcctgcctggcaccacagtgaccctggcctcagcgtggcaaatgcatgtaaatatttttcgtaggcagcgtggctccagagagccccctgaagacagtgtccctccctcctgtgagtcctttctcctgtacagaacctgcctggggtgggtgggggtctgccattccctcccccaggccttccctgccccttctctcccctgtaacctgtttattaaccatacctgtcctgagttcatggccaaaaccttaaataagaaaaacaaaagaaaaagacagtggaaaaaagagaccaaggcgcctgccccactgcgggtactctcctgttccagccttgtgaaggaactggttttgtttttgtttttgtttttgtttttttttgtttgtttgtttgttttttaacacttcctgtgctgtgcccatttataagaggaaataaaattaagctgaaatgaaaaaaaaaaaaaaaaaacgcgg

SEQ ID NO: 42532 - DNA, 793 bp, Homo Sapiens
cgccgggtgagtgagagagttggttggtgttgggccggaggaaagcgggaagactcatcggagcgtgtggatttgagccgccgcattttttaaccctagatctcgaaatgcatcgtgattcctgtccattggactgtaaggtttatgtaggcaatcttggaaacaatggcaacaagacggaattggaacgggcttttggctactatggaccactccgaagtgtgtgggttgctagaaacccacccggctttgcttttgttgaatttgaagatccccgagatgcagctgatgcagtccgagagctagatggaagaacactatgtggctgccgtgtaagagtggaactgtcgaatggtgaaaaaagaagtagaaatcgtggcccacctccctcttggggtcgtcgccctcgagatgattatcgtaggaggagtcctccacctcgtcgcagatctccaagaaggagaagcttctctcgcagccggagcaggtccctttctagagataggagaagagagagatcgctgtctcgggagagaaatcacaagccgtcccgatccttctctaggtctcgtagtcgatctaggtcaaatgaaaggaaatagaagacagtttgcaagagaagtggtgtacaggaaattacttcatttgacaggagtatgtacagaaaattcaagttttgtttgagacttcataagcttggtgcatttttaagatgttttagctgttcaaatctgtttgtctcttgaaacagtgacacaaaggtgtaattctctatggtttgaaatggatcata

SEQ ID NO: 42533 - DNA, 579 bp, Homo Sapiens
atctcaagaggtcatttgttccccatagcagcatatctcatttttaaattgaagcgaattaaataggattttactactcaacattcattatactgttaatctttgctgaaatatatgctaacaaatgttaagcaagggaaactgaagacttagtcatgtggattgttagcagtgatctgcattctgtaaaagaggtactttcccatgatgtaggcatgaagtggtgccagtaagcgtagagcggaaatgttgactttagttaacattgggtttagcatttccagtgcagcattatcagtgggcctttaaaaatacttcgtaagtacattagctttcactttgttgttaaattatagcagactcattatagagaacaagtttgccttgattttgtttaaaatgacttctgctaagcacccagaagataaaattgacatatttttataataagcatactttttttgtacattgtgttcattcttgaataaaatgagttctgtgttggcttgtagatactaaaaagaaagtattgattttgattcaataaatgttttctttcaaaaaaaaaaaaaaaaaaaa

SEQ ID NO: 42534 - DNA, 699 bp, Homo Sapiens
  misc_feature (645)..(692): n is a, c, g, or t
ttccaagaaggatctgagtacccctgctcagtatgcgctgatggagaaagacgccctccaggtggcccaggagatgaaggctgagtactgggcagtctcatctctcactggtgagaatgtccgagaattcttcttccgtgtggcagcactgacctttgaggccaatgtgctggctgagctggagaaatcgggggctcgacgcattggggatgttgtccgcatcaacagtgatgacagcaacctctacctaactgccagcaagaagaagcccacatgttgcccatgagggctgaggagactgttcagagactgcccagccctagggcactgtgccaccctcattcctccagagcttgacccctggacatttgcactgactttatccagaccaaagagctgcctcttggtggcagtattcccacagaggggtagctgggatcatgctagtcacttcctgcccccaggcaccgtgccaaagactggatgccccctactcctcaggggactgtccagggcgcccagtggtagtgagggagagtgtctctgttcttttgctcagcctgctgggccctttgtgtttgaggatgcttaatgattccagcctctcactgtgccttatgcattaaaatttctttgttacgagcnnnnnnnnnnnnnnnnnnnnnnnnnnnnnnnnnnnnnnnnnnnnnnnnaaaaaag

SEQ ID NO: 42535 - DNA, 970 bp, Homo Sapiens
  misc_feature (916)..(916): n is a, c, g, or t
caactcccgtcgggtagtgtgccttgttcgcgatatcaacgcgactccgcctcccaggttcaagtgattgtcctgcctcaccctcctgagtagctgggattacaggtgggcgccaccactcccatctaatttttatatttattagagagatggggttttacccttgattggccaggctggtcttgaactcctgacctctagtgatccacctgcctcagcctcccaaagtgccggtattaaaaggcatgagccaccaggcctggtcctaaaattttcttgattaattttgatctcatttgtattttgtaaatgacttatcatgttgaggcttttgccattgagatgtttgtctttttcttactaatttgtaagaattcttgatgggttatctgtataggtcatgtattttgctaataatttccctagtttgtagtttgccacttagtgctatttttgacataaatgatgtattttaatgtagttgcatgttgacctagtccattatggttatttgtatttggtccacgtggattggaaaacctttgctttgattatacttttctttgggcactttaaaaaaaaaaaaacacacaaaaaacaaacacaccaaaaaaaaaaaaaaaaaaaaaaaaaaaaacacaaacaaaaaaaaaaaaaaaaaaaaaaacaaacaccactacaacatatccttcgggcgacagttcacacaagagccagctacaacaaatggacacgaacaagagcccgcgcacgaggtgaagaggacatcaggataactacctaccgaagaacacgcgctgagacgaaggagaagacaacagaacataaccagcggcgcgcaacactgaagaagtcacacacaataagtatgagacaacactaacaagaggcagacaggaaaataaattcagtagtnactaaaccagcgcacgcagcggaaccagacaccaagccagatgacgaaacaaag

SEQ ID NO: 42536 - DNA, 555 bp, Homo Sapiens
cagttgatgaaaaactaatgccaagcgccccagtgaacactacaacatacgtagctgacacagaatcagagcaagcagatacatgggatttgagtgaaaggccaaaagaaatcaaagtctccaaaatggaacaaaaattcagaatgctttcacaagatgcacccactgtaaaggagtcctgcaaaacaagctctaataataatagtatggtatcaaatactttggctaagatgagaatcccaaactatcagctttcaccaactaaattgccaagtataaataaaagtaaagatagggcttctcagcagcagcagaccaactccatcagaaactactttcagccgtctaccaaaaaaagggaaagggatgaagaaaatcaagaaatgtcttcatgcaaatcagcaagaatagaaacgtcttgttctcttttagaacaaacacaacctgctacaccctcattgtggaaaaataaggagcagcatctatctgagaatgagcctgtggacacaaactcagacaataacttatttacagatacagatttaaaatctattg

SEQ ID NO: 42537 - DNA, 582 bp, Homo Sapiens
tatagaaacaaatgacactttcagtgatgaagcagtaccagaaagtagcaaaatatctcaagaaaatgaaattgggaagaaacgtgaactcaaggaagactcactatggtcagctaaagaaatatctaacaatgacaaacttcaggatgatagtgagatgcttccaaaaaagctgttattgactgaatttagatcactggtgattaaaaactctacttccagaaatccatctggcataaatgatgattatggtcaactaaaaaatttcaagaaattcaaaaaggtcacatatcctggagcaggaaaacttccacacatcattggaggatcagatctaatagctcatcatgctcgaaagaatacagaactagaagagtggctaaggcaggaaatggaggtacaaaatcaacatgcaaaagaagagtctcttgctgatgatctttttagatacaatccttatttaaaaaggagaagataactgaggattttaaaaagaagccatggaaaaacttcctagtaagcatctacttcaggccaacaaggttatatgaatatatagtgtatagaagcgatttaagttac

SEQ ID NO: 42538 - DNA, 695 bp, Homo Sapiens
cccacgcgtccgagctggtggaacatatggtctccattttacagttaaggaatataatggacagattaatattgttctctgtcatgcccacaatccctttctaaggaagactgccctactatagcagtttttatatttgtcaatttatgaatataatgaatgagagttctggtacctcctgtctttacaaatattggtgttgtcagtatttttcctttttaaccattccaatcggtgtgtagtgatgtttcattttggttttaatttgtatatccctgatagctataattgggtcatagaaattctttatacattctagatgcaagtctcttgtcggatatacgtattgagatattacacctagtctgtggcttgactgttttctttatgtcttttgatgaatagaagttttaaattttgacaaggtcaaatttatttttttcttttgtttgatattttttctctccaatttaaccccaagatttcagatattctgctctattatataaactttatatttttatatttgtgatctaccttgaattgatatgtatgttgtgaattatggatcagggttctttttttcccccatacaagtatccagtcattgtaacactgtttattgaaagaattatcctttcctcattaaattaccttgccaattagtaaaaaatccattaaccataaaaaaaaaa

SEQ ID NO: 42539 - DNA, 890 bp, Homo Sapiens
  misc_feature (661)..(661): n is a, c, g, or t
ccacgcgtccgattgtcttgaggattaatctgatttataagtaatactgatagacatattttcgtacatctgagcagaaataaatgcatgtttctagcatatgtaatataaaaactccagaggataagtttacacttaacaagatgttgttttctatttttgaatttcttattatttccccctttttggtagtggagttgagagggggagcatactatttgtataaagaactgtcaccccagagtgacatttattttccaagatgaccctgaactcatgctgttggtttcatatggtgtttgtgtgctttgcctagattcaaggcctgaggatttgaggaaaatcgggattttttttttcctatttggttttcatgtaaaagttctaaatgtcacttattttgctaaataagaccctttcacaggatagtgtgcgcaatacctgtccgtgtttccaagcagagttcaagttcatgtcttcacaagtagatgagagtcacttccagtcgggggaagcccgcctgagcagtgttttgagagtgcgtacattggaggactgccccacgtccgtttgcactctgccttgcaaaacttactgtggagacgtgccccagactggtctcagaccagagtttgtggcacaggaaaacctggccccctanaaagaagttttggaattggaagcctgataatttcgggaggctgaggcacgagaacggcgtgaacccgggaggcggagcttgcagtgagccgagatcgcaccactgcactccagcctgggtgacagagcaagactcccgtctccaaaaaaaaaaaaaaaaaaaaagggcgggcggctccaaaggaatccctccagggggcccaagctttacccgtaacccagcttttctc

SEQ ID NO: 42540 - DNA, 633 bp, Homo Sapiens
cgcgtccgggcagattaccattagaagcaaaattaaaagtacaagctgggcaaactgacagaatactagataggagagactaattccaaccttctaaatttggctagtaaagtgcaataaaggcattgataagttctgttagctcaccatagcacttgtaaatcaggaattaataattgaatcagatttaagggctctgtcctgttatacatatttaaggcagaaaaaaagttacatgtcgattaggtacttatcaagaatggtcaagctgagattttggttaatagagtaagcttacatatctagagaaacaacatagtggaaaaccgaaaaaaaaaaacagaaaaatctaccggtaatttcccaatagctttgaatattcacagcagagctttattacttgagagaaagactggaagacctgaaagccacttctgctttctaaccccagttccttaaatattgaaatcttgtacattttgtgaaattccagtatgttttgcttaaggtgttaataaaattagtttgcatcatgtagtcattgagtgagggggagatataagccaaggattttaaattgacccttagctatagagaatttgctataagctagtcttgtttgtaaaaaaaaaa

SEQ ID NO: 42541 - DNA, 757 bp, Homo Sapiens
cgcgtccggatttgtttcataaacccagcttatttcctccaaaaagcaaaatggtcctgtaatttttaaagtaaaataaacgtgccattttgtctgcaatctataatttcaggaagttattgaaagttctgactcagggctttttaacagttcaagcaattgtcagttatattttggaaactccatctgtgtaattctccagtgccttgaaagaattattaacttggcaacactattaaaactttataaaagatggtctttagtgcacgtgtatcattatatacacgttttaaagtcatattgcttagcttgttaataatgattctgcatgtgtgctgggtttgggtaattctttaaaggaagttttctagatttgcacttgatgtttgttttttaaaaactgattatttatggccgtgacactgttaccagaaaagtaattctaattaagttattatgcaaagtcatctataagtagcatctgggaagaggagatcgaggccacagtttgctattttagtatgaaaggaggatctgtttgggaaacatagattgtcttcccctcaaatgaggggaaaaaaaaagaccctttgttcaaatggattctgttgtaaaaaattatttttaaaggaaatcacaaattgtatgtcattcttaatgctagtcttatagaataaatccataaaattggttttatggtcagaatggttatgtcattctaaatgcagcaaattcaatgatagcagttcaattgact

SEQ ID NO: 42542 - DNA, 748 bp, Homo Sapiens
gtctacgcttatgagacaggctggcttattagctgtaatggcccagatgggttgttacgtccctgctgaagtgtgcaggctcacaccaattgatagagtgtttactagacttggtgcctcagacagaataatgtcaggtgaaagtacattttttgttgaattaagtgaaactgccagcatactcatgcatgcaacagcacattctctggtgcttgtggatgaattaggaagaggtactgcaacatttgatgggacggcaatagcaaatgcagttgttaaagaacttgctgagactataaaatgtcgtacattattttcaactcactaccattcattagtagaagattattctcaaaatgttgctgtgcgcctaggacatatggcatgcatggtagaaaatgaatgtgaagaccccagccaggagactattacgttcctctataaattcattaagggagcttgtcctaaaagctatggctttaatgcagcaaggcttgctaatctcccagaggaagttattcaaaagggacatagaaaagcaagagaatttgagaagatgaatcagtcactacgattatttcgggaagtttgcctggctagtgaaaggtcaactgtagatgctgaagctgtccataaattgctgactttgattaaggaattatagactgactacattggaagctttgagttgacttctgacaaaggtggtaaattcagacaacattatgatctaataaactttattttt

SEQ ID NO: 42543 - DNA, 683 bp, Homo Sapiens
cgtatgtgcatctttgctattgtaaataactttgaccttttttgttcctgttcctgaagtgctggaggcagttatggaaggagctgcttagggaagaggggtttcacttgtatctccttagttaacaacccagttccaggatcgagcctaaagcgggagccaggcctgagtgttcctgtccctgtgagtgggaaggtcttctggctccccatcccacctggctccagagcctgccctccacagcttgctgccaagctactccctccctccctggacttctcatcttcacaagatggggatcatgggggtttcttaccccacctatgtccccctcttccccaccctgtccctgtagaaaaccagtgaagcaggtacggagctgaggactgggccccaggaggtggggacaggggtctgaatgccgagtccctgaattcacccaggaccatccaaggggccaccgcagcattggccccatcaccacgtcctcacccaactctccctgatgaatagaatatacacactgtgctaggtgtatatatacatatatatatataaatatatatataatatataaaatatagatatggaaatgactgttctgctgttaagataatgtatactcttttattttcttcctttcatggttaagattttttttttaagaaaagttaaatatcctt

SEQ ID NO: 42544 - DNA, 759 bp, Homo Sapiens
cgggagcagtttccacacagaagcagctagatggacagatggctccctctcacctcccgctaaggagcccctagcttctgactccaggaacagccatgaactggggccctgccctgaggatggctctgacgcccccctggaagacagcacagcagacgcagccgcgtcaccaggaccataaccgtacaaaccaccaaatcctctgcgtccccactcctccttcagggactggcctgagaccggggcacagggtaggggggatcccaacactcctccctgtggaggaggcagttagggaaactaggatccagccaaggcccggggggagacccgcatgttgcttggtctgctcaagtcggagtcaggtttcagtgtcttttccctcccttagcccaaccctccaaggcctcatgtctcctaagcatgctgactgcatccgaaaggcccccactcaccatggtctgccctcaccccacatatgtgtgtacacgcgcacgcctgtatgtgcgctgccctcagacatgcaagtgaaaggaggaggcttctgtgtaaatgcactttcttcctcccctctttctccataagaccccaggcagaggtgggtgcctcccctcccctctttgtcactttggtttcctataaatatgtatgtatcgtatgtgcatctttgctattgtaaataactttgaccttttttgttcctgttcctgaagtgctggaggcagttatggaaggagctgcttagggaagaggggtttc

SEQ ID NO: 42545 - DNA, 653 bp, Homo Sapiens
  misc_feature (590)..(590): n is a, c, g, or t
tagaggcatcacctgactgcacaggcaatgaaaaaccatgtgggtgatttccagcagacctgtgctattggccaggaggcctgagaaagcaagcacgcactctcagtcaacatgacagattctggaggataaccagcaggagcagagataacttcaggaagtccatttttgcccctgcttttgctttggattatacctcaccagctgcacaaaatgcattttttcgtatcaaaaagtcaccactaaccctcccccagaagctcacaaaggaaaacggagagagcgagcgagagagatttccttggaaatttctcccaagggcgaaagtcattggaatttttaaatcataggggaaaagcagtcctgttctaaatcctcttattcttttggtttgtcacaaagaaggaactaagaagcaggacagaggcaacgtggagaggctgaaaacagtgcagagacgtttgacaatgagtcagtagcacaaaagagatgacatttacctagcactataaaccctggttgcctctgaagaaactgccttcattggatatatgtgactatttacatgtaatcaacatgggaacttttangggaacctaataagaaatcccaattttcaggagtggtggtgtcaatcgctctgtggccgtgtg

SEQ ID NO: 42546 - DNA, 585 bp, Homo Sapiens
caagaaaaacatatttattttgacaaaggggaacactgactttctgaaggattcagaaagaaccttagtgaaaggttctcagtctctgagagtggaccctaattaacataaagaccattcatcagcgaataactactgagcaactctagtgtgccagcacaggccagacatactagtgagccaggcacatctggccttgggaaactcatcctacaggggaaggccagtttttttcccttcaattcctcaagtctgggtggtgacaaggtaggggctaggtactggactaccacaggtttttaggaactaaggtgtttctcataaacacaaaatgttgggtgaaactgggaacaactactcagaagctcatttatttgcttaaatggaaagtgtgggagccactaccctctcttttgatctgccaaggatttcctctcagagctgttgcacagacagagattgtacttggtaagataccaaacaagacagatatggatctaaatttctaatgtgttctatgggtttcaattctgaaaaaagaaaatgaataaagattttaataaatattgatatctgaaaaaaaaa

SEQ ID NO: 42547 - DNA, 759 bp, Homo Sapiens
  misc_feature (2)..(2): n is a, c, g, or t
  misc_feature (15)..(15): n is a, c, g, or t
tnaatttgaaaattntgtacactcagttatctaataaggggccaccgacgctgtttttaaaactattttgaagttataaaaaggtagaacatctgactgatgatgttcacataaagagacagacagactatcatgttgcagacatgaaaacagcatgtcaggtttttcctttccttccatgccatgggctacccatctcttcccactagatcacctggtgaggagggagcacctggctgactcatgcagagtttggccaatcagagaattgtgtggtctccagctctactttccttaaacaaatcctttctgttttctgagctgcagtgctaaaacagatccctaaaaggtaatagcatcttccagactagtttaattatttcctttataagaatatgacataaatttttattatagaaataatgtcattataattttagtgctagtacttgtgggttttctgtatttgtatcaccttgaaatttgttccatgaatagaaaatacttctttattcatgttttcaatcacttagaattattttaaatttattttgggtttgtgagagataataagattaagaacttcatcatttcagtgactttcctccaactctctgaatctgctacctcttattatatgtcccttagcagtacttttccagttaggttcgttaccctcctcattagctaaacctctttatcttgtgcctcaaaagagcttttacttttcttagaaacatttataaaaaaaaaaaaaaa

SEQ ID NO: 42548 - DNA, 946 bp, Homo Sapiens
gtcgccagtggctcccatggccccatgcagccccaggggcttcccccctgcccatggagtagagcccgagatcctggccactatgccagttctgacctcgcatccccctaccccgagcccatgcagtctgggaacatgccgccttctctccagcctctgtgcctttgttccaggtggtctcaccctcctgtccctggctgggctaggtggtcctgtccaggctcctgcagcgcccccctcactttgacactggactaggatgcagcctcccttctgtgtccccttgagggtaccctgggtcccctcatcaggggcagaggcatgaaagagtcggggctggatggccaggggcttctgggcccgacgcctagtgcagcccctggggtcgtggtttgacatttgtctgcctggtgcaaacaaggaatccttgcctttaaggtgacaggccctccacaggcttccagacttgaaggaaaaggtttaagaaagaaaacaaaaccaacagttagtggagtcaaagcccagacactgtaaatagaaccccctccaccaccccccgccgcccagcatcctacctggactgcggtgctacgagggcctgcgggcctttgctgtgtgccaccctccctgtaagtctatttaaaaacatcgacgatacattgaaatgtggtgaacgttttgaaaagctacagcttccaccagccaaaagcaactggtgtttttggcaagacgggtcctgatgtaacaagctttgattggaaattcccctgcgcccacttgataccgtttattcccgaaaaccccaaagggaaaggggctgggcccccatcccctcatggtggggctggggggggaacctccacctggtggtttgtgtggggcgcaattgtatatctaaaacgtggtgccccccccacaattccgacacaaataaataaacaaaaat

SEQ ID NO: 42549 - DNA, 648 bp, Homo Sapiens
aaatagggataataatatctacctcataggattattgtgagaattaaattaacttcactatagtagaaaatatcaactaccatccttttctctacttcccttgcccctcattaaagactaatacaagttagcatttcagatgtgtagatcattctttattccagttaaaagaacaaactttatctcatcagttctgaaactttaagatgcagtagcatcacctaaagtgcttttaaaatgcagattctcaggcctcaaccgtacaccacccccccacacacgtactaaatcaagaatatgtgcagaaggtactgggaatctacttgttaatatgtgctccaaatgattctgatgtaggtaattagccagccacactttgagaaccactgccttatctattctttacaaaaatgtacattgccaggtctttctttcctgtggatgctaactataggatatttaggttcctctgttctttgtctcccatagtggccccctttgcaaactccaaatacattatatttatttattcttgtgtcttttttcccccactagactgtgagctccttgagggccaggacttatctctgttcgcagtgccaaggacatggcctggaccatagaagatactcagttttttgttgaata

SEQ ID NO: 42550 - DNA, 755 bp, Homo Sapiens
tgtgattccaccgttagatgagcccttggggcaggcagtttgggatgtgctcttgggggaaagttggctgtttccttgcgctctgctcctacccgaaggtttttaagtccctctgaattgctcatctgagattagtagagtagcaggcctgaaggatgatggttttgtcctctttggttctcacctgcttgagaagtaaaacagtaactttgttcttctgggcccttaagcttttttggttaagtcttccttttcagaagtagatgtcattatatgccaaaagtctagctctttgctttaccatacagggacctgtcccaaagaaaaaggctctttttttagccagcatatttccccttctacccttttactttgttgttctgattttaggactctggctggccatgtgcttgtggttgcctctcctgcatttgccactggatttgcactgcatcgtttggagatacaaagcgagcagttcttggtcagaaccctcctctgcttttcattgtgtttgataatggttactgggtccttctctcaagggtagcaaggccaagctgatggctgcttgtttaggaggccatcagttccttcctgtggagaagggtctgaaatggaagtcagtggtagaaggggctggtctgctgggcagggcttacatccactgagttctaagattcctttcctgatctgcacctacgcctggtctgtatggtggaatttgtcagctggaactcagaaacaacaacttg

SEQ ID NO: 42551 - DNA, 632 bp, Homo Sapiens
gttatattttgcagttcccacattaaagaagacctgagaatgtatccccaaaagcgtgagcttaaaatacaagactgccatattaaattttttgttgacattagtctcagtgaagactatgaaaatgctggctatagatgtcttttcccatttatctaaatatggactgctcaggaaacgagactttccattacaagtatttttaattaattgggccagcttttcaaacaaagatgccacattcaaaatagggtatattttcctatattacggtttgcccctttataaatccaagtagataggaagaaagaagacaaactttgcatctcagtatgaattattcaatttatttgaatgatttttctttacaaaacaaactcattcattagtcatgtttatctgcttaggagtttagggaacaatttggcaattttgtggttttcgagattatcgttttcttaaagtgccagtattttaaaatagcgttcttgtaattttacacgcttttgtgatggagtgctgttttgttatataatttagacttggattctttccatttgcatttgtttatgtaatttcaggaggaatactgaacatctgagtcctggatgatactaataaactaataattg

SEQ ID NO: 42552 - DNA, 478 bp, Homo Sapiens
atcaaaggaacttttctttgtttaaatttgctgatgcaggaattaagtttaaacacaactctatagaaagaaaggagattattacccagaattcacatgtagtgattattaaggacaatttttttttttaactaaaaaagttggcggcaggggtggggggtggcaatcatttttcttcctatacatacaaaggatattgtcaaaaatggcgttcttctcttgtggcctgttattctgattgctgctgtatacagttttgtcactctttagtttttagttaagcatactgatagactttcctctaaaagccattcactccagattttacctggggaatattctacatactgcttactttctctataaaactcatcaataaatcatgaaaggcactgagttttgtaaatcaggaccctaaatgtttaattgtaaataagtttcagataattattatagctttgcgttgaagtttgttgtt

SEQ ID NO: 42553 - DNA, 611 bp, Homo Sapiens
  misc_feature (212)..(212): n is a, c, g, or t
  misc_feature (515)..(515): n is a, c, g, or t
aacgaggttaacaaggatatttatgtaataagaaactttgccttaggcaggtgttggccagaaaagtccagattcctctgggatcccaccctggcctctcctggaactctgaacctgctgtggaaggaattggccatgaccttcacctctggagagtagggtctatggcgagggaaaagggtgttcaccatgataacctagtgcctccatanaggggtttggaaaaattccagtccgatttctttgtgtgtcagctgacttccttagctgattgttcccacttgcacctctccacctttggcactagaactcctgagacaccacttctcatgcttctccctccctaccagcggtcaaggctttggagccactcttttgtaactccagattatttaaagagaaaagtacaagacagaaatcttctagcactttgtaaacacagtgaataacctcttggagtatttttggctttatataaaacaaggtttttaattgtaaagtataagtgccattanaaaatgcacagggcatatctttgttaaagtagatttttcaatgttttacagaattacattttcaaaaaaaggtttttataatgaagttgtttatta

SEQ ID NO: 42554 - DNA, 980 bp, Homo Sapiens
tctggccttgctctcttggcagggccccagcccctctgaccactctgcagctcaccatgcagctgatgccaaagttgtggtgtccagtgtgcagcagccctgggagccactgccaccttcagaggggttccttgctgagacccacattgcttcacctggccccaccatggctgcttgcctggcccaacctagcgttctgtgccatgctagagcttgagctgttgctcttcttcaggggaggaaatagggtggagagcgggaagggtcttgctcctaagtgttgctgctgtggcttttttgccttctccaaagacgcactgccaggtcccaagcttcagactgctgtgcttagtaagcaagtgagaagcctggggtttggagcccacctactctctggcagcatcagcatcctactcctggcaacatcaggccaacgtccaccccagcctcacattgccagatgttggcagaagggctaatattgaccgtcttgactggctggagccttcaaagccactgggatgtcctccaggcacctgggtcccatgaccagctccccgtctccataggggtaggcatttcactggtttatgaagctcgagtttcattaaatatgttaagaatcaaagctgtctttgttcaggctgctataacaaaaatataatagccctggggtggtttaaaaaaaaaaaaaaaaaaaaaacttcaaggcatccttatgtcggggggcgggaaaaaagaaggaattgggaattggcacaatgggtccattagcttggtttccccggaacccaaccctttccttgggaacaaaagtgggggaaaaaatctgcgccgggttctccccctaatagaggggaggtcgctaattaaatttttcccaaataaacgcccagggttaaaacccccggccctttaattgggaaaattcgggcgttggccaagttaccccccggggggaaaatttttataaccccccc

SEQ ID NO: 42555 - DNA, 637 bp, Homo Sapiens
gtccggtgagactagctacagtgatgctaaccagatgtacgatggagaacaaggaaggattggggaatgaagttttgaaaatgtgtcgctctttgtataacaccaagcagatgctgcctgcagagggtgtgaaggagctgtgtctgctgctgcttaaccagtccctcctgcttccatctctgaaacttctcctcgagagccgagatgagcatctgcacgagatggcactggagcaaatcacggcagtcactacggtgaatgattccaattgtgaccaagaacttctttccctgctcctggatgccaagctgctggtgaagtgtgtctccactcccttctatccacgtattgttgaccacctcttggctagcctccagcaagggcgctgggatgcagaggagctgggcagacacctgcgggaggccggccatgaagccgaagccgggtctctccttctggccgtgagggggactcaccaggccttcagaaccttcagtacagccctccgcgcagcacagcactgggtgtgagggccacctgtggccctgctccttagcagaaaaagcatctggagttgaatgctgttcccagaagcaacatgtgtatctgccgattgtttctccatggttccaacaaa

SEQ ID NO: 42556 - DNA, 582 bp, Homo Sapiens
ctgatggagaacaggatgaagaagagaaggatgatggtgaagctaaagaaatttctacacctacccattggtctaaacttgatccaaagacaatgaaggtaaatgacctccgaaaagaattagaaagtcgagctcttagttccaaaggattaaaatcccagttaatagcccgattgacaaaacagcttaaagtagaggaacaaaaagaagaacagaaggagttagagaaatctgaaaaagaagaggatgaggatgatgataggaaatctgaagacgataaagaggaagaagaaaggaaacgtcaagaggaaatagaacgccagcgtcgagaaagaagatatattttgcctgatgaaccggccatcattgtacatccaaattgggctgcaaaaagtggcaagtttgattgtagcatcatgtctttgagtgtcctattggactacagattagaggataataaagaacattcatttgaggtttcattgtttgcggaacttttcaacgaaatgcttcaaagagattttggtgtccgtatatacaaatcattactgtctcttcctgagaaagaggacaaaaaagaaa

SEQ ID NO: 42557 - DNA, 877 bp, Homo Sapiens
gatcaaaaatccaaggagaatggtccagtgtatgataaaatccatgtagtgatgaggaatggtgttaaataatgtaatatataaaaatcatgatataagaatgtttgaaggtgatgcatgtttgattttagtagtataaatgtattttagttcaaatgatgtataaagttttatgaatgtgagtttctgcttttgaaaattgcttgtaattgcctagccttcaaattattaaacactccttgagtgaaagtaattttgcattgcaaagtgttttaggatgaacttggttatagttttaactccaataaagttcatcagtttaattgactgtagtatttaattacgcaaatttcttttattgaaaatgcctagaaattttcaatttatagaattcattgaggtttctaaaattttttagttcatctgtggaaaatttcagtcaagaatcataaaatagcatgatgcttaatttttgcaagttttttgaaacttttggtggtatcttgactcatcaccaaaaaatcccctcttgatcagtctctaaaagcattcatttaaaattcagttcaggccgggcacggtgggtcacaccgtgtaatcccaacactttgggaggcccgaggcaggtggatcacctgaggttaggagttcgagaaccagctgggcaaacatggtgaaacccggtctctactaaaaatttaaacattacgctggccatggtggttggggtgcctggtaatccccagctaacttgggaaggtgaagcaggagaatcgttgaacccaggaagcgaaggttgcagtcactcaggatcattgcagtaaaatccaggctgggcaacagagtggaatccacttcgaaaaaaaaagtaaaaaac

SEQ ID NO: 42558 - DNA, 608 bp, Homo Sapiens
gttaccagcctgaccacatggagaaattctgtccctactgaaaatacaaaattagccggatgtggtggtgcatgcctgtaatcccagctacttgggaggctgaggcaagagaattgcttgaacccagggaggcagaggttgcagtgagccgagatcacaccattgcactccaccttgggcaacaaaagcaaaactctgtctcaaaaaaaaaaaaaaaaaagtgccagcgtatgaggtaattagattggttctctccagaggtaacctgccaagaagagatgctatagatgttactcctatactgtaaaacattgtgaaatcagattactttaaaatgatgtattacaaagttatgcaaaaaagcagttgtgactatggaagcccaaggcttatatcccagctctgtcttacactaaatatgggtacagtgtttccactctgtccataaaatgggagctaatattctccaacctgtgtgcctgacatgatggttaaagggattaaacaaaacaatagtttgtaatttattctgtcagagcaaactgctggtaaataaaagggactaagttgacgaaaaataaattttaaaaaacctaaaaaaaaaaaaa

SEQ ID NO: 42559 - DNA, 669 bp, Homo Sapiens
  misc_feature (567)..(567): n is a, c, g, or t
tttttttttttttttttagtgtgtggagattgtaattgccatctaggcacacaaacatttaaaaggatttggactgcatttaattgtaccattcagaatggactgtttgtacgaagcatgtataatgcagttatcttctttctttcgtcgcagccagtcttttttgcttctcctacaaaacgtaacttgcaatttgccagtttattattgttggatacaaagttcttcattgataagagtcctataaataagataaatacgaagataaagctttattctttagtgttaaaatacagtatatctaataactagcctcattagtagagcagtatattaaaacaatgttttatgtaaaaagtgtttatcttcagcaccaaatacatgataaatgtatcaatcactatttataaacagagctttcaaacactcctcagaatattcttctaagtattttgatgaagtaactttgtaattatttgaacattgttttaatcattaggaaacactgattaactgcaagtcttcatgattctgtcatattaagaaacacctgtaggtttgcttcanataaaggcatatataccaaggacttacagacaaaattaagaatgtcaatttaagttaataaaaatctcccaatatgaaaaaaaaaaaaaaaaacctcgtgcc

SEQ ID NO: 42560 - DNA, 806 bp, Homo Sapiens
cgggatgtttcccgtgttagccaggatggtctcgatctcctgaccttgtgatccgcccgcctcggcctcccaaagtgctgggattacaggcatgagccaccgcgcccagcctacattcacttctaaagtctatgtaatggtggtcattttttcccttttagaatacattaaatggttgatttggggaggaaaacttattctgaatattaacggtggtgaaaaggggacagtttttaccctaaagtgcaaaagtgaaacatacaaaataagactaatttttaagagtaactcagtaatttcaaaatacagatttgaatagcagcattagtggtttgagtgtctagcaaaggaaaaattgatgaataaaatgaaggtctggtgtatatgttttaaaatactctcatatagtcacactttaaattaagccttatattaggcccctctattttcaggatataattcttaactatcattatttacctgattttaatcatcagattcgaaattctgtgccatggcatatatgttcaaattcaaaccatttttaaaatgtgaagatggacttcatgcaagttggcagtggttctggtactaaaaattgtggttgttttttctgtttacgtaacctgcttagtattgacactctctaccaagagggtcttcctaagaagagtgctgtcattatttcctcttatcaacaacttgtgacatgagattttttaagggctttatgtgaactatgatattgtaatttttctaagcatattcaaaagggtgacaaaattacgtttatgtactaaatctaa

SEQ ID NO: 42561 - DNA, 598 bp, Homo Sapiens
tgtctgattatacgacttttaagcaaagttgggtgtaattaggtgaaaacagcccaggtcctcccgggagcacagaggggctaggggctggtccttctcgtttgctctagtcttgctttgctgtctggtgtagctcctctgctgctcccatctgcactaattgacccaaaacgtgggtatttcctgctacacaaaagccaaaaggtttcatgtagattttagttcactaaagggtgcccacaaaatagagattaattttaacttaaattttaagcttgaagattaggtactatctgtgaagttacactttctttttttttttaaaggtagagatgtgtgtgtgtgtaggtattaaagatgtgttgttggtttccaaaaaggaacactggaaaataaattttgaatttttatgttctcagaatcaggttgacaagcccttgctgacatggctttgctttgtgtaaatacagtggattctaatctttccgggtgtgatgaattgcgaatcatcttcaatccttgagcactcagtctagtgaagatgttgtcattatgtcaatacataactagttaaattaactatggatgttaccttttt

SEQ ID NO: 42562 - DNA, 629 bp, Homo Sapiens
gagaagggtaacagggaggatgcaaagcagacatctaccctggtcaccccaggatcaggatatctgtccttgtttcatgttgaattcaaaaattggatctcacttaggctttgaaggtgacagccatctctgatagctgagcataagtaaagaaaggtggagtgccgatgcagaaaggaaaatattcagctttcctctcttagatcgcactttgaagatggccttttggagacaatctgacaggttaaaacaggaactgttggaattattctagctgtaactacctattggctatgtgttgattgatcctagaaagaaaaaataatttttcattttagatcttgattgaatttaagatgtatttatatgcctacaaaaggtctgtcttgtaactgttgtataaaataaacctaatctatggtttcatttttaatctaaaaaaagttgtgccttaacaatagggcattgtatgttaataagggaaaacaacctttttagtagatgggggaaaataggaactttttgccattaaaacttaagttcttttgatgtttttaatattatagttgggggagattcattaaaattaaattgaaataaaattatttttgcataacctagcatttaca

SEQ ID NO: 42563 - DNA, 765 bp, Homo Sapiens
ggccgagatgatcctaaaaataaccgaagaaagagaggaccaaccagaattccctttggacatttgtgtttttttgtttttttattttgttttgttttttcttcttcttcttcttccttaaagacatttaagctaaaggcaactcgtacccaaatttccaagacacaaacatgacctatccaagcgcattacccacttgtggccaatcagtggccaggccaaccttggctaaatggagcagcgaaatcaacgagaaactggactttttaaaccctcttcagagcaagcgtggaggatgatggagaatcgtgtgatcagtgtgctaaatctctctgcctgtttggactttgtaattatttttttagcagtaattaaagaaaaaagtcctctgtgaggaatattctctattttaaatatttttagtatgtactgtgtatgattcattaccattttgaggggatttatacatatttttagataaaattaaatgctcttatttttccaacagctaaactactcttagttgaacagtgtgccctagcttttcttgcaaccagagtatttttgtacagatttgctttctcttacaaaaagaaaaaaaaaatcctgtggtattaacatttaaaaacagaatggtgtcatgtgatcagtttggggggttaactttgcttaattcctcaggctttgcgatttaaggaggagctgccttaaaaaaaataaaggccttatttggcaattatgggagttaacaatagtctagagaag

SEQ ID NO: 42564 - DNA, 704 bp, Homo Sapiens
ccgtcgacccacgcgtccggacagtatgaagaaaaacaaagtgcacagagacccgcccccagacaagagttgatggagacccagggattggacaccatctcccaaccccagtactcctgctctccggtgccacctcaccttctttggcttcttccctcttgcctccttctgttctttctgctctcccctcttttccctcctcctcacttccctctggctagcccacccctgcactctctctcattgccgctgccactatcacctgtctctctgccagctgatgtgccctgttgccccccaccccatcccgcacagaaccatccctgcattccacaggggactcgggcaagggtgccgaagatagacaagaggcacacagagacagaccaactggcagccaggcagccccagaggagagagacattcagacagaggaaagtctccctgcccctcattccttccaagatgagaaaaacttgccgccaccccccgacactgatgccagggaggtgggaggaagaagtgggaaatttcccttcccagtacccccaagaacgtctgagccttcaatgttgaattttttctttattaaaattacttttatcttataaaatcaactaatcaaaaatgatatagacgacagcactggctctgtgaaggtggcatctttctgggcaggcaggccatggggcatggaggagggt

SEQ ID NO: 42565 - DNA, 891 bp, Homo Sapiens
caaagtcaaatgtgtggccacatgggatgggccaggtcctctcaggctactttctggatgtcatttttaaaatatggaaacatgcaggtgccttcccaaagaggcttggactggtatatccaacgagaaacaaataagctaaagaaagtttaaactcaagaagaaagatgttgacagtctatgtaacagctggaaagtttataggcacccacctttgggacaacccagtgattatgaacatgtgatatctactatttaaaagaaatgttctcaccttgggttgattgtggtataccatgtgttatgaaaattgttgagctgaagctttgaatcgatttagttgagtctgactcacttgctttggttcctgtgtattttactacccctcttgtcagtgaccttccttccccaccccacccagagtgaatttgtagcatgattgtataaacctctatgtagaaaatggagatttcttgctctgaaatgttaagctctaactgatccatttctgtgtcctttagcctagtatgtctgaacttccattcttgttatatatttaaactttccctctatattataggttttgtggcatccacggtcaggtgtagaggaagctgccccttgcagaactgtactgtaatatttttcttttataaatattttcacaggactgattgtacacagggcttgtaataaaattttaacactgtgctgtgaaacaactatggggaatctccattgaaggctacttcatgggcactggaaaaggggagtgttatagctatggactttctatttcttgttttcctaagtaaattaaacctaattttcccccttttcattctgtttcagcctccccggtataagaaaaaaccgtattttctgcccatt

SEQ ID NO: 42566 - DNA, 806 bp, Homo Sapiens
ccacgcgtccggtggtagatatgatcccattggaggtaaattgtagcttcttctcattcatgcagtaaataatacatcctttcactcagcagagatggccatattaaacacgttttgctatgttaaaagtggcagaacaggaaagacgaattaaaaataacattttttaagcgacataaggatgaaatactgatgaatctctgtgacattacagggaaaaaaatatagttttctatctctttcaagggcagaagagttttcatttttatttttgtaattttatctgtaagtcataaatattacttaatcaggcctgattctacttttgaaaattacagttcttgaaatgcagataatgtttactttgaaaacaaatgtcatgaatgatttccagtttttaaagctatatgtttcactgcttcatatctctgtccactttctgaatgagaacttattttgtgcctagagctctcactcactgataatgcttattaccttctgggcatttattccaaagtgggatcaactgtacgcctttggtatctgaccataaagtcttttgctccgctgacatttgggtgatgtcttcacatggaaatataataaaaataaaaatctagtttaatactgcattatttattttcctaaggctaaagaggagcagtcctatgcttttattcagcatcctttatctgtgacttcatgctctgataactgcctttccttccttctgtgcctttgaatacaaatttcagttctgcaaaagtgaaacattaaacattgccaacgcaaaaaaaaaaaaaagg

SEQ ID NO: 42567 - DNA, 637 bp, Homo Sapiens
cgcaaagttgcaggggcctctggagtgtctcttctctagagagaattggtgggacccccctcagtgcagtggccccaactagtggagggagagaggacttaagtcagatggactcaacagaaatgggtttccagaagaataatgaaaagttgtgggtaggaaaatgaatcatttggactcttcaatgaaatggagtgagcccaggagagctcagccaacagaggcactctgggaacctgttagtaaagccaggctggccaaatgccatttgattttgaacctcgtaggtccccactcaccctctgccaggagctaagtaaggcaggagagctgacttgggactcctggctcggccccaacagggagcccccttcccaccatccctcggcaagctcaccacctcatccttctgccaaggcagctttcctttcttttgtgtgttttctgtgttcttagcctccaccctcctcctgccacccttgtggactaggaccaggtcctgaccccagtcagaaaatgatgatatgtacagtggcacaccttaaccagtcactaattttcactgttgtgaaagtgatttgatttagaattaaacaaatggttttacattaaaaaaaaaaaaaaaaaaaaggacgcg

SEQ ID NO: 42568 - DNA, 544 bp, Homo Sapiens
ttcggcacgagggaagctttactggttaagtatagggtcaccagagaaagttcctttccccagttgatgtcttgaggctgttgagaaacttaggacagaagcctacctcatcccaggcctgcccctccgtgcatagctctgcctttgggtcttgttcatagtgctgttcaggcaaaatggaatagtctcaggtgggaacaccttctcttgctagctccaggaaggctttgtgggaaatgagttgagaccatggacttgggagttgggggccagagttgagcctggacttgaccaattaattcccttacctttcagcccaagatagctacatgtctttacttgctgtataagttttccttttgtcctgggggtgcctgattgatcctatctcttcacccttcattctttcaacaaacatgccatctatctcccaggacatttattcccttctattcaaggccagttaggaatgcaattattttttttttcagttaaatacagacttgtttggacgcaaggtaccctttctctttttaaaaaactt

SEQ ID NO: 42569 - DNA, 652 bp, Homo Sapiens
acgcgtccgggaaaatgtgaaatctcagaatttatctcccttagaagagagccagtaacttatgtacaaggatgaaagaaaggtcgcagcagtagctttggggaaagggaggaagatatggcacttctccaaccccggaaaacattgcttttgaaaactgctgataaaatatgagccggttattacttctgtttgggagactgtgctctctgtggtgcctctcttggctctactccacagataccagacctcttctaagaggatgagcagaccagctttgaggttgacctgtttctctttgtctgccttcccaaaacaccagcccccaggaagacattaagcagccttaagcttaaattcctactccctcttccaaatttggctcacttgccttagatccaaggcagggaaaggaaaagaaggggggtctctggctttattactcccctaagtctttactctgacttccccaaacccagaaagattttctccacagtgttcatttgaaagaggagtattttgtcccattttccccttcctcattatcaaacagccccagtcttccttgtctctgctaagaaagtagaggcatgatgatctgcctctcaactgccctaagtcctagctaagtatcaggggaaaaaaaaaaaaa

SEQ ID NO: 42570 - DNA, 706 bp, Homo Sapiens
tgaggctgctgctgcatttcacatgccttgcaatggatcagccaaggccgagaccccatcttccagccacctagtcccccaaagggcctcctcacccaccctgtggctcacagtggggccagcatactccgtgaggctgctgccatccatgtgctagtcactggcagcctgcacctggtgggtggtgtcctgaagctgctggagcccgcactgtcccagtagccaaggcccggggttggaggtgggagcttcccacacctgcctgcgttctccccatgaacttacatactaggtgccttttgtttttggctttcctggttctgtctagactggcctaggggccagggctttgggatgggaggccgggagaggatgtcttttttaaggctctgtgccttggtctctccttcctcttggctgagatagcagaggggctccccgggtctctcactgttgcagtggcctggccgttcagcctgtctcccccaacaccccgcctgcctcctggctcaggcccagcttattgtgtgcgctgcctggccaggccctgggtcttgccatgtgctgggtggtagatttcctcctcccagtgccttctgggaagggagagggcctctgcctgggacactgcgggacagagggtggctggagtgaattagagcctttgttttttacacgaacaaccgactatactgctacaacacac

SEQ ID NO: 42571 - DNA, 551 bp, Homo Sapiens
aaaatttgaaaattgtatttagaataagaaattttacattttaaaccctattgtcctttatgcattttcaatgaaatggaatgaaggctaatatgcttgctttatttacttttgtaatcttggattttgtagcttttaaaactagaaaccattgttctaacaaagcaggcaactttattctataaacacaactttattaagcagaatacactgtagatgcttttccccaacgtatctggctggcagtctttgtcgttgttcattctggggataaaggggaactaggctagcagttctaatgtgacattctttaagcatatcttaaaatagtatttaagtaaatggtctaatttctacataattattgcactgaacttttttgtttattaaggtgtttaaataagctcagctaattcaagacactgtagtcacttgtgcatcagtgtgcttgaatttagtagcttacagcattatttatgaaggaaaaaatacataaatatgaagtacctcatgttgaatgttattgtactgtatttttaatgtaacagtgc

SEQ ID NO: 42572 - DNA, 860 bp, Homo Sapiens
agaatcaatggataagcgtgggtggaggaagatccaaacagaaaagtgcaaagttattccccatcttccaagggttgaattctggaggaagaagacacattcctagttccccgtgaacttcctttgacttattgtccccactaaaacaaaacaaaaaacttttaatgccttccacattaattagattttcttgcagtttttttatggcatttttttaaagatgccctaagtgttgaagaagagtttgcaaatgcaacaaaatatttaattaccggttgttaaaactggtttagcacaatttatattttccctctcttgcctttcttatttgcaataaaaggtattgagccattttttaaatgacatttttgataaattatgtttgtactagttgatgaaggagttttttttaacctgtttatataattttgcagcagaagccaaatttttgtatattaaagcaccaaattcatgtacagcatgcatcacggatcaatagactgtacttattttccaataaaattttcaaactttgtactgttaaaaaaaaaaaaaaaaaccagacaccagaaaacaggaaaacaacaaccacaacacccagaaacaacaaaaaaaaaaacaggcgcaaagccaacgaacgaagacacagcacacaagaacagcaacatacaccaaagggagggacgagcacactaagcatacccgggggaggaaacaaaaactcgacccagttgagaaaggccgccccaagcgaagcgttataaaagacagcccgcgccaaaccgaggagtgacacgcagctctgtgacaaccccatgtgggagcccaccacacagagccgcgaacatggtgcgcaccag

SEQ ID NO: 42573 - DNA, 726 bp, Homo Sapiens
gcttctctttgacaacttgcatctctcctacatggaagtaagttttattcctgtcaatgtgtcttgtgtgtgacagattaggattaaattatggtttgacttttcctagcagcgtgatcatgggcaagtggcttattttttttttttttttgagacagagtctcacttctgctgcccaggctggagtgcaggggcacagtctgggctcactgcaactccgttgcctcccggtccaagtgattctcgtgctgcagcttctcaagtagctggcatcaccaccacaccgtggctaattttggtattttatagtaacgacgaggtttcaccatgtgggcaaagctggtctcaaattccgggcctcaagtgatctgcccacttcagcctcccaaagtgtggggattacaggcgtgagccactgcgcccggcttttttaaacttttagattcatttaataggtaaatggcatgtcacgggtttggtagcttattctttcagaaactcttgcattatctgtagacgtggacgtaaatatccacctcatagggtttccataaaaaatattggagataaggtctgtaaaggtcccacagtgcttggcagactatctaataaatagtagctattagtaaaaaaaaaacaaaacaaacacacaaacaccaaaaaaaggggggggggcaaaaaaacccgcgggggggcccatagcgccccgtttttgacaaaggggcc

SEQ ID NO: 42574 - DNA, 562 bp, Homo Sapiens
  misc_feature (48)..(48): n is a, c, g, or t
gagtctagggcacaaagacttccggggaagatacactgagattgaccntgaggagacatctacacacaccagtggcagctgccccagggcctgcttccccttcctaagtctgtcatcctctggaagggatgggtggtgctccaatctctggtgcctaaaaacccaagtttatttctctcttaacactggcaataaccagtccacaccactgttgccttttaaaacctcttaataatctcatgctgtgtttgttttgattccaatccaattatcaccagggctgtgtgggtaaatgcttttaaatgctctctcatcttgttcttccccctcaccccccactcttaggtatgtatgatgctaatcttgtccctaagtaagtttcttcctgctccttttgtatcttcctttcttgtctttcctcctaccttttgtctcttggtgttttgggacttttttttttttttttggccttttgtacaaagattagtttcaatgtagtctgtagcctcctttgtaaaccaattaaaaagttttttaataaaaaaaaaaaaaaaaaacgcgg

SEQ ID NO: 42575 - DNA, 580 bp, Homo Sapiens
  misc_feature (580)..(580): n is a, c, g, or t
ggtagagaaggtcctctggttagtctctcaaattgaggctgtttagggaaatccttattcagttggtggcagtggttggtttaaagtagaaggaaataagatcgccttaataccagaaatgattagaagtgctgatttagattcaacaaataccatatgtccttatcattttttgtaagaagaaattggttaagtcctaactttcaatgtgtacccaaatacttgtatttatgcttttgataaaatgtattttcagcattaatacacatccgattatgccttatttatatatgaagaataaagttaccatgttatactgttatgtcctaaaattcaaatcactatttgagaaaccctcaaattggtgctttcattatataatgatacatttagacaaaaccccaaactaagccatttgaaacaagattctctccattgcagtttgtagcaatgttatttctgtgtatgtcatgagaaggctaaatatcagtgttaatttcttgtttgaatccgtgaaatcatgcctgtaaagcccaaacatttgtaacaaactccctaataaatttagagaaagtcaaan

SEQ ID NO: 42576 - DNA, 883 bp, Homo Sapiens
  misc_feature (720)..(720): n is a, c, g, or t
  misc_feature (763)..(763): n is a, c, g, or t
  misc_feature (807)..(807): n is a, c, g, or t
  misc_feature (875)..(875): n is a, c, g, or t
  misc_feature (877)..(877): n is a, c, g, or t
gggagccatgtttcacaaggtctttaaagtgactaatggcatgagaaatacaaaaatactcagataaggtaaaatgccatgatgcctctgtcttctggactggttttcacattagaagacaattgacaacagttacataattcactctgagtgttttatgagaaagccttcttttgggggtcaacagttttcctatgctttgaaacagaaaaatatgtaccaagaatcttggtttgccttccagaaaacaaaactgcatttcactttcccggtgttccccactgtatctaggcaacatagtattcatgactatggataaactaaacacgtgacacaaacacacacaaaagggaacccagctctaatacattccaactcgtatagcatgcatctgtttattctatagttattaagttctttaaaatgtaaagccatgctggaaaataatactgctgagatacatacagaattactgtaactgattacacttggtaattgtactaaagccaaacatatatatactattaaaaaggtttacagaattttatggtgcattacgtgggcattgtctttttagatgcccaaatccttagatctggcatgttagcccttcctccaattataagaggatatgaactgagtttttcttttgttgtttgtcttagctgtaattcctatgcttctatttcagagagccaggagagtttgatattaaaggangttaaaactgtgatcttatgccatgtcatcaatggccacttangggccatggctgatgacacattcttatctctacagtactaatgnggtattatagagccctgccttttattctgaataagaactttttaaactaatattccttacatatggangnattaat

SEQ ID NO: 42577 - DNA, 668 bp, Homo Sapiens
gtccgctctctgccaacgccgcccggatggcttcccaaaaccgcgacccagccgccactagcgtcgccgccgcccgtaaaggagctgagccgagcgggggcgccgcccggggtccggtgggcaaaaggctacagcaggagctgatgaccctcatgatgtctggcgataaagggatttctgccttccctgaatcagacaaccttttcaaatgggtagggaccatccatggagcagctggaacagtatatgaagacctgaggtataagctctcgctagagttccccagtggctacccttacaatgcgcccacagtgaagttcctcacgccctgctatcaccccaacgtggacacccagggtaacatatgcctggacatcctgaaggaaaagtggtctgccctgtatgatgtcaggaccattctgctctccatccagagccttctaggagaacccaacattgatagtcccttgaacacacatgctgccgagctctggaaaaaccccacagcttttaagaagtacctgcaagaaacctactcaaagcaggtcaccagccaggagccctgacccaggctgcccagcctgtccttgtgtcgtctttttaatttttccttagatggtctgtcctttttgtgatttctgtataggactctttatcttgagctgggg

SEQ ID NO: 42578 - DNA, 721 bp, Homo Sapiens
acgccaagctctaatacgactcactatagggaaagctggtacgcctgcaggtaccggtccggaattcccgggtcgacccacgcgtccgagaagaacatatatatatatatatatatttaaaaatatatcggatagttgtatacaaatgagcaaggtatttgttgcaacttactacatagcatatacccaaaatcactgaagaaaatcgctggcatcagtgtgcagcaaatttgttcttttggtttcatcactaacaaaagtgcctcatcataaaaatacagttggtttttagggtgccatattgttaaaattagataacttacttacattgaataaacgaatgcgttttattggtaacagatatcattacatttaccagttttaacacaggtggatacagaacttccattctttagtcattccaggtggatctgagttttatattcaaacttttaatacagtttttgagttttgtgtgacttgaatttttaatctttctgtaaaatacgtaacttaaatgaacatattaaatgtgtatcttttcttcagataccagatttgatataatgttgtaacataggtgtgtagatagtggatcctggatggaactggcttctttatcgagaagaatataattttgcatgaggaccttaatgaattcaaacctgtgtcatgcctgtgtgcatacccaaattaaaccactggaaaataaaaaatggtt

SEQ ID NO: 42579 - DNA, 792 bp, Homo Sapiens
  misc_feature (670)..(670): n is a, c, g, or t
ggatttctagaaaaactgggccagattttctttgttctccatcattttaatgtggcaggctgttcagttttcttactcttacctatgtgatatttcttcgtaacgtgtccaaaaagaaaaaagacccaatcagtgtctcttgactttgttctttgatccctcagtttcttcttgatttcagcatgtgtcgggttcctaattttgggtatgagttagcaaatttaaccattgtgtttgtgccctacccaggggactccccagtttctgacttgaagtagactgagaagaatccacgaggtgctatctggccagatttaagtagattctatttccttggttctccctctccctgaggacctcttattttattgtcccctcttctaggttaattctcctttgatttgactttgttgagaaggaggttggacagtagattagcaaagttccaagtgcaaaattacagtgtgttagagtgtggggggaaaattagtcttatttttccctacatgggatacaacactgtgaattcaatcttcaactgaaggccctgcagttctcctaaaacatagttgtttgtttttctttaacaaagtttaagctagtgttaataaattaaaaaaaattgcttgtctgtctacttcagctttgttttatgcccatttcatattgntgtctgtgttgtaattcatactttttgataccatttctgatgtgtaaaattgggtggcttggaaatatcttataaagagttcaattggaaataaactattggggctggttaatttttgaaaa

SEQ ID NO: 42580 - DNA, 577 bp, Homo Sapiens
gtgattttgaggctgtaacatgcccagaagctggttgtggccgacacttcaacaatagggaaaaaaaggtagaaaatatccctactgacagtaactacctgtcacatatttctcttaggacttttaaagatgagccattaaaatagaatgatcctttatggaccaaaacttgaatcactgcaaaatgaatccagattgctgtcattttcttttcttttgggtggtggggcttgatgtagattttactctatgtacagaatttaacgttgaatatattaaaataacaaatctggcatggtttgcggaggttagatttactggaaatgtattcatactgtgaattgtgctctgatggttaaaagacaagattgtcaagcattccgtattaacagtggatgtagaaaattttttcagatggacaaaatgtatatggtacagatgtaaagttttctatgtaaaaaattctgtacaactttctgtacaatattgattcccatctggcatattctaatcaggttataggtcaataaagtttttgaattatttcatcagtgaaaaaaaaaaaaaaaaaacgcgg

SEQ ID NO: 42581 - DNA, 602 bp, Homo Sapiens
gcacgaggacaattgcagatagtgataagtgtgtaagacaaggataccacgagcgtaatagacagtggggatggaggaacctttagaaggttggttaagttgaatgataaggagccattcttttgtctttacctgaatgacttatcattcagccctttttgagttttgggttgcttgcagagtttaaccttgcctgtaattgaaacttaattttgtaatagcataacttcatgtaagaaaagcaaagcaatacattacagaattattttactgaagaacttgtttcagagaaagaggctgtttcacatttattagcacatttggattatatttaggtgttttatttttttttaaacaaaggagtttggatcataatacaagagaagcacagggcaaagacactgcataacctcaagaactaagaatggaaggactggccaggcctggtggtgcacacctgtaatcccagctactcaggaggctgaggcgagagaatcgcttgagcctggggggcagaggttgcagtgagctgagatcatgccactgtgctccagcctggtggcacagtgagactccacctcaaaaaaaaaaaaaaaaactcg

SEQ ID NO: 42582 - DNA, 569 bp, Homo Sapiens
atgagctttcctttgatccggacgacgtaatcactgacattgagatggtggacgagggctggtggcggggacgttgccatggccactttggactcttccctgcaaattatgtcaagcttctggagtgactagagctcactgtctactgcaactgtgatttcccatgtccaaagtggctctgcctccaccccctccctattcctgatgcaaatgtctaaccagatgagtttctggacagacttccctctcctgcttcattaagggcttggggcagagacagcatggggaaggaggtccccttccccaagagtcctctctatcctggatgagctcatgaacatttctcttgtgttcctgactccttcccaatgaacacctctctgccaccccaagctctgctctcctcctctgtgagctctgggcttcccagtttgtttacccgggaaagtacgtctagattgtgtggtttgcctcattgtgctatttgcccactttccttccctgaagaaatatctgtgaaccttctttctgttcagtcctaaattcgaaataagtgagactagggtcac

SEQ ID NO: 42583 - DNA, 583 bp, Homo Sapiens
atcttagaaggaaggagggggagcccaggtatgagaaagaaaaaaccactaagaaaatacctccctgggaggatgagctggggccctttttcttttgctggatggttcctttatgcagcttggccctgtctaccgagatgcccatctcttcctgcctgctagcctgctagaccctcaaactgggtgggttctgtgtcaataaaaagcttcaccccctggctgagtgaggtggtcccctgcaatcactgtttgtcccctacccacccaacctgtccctgcctgctcccagcccactcatccttatgtgctagggataaatcaagagtcctcagcactccacattcccaaaaaatcccaggaactcctaaaccttcccctgtgacagaagatgaggttggcagctgatcagacctcaataattttatactgtaataagctctttgaatgtgtatattattattttttacaatcatttcattttgtatttaatatcaatggactgagtctgatttcagaaataattgtaatgtttatattcaatatcttacagggatacagttttgtatttacatataaatatacc

SEQ ID NO: 42584 - DNA, 548 bp, Homo Sapiens
cccctgagcccgtagggttttcatagtggacaaagaacttgtggtcttttaaaactgggactgatacttttttgagagagtatcgtgtcgaaagtgtgatgttctaccactttaccaataactaattttaaatacacattgtcctctcgatttttggaccaaacagacgctcacagtggaggcttatcaagggttgcattggggaagaagcctctccctctctgtcagcaccagctggtaaaggtgactgtacagatgtgcattttccttttggtataaatggtccacagcactaactggtaaggcttattgtacagtatattgtcagtattcttctggttcagcataccttatagttcatatataacctgtattaattgtatagattgtgcattaaaagctgttaccaagttgtcagaacataagagcgaaaacaaggtcatatgtaatattttgtttgtaagtatcctttgtatcatagcaaaggaaatgtttaaaaaaatcaactgtaataaagtaattttagtacacaaaaaaaaaaaaaaaag

SEQ ID NO: 42585 - DNA, 575 bp, Homo Sapiens
tcctgaactcatcaaagaacttaactcccttggacggccagatattcttgtcatgtgtggaggggtgataccacctcaggattatgaatttctgtttgaagttggtgtttccaatgtatttggtcctgggactcgaattccaaaggctgccgttcaggtgcttgatgatattgagaagtgtttggaaaagaagcagcaatctgtataatatcctctttttgttttagcttttgtctaaaatattattttagttatgatcaaagaagagagtaaagctatgtcttcaatttaatttcaatacctgatttgtactttccttgaaagctttactttaaaataccttacttataggcctggtgtcatgctataagtatgtacatacagtttcacttcaaaaataaaaaaaaatccctaaaaactctctatactctctataacaatactttatcaagaactctggacaatggtattatttttaaaaatcatggtgatgtatttattagaatgtttcttataaatctgtttactttttatattaagaattaaactgtacctaaaaaaactctgactattcc

SEQ ID NO: 42586 - DNA, 650 bp, Homo Sapiens
  misc_feature (14)..(15): n is a, c, g, or t
  misc_feature (120)..(120): n is a, c, g, or t
  misc_feature (318)..(318): n is a, c, g, or t
  misc_feature (320)..(320): n is a, c, g, or t
  misc_feature (343)..(343): n is a, c, g, or t
  misc_feature (439)..(439): n is a, c, g, or t
  misc_feature (510)..(510): n is a, c, g, or t
tcttcttcatgagnntaccatggaaaattttctgtgacaagggtggtcatggaagtaagtgagtgatcccctggtttctcattccttaaagcagtggttcgcaaagtatggcacttttancagcagcatcagcagcctttgggaacttgttagaaacgaaaattctcaatcccatcccagatctgctgaatcagaaactctaatgagaggacccggcaatccacgttttaataagccctcctggtgattctgatgcacactaaattcaactgttttaaagggaaagccctttatagtattggagttcccacactgganangctttggggcccaaaataagaangttctaggttgtcattcaaactttaacattaatttcaaagtcacctttctcatgcttccttttgtttctgtttttccatttatgattttaacaaanaaaggtatgtgtgcttttgggtggaagttaggagaatgtttgtgtctttcctagttgaatacaaccttcanagaaaaaccttatgccttggaaattactacctggcacacaaaggggcttcaacaagggaaaagcagttggaggtctcttccaaattgctcttctgccgaattatttgtatctattccgagctgattatgtaataggatgg

SEQ ID NO: 42587 - DNA, 508 bp, Homo Sapiens
tgcacatctgggcccctcactgtggggattgatcattctcatgaaggaatcacagttatatggcaactgcagaaggctgagcctcctcatggtgctataaccccttgggacactcatccagacttctctgaagcagaaaacctgagctccccactcactgccctagaatttatggcaaggagcaaatctacagcattctctcccacctacgtcctgcttcttggttgagactactgggatccttcagaaaagaaacactgggtcccatagctaaattctcaaccgccaggcaccttcagaagaatccagcctaatactggaatttgtgctattatcttcctctccagccccccaactccatccctcaccacagttgtctaggaaatgacatgaattcaatatctaatgtcaaccaatggggagagccacaactccaggagaggttcctgagctgagtcccttaatttctggatgaagaagaccaacaagttttgtccaatgtatttgc

SEQ ID NO: 42588 - DNA, 924 bp, Homo Sapiens
ggaatctgcccagtcctcaaggttaccatgggagacatggggctcaggaggggaaggcaactcagctggaggggcagagaggccaggccaatgggagaggctgaaaagggggcagtacttgcccagggtcatgggagatggtactgtttccaaaggaggaaggggccccggttcccagcataccaaagaagcagaagataaaattcccttggtcccctcaaaagtgagtgtcatcaagggcagcagaagccaaaaggaggcttttcctttggcaaagggagaggtagacactgcaccacagggtaataaagacttaaaggagcatgtgcttcaaagttccttatcccaggagcataaagacccaaaagcaacacccccatgatacaggtctgtggggaagagtgtttatatccctacgttaactttgcctagtagaggcccttctttgcacttgcttctcatttggctattcttttcctaaggaagtccattctcctctgtacagacagctgagtcacccagtctacttagtacctggttgctgcctctgaccttttcagcttgataccctgggctttagtgtaaccaataaatctgtagtgaccttacctgtattccctgtgctatcctgtgggaaggtaggaatgggctaagtatgatgaatatactaggttagggatcttttggttttaaaatcacagaaaacctaattcaaaactggctttaaaactaccaagggattctcatggttcatgtgacttagaaagtccataggtaagtgctggctccaggtgaagcacttgaaccagtagttcagtatgtctctaaataccggactgacttttttctcactgttgcatcttctgtaggaccacttaagtctggccacttaatggttgcacattcctagattaccttttccca

SEQ ID NO: 42589 - DNA, 565 bp, Homo Sapiens
ggaaaagatgattctgggtctttcccttgacttcttgtttcaattacaaactcctgggctttctggggaggggttcagaaaacatcaaaacactgcagcagttcctaaatgattctcacaagcaaccctgagagagacagtcttgtgagggagatctgggggaggcaggaagctcctcagattttctcacagacccttcccaattccatcaccactgccaacaactcctcccccagagatctggctggagcccagaaaaagaagcatgtggtttaaaaaatgtttaaatcaatctgtaaaaggtaaaaatgaaaaacaaaaacaagcaaacaaacaaaaaacaatggaaaagatgaagctggagagagaggaaccagttgccaaggtagagagctgcccgctcctgccctctggatgacataggggacatcaacaagacggctgccaacctgagaagtcaccaaaccacaaaaataaccttacagccttcagggaaagactaccagctctgtctttctaccctctaatttaacaatgcataagagtcaataaaccctactttttt

SEQ ID NO: 42590 - DNA, 672 bp, Homo Sapiens
  misc_feature (47)..(47): n is a, c, g, or t
  misc_feature (362)..(362): n is a, c, g, or t
ctcacacacgcgcacatgggcgcgcacgaactaccattcaggcagtnagtgggcaagaggaaagataagtaagttccatacacacctaaaagatgagagaattcatccagacatattacagccagtttggggcccctgactgcaatgtgaaacctctcgctgctgctaggtttacaaacaagcccattgtcctgtgcctcctaatatcatttgtactgaagaccccatctggggacttgagactttggtcccagcccagactcctcagacttttctctcagttgggatgcttcactcgctgggggtgtttgtttgccctctcatttttcagtacttctacagaattttctctagagtaagtnattatgaaatgtacttccctccatcttaacctatcaactttctgcccctccttcaaggcccagtataaatgccacctcctccatgaagccttccctaattccaccccaaacccccaccttcaacaatatttcaacgcttctgcaatgatgaaaaagaaacatagttgtagtacttagcctacctagaccagcaagcattcatttttagctcgctcattttttaccatgttttccagtttgtttaacttctgcagtgccttcactacactgccttacataaaccaaatcacaataaagttcatattcagta

SEQ ID NO: 42591 - DNA, 903 bp, Homo Sapiens
gaattcatccagacatattacagccagtttggggcccctgactgcaatgtgaaacctctcgctgctgctaggtttacaaacaagcccattgtcctgtgcctcctaatatcatttgtactgaagaccccatctggggacttgagactttggtcccagcccagactcctcagacttttctctcagttgggatgcttcactcgctgggggtgtttgtttgccctctcatttttcagtacttctacagaattttctctagagtcagtcattatgaaatgtacttccctccatcttaacctatcaactttctgcccctccttcaaggcccagtataaatgccacctcctccatgaagccttccctaattccaccccaaagccccaccttcaacaatatttcaacgcttctgcaatgatgaaaaagaaacatagttgtagtacttagcctacctagaccagcaagcattcatttttagctcgctcattttttaccattgttttccagtctgtttaacttctgcagtgccttcactacacgtgccttacataaaccaaatcacaataaagttcatattcagtacattgcaaaaaaaaaaggaagaaaaaaaaaaacatttgtccgcgccgcattagagcccccgagacaggttgtaaaacacacgcgtgtgtgaccgggggcccatgtgagcgagtaaggtggaccacctgtggggcaaagcagggacgtcccacaaggagaaaacggggggccaagaaaacacggcgctggagatctccaccaagtaaaagaaacgcccgcgtggtgacaccaggcgcgtgttgtgaaccaaactccaaaagggagtatcgagagggacaaacaggggatcattaacagagggaccaagggaggcgcgcaatacaattg

SEQ ID NO: 42592 - DNA, 602 bp, Homo Sapiens
ccacgcgtcgatggtcttgtgctagagatggcggtacaagagtctgttatgcaagcccgtgtgccaggatgtgctgggggcggccacccgctctccaggaaaggcacagctgaggcactgtggctggcttcggcctcaacatcgcccccagccttggagctctgcagacatgataggaaggaaactgtcatctgcaggggctttcagcaaaatgaagggttagatttttatgctgctgctgatggggttactaaagggaggggaagaggccaggtgggccgctgactgggccatggggagaacgtgtgttcgtactccaggctaaccctgaactccccatgtgatgcgcgctttgttgaatgtgtgtctcggtttccccatctgtaatatgagtcggggggaatggtggtgattcctacctcacagggctgttgtggggattaaagtgctgcgggtgagtgaaggacacatcacgttcagtgtttcaagtacaggcccacaaaacggggcacggcaggcctgagctcagagctgctgcactgggctttggatttgttcttgtgagtaaaataaaactggctggtgaatgacacaacaaacaa

SEQ ID NO: 42593 - DNA, 789 bp, Homo Sapiens
gagctccaagggttatccccgttactgcactgtcacgactctctcagatggctctgtggtcctaaacggaggccgttcccggagggggaaactgaggggcccaccggagagcagagagtgggggaacgcgctgaaggggtgtgatgatccccttttccttgacttcttaaaacagtgtttagagtgggatcctgcagtgcgcatgaccccaggccaggcttgcggcacccctggctgaggaggcggttgccaaagcctcccaccggggagaaaacgtcagtgaaaaggataactgagagcaccggtgctatcacatctatatccaagttacctccaccttctagctcagcttccaaactgaggactaatttggcgcagatgacagatgccaatgggaatattcagcagaggacagtgttgcaaaactgtgttagctgagctcacgtcccctgatgctggtaacctgaaagatacgacattgtgagccttactgggttgaaaaggagtagctcagaacctgtttttatttgttcaataaactctaactcattggtatctttgcagcacttcacttttactgtacgacaggtgtccatttcgtcttatacaatactgacggaccagctttcagtttggcaaacacccgcccacaacacaacagtgtcgcccccggcccaaaaaacctccaacactcgggggcgcccacggacggacgcgagcggccagagcggcgaaggcgggttccaaaacgcgggcctcaacccagcggccaggacaacgacagcaacg

SEQ ID NO: 42594 - DNA, 825 bp, Homo Sapiens
ctagaacaggttaattctccaaatttgttttgttttgttttgttattttttagggaactcttttgcaaaagcaatggtcggatgtaaataacatttaaagtatagtgcacataacttccccggactgttccaatctgataatttgtaaatgctttagagtttttttaattaacacttgtgttgctaaattctatttatgtaagtctgctaaagttttttagcccacttaaaacttaagacaaccatttaaaataatggatgggttactatgagcaatttcgctttcagaacccccttgttttagtatatgaaaaagcctaatgcgcattaatgaggttgaagagactatgagaaatatgtatagtgtatattttaaaacagctttgcttgtattgtgaagatttaaaaacaaacttgagatttttaacgtaactattaacacagttttaacataagttatcccactgggtttaagagcatcttgaatgtataatcctttttgtaacccaggttggtttctacttttaccagtcacccaaacatatttatgtttttagttttatgtactcatttccctttgttttcctcaaacagcatgatttttttgcacatgtagaaattttttaaaagaaagaaattagtacatcattttctctggattttcttcacttccctcttcctttctactaactccttccttaaaggccatatcactccatttgcattatttgtgcaaatgccagggttggtttttatttttatttttgctatttacctaaaaaaagaaaatgcttcagtcaattgcttttttatttaaaaaaaaaa

SEQ ID NO: 42595 - DNA, 595 bp, Homo Sapiens
ttttatatgtgcctggctctagtaaggatggccagggatttttacaatttgggtgcaaggcacttaagccacttttaaacttaatgggtggtttggggtcgtgttaaatgaccccatcagaatgttagaaaacactttaggcatcagtagcattgggccatattggaatcctaaagtgtgaattattttaaggagagcattcatttttgtaatttttttcatcaaaaatatttctggtaagcagaagactttttaaaaaaactgatctggtctcggtaaaggttttaatattgcccaacataatgctgtaatagcattaaaaaaagtatttgtgaactctgtttcttaggggcttgtacatctctctgctatggacatacataaaattaattgtaattatactcagctcaactgctacagttctgtctaggcagtggcttgggtttttatcgagcaacaacttagacacgtgactgtaatatgctgcaactgtgtgtactgaaaatatgtgaaaatggttgaatgtggactgtgtatatatgtatgtaaaaatttctgtgagatgctgctgtcgccacttaacattaaatatgtt

SEQ ID NO: 42596 - DNA, 592 bp, Homo Sapiens
  misc_feature (521)..(521): n is a, c, g, or t
gcacgaggagaaatgacaaatgaattcaaaacctagcaggtgcattgtaaatgtgtgcccagttatgttttggaaatggcagttccttggggtcatgtttctactggcaaaatttgcaatagtgttctattgtatgtaattttaaaatttataagattatccacgttggccaagtaaactgtactgccaatagaattctggaattgtgagaaattgtatcattgaagttcagtaggatgtgtggcttaaaaatttatcaggaccacaaaaaagaaaacaaaaatatttggtactgaggttcattgccagggcaggaggtatttccagaaaatactcatgcctgtgttctgttccttgctttcccaaatactgcatgtgactttcctaagcggcagctgaaagactcgagcccgtgctgtctcctttggttattatgacatgaaagtgtatcaagaactcagcatttctttgcatccatggacttggtttggagacataaggaatattctgaccctttttanaaaaggattttctcatgtttttatttaacataaataaaagaataacattttaaaaaaaaaaaaaaaaaacg

SEQ ID NO: 42597 - DNA, 682 bp, Homo Sapiens
atcctgccgaagatcggcttccgggagggccagggtctggggaagcatgagcagggcctgagcactgccttgtcagtggagaagaccagcaagcgtggcggcaagatcatcgtgggcgacgccacagagaaagatgcatccaagaagtcagattcaaatccgctgactgaaatacttaagtgtcctactaaagtggtcttactaaggaacatggttggtgcgggagaggtggatgaagacttggaagttgaaaccaaggaagaatgtgaaaaatatggcaaagttggaaaatgtgtgatatttgaaattcctggtgcccctgatgatgaagcagtacggatatttttagaatttgagagagttgaatcagcaattaaagcggttgttgacttgaatgggaggtattttggtggacgggtggtaaaagcatgtttctacaatttggacaaattcagggtcttggatttggcagaacaagtttgattttaagaactagagcacgagtcatctccggtgatccttaaatgaactgcaggctgagaaaagaaggaaaaaggtcacagcctccatggctgttgcataccaagactcttggaaggacttctaagatatatgttgattgatcccttttttattttgtggttttttaatatagtataaaaatccttttaaaaaaacaaca

SEQ ID NO: 42598 - DNA, 642 bp, Homo Sapiens
tggacctaactttgcgtgtgtgtgtgtgtagtagggggtcatttctttttgggtaatgggaaagttcttaagagtgtcaatggggagggatagagggtgggggctcatggtttccctctactttgggagagggcacagattgcagaggtaatgctgtggcatattgcttctgcctcagtgtatcactggagtcacaggaccctgcccacctgagttcccaataaagaaaaacctccccttctgaggctgctttcccaaaactccccctgcatctttatctcttcatctatcccacctcttgtctgaacatcccacctttatcctgtgttctgcctttgttttaattttaactcatgttcatcctgcaacagaagcattctctaggtcccagtttccagttgattgcatatccttgatcagccctttttcccatcctgccctatggttctctagccacctgtgcatgcatgtgtatttctgcctggttctatggtgtgtggatgtgtgtgcatgaatctgtcatatagagggggtccgagctggaatcctagagcattgctgccctggggcctgatgttcttggcttcctcagagcatgtaacaggaaattaaatgggatgagtgttaaaaaaaaaaaaaaag

SEQ ID NO: 42599 - DNA, 474 bp, Homo Sapiens
aactaatgtgcgtgagaatgggcctggcacacctggggtgctcgggggtagggctgccatgctgcagagctgatggagtgatgttgtgggcacaaggcatctgtcagctgcctcctttaacagccatgccttctggaatctggaagaggacaccactcctgcagtcactgggcagccacatagcagctgcaggtcccaggagggcctgaggtcaaagctgtggaaggccctcttggtatcagggctctctccccatggcctcttccccacctctgattgctggttgtggccccatagctcatcacccctgtctcctgctgaatgtgcagggctgatgtggcactgaggagctgactttggtcaaaggccaggctctgcccagcaggggacttgactgccctgggcgccctgcccctcccgctgcgtgtccaggtccaaagtggagagcctgcctttgggtttagttcccgaatc

SEQ ID NO: 42600 - DNA, 1117 bp, Homo Sapiens
  misc_feature (49)..(49): n is a, c, g, or t
attcccgggatgbggcggcggaggggcggcggagggcggcagcagcggntgagcgcgascccggagccccgggcggccggcctcccgcgcccgcgcascccgcgtctgcgtccggccggagacgccgggccccgcgccgcgccgcgccatgtcggtgaacatggacgagctgcggcaccaggtcatgatcaaccagttcgtgctggccgcgggctgcgcggccgaccaggcgaasagttgctgcaggcggcccactggcagttcgagaccgcgctgagcacgttcttccaagaaaccaacattcccaacagccaccaccaccaccagatgatgtgcactcccagcaacacccctgccacgccgcccaacttccccgatgcgctggccatgttctccaagctccgcgcctccgagggcctgcagagcagcaacagccccatgacagccgcagcctgctccccacctgcaaacttcagccccttctgggcctcgtccccgcccagccaccaggcgccctggatcccgccctcctcccccaccaccttccaccacctccaccgcccacagcccacgtggcccccaggagcacagcaggggggcgcccagcagaaagccatggcggccatggacggccagagatgagactggacgccgccgggcgctgggctggagctgggggcagcccagggttgtggggacacaggagggccagggaggggggagccggggagggcagggggtttcccgaagatcgcactggaagattttataaaagaatttttgtgggtcggggggacagtaaacttcctgggccacgtgggtccttcaggagtttttcaggcaagtttttcctctgtttttaatatataactataatatatatgaatagataaatataactaatgtgcgtgagaatgggcctggcacacctggggtgctcggggggtagggctgccatgctgcagagctgatggagtkatgttgttggcacaaggcatctgttagctgcctcctttamagccatgccttytggawttggaraggacacactctgcrgtamtgggmgcamawagmrswgcgggccaggaggsytaggtyaaryktggaggccctttgg

SEQ ID NO: 42601 - DNA, 582 bp, Homo Sapiens
cacagtaagttcaaagaaaggatgtaagtcaaagacttgttacatagagggaaaatggactgggatagaggacagactgatagtttctttctttcatatcacatgtatagagaaataattatatcagaaactcacaaacctagacatggaaaaacagattactgtctattgtcagcatcattttcatctgtaagtcactactggaatatatttttcttttaatttccagtgactttagaatacacacagtttttccgacttttcaaaaatttgattaaatggttttatagtataatattgggaccccataccgttagcccttgtatgtataccaacactgccaaagtaaaacattaggtcaggcatggtggctcaggcctgtaatcccagcattttgggaggctgaggcaagtggataacttgaggtcatgagttcgaaaccagcctggccaaaacagtgaaaccccgtctctactaaaaatacaaaactagccagatgtggtggcgcacacctgtaatcccagctactcaggaagctgaggcaggaaaatcgcttgaacctgggaggtggaagttgcagtg

SEQ ID NO: 42602 - DNA, 858 bp, Homo Sapiens
tctaggatatgttgatacaagtctgcttttgctattctttttgcttaaatactcctatcattttctgaattacttggtatttagaactcctagcaccacggggaagaatagaggtatcatcaaacgtggcaaattttctttcaggaataataaagagcatgattccacagcttttctgggatgtttgagattcttttttagtactaagcaaaattctcatcacagaatgtagcccaggccaatttataactaaatctctatttgttcggatgatgcttctaaaacagcattgataggttaaagaagcttggtatttttaatttacttcaatgattagctcagttgcttaactggagttttaatcctgtgatatgtacattggattcatgactgtgcagcatttttagttatgtggtgtttggcagaatgacaataaggttttcccccattttggtttcaggaggacatgaatagtgtgtttattgtaactcctcatacacttttaaaaccaacatcttttttcataaatgttggtagtgtttgtccaggtaccttaactgtagcttgtgtaatgttgatgaatatctgtatcttacggcttccataatggctagttgatattcaaaaacctatttctgtgttttgaggggtggggaaaaaaaacactaagtgataatttgaaaaaggcatattgcttccagattctgatgtgtgagggaaaatactgtcacaatgaaaatcttgacaatttacttaacaagtaaccagtagttcatcaaaaaccaacttgtacagactaataaatcttttttcacagtaaaaaaaaaaaaaaaaggggcggccggctctagagtattc

SEQ ID NO: 42603 - DNA, 665 bp, Homo Sapiens
gcacttacatctctctatgctgttctacaagcaaacaaacaaaaataggagtataggaactgctggctttgcaaatagaagtggtctccagcaaccgttgaaaggcatagaattgactctgttcctaacaatgcagtattctcaattgtgttactgaaaatgcaacattagcaaagaggtgggttctgttttccaggtgaaacttttagctccatgacagaccagcctgtagttatctgtgtacacagtttacagctacaaaaacctactttggtatttattacagaaaagtgctcagttaaatgtaagtgttattccttcagcaaaatattcactgacccaaaactctttatggcattttacaatgcacacagcctcatgcaagtttagacaagtggatttatactgtcttatgagtgcccgcccctgatatattacctcattatgcaaaaataacatatctttcatgactattttgacaaaagtttaaaacacatatgaagttcaaatttcaggaaccaaggactgccagaaaatattagcctctacattacgcatgcatttagaagcttacctgaaatctgccttttataaaggaatagtatggataagtggaattgtacattttttaaacttgattgccattaaagcagaaattataaggt

SEQ ID NO: 42604 - DNA, 595 bp, Homo Sapiens
gcggccgcggctgtaggcttttttttccccttttgcagcaacttacacagcatttttacaccttttttttctagtttttttgttcggttttgttttccatcaggaatttgagttctctctaacccagcttactgtgggacataggaaaactcagtagaaatacctttggtgatcttgttgagtttaagtctgatcttgatcttaaactcagtaagccactatctgcaattttgtacattatatagtattttgaagatatggaaccttatgaaaaaaaaatagcaaattagttctttttcccccagaggggaaagttatgttctgcaaatagtgtgtgtcttattttactgttgaacagcaattgctatttatttttttattgcctagaacttcaacatgttgtataggaatcctgtagtgccactagttaaatgccgaattctcatctggatgttaccatcaaacatcagtacacttgtcatttcacatgtgtttaatgtgacagtttttcagtactgtatgtgttaatttctactttttttaatatttaaaattgcttttacataaacatattctcagttgatccccctcgtgc

SEQ ID NO: 42605 - DNA, 636 bp, Homo Sapiens
aacctctttcctggcctgagcccctcagccctgaaggccaagctgcgcccccggaatcgctcagctgaggagggagagctggctgagagcaagtcgagccagaaggagtccgcggtccagcgttcgaaatcctgcaaggtcccaggactgggaaagcccctcacgttacctcccaagccagagaaatcctcagggtcagaaggatcgtcgcccaactggcttcaagccctgaaactgaagaagaagaaggtctgagaagtcactgaggttcttcccacctggcagtctcaggcagtgcccattcctgtggggtccctgggtgaggagacggctggagccccaccatgccccaggctgcagcctctgtcccctccacctctgaggagcgtctggggaggcacatttatgcactttgtatcaccctccgaactccccccacaccttcccttccctggatttcatcactagtggttgaaggttttgtcccttcctctcctccttccctctccctctctgcttcctcctccagcctcccttgggttttcttttgataccaatttatagcattttttataaaagcctttgatttttataatgggtgggactgtatccctgcctcaccccaggtctccgtct

SEQ ID NO: 42606 - DNA, 833 bp, Homo Sapiens
  misc_feature (441)..(441): n is a, c, g, or t
  misc_feature (531)..(531): n is a, c, g, or t
  misc_feature (536)..(536): n is a, c, g, or t
  misc_feature (556)..(556): n is a, c, g, or t
  misc_feature (595)..(595): n is a, c, g, or t
  misc_feature (619)..(619): n is a, c, g, or t
  misc_feature (643)..(643): n is a, c, g, or t
  misc_feature (652)..(652): n is a, c, g, or t
  misc_feature (655)..(655): n is a, c, g, or t
  misc_feature (676)..(676): n is a, c, g, or t
  misc_feature (708)..(708): n is a, c, g, or t
  misc_feature (712)..(712): n is a, c, g, or t
  misc_feature (717)..(717): n is a, c, g, or t
  misc_feature (767)..(767): n is a, c, g, or t
  misc_feature (807)..(807): n is a, c, g, or t
  misc_feature (818)..(818): n is a, c, g, or t
  misc_feature (823)..(823): n is a, c, g, or t
  misc_feature (827)..(827): n is a, c, g, or t
tcggatcattatctgtatgatgtggtgtggtttgtttggtttgtccttttttttgcgtttttaatcagaaaacaaaatagaggcagcttttgtagattttaaatgggttgtgcaagcattaaaatgcaggtctttcagaatctagaactaggcataaccttacataatactaggaaaattatgagaaaggggaaatttttggttaaataagagtaaggttcaaacacaagcagtacatgttctgtttcattatgctcgatagaaggcttttttttcacttataaggcctgattggtcctacccagcttaacggggtggggtttttttgtttgttcagacagtctgttcttttgtaaacatttttagttggaaaaacagcatctgcattttccccatcctctacgttttagagaggaatcttgtttttgtgtgcaacataanaaaattatgaaaactaatagccaaaaaacctttgagattgcattaaagagaagggataaaggaccagcaataataccttgtcagttgctnttgtntgtaaaatctgagcttatanttctccttactgagtaaattcataaggatgggaacattntaaattaagttaatgggccttttnaaaaaaaaaaaaaggaaacactcntacctgtanttnggaggatgaatactggaaacnggttaccaatgtcaggttatactaaaactaantcanaaatntgaatgtacacataatggttcctcttctgttgtccaaggctgtaaaaatngacaccctgtcacacctccccgggtgctgttttacacctnaagggttaganccttntcantaaccc

SEQ ID NO: 42607 - DNA, 758 bp, Homo Sapiens
tccgggccccccaaagtgctgggattaacgggtgtgagccacggcgcccagcccaggaagagtttttaaattagagctctgtttaattataccactgggaaatcatggttacgcttcaggcatattcttccccagagtactacttacattttaaatttcattttgtaaagttaaatgtcagcattccctttaaaagtgtccattgttctttgaaagtagacgtttcagtcattcttttcaaacaagtgtttgtgtaccttttgccaagctgtgggcatcgtgtgtgagtacagggtgctcagctcttccaccgtcattttgaattgttcacatgggtaattggtcatggaaatgatcagattgaccttgattgactgtcaggcatggctttgtttctggtttcaatctgttctcgttccttgtaccggattattctactcctgcaatgaaccctgttgacaccggatttagctcttgtcggccttcgtggggagctgtttgtgttaatatgagctactgcatgtaattcttaaactgggcttgtcacattgtattgtatttttgtgatctgtaatgaaaagaatctgtactgcaagtaaaacctactccccaaaaatgtgtggctttgggtctgcattaaacgctgtagtccatgttcatgccaaaaatggctgggaacgtttgctttatttacattcagtcagcgttgctttcagatcacactttatccacacaggaaagccagtcagcctataatg

SEQ ID NO: 42608 - DNA, 849 bp, Homo Sapiens
  misc_feature (790)..(792): n is a, c, g, or t
  misc_feature (798)..(798): n is a, c, g, or t
  misc_feature (800)..(801): n is a, c, g, or t
  misc_feature (803)..(803): n is a, c, g, or t
  misc_feature (805)..(805): n is a, c, g, or t
  misc_feature (808)..(808): n is a, c, g, or t
  misc_feature (810)..(811): n is a, c, g, or t
  misc_feature (815)..(816): n is a, c, g, or t
ggcaaacatcagtgtccttctagctttagccgagaaagaaaccagtcccagggaatgaatggtggtctccccactcccggcagcactttaggcagcccataagctatgcgagaatgtgaacgctcaccttgctccgtcacggttctgacctaccacataaacaggaagaagccagtgaccggaacagctctaggaataacaagtcagaatagaagtgtcctttatattaccagaaaatatgggcttggcctaagtcgctgtctcctaacctgccggggtcattccccaccaaacaccccatactaaggagccatgagccacctggacattcaccttttctttgaccatctggagtctggggcaacttaaggaggcaccacacagtggtgcaggcacatttccaagcgtaggtgtccctggcttttgtggccaaagctagtgttatggtcaacaacaggccagggtctgtggggcactgaccttgaaagtggcaaaatggaggtttcacaggctgtgcgggagcaggacggcttgcttcatctaacaatctcagtttcctttaaaaaaagaaagaaaggaaaagatttcataagcaggtgtcagtgggacagtttaagtacttaaccatttctctttcttcttatggatgtgaactgtgctggggataaatcatttgtatttcttgaatgttctctatgactaacagtttattaagtcgggtgtggatatgtgtaactaatggaactgcccttttaaaatttccttaacaataaaaatgacttttgctccnnncacacnannanancanannaaanncaacatgtgggggcgccttctgcccctcagaaa

SEQ ID NO: 42609 - DNA, 721 bp, Homo Sapiens
cgctgctatgaattgcactgtgaaaagcactcttccctctcagttttcttttcatcccagccatgtttatcagatccttaagaacattgtatttcagtcttttacatcagtctgaattttggaaaagaatgcaatagttgtactccacagtcagtggaactgttccctgagtccgaggctcatgtgtcattctggcactacatttgcttaaattgctattttggcaacagcacagaaaactaatatttttaagcagagaatcttggcaatgagtgagagatgttaatttcacagaagcacaactcccaacccaacccttaggaaaagccctcttccatcgttacagtgctcagtgaatattaatttagttctgcttaagtggttgctatacaaactttgaatagccacctaataaataaaccttgcatgacaaacctgcaaaatattttatcagctgttattggaaagtgattttaagcaattgcttcctcagtgtcagggcacatgtgaatttccacaccaaacagagcatgaggaaccagttgacatgctgggttgtgactggcagctttagcagcctcggtactgaagccacaccagtgtccggatggaagtctgcatctgaggttgctcagtgtcccggtcattcatttacacattttaacttgcattaaagagctgttcttttctgtggcctagactcttttcactgatctcaaaa

SEQ ID NO: 42610 - DNA, 896 bp, Homo Sapiens
gtccaaccgtccgggtgagtttagtgattctggtttgcccttccctagttagagaaaaactgctctgacatgttcatatttatttatttgtatttccttggtctgggtgagtttcttcacccagtctttgagctaaagattaggtcgaaggtactgggggctggccccagaagcctgcagtttttattattaccagcagagggagctacagggagcagtccggtgccttcctattgtttactttttaaacttttgagaagtagcaatggactcgtgagagtgggtatacagctgtgtgggctttgtcctagactgaggcttacagacaggaagggtaagagagacctaagccagctcctagacccttgcctgaggaaatcagtccaccagtgtagagggcctcccttcactccagcatggaccattctattgccagattcttctggtcacagcatgggccttactggatactcaggattgggctttaagcagacctctgggtgtgacacagcctctttcagcccccagcccaaacagcagaaataggcataatttctgctgtgacaccccctacccacaaattggagagtatatcttgctatactctataccaagcctctttctagaatttttccaacaggttttgttttgttttttggcttaactcagaaccatggtgagcgttctgctttgttttgttggagamagggtctctgthacccaggctggagtgcagtggtgtaatcacagctcactgcagcctcaacctcccaggcccaagcagttctcccacatggtgagctttgaatgggcatagacagggttcccagcccaatagtcgggattggggtataggttctacatgggaaagtatccagtctcttgctttactcagt

SEQ ID NO: 42611 - DNA, 799 bp, Homo Sapiens
tctagcgatgtgacagcgtagaaccaggaaggtatggtgctatctgcggatttggcctttccttgatcaaatggatccttattgtcaggttttctgattattttactggatatttcaatggacagtattggctttggtggatatttcttgtacttggcctgctccttttcttcagaggatttgttaattatctaaaagtcagaaacatgtctgaaagtatggcagctgctcatagaacaaggtatttcttcttattgtagagactgcatcaacccgacattcctttcttataccaatgtgaaatttccagatcatctgtaaacctacaactttaatagaagactactaataacagaagacaaattagtgaagaaaagacagagtttcgaaattgaatggcagggtggtttttgcttacaagccatttctgttcattctttaagtatctatatttcatttgttttgcacatatgcatatgtgcccatttaagatatttgcatatacttgatagaaaccataaagttgtagcagttaagtccagtcacatttggttaatcagtgtttgatataattgaaagagttgagtggataaacagtcttccagcttgtaaatgccattgacttctgacccgacatttagtattataaaaaatgaaattcttaaaccatgtcaaatgattttagtttctgggctcttagactcatcctggcagtttctacacatgaaaacatccttttgttaaaataaggtgtatttgaaaacctgccagtggctgaatttattagaaaaggaatttt

SEQ ID NO: 42612 - DNA, 649 bp, Homo Sapiens
  misc_feature (576)..(576): n is a, c, g, or t
cggacgcgtgggctttgttctcccatgaaagaattcagtttgttagtacctatatttttaaactggtgaaactgacccaaatatgtaataaataccatagtagctcagacccaaggagatatttttctaaaatcagttttcgttaaagtacttctacttccgttattggatatggtatctcctaaagtgtaaaaaaaatctgttactatatagtgataaaccatctgctcatcgtaagtgtaaggcttaacaaataagtaatacatgctatatttattcaagtgtctattgcttaattgttaattgtgagcagatttattgaatgcctattctattttctgcagtttacaatacaataactctttgagtaagttgaagtttaattgtgcaacaaatttgtattagagtacaatttaaagtgtttttctctatagccttttttggactggggaagcaaggggtaatgttaattagtacactttgttcttgtactagctatgtttctataagatatggtgccctgtgtatcccagagatgctagaaaactgttccttgctcctaattgtgggttctgnttagtgggtaaatttttggagaaacttgtccacaataaaacattccttgctgtgttaaaacaaacaaaaaaag

SEQ ID NO: 42613 - DNA, 580 bp, Homo Sapiens
tccaactcctgacctcaggtaatccgcctgccttggcctcccaaagtgctgggattacagacatgaaccaccacgcctggctggaatacttactcttgtcgggagattgaaccactaaaatgttagagcagaattcattatgctgtggtcacaggggtgtcttgtctgagaacaaatacaattcagtcttctctttggggttttagtatgtgtcaaacataggactggaagtttgcccctgttcttttttcttttgaaagaacatcagttcatgcctgaggcatgagtgactgtgcatttgagaatagttttccctgttctgtggatacagtcccagagttttcagggagtacacaggtagattagtttgaagcattgaccttttatttattccttatttctctttcatcaaaacaaaacagcagctgtgggaggagaaatgagagggcttaaatgaaatttaaaataagctatattatacaaatactatctctgtattgttctgaccctggtaaatatatttcaaaacttcagatgacaaggattagaacactcattaaagatgctattcttcaaaaaa

SEQ ID NO: 42614 - DNA, 829 bp, Homo Sapiens
  misc_feature (534)..(534): n is a, c, g, or t
ttttcaaagttaattttctaaataagataattctcatttgtgtttgtcttttaaaaggccaataaaatatctttcagtatcattgtaataattttttagagtttaatttgtaaagcttagcaaataaaatcttgtactatgaatagcttcttgctttatgactttaggattaacttgtaaaaaacatatcctgaactgagatatgcaaaatactcattttcaagttatggaaatgtgtttgtggcatataggactgtggggtctgtgtgtgtagtgagagtgtgtagccactattataactggaatttaatttacattcataaactactatatttcccatcttgcaaatcattttatgtctcatctgtttttcctttcggttatatctttggttttgaataccaacatttaaaatgatggtattttatcttttaaacttaaaaattatttaatacagctatatggaccttataaaattgatttcttatttattattagacattactactaaaaggtacatctaactattcaggnacatttttccatttccaaaaaataaaatttattatgctttataactcttctgtattttctaaattttttcattgtctttgataaataaaacaggcttggtttgcttaaaaaaaaaaaaaaaaaaaaaaaaaaaaagggggggggctaaaaatttcccccgggggcccaattaagggtaccccgttttctgttaaaagggggccataaggggagggataaaagaagagagggggggtttaaaagcggggcgggaaaacgtccgggcctttgggaggacccttttgggggcaaatcg

SEQ ID NO: 42615 - DNA, 475 bp, Homo Sapiens
ttgaaaaccttgctcattttttaatgcgaaggctaagtgtcaccccctttctctgcctctggctgggccttgctaagggccaaggaaagaaagacattttttagggggcagccagtccaaatgccaaaagaagaccagttcttgccctgattgtatgaaatttgacattttggcactttttttttttttttggccaatcagattttctatgttctaaggacatggctgctgtagaatagcacagacgtggatgataaattatccccagaagcagcatgacagaatgcctcggggagcacttggaagggaaattgcagttctgttgaaatagaggaaaatcccttggtaaagacacagcctgttaggctcgtgtgggcctccagtatgttcaccaggggaatggctgggatttctcggcactctgcatcatccatcttttcttataggkgggaaaataaacaactttgtgatcctc

SEQ ID NO: 42616 - DNA, 659 bp, Homo Sapiens
  misc_feature (593)..(593): n is a, c, g, or t
tgcagaggtgaagtgcacatgtggaaagggatcaaatgtagcacagtgtaaagaaagacagcaacacaggtagagggacccagtgtgtgctgggaggtggctgtggaaggtaagtatagacctacatctctgttggggaggtggtcagggcagaatggcctgggtgtttagcagcttctaggggtgagggtggcaggaccccaaaaccaaggccctctgcatcgttgttgtaataatcagctctggcatattcagctgcaactgtccctgaagaagaggtttctgagctggctgaccccatgtaggagggtgttaccttgtagaaaaagctggagggacctggtgggacagtgcagtgaggcagggtagaaatggtcagttgtttagggccagtggccacataccaaaataccaccaatgtgcccagggccaaactgccttaattctgagtgctgtgtgttctgcaggtgacagtttcctgaggagaggggtgtatccaggcttacctcccagcaggagtggtaccatatggtgtttatgtactactctatagaactcttggcttgcacttctacagctctgtacatttatangaataaatgcaatcacactagttgaaaaaaaaaaaaaaaaaaaaaaaacacttaatgggcggccgc

SEQ ID NO: 42617 - DNA, 996 bp, Homo Sapiens
  misc_feature (738)..(738): n is a, c, g, or t
  misc_feature (832)..(832): n is a, c, g, or t
  misc_feature (922)..(922): n is a, c, g, or t
aggtactggggactgtctcagtccgtgtggcatgataaataaaaggttaggatcaagtctttgtatttttcaagatgtggtagctgattattcctgttttaagtactctgaaattgatctgtgatcaataatactaatatgttatcttttaccgtattctgcctctcactattgattttaattagttaggagtatttgagctgttatttcttgagcttaatatttttttagagttaactctttaaggagataatcatggctgtagacaaggccagggctggctgacgtgccttagaaggtttgaatgcaataaagcggtgtttggcgttctcctgcattgtagtgcgggtacaaaatgctatttgttcgtcatactgttgtcagcagatgagccgcccactacagacggctactgcccagggacctgcccaggccccacccaagggctcccaagggttgagatttctgcagacctatagccagcacacttagtcctgccctatatagagttcctcttcgggaagcttttgataaggaattctcagaccgataggatgtctgtctgggctttgctgcgggacagtctaactgtgggggctaggggaaagcaggagagtatcgatcaaagagtaagccacacacggataatcagttactagggatggaggtgtgagggctcattatattattcattttactgttgtatatgtttgaaaatgtctataataaaaagctttnaaaaaaaaaagaaacaaaaatagttcaggccagcaatgggccctccatgttcagtggattttatccttgtttcaattggggtaggagttccagnaggtgttggaatttggaggttgtctaaagaattgaactggcctttgtccctgcttcctgggaggggagactttcagtccctgacattcangggggtataagggaggggcctttggttaattgggaagggccatgggaatcacacctgagcttatgcctataaag

SEQ ID NO: 42618 - DNA, 889 bp, Homo Sapiens
gcacgaggggtctgcggcatgtttggcttccctggggagaggacatacaataccaaagtgtacaaaatgtttgcctcacggaggaagcagcgctactggccattctccatggactgcaccggcacagaggcccacatctccagctgcaagctgggcccccaggtgtcactggaccccatgaagaatgtcacctgcgagaatgggctaccggccgtggtgagttgtgtgcctgggcaggtcttcagccctgacggaccctcgagattccggaaagcgtacaagccagagcaacccctggtgcgactgagaggcggtgcctacatcggggagggccgcgtggaggtgctcaaaaatggagagtgggggaccgtctgcgacgacaagtgggacctggtgtcggccagtgtggtctgcagagagctgggctttgggagtgccaaagaggcagtcactggctcccgactggggcaagggatcggacccatccacctcaacgagatccagtgcacaggcaatgagaagtccattatagactgcaagttcaatgccgagtctcagggctgcaaccacgaggaggatgctggtgtgagatgcaacacccctgccatgggcttgcagaagaagctgcgcctgaacggcggccgcaatccctaccaaggcccgagtggaggtgctggtggaaagaaacgggtcccttgtgtgggggatggtgtgtggccaaaactggggcatcgtggaggccatggtgggtctgcccgccagctgggccttgggaattcgcccaccaaacgcctttcaagaaaaccttggttattgggccccggaagatgttcaacagcccaacaaaaaggggtctcatgaaattggaaaatggaaaattgccttccga

SEQ ID NO: 42619 - DNA, 709 bp, Homo Sapiens
  misc_feature (51)..(51): n is a, c, g, or t
cccggggcaggcatccccagtgccctggttctcatcagcattgtccttatnatcctcatcgccctcaacgtcctgctcttctaccgcctctggtccctggaaaggacagcccacacctttgagtcctggcacagcctggccctggccaagggcaagttcccccagacggccacagagtgggccgagatcctggcgctgcagaagcaattccacagcgtggaggtgcacaagtggaggcagatcctgcgggcctccgtggagctcctggatgagatgaagttctcgctggagaagctgcaccaaggcatcacagtctcagaccctccctttgacacccagccccggcccgatgacagcttttcctgaggaccccggccacgcagctgttcccccacatggacagatggacacacagagcctcggcggccactgctggcacggtgtgagcgccaggcatctcccacccgcccctcccgacggcccaaccaggggctgtgcagacgtggggaccacggaaccgagatgcactttagaccagggagctggcccggcctctggcaggccccccactaacttattttgcccggctgaggttgtggggggcgcctcctggggtgcacgattccctcagctctgggtttaatgtattatatttatttggggccgacagtgccccaataaagggtcagaagtgaaaaaaaaaaaaaaa

SEQ ID NO: 42620 - DNA, 899 bp, Homo Sapiens
ccgtcctcggggggctgcgcacatcacgctccttgccgggcgtccggcacagctgcggtcaccaaagcaggtgctggccctcggacctgagagcccagccagggcccatgtggtctgcaaatgggagcggctgtttttgaacacggggtcattctgcagtcaggacgaaccggtccccgtcgcagacggagtgcacgtgccctgcgccacatcctcacgctcggtggagggacgcgtgcggcgggacggtgcctacgggtacttccagctgtgtcccatgtggcatcccagagctgcgccctgctggtctctgtgagcgccacgctgctgtgctggaaatgccgctttaaaaagggataccgtgggactctgcccgtctctttcataacgcaatatttatttgtattgggtgacgattgattctttcgacctaacattttgggttttaaccaaataaccggtccaggagtgagcagctccgttctgtcagatgctactccaaatgttaccagaacgatgacaaaaggggagacgctctattttttcacagttaaatgacagttgtagattgatacgcagttgtgcatgggaaggggaaacgcacagctttatttactgtaaagtggaatttcaggaaggcttgtgtgaaccgttgcgcataaataaacccctttctacccgggcaaaaaaaaaaaaaaaaaggggcgggccgcctctaagaattatcccctccgagggggcccccaagctttacgcgcgtaccccaagccttttctttgtaaccaaaggtgggttccccctaataaggtggaggttccgttattttaataaaaggcctaagggggcacactgggggccccgggttcccttttttttttaacaaaaccggtctccgtggt

SEQ ID NO: 42621 - DNA, 685 bp, Homo Sapiens
cggacgcgtgggcggacgcgtgggctgtgtaatattaagaactgaatgtgaagtttatagctagcctgggtgtaccttttaagaattttgtaaaccgtttgtctgtcttttgttactgttttatggtgccaagtatcctacgttacaacaataatatcatgggagaaatagaaatagcctagtttgcttccaatagaaactgcttttaacatgggctgtatataaaaatattaaagagaaacaaaactgtacatttcctcattgctccgctacagacaacccatgtcataaccttgttgcaaatatttttctcctatagcagtaagtacagcattagaaggtgattagagagtctgttgatgaaacacaaatgtatgttttattgattttactttagaacactacagagttcctggaccgggtgaaggcattagctgggtgtttgtgtgggataaatactaccactgcaagtgactgctgtccgctgcggaatctgttcttggtggaagcacaggtccgtgtcgctgctgtggttgccgctgtccgcggttcaacacggagtccgcccgcgggtttcagctgttggtcgttctgaggggcctttggaagtgaccggtctggtccctaaggcaaataaaattgaacggtgctgaaaaacacaaacatccaaccacacaaaacaaaa

SEQ ID NO: 42622 - DNA, 531 bp, Homo Sapiens
taaactgtatagtgtacatggtaatgatttattgctatgccccagatccttaatgtagttctcatcctccgcatgccctcagccacaagcgggtgactgactgttccctgatgatttggcccacctcctgtgtttggacctctagggaggagggttttggtcatactctccttatcctcgtgcacagaaatgctcagggtccccatgtgcctgttgttcagccctctctcttgttccctttctgagcatgtggtccttccccaggctgtgggacagctgccttcccacgaaagtgtaaagcagtattaagatcattactgcatgtgccctaaaaacccaagttttctattcccttaggacagaaaattgcatgtgaggtgggataatcgagtttcagtgacccacgtcagttacacattaaagccagaccccatgataaaattccacaaaatggaaataaaactcaaatttctttagcattgtgtaaataaatctgaatgtgtttaactttgtactggtaattttctgtat

SEQ ID NO: 42623 - DNA, 374 bp, Homo Sapiens
ggaggttgcagtgagccaagatcgcgccattgcactctagcctaggtgacagagtgagactccatctcaaaaaaaaaaaaaattccataggatgttcaaccatgttttcagaggccgcactgcatgaatgcgggaaaatgttgatgatcactaatcaataatctgatatttaacaaaatatggacaggccacttatgctcagttttaccttagttattccttggtatccacaggcccaagtccctttaaataaaataccctcatatttccatataatctacatacattctcccatatactttaaatcatctctagattacttataatgtctaatacaaaataaatgctatgtaaatgtaaaaaaaaaaaaaaag

SEQ ID NO: 42624 - DNA, 628 bp, Homo Sapiens
ccgcattaccataccatcagatagcatggcttattgtgggcatttctgcagtgaatacattttccaaaacagttaaattgtctgtttggatttgctttaaagtcttgtgtaagagagaagaaactatttctataataaaaagcactctcatcagatatctgacataattagatacaatataacattttactaagttcagtattcatgttttaaaggtgtttatactgatttgattgtgctgtctaatatactgtattgttaatattgaactgtttatttttctcttagtcttcttatttaattaacttcattgccgctggattctgttcagcctttaaaaatatttcttagtggtcattgctctgcagaactcaaaaagaaaattgtacttgttcatagacatttttaaagggttaatttattgttcagccttatcccttggcacgtaaacagactactagacttattgtaggttcgtttgagctttgtgttgtaaaattaaaaatgcttctgtaaagttttcaaggtagggagtgattttattattgtgtatatctaatatattaagtatgtgtgatactaaggtttgactgctataattatttgtactgttgatcacatgtactta

SEQ ID NO: 42625 - DNA, 569 bp, Homo Sapiens
gcacgagattaaatgtttaaagtaagggaaaagtctgggctgccttccttaatattgcatctcactcccacccttaaaaccacagattgcaaagcatagcattttagcatcaactacaatcaaaagagcgatttgctgaaggaaaaatcggactgcaaatcattccaaggccaaactgcaactgagccacccactcccaaacaggaaaccctggtgaaggttcaggaagcacggagattctctccaacaaaggtccagttaggaaacgacgctgagaggatgacgacaacgtgcaacagcagaaagatgcttgcaagcagagtcagggtcaccagtgaatgccacaaaagttctctttcccactgtttaatttgacaagagaagaatttgaaggatatgaacattttcaagaactctgctgaggtcacttagagcgccatcacaacttatttgtgtgactaattgcctagattgtaagctctttgagggcagggcttgtctcttacacatctttataatcccctgcagcggctttcagtattttgtacttgtaggcacctaataaattt

SEQ ID NO: 42626 - DNA, 630 bp, Homo Sapiens
ttggcacttaaattttttctttataaagctttttgaaggtcataaacaaagaccataattgatgatagacctaatacatttcctctgtgtgtgtgtgtaacattccaaatactttttttttcttttccactgtttgtaaggtgcaacaatttaatatttttaagggactttttaagagttccttaagaaccaatttaaaattacttcagtgcaatcctacacagtatcaacattagaattttgatattagtcttatgttatcttccattctatttttatctgctttttgctgctagtttcaaactgccagtatttttccttttgcttttaaaatagttacaatatttttcatgatagccacagtattgccacagtttattataataaagggtttttatttgatttagcgcattcaaagcttttttctatcacttttgtgttcagaatataacctttgtgtgcgtgtatgttgtgtgtgtgcatgtgtggcgtatatgtgtgttacaggttaatgccttcttggaattgtgttaatgttctcttggtttattatgccatcagaatggtaaatgagaacactacaactgtagtcagctcacaatttttaaataaaggataccacagtgcatg

SEQ ID NO: 42627 - DNA, 707 bp, Homo Sapiens
  misc_feature (595)..(595): n is a, c, g, or t
aagatggcaaagtcctgaccccggaggagctgctctaccgggctgtgcagtctgtgaacgtgacccacgatgcagtgcatgcacaaatggatgtgaagctccgctcactgatctgcgtggggctcaagtgctgcacctgtggctggaggtgctctgctccagcctgcccaccgtggagaagtggtaccagccctggtccttccggcgcagcccgggctgggtccagatcaagtgtgagctccgagtcctctgctgctttgccttcagcctctcccaggactgggagctccctgcgaagagagaggcgcagcagcccctgaaggagggcgtccgggacatgctggtgaagcaccacctcttcagctgggatgtggacgggtgaccccctcctccccagcccaacctcgggcctgcgtctgaggtggcccaggaccccaagctgcagagcccagggaagagcagctccagagccctggccggggccgcgggatatcaatatcaggctgccccactccacgttccccagcacatcccaggtggtgggagcagagggtaccctgccccaccaggtccttagggatgctctaggccaaancacagtttgtaccaaaaaccttgtgaggaggtgggggagccatgtctgtgctcaggaagagggacggggatggggtggctaataggctctggctctttggtttaaataactg

SEQ ID NO: 42628 - DNA, 727 bp, Homo Sapiens
cgttcgacggaacaaaggacatgacagcccggccccgtgcggccactgcggagcgttaggaacattccctaaaatggcggccggcgcgtcggaacagggcgggaggcggcggcgcgtgggggcgggacggggaggggcgcggccagccgggcttctgcttccgcgaccccggcggtgcagggcgggtggagtcgcggagtagtcctcatggccgccccgccggagcccggtgagcccgaggagaggaagtcccttaagctcctaggatttttagatgttgaaaatactccctgcgcccggcattcaatattgtatggttcattaggatctgttgtggctggctttggacattttttgttcactagtagaattagaagatcatgtgatgttggagtaggagggtttatcttggtgactttgggatgctggtttcattgtaggtataattatgcaaagcaaagaatccaggaaagaattgccagagaagaaattaaaaagaagatattatatgaaggtacccacctcgatcctgaaagaaaacacaacggcagcagcagcaattgaacaatcttgagcatagaagtcaatgtaaacgaagttaagatcaaccacataaaacatttcatgtgcaataagctctcaatcaagtaaataaagtttaagttgtagtcatttttttcccacacttgtgtggaatgaaaacttgccagtttattctggccctgtg

SEQ ID NO: 42629 - DNA, 743 bp, Homo Sapiens
  misc_feature (687)..(687): n is a, c, g, or t
agcaacagcttttacagcagcagctcgctactgcatatgatgatgataccacttcactattacgagactgttatttgttggaagaaaaggaacgtctcaaagaagaatggtccctttttaaagagcagaaaaagaattttgagagggagagacgaagctttacagaagccgctattcgcctgggattggagagaaaggcatttgaagaagaaagagccagttggttaaagcagcagtttctaaatatgactacctttgaccaccagaactcagaaaatgtgaaacttttcagtgccttctcaggaagttctgattgggacaatcttatagtgcactcgaggcagccgcaaaagaagcctcacagtgtgtctaatgggtctccagtttgcatgtctaaacttactaaatctcttcctgcttcaccttccacttcagacttttgccagacacgttcctgcatatctgaacatagttcaatcaatgtactgaatataactgctgaagaaattaaaccaaatcaggttggaggagaatgtacaaatcaaaaatggagtgtggcatcaagacctggatcacaggaaggttgctatagtggatgctccttgagctacacaaattctcatgtagaaaaagatgacttaccttagacatgtggactggaatttttttcattaatgtgttcatcangtttcacatctaagttgaaacagggtgtgtcataaagtcagttatctctaataact

SEQ ID NO: 42630 - DNA, 811 bp, Homo Sapiens
agaaaatttattggttagtaatataaatattttaaactaaatatataaatctataatgttaaacatatgttcattaaaagcatagcactttgaaattaactatataaatagctcatatttacacttacagcttttcatttgatcaggtctgaaatctttagcacttaaggaaaatgactatgcataattatacctgaccatgaaaaamataagtacctcaaatgcatgcatttgcactggtgattccaactgcacaaatctttgtgccatcttgtatataggtattttttacatgggttgacatgcacacaacaccattttcattcagtatgaaccttgaggctgckgccatttttccacttaaccaaaccagcctgaaggkgaacctcgaaacttgtttcataaatctttcaaaagttgttttacatcaatgttaaaatttcaaaatgcggcagggtaatttaatgtataamatattagtaagaaaaagtatgtattgcatacttagtagaatagatcacaacatacaaattcaattcagtgcatgccttaggtgttaagcatgagattgtacatgtttacggttaggtccttgcatcggtggtgccaggtgagtatgagaagatgtcaaggactggacgtattttgttgcctaaaaaaaaaaggctgtttgtaggcgttttaaatatgcttattttgtgtgtctctcactacctattacacactgttgctttgtgggtttgttttgtatgtgcgtgtgttatacagtagttaaatttccatgcagaaaaataaatgtcctgaattttca

SEQ ID NO: 42631 - DNA, 552 bp, Homo Sapiens
tttcatgacaatggagttctagaaagcagcatctgttttttgttgcgtgtttccattttaaagtgagttgagttctcaaattggaaagaaagattccttgagacgtacttttaaaatctaaagtgtgaaagaaacagcagagtaaaagccagactcattgcaccttcaatgtctgcatagatccagaagttgtacattttacctaacaacatcacttttgttgaacattccaactccagaatgatccccaatcaccctaatctcagaatgctggaatgatgtctgttggaaaacccaggactccacacacaaaactcctgggattttgtttcccatctctttctaggtgtttgcaatgtacaaataatacagctgtgctaatctcacatttagccatgatagatgatggttctagagtgtacttccatttgtaagtcctcctgataagtgctttcttgtttatcactatgtaaatctgaaaatttttgtacttcatttgttttatccattctgaattttcaaacctttaaatgtcaaagaaaaattgagata

SEQ ID NO: 42632 - DNA, 609 bp, Homo Sapiens
tgtttaaatggtattgaatttcctattgcctgattaaatatatctgtaattgtaacatcatgtttctgagagctttaactacttccttatttttatgcaatcattttaaagattgtggctatatctaatttaaatttgctgatgattgaatctaaattcaagtgaagaccacagcattaatcccaaaggagattttttttatgtttagaggtggagatattagggtaaatcagtatattgctcctgtcatcaaagtttttgttcatttgtgtgccacatcgaatagcagcacttctcaaagtttgtcaactggaaaaaagtgtttaaaactgtttttttcttaagcagatttggtgatgtcatcaatatctatgatatcgattggtaaaaggtctttctttgttgaggatttgagctctctttttaagagtttattttattttaaaggaacatatgctttgaataacaattctctgggcatgtttaactaacctaggtgggaaaaccatggtgctgtttaattgtaaatagattgatataagattggaccagtacttgatgtgtataattttagtatgtagggtttatgtgctttttttaaaaaaaaaa

SEQ ID NO: 42633 - DNA, 643 bp, Homo Sapiens
tctttttactcttttaaatgcttgtaggtggcttggggtgtgctatcgtgctgttcctactcagtaaacaggtgtgatgagttaacaagaaataacactgtttgagaactagctttgaataataatttttccctttgtacatgacctgctgaatttcggtacagtgtttttgtagctaacttattttgtcatgcacataatgtatatttgttatgcactacttttgtatatcttgtttttccaacagtgaacatttttaggcacacttttcactgacgggatatctctttatgcaatacctcaatttttcatattgcaaagagtagctttttgtacttttattactgagagatcttcatatacttcattttttaatataaataattttaataaattttattttcttatattctgctttttatacatttcagtgctctgcatacattttaaattatgaatgtcgtgcactggcaatgctattttagagtctgcagagaagagaaagcatgttgcttaaacatccttccccagcaccagctattggtgtacctataatttaagaaatagtctatgtaaagtcacaaattaatgaaaaaaattcgcatgaaaatgacagataacactgtagttcctaaaaaaaaaa

SEQ ID NO: 42634 - DNA, 916 bp, Homo Sapiens
  misc_feature (711)..(711): n is a, c, g, or t
tactgttaagagtaatcctctttcttgctggtgtttctaaagaaaagaatcagaaatcaatctttctactaatgtaaatttgagattatttttaaaaatggaataaaagaggttttggtcatttgctttattttattattttaaagctactgtgattgatagcattgtaagaatcgggacaatattgtattcaactgttttattttttatatttttaaaatttaaagtataattagtttttataattttcatcagatttttgttatattttttggaagtgaaacttttagcaagtgggtgtctagtttttactaatccctaattttttttccagtgtattgctcatattatcagaaggaaaagttatttaagtatgtcagttaattgtactacttggctgaatttccatatagtttttactgtgtatggggaggttgtagtatttattatagcattttaaataagggtaattcattttttattaaagtcattttcacgttaagttcctattttgtatgttctactcttaagttatataacacagttccttttttaaaagagttcatttgttgaagtgctagtgaaaaattaatgttcattaaactagttcgcaaatgactatttataccagttatgccttataacttctcaaatattgtccctgtgcgcatgtcgcactggaactaaaacttttaaattccgaatttcccnttcacacaacaacaacaaaacaacaaccaccaaccacaaacgcgcgccaccacaacaaacacaccgaggagcccagaacacagaccccacccacgcacaacggaagcccacagacagcccaacaacacacacgcacactcaagtggaagcgcgagaacaacgcgggccgcacacaactgtgggccgaaccatcacacagcgcacc

SEQ ID NO: 42635 - DNA, 620 bp, Homo Sapiens
tacacacacacgaaatgtgtaacagttcaccacttccagagtgtggtcatgcccaaaacatgtttaagaaaggaaagcagtagctccttgctaacgatgtttcaggaggtttggggcacttggttttaatgagcttctgtcatttagggcttctcttggccatggtccccttccttctggaactgtgatgtagtcacatcctacagcctttagtgctggttcactagtgtcagataatcagttcttggaatcgagactgccgtggcgaaggggtggcctcggaggcaggctctggagctgcttggatgtctttaggtggggtggtggctggctctcttcagcatgtaattggggaaaccctcgcgtctactaggggtgatacagatggtgattttaaagagcaaaactagacttctatgtgagaagtgctggaaaatgatttaggacatgtgtaaagttagatggaaagactgtaaatgtttaatatgaatatagtgttcttttgaagtaaggccagctgttgaacggttaaactgtgcatttctcattttgatgtgtcatgtatgttaatgtatgaaatgattaaataaaatcaaaactggtacctgtttatacataaa

SEQ ID NO: 42636 - DNA, 786 bp, Homo Sapiens
ggagacaccaaaatcaattatagctgttcccactcaagttaataaagtaaatgatttcctccactttgcatggaggggtgtaaggaaagcctattttatctgtgcctgggagaactgtgcctattttcagtcttttagaggaaatttcaactcaaaatttttaagtgtgaaaggtttactggtgtcacataaacattagcagtgagaccaaataatgaaacattgctttataccttagtgctttccagttcactgttacctctagtcatggtagatgacaattttcctccctcatcttttgtagcaaagaagcaaattaagagccttttgcaagttagattaggggactgaaaaatccagggagataacctgattcttctatactatgactggagtaaagctgccaagagttaggttgaatttggagccttttaaaagttggttccataagtgagaaggggggctaacatgtgaccactgtgcccctgagaatccatgagatggaaaagtacagacaagaaggcacttaacgctgttctcagttggaaaatgtcagccctccacacctgtttggatgtgaagtgcattattaattttaatgacaaaatgaaactgctaattagtttaaatgtaatgtttaaatggtattgaatttcctattgcctgattaaatatatctgtaattgtaacatcatgtttctgagagctttaaactacttccttattttttatgcaatcattttaaagattgtggctatatctaatttaattttgctgatgattgaa

SEQ ID NO: 42637 - DNA, 660 bp, Homo Sapiens
taaatgtgaggcacaccacccacccctgtgtggaaagtgttgtggcgcttcctgccacccacccacctctctgccgttgctccttgtgacacttgtctgtcgtctcccatccaaactccaagcttacagctacctcagtactgctttgcttgtctgaaacacctcctttgccttccttcagtgtcccgctcaggtgcagcctcctccctaaagctcatctcagcttttgatctgaatgatgatggaaacatgcagacagcctctcagtcttactatttaatgttgtagctgggaaaaaacccagagaggttaactgatatactgggttgggactaggatgtgggttttgtgactctgaatcccatgttctcaaactacgctgccttccgaagtctggcatttgttagctcatgcttccttgtagtccagcttcttatgtgcctgttatattctccagtaagattgtaagccccttaagggcagggacgtctttgcatctctagcactgctatagtgttctatccttagttatgaactagataaataaatggtggtggcaacaaaaaaaaaaaaaaaactcgagggggggcccggtacccaattcgccctatagtgagtcgtattacaattcactggccgtcgttttaccgtcgtgctggg

SEQ ID NO: 42638 - DNA, 598 bp, Homo Sapiens
attaaccttgggacacagtgggttagcctggagaaaatgagaggccctgcctggacccagggagaggagccagtgacacaggcagagcggtgcagccctccttcccttccatttggaggaggtggtgccaggagcctgcccgcttacctctgctgaagcataagtggactttgcttttggggcttatctctgatacatgctggagccctgcctctccactgctagatggaacctggaatctctcatctacctcttagtctgtcagtttctacgtgtgagaagcaagcttgtgggccagtgtccttgtacatgctgtagcacttaaaaaataattccagggttccctggaaaaccagtcccagggttcctatgatctgtagtttctacctggattataactggttttgggtacctgaattttgattggttagccttaattatagtctggcgtgatcatgtagaatcttttctggtgaacagatcataaagttctatcaaggagttctatcaaggcatccatgtcagtggtgctatgctggttacaacttgagatttttgaaataaaaaatttgtcataaaaaaaaaaaaaaaaaaggac

SEQ ID NO: 42639 - DNA, 683 bp, Homo Sapiens
tgcaccttaggagggggttagagagtctgttttgattgatgttttctgaggccctagaggagtttgtatcaatttgtgagtattaatgtcagtactaccagcactttgccaaaactgtcagagggacccgtttctagagtgagtcccagttacatcaaacagtgacttccagttattccccagtaagtctgagtggttccttcaagctgggtgtctttccagcctttgccagtctagccccagcagggcaccgtgtatgaatgcagtttggtgctgttttagagtatgcctgctccccagccccctgcctggaaccctctgagcaacttgctctgacctataatgtcttaggtgcaacacggaccccaccagagctcttggatacccccctagatccatgtggctttatgtgaggggactgaatgcagacacaccatagcccccttctactactttccctctcgccctgccacctagttccacatggaaccaacaagttgagtgcatccctgttgggtgttttgtgttgagactggctgaaatgaggagactttgaccatgtgacgtgtcaacagactcaaggagacaaccacctcaactgggtcatgtggcatgcctgtgtatgtgtgtaacagaattctgattgttagactgtaatgctattcctctatgggagaaaaaaa

SEQ ID NO: 42640 - DNA, 701 bp, Homo Sapiens
gctttatctgatgaagccaaatatcctcttattgttggtcaaaggaggcaaaagaatttagaggcaaatgacaagcgataggctattgcaacctgagaaagagaactgctccttcatcgtaaatttagaagaccaagtagataatggaaccaaagttgttacttttttctagtagttatttttcctttttctttttgtgtacctctacagagaccaaaactcattctcttaaagagattttatggggctactgcagataaaaataggacacaatattaaaggagctacagaaggaagggagtcccatctcaaaaaaaaaatgaatgtatgccactgcaattagagtatccaataaaggagacagtttagagtcaggacagaaaagcttccataattgaactagattacataatagtatttctagaaaaagagatatttttagattgtatgccacttttgtttaagaactgtgctgtgatcactgtattaattttggtttatcttggcatatatccttcagtttgtttttatttttaatttttcctttttttccgattaggctttggtcagcatttttcatttaaagaaaagtaacactcccatccactcataagcttggtacaaaaacttctctggcagttacttttgaagcttcactctgctttctgtataaagggcagtctgtggtcacgccagacttt

SEQ ID NO: 42641 - DNA, 694 bp, Homo Sapiens
  misc_feature (507)..(507): n is a, c, g, or t
ggagatcagggcaactcggagagggctgcgagcatttccctcccgggagaggagatcagggcgacctgcacgcactgcgtagagcctggaagggaagtgagaaaccagccgaccggccctgcccctcttcccgggatcacttaatgaaccacgtgttttgacatcatgtaaacctaagcacgtagagatgattcggatttgacaaaataacattcgagtatccgattcgccatcaccccctaccccagaaataggacaattcacttcattgaccaggatgatcacatggaaggcggcgcagaggcagctgtgtgggctgcagatttcctgtgtggggttcagcgtagaaaacgcacctccatcccgcccttgccacagcattcctccatcttagatagatggtactctccaaaggccctaccagagggaacacggcctactgagcggacagaatgatgccaaaatattgcttatgtctctacatggtattgtaatgaatatctgctntaatatagctatcatttcttttccaaaattacttctctctatctggaatttaattaatcgaaatgaatttatctgaatataggaagcatatgcctactcgtaatttctaactccttatgtttgaagagaaaccctccgtgtgagatatacaaatatatttaattgtgtcatattacttctgattccc

SEQ ID NO: 42642 - DNA, 953 bp, Homo Sapiens
  misc_feature (788)..(788): n is a, c, g, or t
aagctgtggaggctgctcaggcccatcaaatggctccagacatgttctactgcatgaagctcctggaggagactggcatctgtgtcgtgcccggcagtggctttgggcagagggaaggcacttaccacttcaggatgactatcctccctccagtggagaagctgaaaacggtgctgcagaaggtgaaagacttccacatcaacttcctggagaagtacgcgtgaggacgcctgagccccagcgggagacctgtccttggctcttcctcccaatgcccgtcaggctgaactcgcctcccccgtgactctgcctcgggcctcgcagaggccgctggtcacttcgtcatcattttgcccctggagacgtctttctttgtgccttgatgttgagagcgcctctcttttgagcaaacaagcattctatatgcaaccagagtagaggggacctgctcagcaggtgtgaccagggttctctgaatctgttattgtttttgcttctggaaagttcatttggggtttacaacaactaggatgtgttgggtgagatgtttcagatctggagaaatgagcaggtgtcgggaaatgtgtgacttaaccgtggtgagggctggaaatccaaactcaccaccatgatctgtgaaataaagcccttagcggtgtgaagcatccggtcctttgaacagaagggcctggaaggcccctggggctgagaaagggtccgcccggtggcctggaggcaggcgccgggagcgcagtagcacgtggacctgggcaggatgttgcactagncttggggttagatgctggggggctgcggccacggtcagaaggccaactgttaaaagccctttgggtgtaacccagggctgccaaggaggaaactggggccctccgctttcccagcaaccgcagccagggccctgaagaaatctgggtgcgcccccgggggggtta

SEQ ID NO: 42643 - DNA, 690 bp, Homo Sapiens
  misc_feature (635)..(635): n is a, c, g, or t
ctaaaaaaatccggcagtgctaccactactggccggatgaaggctccaatctctaccacatctatgaggtgaacctggtctccgagcacatctggtgtgaggacttcctggtgaggagcttctatctgaagaacctgcagaccaacgagacgcgcaccgtgacgcagttccacttcctgagttggtatgaccgaggagtcccttcctcctcaaggtccctcctggacttccgcagaaaagtaaacaagtgctacaggggccgttcttgtccaataattgttcattgcagtgacggtgcaggccggagcggcacctacgtcctgatcgacatggttctcaacaagatggccaaaggtgctaaagagattgatatcgcagcgaccctggagcacttgagggaccagagacccggcatggtccagacgaaggagcagtttgagttcgcgctgacagccgtggctgaggaggtgaacgccatcctcaaggcccttccccagtgagcggcagcctcaggggcctcaggggagcccctaccccacggatgttgtcaggaatcatgatctgactttaattgtgtgtcttctattataactgcatagtaatagggcccttagctctcccgtagtcagcgcagnttagcagttaaaagtgtatttttgtttaatcaaacaataataaagagagatttgt

SEQ ID NO: 42644 - DNA, 583 bp, Homo Sapiens
tatgaaaatttcttttaaaagccccagtctcacctacgaaatatgaagagcaaaagctgattttgcttacttgctaaactgttgggaaagctctgtagagcatggttccagtgaggccaagattgaaatttgatactaaaaaggccacctagctttttgcagataacaaacaagaaagctattccaagactcagatgatgccagctgtctcccacgtgtgtattatggttcaccagggggaactggcaaaagtgtgtgtggggaggggaagggtgtgtgagtggttctgagcaaataactacagggtgcccattaccactcaagaagacacttcacgtattcttgtatcaaattcaataatcttaaacaatttgtgtagaagtccacagacatctttcaaccaccttttaggctgcatatggattgccaagtcagcatatgaggaattaaagacattgttttttaaaaaaaaaaatcatttagatgcacttttttgtgtgttctttaaataaatccaaaaaaaatgtgaaaaaaaaaaaaaaaaaagggccacatgtcctcaacctgcaggtcggggccgtta

SEQ ID NO: 42645 - DNA, 639 bp, Homo Sapiens
gaactacttagggtcgtttgccttccatgggaacttggctagacttagaaaaagctgtttgttgtgctaatgtaaaagtgtcatacaatttagaagatttttgaagatggtaaacttagaagaattctatgttctgaaatgcacacttttagaatgtttttctttgaaaacaggctaatagttttttctttttttgacaaagtttcagctcctctttaaagttattgtgtcatttttctggtttaaatttcccttatatttccacctgtaatgtcagtggcaacaacatcatacttcacttacttgttaatttactttttacccttattctaagagcaagttgagttgaactgaatcttccttgtcttagtaacaatgtataaatagtggcttttctgtacaaaaggttgtaatgcctcctgatggatataattttgtgattgtatttaaaagttgaataaatcacaccagcttcctgaaaatgttcataatgcatcttttggaaaacaaatacatgcctactttgtgcatatttgcattaacatggcaaagattgtatgaaatacctgtttttcagaaaataaaggttcagtctcaaaaaaaaaaaaaaagtactctgcgttgttaccactagtagta

SEQ ID NO: 42646 - DNA, 734 bp, Homo Sapiens
ggaattgtacactgtttaatgagttctccatattcctttaggagatatttgctttgcaattacatgttacaattagaataattacaattaaaataatattacatgttacaattagattaatagtgatgagagggaaaaaagacacccttctgtttttttctctcaagccagtctaaaaacttgaagagccatttaaaattaaatgtcactatacttgtattataaatcaatacataagtttaaacctgttatatactcagtgcaacagaaaaacccatatggaggttcaaccactgatgtattttgaatgatcctaaatataagtcttgggtggctaaatggccctctgcttaccagtctgaaaatgaaaccgattatactcatcggccttatttactgtaatacaaactggttaaaactatgttaactgaatgctagtttgaaacaaattatctacattaagtcatcttaatgttttctctttaaaagaaataaaaaaatctgtttcttctgatttcgaaagtaatagaaactctgctgtagaacataaactaaaaatattaaaaagtataaaggtaaaaaatgatagttgtctgcaatcccataatccggaaatattgaagtactgtccgtaacatggttatgacatgttaagtggaagggtagaaggtctttttttttttaaggagaaaatgtttcttttaaataaatgtttccttatgtaaaaaaaaaaa

SEQ ID NO: 42647 - DNA, 732 bp, Homo Sapiens
  misc_feature (612)..(612): n is a, c, g, or t
  misc_feature (640)..(640): n is a, c, g, or t
  misc_feature (684)..(684): n is a, c, g, or t
cgggcaatatcaacagcgctactctaaccagacctgcagggacaactgcaatgagaagtggcttgcccagacccagtgccccttctgctgggggcataccagtgcctcgcagcaaacttgcacagcctgttcgcagatccttgccagctcctaaaacctatggtagcatgaaagatgacagttggaaagatggctgttactgaccagcaaagacaagaatgcagaagtccacggcttcatggatacccttcaccaggctaaaaaacaacttttatatgcagactgttcagataagactcttgggatttataaaatcccagccctctctgtcttaattagcacaaaccgacagagatcatcaaacagcactttaatgacatttaacatcagatgtgtttggtaatcatacaatcactctccatagaatcacttttagttttgtttaatagaaactaggttgatttttaaaaaatatttgacagaggccaatatctgggcaaatacctaatggatgccaaagagaaatgcccatttgtaaatgagaaaaatgcccatttgtgcacaagaaaatggtgaattcaggctatccaaaacttcacattcaacctaatntactgtataaatagtatcaataaatatntgtgttaatgagaactaatattctgactaattatctaaagtgtntcactagtacaccaggaaactacagattgagattagggggtgggagga

SEQ ID NO: 42648 - DNA, 749 bp, Homo Sapiens
  misc_feature (567)..(567): n is a, c, g, or t
cactgctgcgatgctcaaggacattttatgttacggctttaaagcaaaggcatgattattagaaactatttaagcttttttctttgaaaaacaagctccttttacagaatataaacaacagtagtgcctgtggtttagcccaccaatcttgatgactaaaagtagctgatgcattgtgcatatgatgcttgagatggtttttgcaaaagcagaaatcgctgcaaggtaatcacaatagataaaagtggtattttaaacctttgaaataaatggatgtaactgtaccttggtacagcttttcacttgtttagtttttaaacgttagtataatctgaataaataaaatgttgccaaattcaatgtagaaagaatgtgacaacacaccttgggtagttctgcttgtgtttttgcatattgtaaaagcagtgtcacagctaaaaagaaagaaatcgtttctaacagtaaattattgtgctttagttgctagtttgtactgagagttgacctctccctgtgcagttttttgttctaaacttgtataaataacaattgtgtaatgtgtctccnctcctacattggtaacaattggcttcaggccctacggttataaaataaagaaccactagaatttaaaaacaaaaaaaacacaacgaaaaaaaagcaaacggaaaaaagaaacaagaaaaaagaaaaaggggggggcgcaaaataacaccgggggaggcatcaaagggtattgagaggcccaa

SEQ ID NO: 42649 - DNA, 644 bp, Homo Sapiens
gcggccgctcaggtatggtatagacatagcaagaggggaagggctgtctcactctagcaaccatccctccattacacacagaaagccctcttgaagcaaaagaagaagaaagaaagaaagcttatctctaaggctactgtcttcagaatgctctgagctgaatgctcttgctcctttcccaagaggcagatgaaaatatagccagtttatctatacccttcctatctgaggaggagaatagaaaagtagggtaaatatgtaacgtaaaatatgtcattcaaggaccaccaaaactttaagtaccctatcattaaaaatctggttttaaaagtagctcaagtaagggatgctttgtgacccagggtttctgaagtcagatagccattcttacctgccccttactctgacttattgggaaagggagaactgcagtggtgtttctgttgcagtggcaaaggtaacatgtcagaaaattcagagggttgcataccaataatcctttggaaactggatgtcttactgggtgctagaatgaaaatgtaggtatttattgtcagatgatgaagttcattgtttttttcaaaattggtgttgaaatatcactgtccaatgtgttcacttatgtgaaagctaaattgaatgag

SEQ ID NO: 42650 - DNA, 751 bp, Homo Sapiens
  misc_feature (711)..(711): n is a, c, g, or t
ttttttttttgtatgttttagtgtaagtagaagataaactttttattcataaaccaggaagcaatgttctttatagtgattctcttgtgtacatgcttgtgaattaaatttgtgtaaaatcccttggcaattgggtcttttaatataggaccaaattaaaacattttgctgaatatgtatagtttttcacaatttcattaggtaaataatggtttggtgatcatacatgagaaatgtacacattaaaaggccttgctgacaacttgcacaatgttgaacatagcctttaagcatcatttaaattttaaaggaatggagtttttcagcctgtggcccagcactggtcaagaaaacaagatggcaacatatatgctttcagggtcaaatttgagcaaactgtaaactgtcagggtgataaaatgtttctcttgatgtttacatgcacaagctttgcgttctgactataaaaagtgtgaacaaatcaatgccagattcctgttttgcgcattgtcatgggattcttaagtgaacctttctaaatgtggtcttgttcacatgctccacgtagctgtaacttcacatcatcagcttgcagtttgtaattgactaaagcattccagtgtcctctttctagattgccagctcatgacatggtgcttataaagatttaattaaagtaagaatgaaataaagttttttatattataacanaaaaaaaaaaaaaaaaaaaaaaaaaacctcgtgccgaatt

SEQ ID NO: 42651 - DNA, 935 bp, Homo Sapiens
  misc_feature (787)..(787): n is a, c, g, or t
ttccctgctaccatcctggcttgtccacatggtgctctccatcttcctccacatcatggaccacaggtgtgcctgtctaggcctggccaccactcccaacttgacctagccacattcatctagagatggttcctgatgctgggcacagactgtgctcatggcacccattagaaatgcctctagcatctttgtatgcatcttgatttttaaaccaagtcattgtacagagcattcagttttggctgtggtaccaagagaaaaactaatcaagaatataaaccacattccaggctgctgttttctctccatctacaggccacacttttactgtatttcttcatacttgaaattcattctgctattttcatatcagggtacagacttataagggtgcatgttccttaaaggtgcataattattcttattccgtttgcttatattgctacagaatgctctgttttggtgctttgagttctgcagacccaagaagcagtgtggaaattcactgcctgggacacagtcttataagaatgttggcaggtgactttgtatcagatgttgcttctcttttctctgtacacagattgagagttaccacagtggcctgtcgggtccaccctgtggggtgcagcacagctctctgaaagcaagaaccttcctacctattctaacgtttttgccctctaagaaaaatggcctcaggtatggtatagacataccaagaggggaagggctgtctcactctagcaacatcccctcattaacacagaaagccctcttgaagccnaagaagaagaaagaaagaaagcttatctcttaggctactgtctttcaaaatgctctgagctgaatgctcctgctccctttcccaagaagcagatgaaaattatagccaggtttatcttatacccttcctatctggaggaggagaataa

SEQ ID NO: 42652 - DNA, 825 bp, Homo Sapiens
ttcagaaacacacatttcttaaaaggaaagtgcagcttcaagatattgtgtaaatactgagccaagacatttctggagctgtgctctgtctccaaaaacctcaatgcctttagggcttttctcagtggtccagctagccttctctttggaggaggatgaagccgcattgcacattctctgcttcctgtcgtagcctctgttgtcaatggaaatgcggaagcccatctggtgcccgtcagtgagaagcaacgttctgcgctctctccgttagacctccatgctgtccccagtcttgtccattccatgctgctgtgttacaaactctcagaggtagtttgcwggggaggaaggggaatatgattttwaaaacaaaatatttacaacaacaaaaattcttaggatcacctgacctttgtaatgttatttatgttggggagggaggggggctgagaaggggaaatcagcagtgtgcaacatctttataatttgtactttaattacaaatcacaaggaaaccaataagttgaaatcctatataacaggtttatatatatagaatatgtatatttgaagccctctacagactgagtctatgttttactaattctttgttcactgtgttacccatcttggaataagttgtgaatgtcagctccctctctctgaggcctccagacttagctcctcaggagggtaatgagccaaggttgagtgtttccatacaatgcttttacctttgatcccaggagaatcagaaactccaacattttggaatcttcaagggcacatactgagaaaaaaaaataaaattgtttatgagcaaaa

SEQ ID NO: 42653 - DNA, 704 bp, Homo Sapiens
  misc_feature (668)..(668): n is a, c, g, or t
  misc_feature (701)..(701): n is a, c, g, or t
tccacatcttgcatatatacatgggctcaattattatgtttgtcaggataatcaaatgaaaatactagttcagtgatcagcattgaatggttgttaggcagccatgtgctcaacactgatttcacctcttgagtataaactttttaaatttaaattggtttacatgaaagtggattaaaaggcctttcaaaagaatgggtttgaaaaacctcagtaccctttaatacatgtacatttctttccttttttcatttaatgtaacatgtctgttgtaactatgtttcttaaatattattttaaggttatgtgttctttaattatggtcaaatataatttggtcaccaaaaatgaaataatagtttaaaacaagtagctgttactaagtgtgctaaaaatactcattttataattaattttagttttcttagtatattattataaattgtgccctaagtcaggtacaaatgtacacatcaaaatgcccatattgtatctatctgtagtcgtttaatgtgaattatatgtgaatttttttcaaaattttactaaccagaattctgttataggcacctaaccacgcagcatgaggaaaacggcacaacacaatcttgaggtgccttctgaatcatcagattaaattatgcttcatatgtttttgcttttactgnatttctttaaaaactctaaatctttattcatgngtc

SEQ ID NO: 42654 - DNA, 673 bp, Homo Sapiens
  misc_feature (673)..(673): n is a, c, g, or t
ggtgacacaaggaaagtattctacagctcaagactgcagtgcagatgacgacaacttccttgtgcccatagcggtgggagctgccttggcaggagtacttattctagtgttgctggcttattttattggtctcaagcaccatcatgctggatatgagcaattttagaatctgcaacctgattgattatataaaaatacatgcaaataacaagattttcttacctctcagttgttgaaacactttgcttcttaaaattgatatgttgaaactttaattcttttatcaatcccagcattttgagatcagtctttattaataaaacctgttctctttaatcagcttaaaatccaaagtgtcatatttactggtcctggagacaaacttgttcaaaagaacatcaacgtgcaatgttttaaggtctatcttaagaagccctggccaaattttgatcctaaccttgaagtatgccttgaacttattaacatggccattataagaataaaatatgtagttgtgtcttaatggaattaataaatgtcatttcactactggtgttctgtttcaatgtataaggactatagtgatttaaactcatccatgtgccttttgcataaagttcattaaaataaatattggaggtggtaataaatgccccatcaaaatatgctttan

SEQ ID NO: 42655 - DNA, 722 bp, Homo Sapiens
ggagaaaatggacatcgttaccaagcaaacctagagatcactggccccaaggtggcatctcctgggccacaaggaaaaaaacgtgactaccagcgtctgggatggcccagcccggacgaatgcctcaaactccgctgggtagagctgactgccatcgtgagtacctggcttgcagtttcttcaaaaaacattgacatcacagaacacatagattttgccacccctatacagcagccagcaatggagcctctttgcaatggcaatctccccacgagtatgcataccctggaccacttgcatggggtttccaaccgagccagcctgcactacacaggggagagtcagttaacagaggtattacaaaatctcggcaaagaccaatatccacaacagtcgcttgaacagattggcacccgaattgccaaagttttggaaaagaaccagacgtcctgggtcctctccagcatggcagccctctactggagggtgaaaggccaaggaaagaaggcaatcgactgcctccgccaggctctgcactatgcgccacaccagatgaaggatgtgcccctgattagcctggccaacatcttgcacaatgccaagctctggaatgacgccgtcatagtagccaccatggcagtagagatcgcaccacactttgctgggaaccacttcactctgggcaatgtctacgtggcaatggaagaattgaaaagcactgg

SEQ ID NO: 42656 - DNA, 651 bp, Homo Sapiens
gcatattgcttggattctacgtgcagcgggttctctgcctccgtgaagacaagctgggctggggaggacggtgtctaggagggatgaccccactcagctccaggcagtgttctgccgagaccccaagaactcggggtgtcagagggcaaaggaactacctgcctttcacggctgctgacttctcagggctgcaagcagcacagaatgttatccttacgtcctgagccggtttaagtctgtggaaaaggaagcacgggagaaatccacgtaacctttgctttctttttaagggaagcggttccgccgtgaacttggaaccctcagctccgggtgttctcggcagaagggcagctggaagggacacagtggggcaggctttggggttgctccctgttctgccccgaggccggggacgcagggcagcccacgcctccgtgggctccattctgtagcattgccagcgttctcttcacgtctctaacaatccttcgcttttcctcactcacgtggaaatgtgaactgtcccggctctgtcttcatttttatttttaagccatcgttcccctcctgaacggttgccccttatttaatgctgtaaagttggactgttgttcaataaaccagagcaatgcattaaaaaaaaaaaaaaag

SEQ ID NO: 42657 - DNA, 851 bp, Homo Sapiens
ccacgcgtccgagaagagctggctgtattcatcaccaaagaaaaaacttacaccaatgcagaaatcggttagtccattagtttggtgcaggcaagttttggattacccaagtcctgatgttgagtgtgctaaaaaatctcttatccacaaacttgatcaaactatgtcagctctcaagaggcagaatttatataataatcctttcaactctatgagttacaccagtccttacagtccaaatgccagtagcccatacagcagtggcttcaattctccatcctcaaccccagtgcgacctcctatagtcaaacagcttatacttcctggaaattcaggtaacttgaaaagctcagacagaaatcctccactcagtcctcagtcctctatagatagtgagttaagtgcttcagaattagatgaagattcaattggatccaattataagctaaatgatgtaactgatgtacagattctagcccggatgcaggaagaaagtctccggcaagaatatgcagccaccacgtctcggcgcagttctggttcatcttgcaattctacaagacggggtacttttagtgatcaggaacttgatgcacaaagtttagatgatgaagatgacaatatgcatcatgcagtataccctgctgttaacaggttttcaccatcaccacgcaattcacctcgaccgtcacctaagcagtcacccagaaattcacctcgttcacgatctcctgctcgggggatagaatatagtagagtgtccccacagcctatgattagccgcttacagcaacctcggctttcactttcaggccatcccacagatttacagaccagcaatggtaaaaatg

SEQ ID NO: 42658 - DNA, 848 bp, Homo Sapiens
  misc_feature (532)..(533): n is a, c, g, or t
  misc_feature (535)..(537): n is a, c, g, or t
  misc_feature (541)..(541): n is a, c, g, or t
  misc_feature (551)..(552): n is a, c, g, or t
  misc_feature (592)..(592): n is a, c, g, or t
  misc_feature (601)..(602): n is a, c, g, or t
  misc_feature (612)..(614): n is a, c, g, or t
  misc_feature (632)..(633): n is a, c, g, or t
  misc_feature (650)..(652): n is a, c, g, or t
  misc_feature (673)..(674): n is a, c, g, or t
  misc_feature (684)..(685): n is a, c, g, or t
  misc_feature (710)..(710): n is a, c, g, or t
  misc_feature (717)..(717): n is a, c, g, or t
  misc_feature (731)..(731): n is a, c, g, or t
  misc_feature (754)..(754): n is a, c, g, or t
  misc_feature (758)..(758): n is a, c, g, or t
  misc_feature (784)..(784): n is a, c, g, or t
  misc_feature (786)..(787): n is a, c, g, or t
  misc_feature (797)..(797): n is a, c, g, or t
  misc_feature (825)..(825): n is a, c, g, or t
  misc_feature (844)..(844): n is a, c, g, or t
gggggaaaatgtatttggttttgttcctttcatcctgtctgtgttatgtgggtggagatggttttcattctttcattactgttttgttttatcctttgtatctgaaatacctttaatttatttaatatctgttgttcagagctctgccatttcttgagtacctgttagttagtattatttatgtgtatcgggagtgtgtttagtctgttttatttgcagtaaaccgatctccaaagatttccttttggaaacgctttttcccctccttaatttttatattccttactgttttactaaatattaagtgttctttgacaattttggtgctcatgtgttttggggacaaaagtgaaatgaatctgtcattataccagaaagttaaattctcagatcaaatgtgccttaataaatttgttttcatttagatttcaaacagtgatagacttgccattttaatacacgtcattggagggctgcgtatttgtaaatagcctgatgctcatttggaaaaataaaccagtgaacaaaaaannannnaaanaaaaaaaaannaaacatggtcggcccgcctcggcccctcgaagaagctttnctagaccannttcgtttggnnncgcgcgggcccccagtannggtaagtgaaacatggnnntcatagcttgttttcctaggnnagatcctggnntcatgactaggtggcttgggatttnctcaccnaataaaaaaaacgncccccggcgggcaaacccgaagncgtnttctgaaaacaaaatccaagaatggngnnagtttcttgnaagggtccatttttacctgggggatctntattcaaaaccagggaagntcct

SEQ ID NO: 42659 - DNA, 520 bp, Homo Sapiens
ggtcctctatagatagtgagttaagtgcttcagaattagatgaagattcaattggatccaattataagctaaatgatgtaactgatgtacagattctagcccggatgcaggaagaaagtctccggcaagaatatgcagccaccacgtctcggcgcagttctggttcatcttgcaattctacaagacggggtacttttagtgatcaggaacttgatgcacaaagtttagatgatgaagatgacaatatgcatcatgcagtataccctgctgttaacaggttttcaccatcaccacgcaattcacctcgaccgtcacctaagcagtcacccagaaattcacctcgttcacgatctcctgctcggggaatagaatatagtagagtgtccccacagcctatgattagccgcttacagcaacctcgcctttcacttcaaggccatcccacagatttacagacaagcaatgttaaaaatgaagaaaaactaagacgcagtcttccaaacctgtcccgaacatctaa

SEQ ID NO: 42660 - DNA, 604 bp, Homo Sapiens
  misc_feature (573)..(582): n is a, c, g, or t
  misc_feature (584)..(584): n is a, c, g, or t
  misc_feature (586)..(586): n is a, c, g, or t
  misc_feature (588)..(590): n is a, c, g, or t
  misc_feature (594)..(599): n is a, c, g, or t
ggggggtagagatagacacgtttttagatggtgcattcaagtcagagttggaagggtcatacaggacccagaagctcctcttactggacagagcagtagaatcccaggctctttcacggatttaggctgagaaacttcagcagcagtattggacttctctgctgtcagtctttgtttctcccagtttttatcggtatgccccagcagctctctggagatttagttctcttcttctaggaaccatttcttttggttattggagctccttagcaaataagaggagtgagtgaaatagagaaagcaccccggaccccttttattggtctgttcctttggctttctcttggaggtgggtcgcagcaccagatggggagctttatgacatgacaggcgggagttttgtaccacttttagaagataccagatgcctctgtcctcattttgtttcctatgatcatcctctagataccagatagaggcccattcctgcatttgagatagggttggaatatagtactctagatgatgaatgtgtttgctttgtgtttggtattaaacatgtaagattagaannnnnnnnnnananannnaaannnnnncatgt

SEQ ID NO: 42661 - DNA, 915 bp, Homo Sapiens
ctggaccggtccggaattcttgcgatatttttaaaaacaaatctgtattgttgacaaataaatagttgctcttctacactaggggtttcacctgcaggtttgacacgcagttgctcgcttttcctgccctgtcaagcttctctgttctggcgtgagttgtgaaagagttgaagacagcttcccatgccggtacacagccagtagcctaaatctccagtacttgagctgaccattgaactagggcaagtcttaaatgtgtacatgtagttgaatttcagtccttacgggtaaacagattgagcatggctctctattccctcagcctaagaaacactcatgggaatgcatttggcaacccaaggaaccatttgcttaaacctggaacatctcacctttttaaatcctaaaaaacactggcagttatattttaaattagtttttatttttatgatggttttatcaaaagacttttattattagattgggacccccttcaaacctaaaaatcaagttatttccttttataatacttttcttccccatggaacaaatgggatcaatttgtgagttttttcctttaatggtaactaaaatcccctctaatttctcatttatggcttttgccttttttatgaaatatttccttttaaaaagcccccagttcttaccctacgaaatatgaacgaagcaaacgctgatttttgctttactttgctaaacctggtggggaaaacctcttgtaaaaccttggctccccggtggagggcccaacaatggaaaatttggattcctaaaaaaggccccccctaactttttttgccgattaccaaacccggaaaggctttttcccaaaaactccaaatgatggcccatttgttttccccccgggggggatttaagggggtcccccaaggg

SEQ ID NO: 42662 - DNA, 745 bp, Homo Sapiens
ccacgcgtccgcccacgcgtccgaagacaaagccttgtctatgtggggggcggggaccggggaaagagggaggctgaaatgtttattctgcttctcccgtgtttcatgccatctcgcgtcccccttcctgcacatgggtgtgaatgcacacacatacgcgtacacacaggacttggtctgctggcctggcctcttctgcccaggtgggttggaacacgtttgctgcctgagcctgtgccactgagcatgttaggtggagcagttggtgtggcacgtgcggggtgttggcaccggaggcatggaaaagcacaggctgtactgccaggctgcgatgcgtgctggcccccgcacaggctcctgtgtgcagggactgattcctcagcacacgaggcttccacaacccagtctgctccatagcactctggcccaccctgtctgcaggtgaaacaggagggctgtttgcctctgccccatccccccgactgtgttcaggagtcccaccttgcatttcagacctgggctggcagtctgttggacttctcttcaggaagaaaaagcatcagggggaaatggaatgcccctgccccaggaacatggcagaagcacaggttctgtacctcagatggactcctgctgggccttcggggtctcagttggcttcccccagattctgattctacagctgcagaatgtatataacgcaataaaagcaaatgtttgaaccagtaaaaaaaaaaaaaaaaag

SEQ ID NO: 42663 - DNA, 706 bp, Homo Sapiens
ggttggatgaagtgtcctcttgctagcaccaataaaagatttctaattaacacaattaaaaacacattgccctctcataaagagcaagaccatgaacaaaaagagggcgataaggaaccagccaagagccaggcccagaaagaagaaaacccaaagaaacacagaagccatccttacaagcacagcttccgcgctcgaggttccgccagttactccccgccacgaaagcggagcagccaggacaagtacgaaaagcggtccaaccggcggtgaggctggaaccagggccagccagccctgcgggcctccgtgctccttcggggtgcggtgtgcggagaaggcctgagctggcagggcaaacacctgagagtgactttgacattaggtcctttgttgtttttaaagaggctgctggccacaggcaaaaaaaatgacctagcaactcttgaggaaacaagtgcaaaggaggatgtcttggcaagtttaagctacttctgcagtgtagtagacttacatattgttgtttatcttgtttggaagtgtgtttcaaaataaacatgtctagaatttaaagttttcagagattgttaaaactggttccaattttttggtcatttctcagaaaaataaaatacttataaatcctatattttactttttgggggtattacatttaaaaattagaaatcatcagtccagtgaccat

SEQ ID NO: 42664 - DNA, 703 bp, Homo Sapiens
gggatgggatacatatacggagggggatcttactcttcccattcctcagaccagcaggaaaagaggggagacgtcagtctttttcctgtggttccctctcatttgtcccagttactaactacggaaatagcatcctctgctggtgctaagtgtgattaggaagaagcctggggagaggcgagtctggaattttggtcacaagagggaaggacttggagaggagaattagttttctaggctcattggcatttagtttccctaggaaaggggtcaaaacttcaagacactggtggtggtgggagatcaggaaaataacttggcctagctcaaacaatattggataatcccctccttgggggagagggattagagtgtgctcctactggccccttggagcctcccctagcttacacagttaacttgattttaaaatccaaggccaggagagaagaatccaaaaagcaatatttttcatcacatgccaaaaacgggggatagagagaaggagtggcaggcctaggcccctccgattgtcccttgggggttaccctcagcccacctcactatggtgctgggtagaggggatacctgggttctaacctctaaataggggagatcccagcctccacaaagaggcccttttattttttattctgattagccattttaaaccaacgaggaataaaaagaaatcctgatctaa

SEQ ID NO: 42665 - DNA, 914 bp, Homo Sapiens
gagaagttgaagtttttaagttaggaatgcaattttctgttaactccaaacctgattttaatctgaaaaaaaaaaaatttaatttgggaaaaccagaatgaaaggaaaaccattattgccttggttgcttaacattatttgtaaaccattattttctgcatcttgcatggtgcacaatagaatatcttttactgtaatcccttacaataaagccttaatagccattttctatgtaatatgcaaaagtagattagcacaatgcacaattttcttttgttaaaaatcaaattcaaagatttaattcttgctatgaattctaaagttcggcaaaccaattcatcataaaatccaaataatcttgtaacctatttatctagtgattcatctccaattctgttgaaaaagcataatataaatgttgatgagactagactctaatggatatgtttatataattccaaacactcaggtgtgtgaatgctttaaaaacattaatggaaaataatgctgataatatttaattgatcatgcaattccttcaattatgatggaaagacttgaactttctgaataaaacaaaaatacgcaaaaaaaaaaaaaaaaaaaaaaaaacaaaaaaaaaaaaaaaaaaaaacaaaaaaaccacaatacaaacacacaccaccaaaacaaattcaaaatacgcactacaattgatattatccaccagccaagacacacaattacaaaacatccaatctaatatgaatatcaccacatttgtttgcgatgacataccatacatcaaaccacaccaacaaataatatagttaaaacacactgatgacctattattatacatacaacacaaatataacagatcacaataacgtctaaatacaacaatctagatacacaaacatacacaatttatc

SEQ ID NO: 42666 - DNA, 824 bp, Homo Sapiens
  misc_feature (750)..(750): n is a, c, g, or t
accagtgacaagttggccagccgctccaaactgccagatggtcctacaggaagcagtgaagaagaggaggaatttttggaaattcctcctttcaacaagcagtatacagaatcccagcttcgagcaggagctggctatatccttgaagatttcaatgaagcccagtgtaacacagcttaccagtgtcttctaattgcggatcagcattgtcgaacccggaagtacttcctgtgccttgccagtgggattccttgtgtgtctcatgtctgggtccatgatagttgccatgccaaccagctccagaactaccgtaattatctgttgccagctgggtacagccttgaggagcaaagaattctggactggcaaccccgtgaaaatcctttccagaatctgaaggtactcttggtatcagaccaacagcagaacttcctggagctctggtctgagatcctcatgactggtggtgcagcctctgtgaagcagcaccattcaagtgcccataacaaagatattgctttaggggtatttgatgtggtggtgacggacccctcatgcccagcctcggtgctgaagtgtgctgaagcattgcagctgcctgtggtgtcacaagagtgggtgatccagtgcctcattgtcggggagagaattggattcaagcagcatccaaaatataaacacgattatgtttctcactaaagatacttggtcttactgggttttattccctgctatcgtggagatcgtgtnttaaccaggtttaaatgtgtcttgtgtgtaactggattccttgcatggatcttgtatatagtttatttgctgaa

SEQ ID NO: 42667 - DNA, 499 bp, Homo Sapiens
cataaacctaacttggtcttggcttgatctactgggtaaataataactcttaaatatatatacagttgacccttggacaacacaggagttaagagcgctgaacatttgctcagtggagaatctgcatataacctgactcctcaaaaacttaattagtagttagtttacaattgactggaagccttattgataacataaagcagttgattaacatattttttgtgttgtatgtattatattccgtattcttacaagaaggtaagctagagaaaaaaaaatgttattaaggaagtaatatattcactattcgttaggtagaagtgaatcatcctaaaggtcttcatcctcatcttcacgctgagtagtctgaggagcaagaggagttggtctttctgtcccagtggcagaggtggaagaaaatccacagatacgtggacctgcgcaagttcaaacctgtgttgtttgggtcaactgtattgtaatagcattttaatgtttt

SEQ ID NO: 42668 - DNA, 675 bp, Homo Sapiens
ggctgcagagggaggtggaaatgaaccctgagggctcccccaacttgccatgccctgtcccttagtagatgagttgctcctgattggtcattgggtttgggtgaggcctggaggcttcagaggtgaatttatgcttgggaagcctgatcccaaacctgaagggaagggacttggatctccttatattgaataagctgtttggaggaaggtgtctgtctgggaggatggggcagtaaatgaggttggcagagtggcagtgggggctctgcagagccagccttggagcctgctcattctgggcccttgctgccaaggagcccagcctcacctagcaggaaaggagatcaaggccctcctcccaggaggtagggtcttggctgccccgaacttaaatgcttttgaaatctcttagatgtggaaatattttttcgaacctgaaaatgcagctggtagaatttcaatggaagcataatccatgtaaaatatattttagttgatattttgtaaaatgcactttttgtgtgtgttgatcctggtttcccagatctgtatttcagtgtttacaagggaggaaggactttcctcacctcccttttgacagagattagaagtacttctttaagacacacaaattaatttgagaaatcgtcattgatctagaaacacaaaaaaaag

SEQ ID NO: 42669 - DNA, 719 bp, Homo Sapiens
ggcacgaggcccacatacctggcccaaccagacttctcccgtgagccaggcaaaggaaattgtcatctgccaactgtcctactcatattcctctcagtccttcttgggggtaagctgattacctgaaggacagctgaacccctggggtagcctcctatccaccactgcttaagtgcctatgggaatgtgggtctgcaccttgtcccctcataggatggtaccaagcatttagtgcacagtggccccatcatagcctgcagcctcatcatttcccatctggacctggtacaaatgcacgtcacaggctcagctcctccccactagcatcttctctaccttcaagaaccaggcagccctgccatgtcacaataggccaggggagtttccaaagatgtgggtggcaaatgcccctatagaaacaccagtacctgaaagcactgtagccctggacctgcctccttccctcggggccatacttctgtttccatctgctgggccaccagccactttagtgacccctgcctacttccttcctgttggatatcatacttccatctggctgcctttgcttaagccatctttgtggtagaggggccctggaattgcagctgtactgaggatgatgttattcacagcccctggcccacccactaatactactgcacagagtcaggatctcacatttcaccccaggctcaactgaggatgtggcttattaa

SEQ ID NO: 42670 - DNA, 920 bp, Homo Sapiens
atggcctctgtgaataatgtaactccagttacacggtgacttttaatagcatacagtgatttgatgaaaggacgtcaaacaatgtggcgatgtcgtggaaagttatctttcccgctctttgctgtggtcattgtgtcttgcagaaaggatggccctgatgcagcagcagcgccagctgtaataaaaaataattcacactatcagactagcaaggcactagaactggaaaagaccacagaaaacaaagaatccaaccctttcatcttacaggtgaacaaactgtgatgatgcacatgtatgtgttttgtaagctgtgagcaccgtaacaaaatgtaaatttgccattattaggaagtgctggtggcagtgaagaagcacccaggccacttgactcccagtctggtgccctgtctacaccagacaacacaggagctgggtcagattcccctcagctgcttaacaaagttcctcgaacagaaagtgcttacaaagctgccttctcggatactgaaaggtcgagttttctgaactgcactgattttattgcagttgaaaaaaaaaaaagctattccaaagatttcaagctgttctgagacatcttctgatggctttacttcctgagagggaatgtttttactttatgcataattcattgttgccaaggaaataaagtgaaaaaacagcaccttttaatatataggtctctctggaagagacctaaattaggaaggagaaaactggggacaatttttcatatttctcacttcttaaaaaacccctaatcctttacctaacaaaaagttcttttggagaaataagttaacccccccatgggcccacaggcaggtttggtcttttaaataagaaaaatgggcttattacctccatggaaatccggcttaacttcacttaatgggcct

SEQ ID NO: 42671 - DNA, 772 bp, Homo Sapiens
acgcgtccgggacgcccagctgtcccccgttttggcaagccagatgggctaaggggccggggagtagggtcccctgaaccaggcccaacagccccatacctgggccgatcgatgtcttacagcagccaaaaagcccaacctggtgtctctgagacagaagaagtggccttgcagccattactgacacccaaagatgaagtacagctgaagaccacctacagcaaatccaacgggcagcccaagagcttaggctcagcctcccctggcccaggccagccacctctcagtagccccacgaggggaggagtcaagaaggtgtcaggggttggtggtaccacctatgagatttcggtgtgagccttcggcacctcccctccccaacgcctctgcgcctacaccaaagggccccaggtggccaccttccttccctcaaggggctcccctcccgtgcatggacattttttaaaccaccgattccaagaggatgaggagtgttttctaaaatgcagtaggcttggggagtcggagagttggggccctgagactggggtagcaacccccccttttatcttttaagaccttcccttccttgatccctggaccagactcagtggacatttgtgcaattgctcgccctggagggaaccagatcatttttaaaccagaaataattttttttattattgttacggattctatttttttcctcttctgcgttaccaggtgtgtgtgtacctataatatatatatatatatattataaatatcaaag

SEQ ID NO: 42672 - DNA, 471 bp, Homo Sapiens
cccattctgtccctggactggctgcatcagtcccgcaaggctggtttcttcttacccccggatgaatatgtggtgaccgaccctgagcaagagaagaactttggctttagccttcaagacgcactgagcagggctcgggagcgaaggctgctagagggctatgagatctatgtgacccctggagtccagccaccaccacctcagatgggagagattattagctgctgtggaggcacatacctacccagcatgcctcggtcctataagcctcagagagttgtgatcacatgccctcaggacttccctcattgctccattccactacgggttgggctgcccctcctctcgcctgagttcctgctgactggagtgctgaagcaggaagccaagccagaggcctttgtcctctcccctttggagatgtcatccacctgagaactccactacccttttccctcccagaccacgaat

SEQ ID NO: 42673 - DNA, 574 bp, Homo Sapiens
  misc_feature (19)..(19): n is a, c, g, or t
tgaaacccgtctctaccgnacaaaaagcagccaggcgtggtggcacatctgtggtcccagctacttgagaggctgagccaggaggatcgcttgagcccaggaggcggaggttgcagtgagctgagatggcaccacttattgcactccagcccgggcgacagagcgagactccatctaccagatccttatgacgcagctgatgcctgccttggttcctaccactctggtgtagacagaggactttgtccaagtctcacactaaacatgcccgggcttcgatgtgcctggaggatttccccacagggacccacgcacctccctgtatctgcgcagcttgctcgtgtggctggaagcgctgtcgataagcttcacgcactggcttgccagttcttcagctctaggacttgtagctttaagcaaacggtgtggcatgggttgagtgtggccacctgcaggatgtgcagggctgcctcagaagctggctggggactctagcctctgtgttcataaagacattaagaagtggatggatgttgttccttttttgaagttgtcattaaagtaggtgcaacaa

SEQ ID NO: 42674 - DNA, 873 bp, Homo Sapiens
caccacctcagatgggagagattattagctgctgtggaggcacatacctacccagcatgcctcggtcctataagcctcagagagttgtgatcacatgccctcaggacttccctcattgctccattccactacgggttgggctgcccctcctctcgcctgagttcctgctgactggagtgctgaagcaggaagccaagccagaggcctttgtcctctcccctttggagatgtcatccacctgagaactccactacccttttccctcccagaccacgaattagaagatatgtggaagaaagaactcagggcgttagaaaggattggggtatattgatacaacttgtcctggaacatgggtgggaccagaaatctttatgaataaatgaaaagataagggatttggaagccacaggttgttttttgtttgtttgtttgtttttttaatggccattttattttatttgtatttatagttttttatttgtatagatttaggggatacaagatttcttacatgcatgtattaaatggccattttaaaattagctagtttcatgctcagatgtcataagtggcagctatctttagccagactgttgcagttattgctcgatgccactcatggtgtcctacctcctatttggaaaccatctctatttttttcttactgagattcttactttggggtcaggaacttgaagggatgcttggagtgagtagatttgagggtccagttatggagtgctactaaaacattttcttctctcctggcctctgggagcatctttagctttgactttgggaaagtctctgtacttttcgggcagcttttccagggattattaaattagagccttccgctttgacctccga

SEQ ID NO: 42675 - DNA, 689 bp, Homo Sapiens
tgaatccacagtctttacttcctgcctcataaagggccaggtctccccagtaccaagtcctttcctcatgaagttgtgttgcctcaggctgtttagggaccattgcctgtcttggtcacatgagtctgtctccttactttagtccctgggcaatccttgcttaatgcttttgttgactcaacgagggcccgaggccttaggttttctattaaggtctctgccccaggcatggtgctctatatcttggccaaataaattactttccttgaatatccaggaatcttttagtctaaagcaatgaggagttatcacctcatcctcaaactccaacaagatctatgccttagtgttgttttgttgtctgctttgatgtaaaagcaagagtatttggagcaagaagctgcaatgcgccaaatacacaataggccttttctttatcattcatacgacatttctggtttaggtgtatgtagttgggccatgttacttgtccagaggaagagactaaagatataagaataattttttagtcctaaatgctgtttgtttactttctgtcaagatatttacccgtgtcaaattcaaactacagtactgtgtaattatgtataaagtttttatttatttgaagttagactagatatacgtttttaaatttaacatctggctggacagtgttctattagtca

SEQ ID NO: 42676 - DNA, 722 bp, Homo Sapiens
  misc_feature (696)..(696): n is a, c, g, or t
  misc_feature (712)..(712): n is a, c, g, or t
ttttttttttttttttttagtctttaattcacttttaatagtataaacctcatttaggtagtagtattaagccacaacaataatgccacattgaaacagcatttaataaaatgcataaagctaattcatgcactgcaatactctatatacaaacacaacaatgcaaattcttcttcaagactgaagacattgattagatataaaattcagtttaaaaagaacatgctattttttaaatgccatcacataaacaaagtgatttcacagggagaagaaagctgtataaagctgcagctttcaacaggttttaaacctggcattaaaatgtaatggcaaaaccaatattttctatattgtgaagggcaaaggttacagaaacggtcccaagaaaatctaacacccaaattttcctttgatagatagatgcctttaaaagggctggtaatgcagttacattctaacagagaagtccaaactacaggtaaaaactacggcttgtactgtgaaaaatgtgcagcttttcagttataaaactagttgaacactggtttacaagataatccgtagaacagagagactgtagaaaaatattccagcacttgagttgtgtgtggcagcagcatttgagtccatgaatgctatggtcattaaaataattgattatactttcctaaagaaaaccattttttaatgcanagtctactacttccanatgttattcc

SEQ ID NO: 42677 - DNA, 632 bp, Homo Sapiens
ggcacgagggtcctcccgcgaggaccaggcatcgctgtgtgaggacggcacggccagcgcctgctgtgagtgggtctcccaagactaggcctcaggacgcggggggagccatccccgccgccctcacaggacccaccaggcagcggagacatgtggaattagagtattttgaggtgtcctttctttacaaaataatggggtcttgggcatttcacatcactccatttctactgagactttcagaatcacacaggccctttccgtggatttcatttggggcaaagaaacaacgtagttttgtttttgttttcagcctatggaatgatttccttttgtctgtcttgttcaagttcagacgaagctactctggcatctgcacatttccgtgttacagcagctgcctgatgaattttatccacctccatttcagcatgtggctcgcgtggacaggtggacggacgctgtggccgcatggaaccttgagaacccagggacgagccagtgccgggaaggaactgccgggactcaccgagctgcacttaactgttctctttctggctattttttggtgtttgtttctttgagatgactttgtccctggcaaaattttccactctgggtaaaacaagtct

SEQ ID NO: 42678 - DNA, 626 bp, Homo Sapiens
ggttttcaatacctgttttcatatacaattacaaacctttcaaacctgtattccttctttatactcaggaaaatgtcaccaagcaccctcctccccagttcacaaaaggaagaagatgaagattctgtctccctgttccccctccccagttttccaaagtgtctgagcatatgcctggctgtcctcagatcatcaccatgccacatccctgctccctacttcctggcagccaagaaaagccctttctacatgctagaaggaaatacatccaaaaagttagcattggagtgttagaaactagaatagacctctccgccaccgagctgctgtgtcacgccctcagcctgctagggagtgacaagcccaagtcattcttgatccaccccttctcccaccccagatcccagggactcatcctgtgactttgtaaccacactcattcctttcaaacacagaggaggaattattgcttcatctgactttattcaaatctagttatgtattggcctaaattatttgtgcaaaatttgaaatgttttttatttaaatattagaaatagcacaaagtcatggagtttttaaaaattgttataattaagtaaaaataaagctgaattgtgtcattt

SEQ ID NO: 42679 - DNA, 1118 bp, Homo Sapiens
tcacgcgtccgtaaattgctaattttatacagtgtaattctgttcttcacaaaataggtttcattattctatatttaaactgttggtcagaaaatgatctgcaattcaagtaagtctgcattacttttttctttaaaaagtactttaacatgccttatttattatattagcaaatgagctaataacagatgaaattttcattttttgacagatataaccttgcataagtagtatttagggtgattttgatactatctttagagttttgcattggatattaaaaaatatattggcacaatgtattggaagaaaatgagtagtatctggtttaatttttaatatttagggacattttaaaaaatcaatgttttaattagactaaaaattctttatattttttatttactttttaaagaaacatctgtcaaagtaatattgattccaaactgatgtttgtgtgaatttacatgtctattttcatgaactaagaatagagtttctttgagttgaggagaaaaaaatatatatgtgggtccatttattaggttaaagttgacccattcagtgtaaaaataaccatagtgtgtgagctaaagaaaaaaaaaagtaaatttctcctttatattctaagaagctttaaaagaacaattcaggggttattgataactgctactctgtcggtcattgtctctatatgcagtaaaattttatggtcccctttataggaatataaagaattcaaaacagtttttcaaaagatttttttccttggacataaaaaattttgatgctattccatttttggttttattacagcttaactgtatggtgttaaaatctaaggagtatcggaatctttcctttttttcccccctcctcaaaaatataaatctggggctctcccatggaaatggatctttaattttgggaaacctaaaggccaacatcccaactaaggcggtggtcctcaacgtactaccaccccgccttcgacctcctccatactatccaacaacgcctttcttacccccccacaaatatgtggtgagaaaaaatataccactatcaacccggaaaatattaaccccgtcggtcttccggtgccccggaacaaacag

SEQ ID NO: 42680 - DNA, 773 bp, Homo Sapiens
  misc_feature (589)..(592): n is a, c, g, or t
  misc_feature (594)..(594): n is a, c, g, or t
  misc_feature (600)..(601): n is a, c, g, or t
  misc_feature (607)..(608): n is a, c, g, or t
  misc_feature (610)..(614): n is a, c, g, or t
ggaattcaggggttattgataactgctactctgtcggtcattgtctctatatgcagtaaaattttatggtccctttataggaatataaagaattcaaaacagtttttcaaaagatttttttccttggacataaaaaattttgatgctattctatttttgtttttattacagcttaactgtatgctgttaaactctaggatgtatctgaatctttccttttttcccccctcctccaaatatataaatctgtgctctcacatgtaatgtatttaatttttggaaaatttaatgctatatagtaaatcaagtgtgtgatttaaagtaatcagatcactttgattcttttaagttttcagaatttcttttttccacaggtaattttggagaaaataattaccaattaactgataataagcacgctgtcctctgctgtaaaaagtctgaatagatactgtgtatgtttttatgtccatgaacttgagctactcgtgtgcaattatgtgtatgggaatggagtagtgttcatgatttgtatctacatcatcatatggatgtatatttattaataaagtcattactttaaaacccnnnncnccaaanncacacnnannnnncccattgtcgcccgcctcgggccctcgaaaaactttcctagaccattccgttggccgcgcggggccccattagggaaattgaacatgggccataactggtttccctaagaaaaacctgggcccatgactaaggggcttgggaattcctccccaattaaa

SEQ ID NO: 42681 - DNA, 691 bp, Homo Sapiens
  misc_feature (660)..(680): n is a, c, g, or t
gggtgtcttcatcttcaatttgggtttaatgttatagaaataaatgatgataaactctaactaataaaggaaagagaatatttggttactcagatccatttttaacctctggtgctgtataaagggaatattaaactagatgtaaatcaaagtatatgtttggctcatttgagcattttggaatatttgagaatgtatgatacatgtaaaattaaaaaaactattagaactgtaccataattatgttgaaggtagaagtgatcttcaaagagatggccattaacttagcagtgggacctcacttttacaagcactgctctagatatacttgaagaatttaatatgtacagaagtttattctggataataaataaataaggatcacactgtattaggggttatggcaacattattgaattttttatgtacataaagccatatgtttagggtggtttctatctgtcttgtttttcacttatataacactgtgaacttctaaagaaagaggataaaagaagcatgaatgaaaagaatgacatttcaaaaaaatggttcaatgaaaaactatagctaaaatatgtaaacctttctaggtaaaccgcttgccttcatcttgagtcggaatatatttaaataaattgtgttatctcttgcaaaaannnnnnnnnnnnnnnnnnnnnaacatgtcggc

SEQ ID NO: 42682 - DNA, 632 bp, Homo Sapiens
  misc_feature (576)..(576): n is a, c, g, or t
  misc_feature (583)..(583): n is a, c, g, or t
  misc_feature (619)..(619): n is a, c, g, or t
  misc_feature (627)..(627): n is a, c, g, or t
gtcggccactcagatgagggctgtggtgcgagccagtgcaggagagctgcgcttgggattgtgccctctcctgtgtctgtcctccggacctacccaggtctccaccatcaggaccctgtctttgggtttagaagaccaagtatggggaaaaccaggcaccagcctctgcagcaatgggtccctctagcctgtggacaccagctgggggatccagggtcaggccccctcctctccccagtttccctctgctgtgggttctgggctgtcatgtctccaccacttaaggatgtctttacactgacttcaggatagatgttgggatgcctgggcatggccacatgttacatgtacagaactttgtctacagcacaaattaagttatataaacacagtgactggtatttaatgctgatctactataaggtattctatatttatatgacttcagagacgcgtatgtaataaaggacgccctccctccagtgtccacatccagttcaccccagagggtcgggcaggttgacatatttatttttgtctattctgtaggcttccatgtccagaatcctgcttaanggtttanggtaccttcagtactttttgcaataaaaagtatttnctttcccnaaaaa

SEQ ID NO: 42683 - DNA, 646 bp, Homo Sapiens
ctcgttttcctcttactcttactttaaccatgtgcctggaggagccattctgggctcttgcacttgcccagcctttctttgccaggggcagagaagggaaagggggtagattgagtgtgccaagggccgtgcaagggcaggcttgctttccacccatctgctgagggagccctctcctctcgctccttgcctctgttcacacctgttgtcttggaagaggatggtccctttgtcttaaggctttgtgataaagtcatctccagttaggatctgcacctgtttccttcgtaatagtgcctggcggcctttctgaagttacaggtggttgggagccctctcgcatgcagaacatctggtagattgatctgccaggctgggtggttctactgctttctcaatttctaagaaccttttttttttcttaaagagttctgctgaattatttgacaatatttgtaagtaccatgtttccttgtggtgtatgctctgttctggtttctgttttcaaatcaaatgcctgtttgggaggagatgaacgtatttagtctattagatttgcactgctggattttttttttaaagtgtaaccttgaatagctgtcttattgtttatcctgtaagattagtcaatcgattaaagtttgat

SEQ ID NO: 42684 - DNA, 730 bp, Homo Sapiens
tcccagccttttgagtcctatatcactgcgcctcccggtaccgccgccgcgcccgccaaacctgcgaccccagctacacccggagcgccgacctccccagcagaacaccgccttttgaagacctgctggagctgtcgcgtgctttctgggttggggctgatgggggcgggcgggtacgtgtactgggtggcacggaagcccatgaagatgggataccccccgagtccatggaccattacgcagatggtcatcggcctcagcattgccacctggggtatcgttgtcatggcagaccccaaagggaaggcctaccgcgttgtttgaaagtaccaccagtgaatctgtcttctgtctctgtccctttccccgtgacacacagagcaggcatggaatttaatgggtgttctggacagacacttgtacatggacagacatcactactgtggatactacaagactgaaaagaaaatcgtatgttgtcattctctggctatggagtgtttgtggccttcacagatttcacaggaaccaataaatccctcaaagaagtaaacaggttctttgtcttatctggggaaggaaagtataacttatatttaaatataattgcttaattaagcattatatataaacataatagtatgtcttatataattgcatgtctattatatataataacataaatatgtttagtttatagttatataattttaaactttaaatacgctag

SEQ ID NO: 42685 - DNA, 709 bp, Homo Sapiens
  misc_feature (654)..(654): n is a, c, g, or t
aaaaaataaaataaaactatttgttgacttttgtttttcatttagttttggaaaagatatttgcaaaagtacagagttatcttcagcaattacttcacaacttagattggtaccaagagtgacaggagatcttgtcttggaagatcattattagatgccaacaaggagacccactgtgatttctggtaacctatttggggaaaaagacctaatgacctaatatgcaatttctgtcctcgtgtctttttctctaacacacagtcatgggtgaaacatttcagacacctcaggcagcacttatggtttctaattgtgagaactacccttccatcaaacaaaaagggcaagggtgggagccccggctacttggttaaacattttttactacaaattcgcccagaaaaggtgaaatattttgttataaaactgtattaagcatggcctaagtatttattaggtatatgatctgtgtagtatgttccatcagaaatatttcttactagtgctttaagctccagagtaaacagtcatttaaaatggagttcactgggcaggtttcccctttaatctagatagaaatactctttatcagagatttaaggcactgttttgctaactggtaaataaaaccaaatgtaaatatgtaagaatgtntatttgttgcacataacttttttggtataaataatggaagaagttacctgtggaa

SEQ ID NO: 42686 - DNA, 811 bp, Homo Sapiens
ccatgcattaagatttatttattgtatttaaacctggtgagaggacaagtgaggtctgctcagaccttgtaggcttctatcaaaacagcaccctgcttgctcaccaggcctagagaatggctgtaggtggccgctgacaagtgcctttagttgaagagcacatttctttcatctctcttgtctatacctgatagacacattcctctctgccaccttccttcagggaggacccgccctctgcagactgggcttagcgtgagcaggcacttcccatgtacgtgccaagggtaagctggcctgctgagcccagggcgacagaggggcactggtttacactttgccgggaccatcagggccgccaagcaggtcaggggctgggggctgggggctgggctgctggctttgctttctctgggtcttcaattagaatgtggctggcccatattggtttgtgtttaaatgctgtacttactacaagaaggatcttttttcaagctgtacatttataaaaacagatcatatactgtatatataaaaatcttgagatggtagaaacatgtatgaatgtactaagtagtattccactgtactcattcataaggtaggttttcttacaaaactcacaccaggtacttaaagatgtgctctgcttttttccaactacggagtgtcactgctttctaggtcagtccctgcagactcttctcaactctttccctataggaaacttactccgcgtcctgcccccacctcctaaataaataaaggaatcggggaacacctttctctttttaaaaaaaaaaaaaaaaaa

SEQ ID NO: 42687 - DNA, 897 bp, Homo Sapiens
ttcccgggatgaacttccaagcctccggcatcttttcctggtgagtgtttctcctgtgcttggttgtgtataatggagctaactcctaagcggtggggtgaatgtggccgccttagttctgaagctactccagttatgttctgtttcttcaagctgtgatccagaaagatttttgtgcccccagatgcctcttgataggagaggcaacatactccaaatagttgggttcttcagggaagctattagaaactcaggtgacttgttagagcactaacttggtcagagccaaatcctggcaaacgctgcctgaccttcactctgtggttggggcagtgagaaccactgaggtccaatgatgagacttggaggtctggatccagtctctctttgttttaatgtgacttaggtgctgtcaacattagcaagataatggaaatcacgacgccagtgggtgcttacctccctgctaggcatgcaggggctggcggttggcaggggaaggaggcccagtgagccgggtcccttaggggagggagagtttgtcctctttgccccacagtctacccttcagggccttgtggcagtgccagtgttcggggggtgtctgggccactgagtacccactcggtcgtggttgtgctggcctcttgggtgagtgaacctgtgaagcccaggaggtggtgttggctgcagggtacacaaatactgagtggtggtcttttgttacaggcttagcaacaaagctgtgccctgggcatggggggctgtagtgtagctacagttgtgcgtttgtgaaatggcttagctttccatgttgctgagaggaacctggacatggtcccgggcatctgaatgatctgtaggggagggagttcaaataaagctttattttgttca

SEQ ID NO: 42688 - DNA, 635 bp, Homo Sapiens
ctcaaacacttgctaaaactgcctagggcaggattcattagggcttgcagacaatgtcacctaaattgctgaatgtactcattataatatgatatctgacaaaggtagtacagcgtttctgagtcatttgggaccaactgcagtggttgtttaaaatgctggttcctgcacacaattctctatctactgaagcacatctgttttctttgtttgttttgctttgctttttgtttttaaagtttcccccagtgattccagtgcacctgaaaagttgagaaccacaggcttagtggtacgttggggtttcccacgctaggctgcatagcattataacctgggaacgttaaaaaaaatacagacattcttgattcttagtgtagttatgatgtggatcctacgtattttttaaaaaactctccagataattttgatgtcacgagtcactagtatagactatctatctagtgagttgtattataagcgatgaaatactttaaaagctacccagtaactcttgggattaattttatgaaataaattctgagctgctgcttttgatatagtcagacttaagactgaaccccagtagacaggcaatagatatagaattctggttagctaattgaacttttgtg

SEQ ID NO: 42689 - DNA, 714 bp, Homo Sapiens
  misc_feature (599)..(599): n is a, c, g, or t
  misc_feature (705)..(706): n is a, c, g, or t
  misc_feature (708)..(708): n is a, c, g, or t
  misc_feature (714)..(714): n is a, c, g, or t
cagccacctatggatgcgtcccagccagccccgtcgctctcgtccatcctcagagacaaagaagagggcagggagtttgggcttggttttgaactttcctttcaatgtagcaaagcattcctagttaaccagagccttggaatctactgcctgctggccaggctttaaaatgaaaagtgttttaatgctgccataaaagggaggcgggggggaggaagggaaaataaaggcatctttccaagtactcatctaatttaattgtcaaaagattgataggccatgaattacttctccatctcactaagggttaaaggcgtgcaaccccccactggctgtgtcccctgccaccgaagtgagtgacctgccctacaaccaggtgggaccacctgtgctgcagtccggaggggcttctgcaggaagcactcaccccccacaccttccccggcctgagcttcccctacctttcgtcaccacctgagggcatgagcacaggccatggggcgtgcctggtgagtctgcctgtggttcaggcttagcctgtggtctcctgtgtgctgctgcccgcatgggatgcgcaggggaggcgtggggatccgcangagggtggttgggatacaccggatacctctgctctcattgcttgtttgcaaatgctctatggacatttgtgtgctaaatctattaataaaaagacggttaaacccnnanaaaaan

SEQ ID NO: 42690 - DNA, 748 bp, Homo Sapiens
  misc_feature (695)..(695): n is a, c, g, or t
  misc_feature (730)..(730): n is a, c, g, or t
tgtgtccgagccgagcacctgcgtctacgcgctgacgttcgagacccccctcgtctgccacccccacgccttgctagtgtacccaaccctgccagaggccctgcagcggcagtgggaccaggtagagcaggacctggccgatgagctgatcaccccccagggccatgagaagttgctgaggacactttttgaggatgctggctacttaaagaccccagaagaaaatgaacccacccagctggagggaggtcctgacagcttggggtttgagaccctggaaaactgcaggaaggctcataaagaactctcaaaggagatcaaaaggctgaaaggtttgctcacccagcacggcatcccctacacgaggcccacagaaacttccaacttggagcacttgggccacgagacgcccagagccaagtctccagagcagctgcggggtgacccaggactgcgtgggagtttgtgaccttgtggtgggagagcagaggtggacgcggccgagagccctacagagaagctggctggtaggacccgcagggaccagctgaccaggcttgtgctcagagaagcagacaaaacaaagattcaaggttttgattaattcccatactgatgaagataactccatgggttctgtgagccattgcataagtgctatggtgtggaaaagtttaaacaagtgttaactttanacagttcgctacaagtaaatgattataaatactanaaaaaaaaaaaaaaaaag

SEQ ID NO: 42691 - DNA, 716 bp, Homo Sapiens
gtctatccacaccatcaccaccaccaccacacccctcctccctcaacatacaatttttctttattttaaaaaaaataagagacggggtttcgccatgtttcccaggctagtctggaacttctggcctcaagcaatcctatctctgtctcccaaagtgctgggattacaagcatgagccactgcatccatccaacacaaaatttttaaaatcggaatattttaaagcaaatcacacaaattatttcacttataatacttcagtaaggcctttaaaaaatccacagtgatattattactcctaacaaaaacaataattacttagtatcatctaatatgtggttcatatttaaatttgttgttttgagatgggtcttacaattggtttattcaattgcattttttctaactcgtgtctcaagtgttttaaaaatctactgaacttataatgacttatataatgtatttctcattttacctttcttccaaaagaggaaataatggcaaaccatataatattgtacattcactgtcaaaaagccaacccttgttttgataacttgttgattgataaaagttttccaaattgaaaaaaaaaaaaaaaaaaactggaaaccggcacgagggggggcccggtacccaattcgccctattatgagtcgttttacaattcactggccgtcgttttacaacgtcttgactggaaaaaccctgccgtc

SEQ ID NO: 42692 - DNA, 836 bp, Homo Sapiens
  misc_feature (790)..(790): n is a, c, g, or t
  misc_feature (795)..(796): n is a, c, g, or t
aatgtatgtaccatttattttatctggttgtgtgtgatgtgtgtgtatgcctatttaatatgtacacatatattcactacatatgtatgtatgatatattcatatatacatgcagtctgcttgattatcagcaaaatggtcagcctttatcagatagtttcttcatgtggagttcatctgcatgtggcccttactctgaagcctcttcctgatctggagccacagtctgtctgtcttccagttcatctcagtcctcgagaaaggccctttaaatatgtcactttcccattttcctttaaccatgggttgtgtgagccagaaagagctttgagaaagatggctgcttccaccagggtggaggcttctaggtctgcatgatgatggggcccgtttctggccagagggtggctctgggagcagttgtgctgcgggcttgctgggggagaactctaactgttgcagaaacagagcttcatggcttgcttaaattacttagctggaatattttaaagtgtcagataatgtgatgtacaaagagagtatgccgatgcatttcattgtttttgcattatctgtatcagtatttcccattgctagcccgaataatcaagaccagactgtttcttgtcactggattctggaagccttgccctttcaactggatttatgtttgtttctgctgctgtgaaaccccaaagtaatgcagtaggttttaattgaaaattgtttaattctattattgataattatttattgtaataaaagtaaaagagtaatttttaaatccttngggcnncgggaagtgcattaacaaagaaatatcccggggggggccg

SEQ ID NO: 42693 - DNA, 613 bp, Homo Sapiens
cttcggcacaatgcccttattcaagaggtgattagccagtcaagagctaggtttaatcccagtatcagcatgattaagaagtgtattgaagttctgatagacaaacaatacatagaacgcagccaggcgtcggcagatgaatacagctacgtcgcgtgatgtcgctctcctccagcgtggtgtgagaagatcattgccatcaccatttggtgtgttcctgtgggaaaaagcaggactgtgcctccataatttggtcatttggcagcccctgttttctgctgtttacaacatcaccagtgccacgtcatgagcgtcaaagaaaatgcctagagatatttcaagctcatgtcattatgacatttcttaaaactttattaaaagaatgagtgaagtattgctgaaaagtggaaattcggttgggtaccatgctttttctccccttcacgtttgcagttgatgtgtctttttttttttttttaatgtatcttaaaggacataaaatttaaaaacttaaatattgtaatatgacagataacctaataattgtwtctacattaaaatgacaaacatgatactgctgcttgtcaaataaaaaaaaaataaagaaaaaaaa

SEQ ID NO: 42694 - DNA, 876 bp, Homo Sapiens
cagggctccagaacctgatacctgttaccaaagctaggaaagagctttatcacaagccttcactgtcctggcatgagaactggctgccaggctcagtgtaccccattaactgtgaatgaatctgagcttggtttcctttattgcttcctctgcaatatgattgctgaaacacattttaaaaattcagaagcttgtcactcctgttaatgggaggatcagtcacacatgtgtagtacaaggcggactttgtgtttgtttttggtgttaatttttagcattgtgtgtgttgcttccccaccctgaggagaggacaccatggcttactactcaggacaagtatgccccgctcagggtgtgatttcaggtggcttccaaacttgtacgcagtttaaagatggtggggacagactttgcctctacctagtgaaccccacttaaagaataaggagcatttgaatctcttggaaaaggccatgaagaataaagcagtcaaaaagaagtcctccatgttggtgccaaggacttgcgaggggaaataaaaatgttatccagcctgaccaacatggagaaaccccgtctccattaaaaatacaaaattagcctggcatggtggcgcatgctgtaatcccagctactctggaggctgaggcaggagaatcgcttgaacccaggaggcggaggtcgcagtgagccgagatcatgccagtgcactccagcctgggtaacaagagtgaaactccgtgtcaaaaaaaaaaaaaaaatgttactcatcctctctgaaagcaaaaaggaaaccctaacagctctgaactctggttttatttttcttgctgtatttgggtgaacattgtatgattaggcataatgttaaaaaaa

SEQ ID NO: 42695 - DNA, 576 bp, Homo Sapiens
gtcttgttttaaatatgtattatgtgtatatattgtttgcagacattattgttcatgccttagaggattgtagcattttattttcgtctgaaggtaatgatagctatacagtctgtacagtaattatcctctaccaacactgtggcgtctccttaatcttggtagtgcctgcctttgaaacagggtgtaggggatattagttttccatttttctattttgttatataattttaagccaccagggcctaaattaaagtataatcatttgtatccatgtggaataaaattgtgacaatttcctacgcacacagtatttttttcatagaaacatttccctcccatttgccttgcctcagaaataaatttaaaagacgtttgtaaccactgtgttttatctactgtgtgttgtggtggcctgttggaggcaaatagatcagattttttttgtacctacgtaagagtacttgaagttttatttaaaataaaatgttgtggaaaaggtagcattctttttttaggagtgttatttttcactatgtgtggcacggatacaataaaagacttttacaaactaaa

SEQ ID NO: 42696 - DNA, 626 bp, Homo Sapiens
tgctgtgctctggcaccatcagcctgttccagaaggaggattcgagcatcaggctaagaccctgtgtcctccaccatgcactcacccctagccctggttagctgacagtcagctgtggggaacacagctacaaccctaccctggcagggacctgagagcatctcaggaggggcagcgcatgtgtgcatgtgctgtgtgagtgagcacacccgtgtgcacactcatacacatgtgcacacacacgcactctccccgctcaggggcctggaggtctggctgagcccctggggaaaggtgagttctttcatctccctcctccaggtcggagtgcctggagtcaggtgtcgaggccacattgctggctgccccctctttgtagctcctataaagggcccacacctggtggatacctggttgagcgtgtggtctctgccccagcctgtccttgtcacgatcacaggccttgcttttgtaacaatgatgaccccggcctgtctcatcttctgaagaggaaaagtcaaagtgttgctgtggctccatatttcaactaaaaatatatctgttggagaaagaaattaacaataaagaattttcataggttaaaaaaaaaaaaaaaaaaaaaaaag

SEQ ID NO: 42697 - DNA, 630 bp, Homo Sapiens
gtcacttatttctctaaaattatctcattgcctggcaatcagtcttctcttgtatacttgtcctagcacattatgtacatgggaaatgtaaacaaatgtgaaggaggaccagaaaaattagttaatatttaaaaaaatgtattgtgcatttggcttcacatgtttaactttttttaagaaaaaagttgcatgaatggaaaaaaaaatctgtatacagtatctgtaaaaactatcttatctgtttcaattccttgctcatatcccatataatctagaactaaatatggtgtgtggccatatttaaacacctgagagtcaagcagttgagactttgatttgaagcacctcatccttctttcaatgcgaacactatcatatggcattcttactgaggattttgtctaaccatatgttgccatgaattaactctgccgcctttcttaaggatcaaaaccagtttgatttgggaatcttcccctttccaaatgaaatagagatgcagtacttaactttccttggtgttgtagatattgccttgtgtattccacttaaaaccgtaatctagttgtaaaagagatgggtgacgcatgtaaataaagcatcagtgacactctaaaaaaaaaaaaccaa

SEQ ID NO: 42698 - DNA, 618 bp, Homo Sapiens
aagtactgttattttggtgattaaaatccaaaactttagctgtatttcagtaacaaaaacataccttactagactgtgatggctcacacctgtaatcccagtgctttgggaggctgaggtgggaagattctttgagcccaggagttcaaggctgcagtgaattctgatcgcaccactgaactccagcccgtatgacagagtgagaccctgtttctaaaaacaaaacaaacaaacaaacaaacaaacaacgtatcttactgactaaactggaatggaaatcttataattagtgttgtatttttctgcaaaatagtgaattggtacttgggagacttctgttctttgttgaaaaaaattgcctttgttttgaaattatatcacctgtgttctgaactaaaatgatgggagttcattttgtatttactttgcagtaagtatcatgtaaatatgcaaatgttgaatgtaatatagattgtgtcctcattgagtttttgggtgatacagtttataaatataacaattatacaccctcatacattcgtctgattttgagcttgtaagatgagaactgctttttacacatttaataaaaaaaggtctctgaaaaaaaaaaaaaaa

SEQ ID NO: 42699 - DNA, 939 bp, Homo Sapiens
  misc_feature (677)..(677): n is a, c, g, or t
  misc_feature (826)..(826): n is a, c, g, or t
ctagtaacacatatgtagtataatttctagaaacaaacatctaataagtatataatcctgtgaaaatatgaggcttgataatattaggttgtcacgatgaagcatgctagaagctgtaacagaatacatagagaataatgaggagtttatgatggaaccttaatatataatgttgccagcgattttagttcaatatttgttactgttatctatctgctgtatatggaattcttttaattcaaacgctgaaaacgaatcagcatttagtcttgccaggcacacccaataatcagtcatgtgtaatatgcacaagtttgtttttgtttttgttttttttgttggttggtttgtttttttgctttaagttgcatgatctttctgcaggaaatagtcactcatcccactccacataaggggtttagtaagagaagtctgtctatctgatgatggatagggggcaaatctttttcccctttctgttaatagtcatcacatttctatgccaaacaggaacgatccataactttagtcttaatgtacacattgcattttgataaaattaattttgttgtttcctttgaggttgatcgttgtgttgttgttttgctgcactttttacttttttgcgtgtggagctgtattcccgagaccaacgaagcgttgggatacttcattanatgtagcgactggtcacagcgtgcaggttttctggttctgtgttgtggggtcaaccgtacaatggtgtgggagtgacgatgatgtgaatatttagaatgtaccatattttttgaaaatatttatgtttttctaacaatttatcgtatangttgatgaaacgtcatgtggtttgccaaagactgggaaatattatttatgtgttcacatggtcaaaatttcaccactgaaaaccctgcacttagctagaacctcctttttaac

SEQ ID NO: 42700 - DNA, 533 bp, Homo Sapiens
gcacgagggaaattgagggctttcgccttagcgcccactgctcctgtgacagcagggataacacactgcaagtggacatcaacgggttcactaccggccgccgaggtgacctggccaccattcatggcatgaaccggcctttcctgcttctcatggccaccccgctggagagggcccagcatctgcaaagctcccggcaccgccgagccctggacaccaactattgcttcagctccacggagaagaactgctgcgtgcggcagctgtacattgacttccgcaaggacctcggctggaagtggatccacgagcccaagggctaccatgccaacttctgcctcgggccctgcccctacatttggagcctggacacgcagtacagcaaggtcctggccctgtacaaccagcataacccgggcgcctcggcggcgccgtgctgcgtgccgcaggcgctggagccgctgcccatcgtgtactacgtgggccgcaagcccaaggtggagcagctgtccaacatgatcgtgcgctcctgc

SEQ ID NO: 42701 - DNA, 586 bp, Homo Sapiens
atagaagttagtttaagccaagtgtagacagtacattactcccttgaaaaagaattaagttgaaagagttgactttgccttaaaaggcagatctaacccaagctccatccagtaccaaatgtgaaacttcattgttgtttggtgagaatcgccaaattctcactaatacattggtatggtgtagggcatgctactttttaaacagcagcacttatttttacagattgctactccaaggaagaaaactggccacttttcatgtaaatattttgttcaaagatttgtatatctctctaggagttttccctcagttcccaggatggggtccaggagtagattaacagctaaaaatctcccaaggatatcttgttttgatttatttactccagggaactatcagctccttcacaggagccaaaggggagctatgaatagagggtcacatgagccagattctttactgttcataaaacccagagagtagttgtgaaagattttaatacaattgtgaaaagctctgtaaacatgaaatctaaaacaaatgtagattttcacaatatgcttattaataaatgaagtctatgga

SEQ ID NO: 42702 - DNA, 966 bp, Homo Sapiens
  misc_feature (470)..(470): n is a, c, g, or t
  misc_feature (966)..(966): n is a, c, g, or t
ttctatagcagctaggtgagtttgttttccgggtctgtcttaactggcagcttcctgtacatactggtacttatttgctgtaaacgtctgtttcatacatttgccatgcagtgactgtgctcgaaaggtgaaatcaatggtaaaaaagcctaggattttatggtatgagaaactgatcgcaggattttctgatccatagctattaattgaaaacttctgatagtgctgtaggctctatagtaggcttaagagtgagtcttatactatgaagccagccacaagatactaacaaatgtataaattgaaaagtaccaatactttttgcacatagatcaaaatagagtggagaatttgggctccaaaaatcaggttagtaggctcatttccatgtgcttaaaaatgttttgtgttatgcattgattaagggctagagcaaatataaacattaaaatggttctttttcctccaanataaaaaaaaaagaaaaaaaaaacaaaagaaaaacaaagacacagacaaaaaacagaaaaaaaaaaaaaaaaagaaacaaaaagaaacaaagaggggggggggggaaaaaggaaaaccacgggaggggggcggcaaaaggcaacacccggcgggggcaacaggtgcggccccacaggggggggagaaaaagacggcgagtgcgcggcgaaaaaaaaagcagcgcgagcgaacacgtcatggacgggctccgggacagacaccaaaggggcggcgaacagaccaccacccagcagaacaaacgctgcggcatcaagacacagcgcctggtgacacaccacgacgccgcgaagaacgccggggtcaaaacttcgcgagccaccagcgggcgacgacggagtgaaatagacaggagaacgacggccgcagccagcagagacgcacgcacgcacacgcgcaccagacgaccacaacagcgagtcgcactccactcccacn

SEQ ID NO: 42703 - DNA, 917 bp, Homo Sapiens
  misc_feature (886)..(886): n is a, c, g, or t
aacgtcttgggaaaggggagagcttgacctccatctaggtttcttttatctggagaaaaagaacacttttgaactatgtaatgcttcgccctgaaaggcaagctaacgctaacttcccaggtgacagtagcaggaacaaggaagggtaatgtttccatgacagacacttgcttcccttgggacaagtcccagaagaactacctgaagcaccaaagctccccaccccagcctggtggcagaggaagcaggtggcaccaactcaccaaagggacttgggagccaccttctcactctgtggaagtactttagtgagagctgactggcaagataaaaaccctgaaattcccagaagttacagatgccttaaagactttctttggaagatcattgcctgtactattccttttttgtgtggcataaataatatattaacctattacaactgacaacattggttttctgcagctagggagtcttgagtcgagactgctcgccttgatgacttgctcttttttggcagatgtgtggagttggctgttacgacatccctgtgtgatcccagaggaggggcagtagctgggcagaaactgcaggcacacatttgggtggatcacctggcttccagcccccttcggggtggtgctcagtgtggggtgatggtatcatagaggaccacggcgcttatcagcattgtttctttggagtctgtgtaatggaatgtatttttcaaatactgatatttgcattttctgtaacaattccttataataaaatgaagtaaaattggtgcatttaaagtgggaaactttaataaggacatttgtagttacttcctaatgcagaagtaccaataagcattaaaaacaaatttttacaaaaaaaaagnaaaaagggcgggccgctccaaaagattcccc

SEQ ID NO: 42704 - DNA, 707 bp, Homo Sapiens
ggatccaaattcagcagcttgggctgcttattacgctcactattatcaacagcaagcacagccaccaccagcagcccctgcaggtgcaccaactacaactcaaactaatggacaaggagatcagcagaatccagccccagctggacaggttgattataccaaggcttgggaagagtactacaagaaaatgggtcaggcagttcctgctccgactggggctcctccaggtggtcagccagattatagtgcagcctgggctgagtattatagacaacaagcagcctattatgcccagacaagtccccagggaatgccacagcatcctccagcacctcagggccaataataagaagtggacaatacagtatttgcttcattgtgtgggggaaaaaaacctttgttaaatatatggatgcagacgacttgatgaagatcttaattttgtttttggtttaaaatagtgtttcctttttttaaattttttttttgaaaaagtacaaaatatctatcactactgataggaggttaatatttctgtgtagaaatgaaaattggtttgtttttagtatttagtgtagatgtacacattccagcaaatgtatttgcaattatgtggttgatgctttgtgawawaaatgtactttttcaatgtawactttcacttttaaaatgcctgttttgkgctttacaataaatgatatgaaacc

SEQ ID NO: 42705 - DNA, 627 bp, Homo Sapiens
  misc_feature (579)..(623): n is a, c, g, or t
tgcggatgctgtacgtgtgggcgctctgccgagaccaggacgagctcaacccctacgcggcctggcggctcctggacatctcggcctccagcaccgagcagattctctgagtgtggtgccggagccaggtagccccggcctgggtcatcaggcacagaggcaccgcaacaccacctgcggcaactccagacctctgggaacaagactgcgggctctgcccccagctctgccaggacggctgcaagaccagctggcccgggaggggacaacgggctgttgcgggtgcgcggcagctggagacactcccccgcagggccaacccctgccctgttgctctgccctgcaggggtcccggcgcctggtcacctggggtgcacacaggtcacacagtgccaagaggccccagggcccagggactccccccacagcagggtgggacccgggacccgcggctcagtggcccgctagccacgtcagccaagccactttaggtccattttttaattttaacagtgctcttccatcttgtgcataagcctgagatttggaaagaataaaacaccgaattgcagaagagcnnnnnnnnnnnnnnnnnnnnnnnnnnnnnnnnnnnnnnnnnnnnnaaag

SEQ ID NO: 42706 - DNA, 573 bp, Homo Sapiens
cccggtttcactctggccccaggagtggagcctggccactcctgtttggttctcactgggaggcccactggccttggatcatctcctcatgcacacccggagttttacctgcttgcttgctttcctggactgctgtttgcaagaaagtaactaaaacatgaaaagtaaacctccagcttccacagtatattacctgccgttgcatgcatttgaaagttagcctcctcccttgccaccgtcttggtggcagtagcgatgcaagaatgatgggagctttccgagagcgttcagtgtttcactgaagacaggacccatagccttcatttctggctctgtgtctcctctggcatatggacacatttcctggcatttgcctgagtctacaccactttttgagaacctgaaatagaagggaatcttctgtggcccacagtctccatattggcactagaagactggcctggcggaggaatttgcgttggcttgctttcaggggttagctacaagattcagctttatatctctgttgcttcttggccagtgtagtcaataagggtcttctttaacatctaa

SEQ ID NO: 42707 - DNA, 771 bp, Homo Sapiens
aaattgacgacagcgtcctgggacagaccgggccctaccggaggccccagcgactccggaagagaacggagtttgcgggagataagttcaaggaggagaaagtgtttgagccaaacgaggaggccctgggggtcgtgctgcacaaggactccaagtggtaccagcagtggaaggacttcaaggagaacaacgtggtgtttaaccggttcttcgagatgaagatgaagtatgacgaaagcgacaacgcgttcatccgggcatcccgggcccttacggacaaggtcaccgacttgctggggggcctgttctccaagacagagatgtcggaggtgctcacggagatcctccgggtggacccggcctttgacaaggaccggtttctgaaacagtgcgagaacgacatcatccccaatgtcctggaggccatgatttctggagagcttgacattctcaaagactggtgctatgaagctacttacagccagctggcccaccccatccagcaggccaaggcactgggtctccagttccattctcgcatcctagacattgacaacgtcgacctggccatgggcaagatgatggagcaggggccggtgctgatcatcaccttccaggcacagctggtgatggtggtcaggaaccccaaaggcgaggtggtggagggtgacccggacaaggtgctgcggatgctgtacgtgtgggcgctctgccgagaccaggacgagctcaacccctacgcggcctggcggctcctggacatctcggcct

SEQ ID NO: 42708 - DNA, 704 bp, Homo Sapiens
  misc_feature (3)..(3): n is a, c, g, or t
  misc_feature (648)..(648): n is a, c, g, or t
ccntgtgtcttttggcagtcagtccagatgggaattggctagctgcatcaggtaccagtgctggagtccatgtctacaacgtaaaacagctaaagcttcactgcacggtgcctgcttacaatttcccagtgactgctatggctattgcccccaataccaacaaccttgtcatcgctcattcggaccagcaggtatttgagtacagcatcccagacaaacagtatacagattggagccggactgtccagaagcagggctttcaccacctttggctccaaagggatactcctatcacacacatcagttttcatcccaagagaccgatgcacatccttctccatgatgcctacatgttctgcatcattgacaagtcattgccccttccaaatgacaaaaccttactctacaatccatttcctcccacgaatgaatcagatgtcatccggaggcgcacagctcatgcttttaaaatttctaagatatataagcctctactcttcatggatcttttggatgaaagaacactcgtggcagtagaacggcctctggatgacatcattgctcagctcccaccacccattaaaaagaagaaatttggaacctaaaacagggcactgtctgtgtccttccttgaactgtctaccctgntgcttttcacaaatcatggtaataaaacaaggtattcttggaaaaaaaaaaaaaaa

SEQ ID NO: 42709 - DNA, 672 bp, Homo Sapiens
cgtccgcatcttctgccttcttattttcctgtctgtcaaagacagaaattacaggagatagggagggttttttagcatctctttcaaaagatgtatgtcagaatttcctttgcacaccaagaactggagcttagagccccactattctctaagccaggttctagtgccttacactccagaatgtcagatggtgggtgcagatgggaagaaagagaaaagttcatctcggtgtgtgggttcccatccgccccacatagcctctccttcttcggaacaatgggcgtggggtagaaagctctttcagtgaagggtgttctagcagctcagttaacactttactctccagtcaacacttgggacatataaaaatgccattgtaactactgtagagtcctgtgactcatcgtttgtgtttgtcagtgtgcagttcagcttagcccttccctgttcctgtgtagttacaatctggccctgaagacatccgaggcacttcagtaagtgggatcttttctagagatcctgggtgactttgggtgcacagggtgaccgagcatttctgcccctgtgaatgtggcactaacactgtgcactgtctccaccaagcaaggtttccactgagtttcttctcatgttactgggtttgtaaatgaataaacacattttaactactct

SEQ ID NO: 42710 - DNA, 602 bp, Homo Sapiens
  misc_feature (560)..(560): n is a, c, g, or t
agatgaacaagtttctgctgtttgaggcacagacttttctggaagcagagcgagccacctgaaaggagagcacaagaagacgtcctgagcattggagccttggaactcacattctgaggacggtggaccagtttgcctccttccctgccttaaaagcagcatggggcttcttctccccttcttcctttcccctttgcatgtgaaatactgtgaagaaattgccctggcacttttcagactttgttgcttgaaatgcacagtgcagcaatcttcgagctcccactgttgctgcctgccacatcacacagtatcattccaaattccaagatcatcacaacaagatgattcactctggctgcacttctcaatgcctggaaggattttttttaatcttccttttagatttcaatccagtcctagcacttgatctcattgggataatgagaaaagctagccattgaactacttggggcctttaacccaccaaggaagacaaagaaaaacaatgaaatcctttgagtacagtgcttgtccacttgtttacaatgtcctccttttanaaaaaaaaatgagtttaaagattttgttcagagagtaaatat

SEQ ID NO: 42711 - DNA, 566 bp, Homo Sapiens
cttttttttatttaataagttaaaattcttttggcacactattaaatgcaaaaactcctttcaaaacaaaaaagaactaccttatattcaacatttaatgttcttggcctctgcttttatgtctatacaatatactgagttcagtatggtgtccaagagtgccctgtgtggatagacatgtgcactccttccaggagtgggtactgattccagactccagatgcctattattagttaggcttctgagcttgcaatcatattgaatgtatgaagagcgaaatcaaattcttatttttgtacagttttgaagtttatacttagaactgaccacctccccggccacgcggagagctgtacagtgtgtaaatctgcctttatcttggattgattggtacagtatttttgcatctgtgggacctaccttttcgttcagtagtttgaactatatataaactgtacaatctgtaaagtttttatagaataaatattcagctgtgaaaactggttaaataaaactaatatttcttaacacaaaaaaaaaaaaaaaaaagcctacacctcgtgcc

SEQ ID NO: 42712 - DNA, 910 bp, Homo Sapiens
tagcacactggcagcctcgaatttctgggcttgagcagtcctcccgtctcagcctcctgagtagctgagactacaggtgcacaccaccaagcctggctttatgtatttatttctgttcatgcggaatgattggttcagaactgttcctttcccttccatgatgtccttgacacagaaggttatgcctggctcccagtcaggcttcatacttttggtccatgtaagtgctacccgttgctgggggaggagtcatggtttatttggaaatgtcagttgcaatcatggttctgtcatttgactgcacagtatcagaggagcctgttaacctctctgtgccttagtttcttagcccatgaaagagatcattgcctgacccagggactacctcaagggcttttgatgaggacaagtgacagtaggaagatgcaagagcctttagtaccaaggttctcaacactgactacatgctggaatgactgtgaagcttttaaaaaatgttagtgcccactcttcccctgtacccccggacagttaaatcagaacctcagacagcaatatgccttgagatgccttgaaccatgcttgagaaggaaggacaaacacattattatctttggaagaattgcatagggctcatgacttaaaaaaaaaaaattctttttggaaacacaagcatttctttaaggatgacccgatgttgccgtatgtatttatggcaccagcggtggtgtctaagcaggttcctctgtttgcttgtcatagcagcatttggaaacttcaaccatggcttcattttcataaattgtttttgaagcttttgacacccaattgtttcccggccccgaacttattattccggttaatattgttttagggggtttattttttggaaaggtccctcttccccaaa

SEQ ID NO: 42713 - DNA, 652 bp, Homo Sapiens
caaacaccctataccaccttcggacagagtccagatggctgttctaccgttatgtttcccaagataatgggaggagcatctgcaaacgagatgctgctcagtggacggaagctgacagcgcaggaggcgtgtggcaagggcctggtctcccaggtgttttggcccgggacgttcactcaggaagtgatggttcgcattaaggagcttgcctcgtgcaatccagttgtgcttgaggaatccaaagccctcgtgcgctgcaacatgaagatggagctggagcaggccaacgagagggagtgtgaggtgctgaagaaaatctggggctcggcccaggggatggactccatgttaaagtacttgcagaggaagatcgatgagttctgagtgtcgggctgcccactggtgacaccgggatcgggctgagcaggagaacatcaccggctccagttcccctgatccattctcacagcctgaaacaagctcacccgtagcttacgcttggaagcaggactgggaacatccacgctatttattatcgaggagttttaaagtactgtaactttaaaataaataactacaaagcttctttgtccaaacgtcattattttatacttatatacacgcaggtgtaaaagtataaaggtgagcacta

SEQ ID NO: 42714 - DNA, 892 bp, Homo Sapiens
ggcagcgctggccttctccagggatggcccaaggcttccgcagccgcccgttccgggacctgcccagcgtcctccctgcctccttccgggacaagcctggccaccctcgctgtgatgacgagctggctgattggccctgggccggcccattcttcacacgcctgccagaagctggaggggtgctggagacccatagagctgatgggagcagctggtgcctggccttcggctcctgcgtccccagaacccaagggaacgtcatggaggccacatggggccacccggctccctcgggatggctccgcctgcacttttgaaaccccggtttccttcaacgtccacattccaggtgaccacacgtgtctcctcctcctcatcttagcttccaggttcaccctaaccctgtactaacctgcttggtggacttggaaaagacttggctctgtcgggaaaggagagacggggcctccatcacgcctgttaccagaggatccccgagagccacaccagctctggacatcaccgcccctggaactggggccaccagccctgggcacgagatttgctctgactttatttatatggcatgaaatctctggtttattttgggattttttgttgttggtgttgtcaaagtttgttttttctaaagttgtgtgattatatatttgacattttacatttcaaagaaaggtatgttgtctaacaggggaccaacagaaagtagtattggacactggttcccgcttctactaaaaaaaaaaagagcaccaaaggaaaaactaaaattattgaaaaatttaaaaaatgtccattggtttcctgttttggtaaatatttaagggttggaaaagggggtccgtttttggaagggaattccgacttgtgggat

SEQ ID NO: 42715 - DNA, 687 bp, Homo Sapiens
agaatctaaaggggtattagccagcctcgcctccctgccccacgtagagacacagagtgatgtgaggcgttggctttttctccaagaaggtacagatacctcagattcgggaaactcaaaatcaaaagacttagcttctaggataaatacttctgatgaaaaatccgctgaggagcataccccaaaccagacatatgcttaggattcatgctgagatatcaattggtttccccttctttttaaaatacgtccagttcttacccagttaacatgaagaaaccactgtctctagaagaaagcttgttttgcagtattagtgaatcactgaatagcttaagtatgactatctaagttataagttagtctttagtgggttttaaatagtttttctgacccttctgaaaaataactacataagtgcttcttgttgctgggtgagaaatactactttatagacagttttggttttctgtttgcagatatgattgatgtatttcaccaaaataaaatatttttatgtttataaagtgtaatttttaggttcacttagaatatattttatttaataagttaaaattcttttggcacactattaaatgcaaaaactcctttcaaaacaaaaaaagaactaccttatattcaacatttaatgttcttggcctctgcttttatgtctatacaatatac

SEQ ID NO: 42716 - DNA, 547 bp, Homo Sapiens
  misc_feature (517)..(538): n is a, c, g, or t
gggagtgtgtggagacaaaggcagttcccaccacagttaggtcctggccgttgtgttgtttcctcgcctgcgatgctccttgtacgtcctcaccctcctctcccgcctctgccttctgctgggtcaaaggtggcctttttctctccagccttgaattgttccctgttggcttcccaagggcccatctgctggtacagtccacacttccaaagccaagacccgagagggctttcactgccccaagcctctctcctgtgaccttgggattctgtcttggcagaatcctttgtcagcggctcttgctctgtccttcctgtttggccacagctctttcaatcaatgggtattctagaaccgcaggatgtcagagctggaagggacgcgataccggtttacacaaggggaaactcctcgaggctctgggagggacggagggttttggtgacagagcgagagctaaaattgaggattcctgaatccagatcttgcctcccatcagccatctttctcccaaaannnnnnnnnnnnnnnnnnnnnnaaaacatgt

SEQ ID NO: 42717 - DNA, 649 bp, Homo Sapiens
gggccggagggccgcggtgtgccgcggggcagttgcgggttgtcataacggtccccgccggagtgaggcgaggccgcgtcgctcagttctggccgtctagggcccctgtaaggatgagagcgcagaggacgcagggccgctggaggcgcaggtaacgaagctagggtgcggttgggaccgcggctgagctttttccgggacccgtggtgctgaatggagaggacggagacgaagccgagccgcggctcctagcggcggcgccgatgctcgagctgtagctgccaggcgaggatgtgtggagcgcaggcggcgcggggtaaatgagaggtctcgggccccaggacccccggggcccgggatgagttagcgagggcagccgcgggggccagttccgaccgtgacaggccaaggcgacggccgccgcccgcccgccccttccgtgcagaagcagctgctcctttccgcgcccgcccgcctgcgctcccggccctggagaccatgaggttccgcatctacaaacggaaggtgctaatcctgacgctcgtggtggccgcctgcggcttcgtcctctggagcagcaatgggcgacaaaggaagaacgaggccctcgccccaccgttgctggacgccgaacccgcgcggggtgccg

SEQ ID NO: 42718 - DNA, 789 bp, Homo Sapiens
gccattacaggtttcataaaattacactgacttggctgttacttgatcttaggaaacagcacagtttaagatattgtgaattctgacttatactttattaaatgctataaatctaaatagatcctgttggatgtgatgggtctagtccagtttatttaagttcatgtttcactgtttgcactttgcattgaacaatgggtttattcgctgatgtaaacggttcgagtgaagaattaatgcagtaagtatgacaacacatacacacttgcctctccccatctccagaagaggggagcagagtccgagcttatctaaatatgaatgtggccacaaagctgtggaaggtgacaaagcttaaacacctttgccctggctctgcattgtcacctagagagcaagaggtctatagaaacatcatgtcacatgaaacgattctctgctttttggttctgaacttgaagtccctaaactgcaaaatctaagagttgggtggttattaaaatgcttttaaaaagttaactgtggcaccaattctaatgtaatccaacttgtgactgttttttttttgttttgttttgtttttgtgtgtgtgtgtgtgttgcactgggaaaagtggaaacaaacatgtattgaaatacatattggaaataaaaatggtttgagcgtcagtgatattctcccagaatgtacttatcttacctcggcatgtactgtagtcactcagtatttgtatatgttgctagaattttagattgtaaatagtgaatttaaatgtgtcattgtttttat

SEQ ID NO: 42719 - DNA, 706 bp, Homo Sapiens
  misc_feature (706)..(706): n is a, c, g, or t
gggaaggtttcattttgggagtagggtttttaagctcaatctgttatctgctaaaattgattattgttgatatgagagaagaggggaaattttatttaaattgcatttattaatctttttatctgaaactttgtacacttttccactttcaaaacctattttaagtacagcaaaatttatttaaaactgtcatagcagtaaaaagtattacgatgaaattgttagggtattaatggaacaaacccagtttcactctcttgacacacttattaggaagggattgcttcactggtttaataatttaaaagttatgtttgttaaacaccctgtcagaacagtcattttcagtattagattcctgtactattgtgttttgagtgtgttttggaaccttcatagaacacactttcttttggaatgtatttgattgataagaaagtttaaacattgttttcacctcaatgtagaaatacagtggttttgtttttttttttcttttagtgctgacaaaataaaatactcatttttgcataaaaaggttcctaattcttttgcagaataagttttgtttactctttatacccaaattcagtgaaagcattctacaagtttttgagttaacattacatttttaatatttactattgctacattggtataattgagtttgaaaataaaacccagccttatggacaatggaaaaacn

SEQ ID NO: 42720 - DNA, 513 bp, Homo Sapiens
ccgggccctggacaggaggggctgttgcaggatgagggaggccagagaaggcatcgaagccaagacctgggcccagctggggagggatgtgggaaaggaaggatgggagggaggaccctctgggaaaatgtggatttgagctggtgagagtgttgctaaggctgggctaaagcctggagagggtaggaggaggcaagaggggtccaggcagggctgatcctggcctctgacctgtccagggcgacccctgaagcccctgctgcctctgggcattgctgggagaggccaaggcaggactcacgtctgaacagagatcccctcgggcattgctgatgggccaccttcagctgcagggaagaagcctaggagaggaggcatgggagggacctgggccttgttcagattggccacctctgctgagaagtccataccagtacacccctaataagttatgccacataccaacgtactgtggatattataacctgcattaaaacaactctaaagaacgct

SEQ ID NO: 42721 - DNA, 520 bp, Homo Sapiens
ggagtgtggtacttctcctagttgcagtcaggcttcatacgctgttgtcctgcccgttagagcagccagcgggtacagaatggattttggaagagggagtcaccactggacctccaaggaagccacgtgcagacatctacaaccttcgatctcctgacgagtttattgttggccaaaaccaggctttgattgaaccaggatgaatgcgggtgttggaagtagaatatatatatacatataaaattggttgggagccacgtgtaccagtgtgtgttgatcttggcttgattcagtctgccttgtaacagaaactggcgatggaatatgagaggagccctctggaaagaaaaggacagaccctgtgctttcatgaaagtgaagatctggctgaaccagttccacaaggttactgtatacatagcctgagtttaaaaggctgtgcccacttcaagaatgtcattgttagactttgaaatttctaactgcctacctgcataaagaaaataaaatcttttaaatc

SEQ ID NO: 42722 - DNA, 711 bp, Homo Sapiens
gtaggttgtggtgagctgagatcgcgccattgcactccagcctgggcaacaagagcaaaactccgtctcaaaaaagaaaagaaaagaaaagaaatcatagggccaagttcagaggaaatgcacagaacatatcttcacattagagttaagaattctctagcaaacaacagatttttttgttgttgttagtcacaaatacttagaactggaaggctctttgttattattgaatgtacccctcagccttctcagcatttccttatcccaagactagtgtgctttctgctacactgctagttttcagttttgttcttacccaattgttttttcttttcaacattaccaatttacagattcagtttattacatttacattaatcctcacttatgatttgagcaagctcatttccagaaaagtttactttaagatcatcaataggatttgctaatttcagtgaagtcattttgcttcaggggtaaattatcctagttaccaagtcctatttggacataaagaaaatcctacttatagaaaaggagaaaataattaaacagtcttcatttttaagtaactgatttaaaaggaaaataataaaatatgttcgtttatcatttcagaaattgctgtaacacactggaaaattcctgaacaatatagattttatcgttaataaaaaacactagctttcgttccttaaaaaaaaaaaaaag

SEQ ID NO: 42723 - DNA, 688 bp, Homo Sapiens
tgagccacagctcccagcctaggcccttaatcttgctgttattttccatggactaaaggtctggtcatctgagctcacgctggctcacacagctctaggggcctgctcctctaactcacagtgggttttgtgaggctctgtggcccagagcagacctgcatatctgagcaaaaatagcaaaagcctctctcagcccactggcctgaatctacactggaagccaacttgctggcacccccgctccccaacccttcttgcctgggtaggagaggctaaagatcaccctaaatttactcatctctctagtgctgcctcacattgggcctcagcagctccccagcaccaattcacaggtcacccctctcttcttgcactgtccccaaacttgctgtcaattccgagatctaatctccccctacgctctgccaggaattctttcagacctcactagcacaagcccggttgctccttgtcaggagaatttgtagatcattctcacttcaaattcctggggctgatacttctctcatcttgcaccccaacctctgtaaatagatttaccgcatttacggctgcattctgtaagtgggcatggtctcctaatggaggagtgttcattgtataataagttattcacctgagtatgcaataaagatgtggtggccactctttcaaaaaaaaaaaaaaa

SEQ ID NO: 42724 - DNA, 1110 bp, Homo Sapiens
gcacagtccatccagcccacagctaacctggaccggaccgatgacctggtgtacctcaatgtcatggagctggtgcgggccgtgctggagctcaagaatgagctctgtcagctgccccccgagggctacgtggtggtggtgaagaatgtggggctgaccctgcggaagctcatcgggagcgtggatgatctcctgccttccttgccgtcatcttcacggacagagatcgagggcacccagaaactgctcaacaaagacctggcagagctcatcaacaagatgcggctggcgcagcagaacgccgtgacctccctgagtgaggagtgcaagaggcagatgctgacggcttcacacaccctggctgtggacgccaagaacctgctcgacgctgtggaccaggccaaggttctggccaatctggcccacccacctgcagagtgacggagggtgggggccacctgcctgcgtcttccgcccctgcctgccatgtacctcccctgccttgctgttggtcatgtgggtcttccagggagaaggccaaggggagtcaccttcccttgccactttgcacgacgccctctccccacccctacccctggctgtactgctcaggctgcagctggacagaggggactctgggctatggacacagggtgacggtgacaaagatggctcagaggggggactgctgctgcctggcactggctccctaagccagctggtccatgcagggggctcctgggggtggggaaggtgtcacatggtgccctaagctttatatgtggacatggcaggccgataagggaaccaagatattcctttccttccttcttcgggcctcagatgtccctttatgcacagaagaaagctgggggaaggagcattggttggggggctccggcaggccatgcagcttgaaggcatggggccgggcactccttgtacgagtgtctctttgcacattattaaatcgtgaagatgagtctggaatgacactcatgtgcccctccgtagggtagaacctggtgaacgtgtccgccaacagacaatgggaactaccagtcacaagaaatcgtgatgtacaaacaagctctggagtgcacgagagac

SEQ ID NO: 42725 - DNA, 607 bp, Homo Sapiens
gaacacctgcctcacagctggccgtcacttgtgggggtccacgggacgatggctttgccagcttaaagtaaccggatggcggacacctggcccccgaggtcccccggccgccgccctgctgctgacccagcctgttttaagttctggatgcatttctctggggtatttggggcttatttttaaaattttaatatgggttcttttttgtgtgatttaagacactttttggactcaacgttacatttttgaatgtagtaagtaaattaaccaaaaaagttacaacttcctaattttagtgacagctctgcctgttagactcttactttttaaaatcttttctattttccctcgctggggcagtgccctcctacccccagggttgaggggaccaaggtggcacggtggtactgggggtgcggcagggacacccgaccacaccagagcgtgggagacggtgggccttgtcccctgcctgtgcctgcctgggagttttgtattcatcttttgtatagttgtggacatttaagacagtctttgggtacctattttcattgtaaaactatctgaaccattaaagtcgagcttttctaaaaaaaaaaaaaaaaaa

SEQ ID NO: 42726 - DNA, 546 bp, Homo Sapiens
caacaattggaagagtttttttatatgaactgaaatagatctaagagagcccggttaacagtttcctttaataccagttcagattaaatggttactttaggaacctgtgttactgtgtgagcacccacagaaacaagcaaacttatttcctacaaaaaatgaggggataataaccgatcagagtcacagtcgtttcaatataaacccttccgaaagcaaaagcagggaccacatgagcacacaagaagccaaagtttgtcagtgatcttaataaattaagactgagtaacatcctgcctttagaaaaaaataaccccgaggtggagaccagggcaggggaggtggcggagaagcatcgggccagatcaaccgttaataacatgcttctgagctatgtggatgtataaatgaaaacacccccaactaggtattgtagaggctggaaaaagatgtgatgggattatacaggtgatgcatatttttgttttgagactcaacaatgtgctacaaatgtgatacttaaccctgaactgcatgtattgggga

SEQ ID NO: 42727 - DNA, 661 bp, Homo Sapiens
actggctacaagggcctgagaggtggccagccagggttggagctggaggggatggagccccacctgaggtgccgtgtcacacgggttagagggtcactgggaaacaccgggcggtggcttctgtgatttattttcttgatggtaacttctcagagcagggcgattgggacatcaccagccagagcacaggaagccaccctgcctgctggggaggagggacccacacaagccccctcggcagtttgtccccccagcttcggtatgccttcagggaaaggtcacagctggggaggaagcggggggacgcctgtcacccctggcaggtggtgagttcaggtgggggctccctgctgcccccaggcctgggagcttgaagccctcccggcatctggcatccgagcctcccgccctccagggtgcgcttccctctcttgccgcagcatacacgagggcaggcagtggccttgtcactgtatcttgcatcagagacaaaggaggacccgctttagccctgctgcgggaaatgggggagggcccagggccagcgcattgtgcactggtttactttaaaatgtacagattcttctcgttaaattcttgatagattttttattattattaaaagtcagtttataatacacgaaaaaaaaaaaaaaaaaaa

SEQ ID NO: 42728 - DNA, 864 bp, Homo Sapiens
  misc_feature (707)..(707): n is a, c, g, or t
aatggctgcttttgccagcgaggccaccattcattggtcatcttggtatttgtgtgtgaatctcactttcctcaatgtaaaaaggaatcaagtatggatttcagaggtgctcttagattccccatacacccaagggtaataaacgtgtacaagtacagtgttcatgatacgtgccttggtgggagtccgtggtgccacagggaaggggctcccactgcttctggtctccagggacagtgctgctggaaaggctagtgatgagcttcaccctggagctcctcccgggaccttgcaagcctctccatccagcatcttctctatcttagttgaatgccttctttctgaacatttgttttaagaattattttataaagtcaacaatactttgcttgaattctttcttaatttacgattttttattataaaaatgtatagtgatacaatgggacatgtgaagaatacagaaaagtaaccactttaatgcaataactgttatcataatattgtatttcgtggtagtcctttcctgtagatatttttaatgccatttaatgccattgtcaccttggatttatgagtgaaaagtgtttctaaaaatatagaaataatgtcagatcagagtctgatcttctatgtttgtatttaaatggattaaaagatccccggtggttccatgaagaatttgtaaagatcactttctctttccntcaagccctgaaactttgttcttcaaaagagcgtttcttttttttttttttaagccagtttataaagtggaagtattaagagattcataaatcttctatattgagaattggctatgtttataaatattacaacatcaaaaaaaaaaaaaaaaaggcg

SEQ ID NO: 42729 - DNA, 850 bp, Homo Sapiens
ctgtttacaacaaacttccctaaccaaaacagaacctctaatttagggctaggaatagaagtcttttgatcccagtccctgggacagttctgtatgctgtatcttgtacacaggttgtaggttggtttattgccattttgttttatttctgctgtataaaaaccaagagccagacaattagacaactatggaggaatgaaaggcaattcaaacatctgcttgattcccgccccgccacccctaatttctgagagaataatggttagagaacattgcatctcacttgaaacatcctttgggggtaaatgattcttaggtgctcacttggtctgagctcagctgaatgcagggaagatgggacagagtgacatttctcctctgtgcggcctccagctgagcctgtctctgaattgttccctcccccgcaatgtgggcacttaccatgttcctggcacactggacctcaccatgtcccccggtcaccagtcctcttgctgcccatggttcataggtcatagaaggcagcaatgcactgactgggccacatcttgaaaactcgtggaaagggaaaggggaggagatgggactttgaccacacacagtgatgcctcacaccctgaaggtgggggattttgtacctgtttgtacaactttggtcttgatgggaaaaatggagaattaaaaagtgtttttgagaagctttaaaaaaaaaaaaaaaaggggcgcccgcttctagagtatcccctccaaggggccccaaacttttacgccgttaccccaagctttttccttggaacaaaggtggggccccctaataagtggaggtcgctaatttaattaaagcgttagt

SEQ ID NO: 42730 - DNA, 1079 bp, Homo Sapiens
  misc_feature (880)..(880): n is a, c, g, or t
  misc_feature (903)..(907): n is a, c, g, or t
  misc_feature (909)..(911): n is a, c, g, or t
  misc_feature (913)..(913): n is a, c, g, or t
  misc_feature (915)..(920): n is a, c, g, or t
  misc_feature (922)..(923): n is a, c, g, or t
gtccggaattcccgggatcatgacagtattgaggatgcccgcacagcccttcagctgtaccgaaagtatctggagctaagcaaaaatggcactgagcctgagtctttccacaaggtgctcaagggtctttatgagaagggcagaaagatggactggaaggtgcctgagcctgagggccaaacaagtcccaagaatgcagctgtcttctcctcagtgctggcgctctgactacccttcccaaagaaccacggccctctccctttactgttctatagccccagaactgggagatggcttcctaagttggctataccttgtccacttccagtactggacgtgctcagggtctagggtcacagatggtgctattaattgaactggaacacagcagaattgttgcaaaggttctaggagccagattcattccttcttcattctttgcaaaacagtggtacagacatggagtctagaattgacccagatggaaagtaattggtattcttaatatcctgggtgactaatatccaggcagagaagctcctggaaccataactgtaagttcctagctggctagggattgaagtcctggacagtgacagaggataccacagtagttcaagacttagcacaagtcaccaactgcttcagggatacctggaggggccagcaagtagagtgttggtggcccaagcaaaccagtgttgccaataccattgccaaaagggcctttggatcctggacaaagcttggctgccggcttcatttattcctgctgatggctgagaagcatctgtcttccatcccacttgcctgtcccaagttttggtccatttttttaaaaatttgttgtaaactgcatgttttataaaataaaaataanatatcgtttgttattttaaaacnnnnnannncncnnnnnnannaccccaaaaagggcggcccgctctaaagtatccctccgagggggcccaaagcttaagcgttacccaagctttctttgtacaaagggggccccaatagtgggagccgaaattattacctagggcactggccccgccctttttacaacgtccgggaac

SEQ ID NO: 42731 - DNA, 624 bp, Homo Sapiens
ccctggagggtggagatggagcacctgccccccatggcagggtacactctccccacagccttcctccccaccatcccgtggggactctcgggatttaagcactcgtctctctgggaggcccagaccccactccatttataggcacatctccttcatttcctaggtcactgcccctttgtttacagctcctgcctcctcccttgaccacagcctggtttacaaattccatcagctcccagccccacctgccaaagtcccaggtttacaagccacgcttacttgctgtgtctgcgtggaattctctcctctgtcccctccagtctcctcattggagtgacctgaaggtgtggcttcctccactttttctcagtattactttgccttagttttccccaagagggaaggctggaactcttaactctgtaccccttgatagttatttaattctgtttctcctagtggttcacaattgaactgaattgagatggtgtcgggtggctaaggagacacctcacctctccttccccattgtgccgcctttatcaattgcctgttttgttttgtttgttttttaactttccataataaaatggagttctcttcaaaaaaaaaaaaaaaaaaaaa

SEQ ID NO: 42732 - DNA, 876 bp, Homo Sapiens
gatccgaaaccccgccaagctcaagcgggcaaagaagaagcagctgcgctccattgagaagcgggacaccctggccctgctgcagaagcagccgccccagcagccggcagccaagatctgagctcaggacggcccgaggccttccatggccaacaaccatgtcagacacagcacctcaggccgctgctcagatgcctctgctggagctggcactccaaacccatggctccagaacagggacccccaccccgaccggggctcctcggcctttgaaggcttccaggcaggtctgtgtgggacagaagcccagagggggcctgggacctggcagagatgggggcgggaagagattcagctcccatccctccttcctctccttctccaagtgccttcaaaccaagaactgtacattcttctggttcctcagtgagctggtgactggcaggtgactccctcagcagtgtatgccctttctcagcatcctaggtccatcccaggcctggaggctgacagttgggaatccagcttcccccacaccttcccaaaggctgctctgagcacctccacaccccactgcctctgtccccagcaaactgaatccggttcctctccacttttcaatactgaaagattaaaatggggaggttgcagggagcagagcttttccctagcacccactttcccaaaccagtctctgcagaagccccagagaatctaactcatgcctgtccagtctacagcaaaaatatttattgagtgcctgttgcatacaggcacaatcctaggcaccggcaaatacagacaatagaccaaagtccctgccctcgaggagctttcattctgatggagagaaacataataaacaagcaaaatgca

SEQ ID NO: 42733 - DNA, 911 bp, Homo Sapiens
  misc_feature (808)..(808): n is a, c, g, or t
  misc_feature (831)..(831): n is a, c, g, or t
  misc_feature (840)..(840): n is a, c, g, or t
  misc_feature (847)..(847): n is a, c, g, or t
  misc_feature (861)..(861): n is a, c, g, or t
  misc_feature (883)..(884): n is a, c, g, or t
tcagaatgatgatgagctgcccatgaaagaaggagactgcatgacaatcatccacagggaagacgaagatgaaatcgaatggtggtgggcgcgccttaatgataaggagggatatgttccacgtaacttgctgggactgtacccaagaattaaaccaagacaaaggagcttggcctgaaacttccacacagaattttagtcaatgaagaattaatctctgttaagaagaagtaatacgattatttttggcaaaaatttcacaagacttattttaatgacaatgtagcttgaaagcgatgaagaatgtctctagaagagaatgaaggattgaagaattcaccattagaggacatttagcgtgatgaaataaagcatctacgtcagcaggccatactgtgttggggcaaaggtgtcccgtgtagcactcagataagtatacagcgacaatcctgttttctacaagaatcctgtctagtaaataggatcattttttgggcagttgggaaatcagctctctgtcctgttgagtgttttcagcagctgctcctaaaccagtcctcctgccagaaaggaccagtgccgtcacatcgctgtctctgattgtccccggcaccagcaggcccttggggggctcacctgaaggctcgaaggcactgcacacttgtatattgtcagtgaagaactgttagttggttgtcagtgaacaataactttattatatgagtttttgtagcatcttaagaattatacatatgtttgaaatattgaaactaagctacggtaccagtaattagatgtagaatcttgnttgtaggctgaatttttatctgnatttattgncttttgnatctcagaaaatanaaacttgctacagacttacccnngtatatttgtcaagatcatagctgact

SEQ ID NO: 42734 - DNA, 614 bp, Homo Sapiens
cctaccttacagggctgggggacctgctcggtactggcctcctggcactctgctttttcactgactggctactgaagagcaaggcagagctgggtggcatctcagaactggcatctggacctccctaactgggccccgctggtcccatttgctcattagaatttcctctcacatcagtgggatacagaattcagtttctcccttgccaggtccttgggatggttgacccctgcctctgcagtagccttttgtgagtctgctaaggtagctctcacacacctcggctctggggttgatacctgagcctgcaatagagccctgaaatcaagagcatggcttgagtgtgtgaatatgatgtgtgcacatgcttaatgagcgtgcaagtgtgcacacgtttgtggagaggagggtgttctggcctgagaaggtaaagaagaggcatgtccagtatgctttgcagggtgtgtttgctcttttccatgcccatgcaacccagattggggtggagcaggaaggagctcttttctgttcccaagcctcagaactcttgagctgtggcttacttgctgtcttcaccaggttcaggctccgtgggccacactgctgctgtgcca

SEQ ID NO: 42735 - DNA, 824 bp, Homo Sapiens
  misc_feature (706)..(706): n is a, c, g, or t
  misc_feature (709)..(709): n is a, c, g, or t
  misc_feature (749)..(749): n is a, c, g, or t
  misc_feature (790)..(790): n is a, c, g, or t
agcacactgtctttctcagcgttctctgcaagtcagtaggtgttagtatggttgcaaagttcactgtctcagcaaagttgaactgggctacctctctacagctgtttcctcagagggaaaaatcttgagaccagatggtggagctctggagtcagaggaaatgggtgtcttcagcacaaagctgctgcttttacttcagccacttctgacatttttacataccgagcctgagattgtgtgattatctcaaatcaaatcactttgatggagataaataatcaaaactgttttatagtcattgatttggtgagaacagtaatggaaaatggtgttgaaggacttctcatttttggagctttccttccagagtcctggctgattggtgttcgctgttcatctgagcccccaaaagcattattactgatacttgcacacagtcaaaagcgcagactggatggatggtcttttataaggcatttaagggtacactactgtgtttcactgaccatacatttttcttagcccctcaagtaatatagcacagagttatgaatgacaattcccctaaccattcctcttcatatctgcctcttccccttaccatcgtaattctccaaactggtcataaaggcactctgtgaagatattggggactgacatcttaagctctcacctggctgcagtaggaaaggccaaactgacgacnaanaaaaaattctttataaagatgatatggtaacatgtatctntgccctgggtctgggtgggtccagtcagtctcagatttacnagcatttaggagcctaggtaaaagctgctagtat

SEQ ID NO: 42736 - DNA, 777 bp, Homo Sapiens
cccacgcgtccgggatgccaaattgcctggaaaagagcagtgagaggagtccgggagatgtgtgatgcatgtgaagcaacattgtttaacattcactgggtctgccaaaaatgtggatttgtggtctgcttagattgttacaaggcaaaggaaaggaagagttctagagataaagaactatatgcttggatgaagtgtgtgaagggacagcctcatgatcacaaacatttaatgccaacccaaattatacctggttctgttttgacagatcttctagatgccatgcacactcttagggaaaaatatggtattaaatcccattgtcattgtactaacaaacagaatttacaagttggaaattttcctacaatgaatggtgtatctcaagttttacagaatgttcttaatcacagtaataaaatttctctgtgcatgcctgagtctcagcagcaaaatactcctccgaagtctgagaaaaatggtggcagcagcccagagagtgatgtaggcacagataacaagttaactcctccagaatcccagtcaccactgcactggttagcagatcttgcagagcaaaaagccagagaggaaaaaaaagaaaacaaagaacttacccttgaaaaccaaattaaagaagaaagagaacaagacaactctgaatctccaaatggcagaacatcacctcttgtgtcccaaaataatgaacaaggctcaaccttacgggatttgctgactacaacagctggaaagctacgtgtggggtctacagatgct

SEQ ID NO: 42737 - DNA, 401 bp, Homo Sapiens
  misc_feature (368)..(371): n is a, c, g, or t
  misc_feature (377)..(378): n is a, c, g, or t
  misc_feature (381)..(382): n is a, c, g, or t
gggcctgggtgacagggtgagactctgtctcaaaaaaaaaaaaaaaaaaaaaggagacacaagacttactgcaaaaatatttttccaaggatttaggaaagaaaaattgccttgtattctcaagtcaggtaactcaaagcaaaaaagtgatccaaatgtagagtatgagtttgcactccaaaaatttgacattactgtaaattatctcatggaatttttgctaaaattcagagatacgggaagttcacaatctaccttattgtagacatgaaatgcgaacacttacttacatattaatgttaactcaaccttagggacctggaatggttgcattaatgctataatcgttggatcgccacatttccccnnnnacaaannccnnaaaaaaaaaaaaaacatgt

SEQ ID NO: 42738 - DNA, 539 bp, Homo Sapiens
ccgcctctgccttccaaagtgctgggattacaggcgtgagccactctgcccggcttatttttctttatgtttttgcttcgtaagaggttctgttgagcagtgatttgcaactcttgctgacgttgctggggaagctttaaaaaaaaaaaaagatgccccacagagattctgattttaattgttctgatttaattggcttggagtagaattcaggcattgatatctttaaaaactccccagtgttgagaaacaaatttagagagttgagaagtaggtatattaaattacagaatcttactgagttttggtagactgataatacaatttgctttgcttttcttaaatttgcattgagatgggatttgaagcatattgtgctcttgtgaatgttgaagttgcattgtagaagtttagaagctctggctatgggttgcctaaattgatgttttgaggaagcatattaatgttataaacttcgctgactttgaaggttgtgttgtagcatgaggaacacaaataaaacaattctaaatcaaact

SEQ ID NO: 42739 - DNA, 762 bp, Homo Sapiens
gggggacagtagaactctgactcaccaactgggctaaattttaatttaaaaatgtatttatttgagtgtctttccccccctcaccctcaccatctgaggggctccctgagatcttggtagaggaggcccctcctgcccagaccttcgtttgtttccccggtggcccttgcttcttgctttgcagactgcctgcagccatgattttgtcactgacatctgtgagccaaagactgagcctttttggcaggaataataagcaatactacacaacttgctactttcagaaaacttttttttagcttcaccgatgacaacagaggaagaagggaactgggatttgggtaagttctcctccactgtttgaccaaattctcagtgataaatatgtgtgcagatccctagaagagaaaacgctgactttctttttaagtgtggcacataaggatctgcacaattttccgtagacaaagaaaggatcttgtgtatttttgtccatatcccatgttataatgaaccaattgtattgttttatactgtgaccacaaatattatgcaatggcccctttgttttttatttcatttaaagaagtttaatttaaaaaggaacgcctagaacatgaaatcaaaaacctttgttcggcccgccctcgggcccctcgaaaaaagctttttctaaaacccatttcgctttgtggcggccgcgggggccccaagataagggtaaaattggaaaaacaagggttcaacataagcctctgttta

SEQ ID NO: 42740 - DNA, 593 bp, Homo Sapiens
gggacttacttgatgtatccaagactaacttggctgttcatgaagataaaaacagagtcccgtatgtaaaggggtgcactgagcggtttgtgtcgagccctgaggaagtcatggatgtaatagatgaaggcaaagcaaaccgacacgtggctgtgacaaacatgaatgaacacagctctagaagtcacagtatcttcctgataaatattaaacaagagaatgtagagactgaaaaaaaactcagtgggaaactttatttggttgatttggctgggagcgaaaaggtcagcaaaactggtgccgagggagctgttcttgacgaagctaaaaatatcaataagtctttgtctgctcttggaaatgtgatctctgctttggcagaagggacaaaaacacatgtgccataccgggacagcaagatgactcggattcttcaggactctttgggtgggaactgcagaaccaccatcgtcatttgctgttctccttcttcttcaatgaggctgagaccaagtccacactgatgttcggacagagagctaagaccatcaagaatacagtctctgtgaacctagaactgacagcagaagaat

SEQ ID NO: 42741 - DNA, 595 bp, Homo Sapiens
tggaaacgccatgtagtaatgcctgagatagtcgatggttcttaccacctcactaatttttatgcagtatgaaatgctcattctattgcccaactggtgctctctgtttaaagttacagatcttgcgaaactggaactattttataagctggggaagtgatttactttttttgttgtatcttttttgttcttagtctgttagtggctgtcctgtagtgggaaatagtaaaaggattcttcactcccttctcccctcagcaccttcttcaagtaaacatttcttgtgtgctttgaaaaaagtttcagcttgctgtctcttttagtgttttaaagaagtgttatacaaagcattgtttgcaaaatatagggagataatggagtccactttaatttggaattctgggtgagctatgatccaagttatcagctctttccaactttaaaaaatttgttaaaagcaccttgcttagaaaattttaaatatttatgtctgcaacaattgtctcaaaataataaactggcaatttttggatttaaaaaaaaaaagaactgaattttccctaagggacctgtagtttctcttggatttcctgca

SEQ ID NO: 42742 - DNA, 708 bp, Homo Sapiens
tctagttcttatagaaaaacaaagcaaataaaagttcttaacaatcccctctttcgaagtgcatttttttaaagcagggcaggagacatttggactctagctatatgacatactgggaaaggcagagggtggagggaagatttcacttcattgtctagcccagaatcttgagcaagctaaagaaaccatcataatctaaaattgcttcatttaacactaacaatttagactttttaaaccaagcattgaataatggctggataactgccgaagtaagcgccgctccatgaagtctgcttacttatttaaaaattgtgtatcagttttaaatactgttcattgtgtgcagatataaggggaatagggcattctgtagaattatacatgtctagtttgtaaagtgtgtcctgtgtactgcagatgtgtgttctctgggctttatgtatctgtacagtagctttcacattaaaaaaattgtggacaaacttgtccggggggtttgaggggagaaatggtggtttatatcaataacgatgctgtactatagtccatgtaacaaaagatctggaagtcaccctcctctggcccacggaaaattttggtaatcttctaggttctaaaatgaagatgtatgggtactctggcagactgcatgttgtataatttgaaaaatactaaaagtggaaaataaaattgtattaaactttg

SEQ ID NO: 42743 - DNA, 651 bp, Homo Sapiens
caaatttgatcttaccctttaccagttctataatgtggttaaaagctgattacgtcctacaatgtcaaagtcagctaactgtcgtctacttaagacttctggtcatttccaacttatagaggaagggagtctctaaaatctcttcttcagaaggcacctcacttctcagacttaaaattccacatcaagtgttccattaaaagaagataaggcattctgagtgcaaacaaatgggggcttcttaaactacacaccagcagtcagtgaggaaaactttgaacaattattgagttgctttcttgggtctctataatcaataacctgtctgcagatatctatctatataaagatattatatatatactaaatgtaatatttacaaaataaaactgtgatctcgtctagagaaaatgtattcatattacaaactgctcttccatatttatgtaccatattatacctttttattattgttataattattatgggtatttctaattaatatgatgttgaaacctgtttggcaccttctggaagctaccaaaaaaatgacactccattgaagtgcttaaaagctgttctcataagaattctactggcctattgtaaaaaagaaaaaaaaaagaagaaagacagaaaataatccaaaaa

SEQ ID NO: 42744 - DNA, 593 bp, Homo Sapiens
acagccagcctacacagcaaaccagatttgtttccggcctcctgcaaagtctccagaagaaaatttgccaatctttcctactttctatttttatgatgacaatcaaagccggcctgagaaacactatttgtgactttttaaacgattagtgatgtccttaaaatgtggtctgccaatctgtacaaaatggtcctatttttgtgaagagggacataagataaaatgatgttatacatcaatatgtatatatgtatttctatatagacttggagaatactgccaaaacatttatgacaagctgtatcactgccttcgtttatatttttttaactgtgataatccccacaggcacattaactgttgcacttttgaatgtccaaaatttatattttagaaataataaaaagaaagatacttacatgttcccaaaacaatggtgtggtgaatgtgtgagaaaaactaacttgatagggtctaccaatacaaaatgtattacgaatgcccctgttcatgtttttgttttaaaacgtgtaaatgaagatctttatatttcaataaatgatatataatttaaagttaaaaaaaaaaaaaaa

SEQ ID NO: 42745 - DNA, 775 bp, Homo Sapiens
  misc_feature (520)..(520): n is a, c, g, or t
tataatttggttaaaagctgattaccgtcctacaatgtcaaagtcagctaactgtcgtctacttaagacttctggtcatttccaacttatagaggaagggagtctctaaaatctcttcttcagaaggcacctcacttctcagacttaaaattccacatcaagtgttccattaaaagaagataaggcattctgagtgcaaacaaatgggggcttcttaaactacacaccagcagtcagtgaggaaaactttgaacaattattgagttgctttcttgggtctctataatcaataacctgtctgcagatatctatctatataaagatattatatataaatataaatttacatatatatgcacatgtatatatagttgtacatatatgtgtgtatatatatacttaaatgtaatatttacaaaataaaactgtgatctcgtctagagaaaatgtattcatattacaaactgctcttccatatttatgtaccatattatacctttttattgttgttataattatntatgggtatttctaattaatatgatgttgaaacctgtttggcaccttctggaagctaccaaaaaaatgacactccattgaagtgcttaaaagctgccctcataagaattctactgtgctattgttaaatagaaatattttacaagtaatagaagaagacacatagaaaatatttaaacaccaaaaactaaacacattcccatctctttctttgtacctcacgcccataaatcggttctcctatcttttttttctg

SEQ ID NO: 42746 - DNA, 861 bp, Homo Sapiens
  misc_feature (748)..(748): n is a, c, g, or t
  misc_feature (857)..(857): n is a, c, g, or t
  misc_feature (861)..(861): n is a, c, g, or t
ataatagaagacggtgtcttttgaagcccagtctctgtctgtcttcagaaacaaaagtgaatgccgtcatgttccttgatgtgtgtttctgccacatatgtatgttgacatgttcatgtactgcgccggtactgcaagtaagactcaacagacctaatttggatggggagaaaaactctcatccctgacccttccccccccgcaaatgttagaccagagctgttgatcccacacattcatttttctgaaaattcatgaactattctctcatatccctgaaatataaaagtaagtggccactattcctaagattatttagtttataaagtttgcttttaatcatacaatagcttacctggctaaaactttgcgtataaagggaaaacttgctttaatctgtgggattgcggaccgatgcgacttgcagaaggtaaacaggcgtgggttttgtgtgcgttaggttaggtgttagtggacttttaatgtatcttgtgaagtatggttactagggtaggttcaagagctacatgcctctggcttttgaacccatctattaaatcttttttaatgctgtactaagataaatgtgaagtctgagtaaggttgctctcagaaaaaaaaaaaaagcatatatatatataaaataaaatttaggccatgggaactggcattttacttggtataggaatttaatgagaaccaaatcacaaaaataccagatctcccttttgagatcgtggacaatcangcctttggacaatcaccgcttccagtgccccgctgtgcgttgaggttagagacctaccgtttacacgctagagccgagaaggacgttcaagtttcttaaaagatgctgnttgn

SEQ ID NO: 42747 - DNA, 719 bp, Homo Sapiens
cagtggcctctcagaaccagaaccttcctgttgccaaactcccacctagcaagttagtatctgatgacttggattcatctttagccaaccttgtgggcaatcttggcatcggaaatggaaccactaagaatgatgtaaattggagtcaaccaggtgaaaagaagttaactgggggatctaactggcaaccaaaggttgcaccaacaaccgcttggaatgctgcaacaatggcaccccctgtaatggcctatcctgctactacaccaacaggcatgataggatatggaattcctccacaaatgggaagtgttcctgtaatgacgcaaccaaccttaatatacagccagcctgtcatgagacctccaaacccctttggccctgtatcaggagcacagatacagtttatgtaacttgatggaagaaaatggaattactccaaaaagacaagtgctcaagcagcaaaatccttacttccagcaaaatccaaactgctgtctcttaaatctcttaaactctcttcttccattagaatgctacaagtaactcagtgaaggcccatgaaggaaattgggactagtttataggagaacgtatcaatacagtttataaagccaagaattgctatgatttaagactaagatctgtctttttggtgactaacccttcaattctttcaactcctgttaatacccataatcagtaacctatcaagaaaagcc

SEQ ID NO: 42748 - DNA, 759 bp, Homo Sapiens
catggctacgtgatctcaggccttcttccttcacaattagctcttgcccctaccccacgccagctaatgccccttctgtgtccctgctctgcatgtttccattttccttaggtgtgaagtttgaagaggcaaacagtaattttgaaagccactactttgaaaccattctaaggcctgagttcccataggacacactcacataggcaggtacacgttagtcaacaattggaactgcctcttggatcactcagctgtgctttcatggctggatgatggaacactgtgcgaagagagatgggggccaggaagtagcgcttcatgcttagtacatcctccaaattgtctttgctggaggagaaaaccgtactcagccaaaagatcaggacaatatgacttgagtccacaaggacacaaacacctgagtagctgggcagcccttggcagggtctaagccaggaagtaaaaatgatctggcctagatatttaagggaactctaggaagaggcctaggtttttaaaatcctgtctctttgtcttaccataagaggctgagcctctcttcatttttttgaagggccacttgtgttttctgttctgggaacttcattcatttttctactgggttgttgatctttgcagtaatttctaggagctgtttatgtttggaggtaattggtcctttgtccatatatatgagatgtaagtcttattttccaggttatctttttgcttattttttttgactttttattgtaaaat

SEQ ID NO: 42749 - DNA, 661 bp, Homo Sapiens
tgtcactatgcaagggccctgagactatttgctgtgggctctcctccagcctgcccagggcccacccagatgcctctggggttacccctgtctgcttctggtttttctgttggagatctataggtccttttcctgcctccttcacatttcctccccagcttttgcggccacaacacatcagtgtcatttgggtgttttggcaactcaggggccttcggatgatcttaaacctttgtgttcagccagagcccctgtgccctggtaggcgttggggttagtatctctcgggtgccctcagagccacctctgcctgtgatcgtctgatgaggctccctcccaacctgatccaaaagccagtctcaggagtttacccctgggatgggggatgcatctgcacctgactttggggccacgtgccctgtggcaccccagctcactgggagtctcaggagggataaccggatttctgctctttcccctgtcactcccacatcacacagaaaaatggcattcctctctgtctctccctggcatggagagggcagactgtgcacatttcactagggtccaaatacagaagggcccagggcccagggggcttgcagcttcgtgagggggtctctggcccagtttccaatgaataaagttctcttgacagctc

SEQ ID NO: 42750 - DNA, 1090 bp, Homo Sapiens
  misc_feature (752)..(752): n is a, c, g, or t
ttttgtgggaacagatgtttcttttgtatgtaaatgtgcattcttttaaaagacaagacttcagtatgttgtcaaagagagggctttaatttttttaaccaaaggtgaaggaatatatggcagagttgtaaatatataaatatatatatatataaaataaatatatataaacctaaaaaagatatattaaaaatataaaactgcgttaaaggctcgattttgtatctgcaggcagacacggatctgagaatctttattgagaaagagcacttaagagaatattttaagtattgcatctgtataagtaagaaaatattttgtctaaaatgcctcagtgtatttgtatttttttgcaagtgaaggtttacaatttacaaagtgtgtattaaaaaaaacaaaaagaacaaaaaaatctgcagaaggaaaaatgtgtaattttgttctagttttcagtttgtatatacccgtacaacgtgtcctcacggtgccttttttcacggaagttttcaatgatgggcgagcgtgcaccatccctttttgaagtgtaggcagacacagggacttgaagttgttactaactaaactctctttgggaatgtttgtctcatcccattctgcgtcatgcttgtgttataactactccggagacagggtttggctgtgtctaaactgcattaccgcgttgtaaaatatagctgtaccaatataagaataaaatgttgaaaagtccccacacaaaaaccccacccccnacccccccctataaaaaccccaaaaaccaccccccccaccccccctctcccccccccttcctaccttccccccccctttccacaccccctcccctcccccgccccgccccccctttaaaattatccccctcgggggggcccgatatttccccgcccccaccctttttttttcaacaacgagcggggcccccccataaggggcccctttttattaacatccgccgccggtccgccgccgttttttcccataatccccccctcggtcgcgaacaccccccccttctcttttgggcgcccctttttttatgtgacgagcaaaaccctcctttctccctgcc

SEQ ID NO: 42751 - DNA, 887 bp, Homo Sapiens
  misc_feature (1)..(1): n is a, c, g, or t
  misc_feature (711)..(711): n is a, c, g, or t
  misc_feature (759)..(759): n is a, c, g, or t
  misc_feature (808)..(808): n is a, c, g, or t
  misc_feature (813)..(813): n is a, c, g, or t
  misc_feature (815)..(815): n is a, c, g, or t
nggggaagcggtggacggtcggaattccgggatatcgtcgacaggggtaatccaaggcattggtcaccaagagtcttgcagggggacccacagatatgccatgtccttcacacgtgcttgggctccttaacctgaaggcaaattgctacttgcaagactgactgacttcaaggaatcagaaattacctagaagcaccatgttttttctatgaccttttcagtccttcaggtcattttaaggtccactgcagggggttagtgagaaagggtatactttgtggtatgttttgctttcctaatagggacatgaaggaaacccagcaatttgctgttatgtgaatggcctgtagagcagagtcaagagcggtgtgctttgcccgactgctcccatcaggaataggagagtagacagagatcttccacatcccaggcttctgctgctgctttaaaagctctgtccttggagcctcccgctccctgaagtgtctcgccccctgcacagcactggcctttcggaagcatcccagtagggttttctgaggctcgctggtgactcatgccctaattgcaatcctctgcttttatcttgactttgaaggatctaacactgctctctcttccaaaggggaaaaaaagattcatttgttttgagcaataaactaatacaaaatgatggccattcatgtgcagctctttgtcaccatgggccgngatgagttgtgctcctcctggctcaccatttccccctgctccccacangcggtctgcactatcacgagtcgccctggagcagattccatgagtttcncacangngacatgccatgtagaacatagatctgctgacatactttctgccggctgtgtggagacgcacattaccacagg

SEQ ID NO: 42752 - DNA, 839 bp, Homo Sapiens
  misc_feature (739)..(739): n is a, c, g, or t
acagtttcaatgggtattgacttttgtgattctactcagactgccagtttccagttgtgtaccaaggatgattgcttcaatgttaatattcagccacctgttggagaactgcttttacctgtggccatgtcagagaaagattttaagaaagagcaaggagtgctaacaggaatgaatgaaacttctgctgtaatcattgctgcaccacagaatttcactccctctgtgatctttcagaaggttgtaaatgtagccaatgtaggtgcagtcccttctggccaggataatatacacaggtttgcagctaaaactgtgcacagtgggtcattgatgctagtcacagtggaactgaaggaaggctctacagcccagcttatcataaacactgagaaaactgtgattggctctgttctgctgcgggaactgaagcctgtcctgtctcaggggtaacctgcttacatctggactttagaatctggcacacaacaaaagtgcctggcatccactactgctgcctttcatttataataatagcccttccatctggcagtgggggaagaatacactcttgacattcttgtctcctgctttagaatgctagtgtgtatctatcatgtatgcaatactttccccctttttgctttgctaaccaaagagcatatattttactgtcagttgtctcaactcttgaatccatgtggcgttttctctgtcctgctgcttcttttggcctcctcgntttccttctctttttcgacaatggtagacatgaatgagatatttaaaggtcattggaaatcttctttcctacagcagtaagcaaaaattagcaaagagat

SEQ ID NO: 42753 - DNA, 898 bp, Homo Sapiens
  misc_feature (5)..(5): n is a, c, g, or t
caggnatgaaacacccagaaactcacttctcagtcacttccacagccgatgactcagaagagccaaacccagaatggggcctctcttttccccatcacagactcccctgacaacctttcctggcgtaactagaggagtcccagtgcaggataggccctaaacgttttgttaaataaacaggtgcatgaaaggagcctaaggccattgttgatatccactctcttctttccacttccttctcatctttttctccatgttttatgcttctctgattccctcttctgcctgcaccagaccagccccagccctttattcctctccattttcactccttccagcctctgtccctgaactgccactggcaacccatgggacctcaggaccagagactgcttgactcatctggggagggtaagttcacgggggacaaaaaaatgattcctaaagaagaggcttcctagaccagcacaggctcgagaaagacatcccctaggcctggacttctgagcagctttagccaggctccggacggcagccagaggaggcctttccccattgctcctttccccattgctcaatggattccatgtttctttttcttggggggagcagggagggagaaaggtagaaaaatggcagccacctttcccaagaaaaatatcaagggtccaagctgtatagtatctgtcagtatttttcttctgtccacattcaaacacacacaaaagaacacatttatttaacataaaatactttgaaaatgaaaagtcttgatgtagtcagatggttactttcttaaacattaggtattaccccgatcagacattcactcagaaatgatcaatgcagggactccttctgtgacacaaatgtccaggcctccttggtcaccggcttc

SEQ ID NO: 42754 - DNA, 716 bp, Homo Sapiens
  misc_feature (709)..(709): n is a, c, g, or t
ccagactctaatacgactcactatagggaaagctggtacgcctgcaggtaccggtccggaattcccgggtcgacccacgcgtccggagaaataacatatttattgattcacataagtatgtttttcttcattaatcgtctggagaaacccacttgtcattaatttgttttgggctaggttttcaaacttaccaaattgctttaaaaaagcaatttggaaggtaatttgataggctttccaacttaaccaaattttttattgtaattcttggatagtatttttgtctttttcaattcatttgtctttttcagtatagtttttgttaaggcaaatgtcttcccttaatatccaaatattgctaataaacggtagaagatgctttggaaattaaaattatctcgctgttggttagacttaacactgttaatcttcagccaaatatcacatatggatcaaattattttcttttttgttgtttaccctatcctcaacaacatttttagtttaaattattgtagagattttttttgtggtggttattttttattttgctccaaaataataaggtgcaaagctattttatgcttaactgttgctctgtcaaaacagctatgcagtggagttgcatttgatgttctagagtttgattacatgcagagttgtatatagcccaaacttctcttatcaaactctgttatgtaagcatatntatatat

SEQ ID NO: 42755 - DNA, 698 bp, Homo Sapiens
ggagcctttaattctttaataatacacttaaattttatgtaaatcggttttcgccacgtgtgtttgttcacattctaaatgacttaatgggattctcacggtctgtgtctttgtgtcacgtgtataaaatgggcttgtgatgtaagcgtttcatctggtcagtggttcctttgatattgtactgctgctgggagtgggctgtggaacctgccttcgggtaactgggttcctcttgggtagattggagagatgggggtgggcgtgggcaaattctcacacatgttttcttaacctatttgcagaaactttcaaaaggcatttgattaaacctcttggcagtacagtattcttgtatttgttaacgtctgtgtttaggtactggtacctttttgttttaaaatgttctaagtgttggctttaaagtgaatttatctttagtatgatagttatatgaaaattataggatttgtgtgcagagaattttttttataaagtgctttgtaaaaaaaaaaaaaatgtattctagcttttgcggtacatatgtgtgataactttaatacccatgacagttaagtgcaattatttcatcactctaaaaatgctatttttgtgtcagttcctgcaggtgttttcatgtctttgcaaagtgacacattttgatgccttcttgataaagtgggtagacatttttgtagctt

SEQ ID NO: 42756 - DNA, 960 bp, Homo Sapiens
acatgctcatgtgtacacacgcttttcccgtatgctttcttcatgttcagtcacatgtgctctcgggtgccctgcattcacagctacgtgtgcccctctcatggtcatgggtctgcccttgagcgtgtttgggtaggcatgtgcaatttgtctagcatgctgagtcatgtctttcctatttgcacacgtccatgtttatccatgtactttccctgtgtaccctccatgtaccttgtgtactttcttcccttaaatcatggtattcttctgacagagccatatgtaccctaccctgcacattgttatgcacttttccccaattcatgtttggtggggccatccacaccctctccttgtcacagaatctccatttctgctcagattccccccatctccattgcattcatgtactaccctcagtctacactcacaatcatcttctcccaagactgctcccttttgttttgtgtttttttgaggggaattaaggaaaaataagtgggggcaggtttggagagctgcttccagtggatagttgatgagaatcctgaccaaaggaaggcacccttgactgttgggatagacagatggacctatggggtggggaggtggtgtcccttttcacactgtggtgtctctttgggggaaggatctccccgaaatctcaataaacccagtgaaacagtggtgaaaaaaaaaaaaaaaaaaaaaaagggcgggcccgctctagaagaattccctcggagggggcccaaggctttacccgtaccccagcctttcctggaacaaaagtgggccccctataagtggaatcccaatttattaaagctaaggcccctgggccgctcctttttatcacaccccccgggaagtgggaaaaaactggcctaaccttgggggaacctcttgtgggaaaggaaccccttacctttctgggggggggggaaaataaatttggca

SEQ ID NO: 42757 - DNA, 513 bp, Homo Sapiens
tagagtaactatctttttagtctggatttctgccctgcttagattttaaaagtataagcatggattgccaattccacttgatgtaaacaaaacttttttttatacataatatatatatatatatataaaataacttattgtatcagtccaggttcagaaacttgtggtaggccagttccagatagtttcatttcacctgtaaactgtatcactttgactgatattgtaattttcaaatgtataatatgtttacagatgtgccctgcatttagtctgccttgttcctattttgatttttgttgagtctcctgcctgcttgccaaaagctaggatgcttcaggcccatgtacaattgaaagcagaggcatccttgagctttaaagcattgaacaaactggaaaatgcaacataccacataactgaagtgaaaaaagtctgtgtttttgtgtttttttaaataaaaattttcaaaaaaaaaaaaaaaaaaaaaaaagtactctgcgttgttaccac

SEQ ID NO: 42758 - DNA, 872 bp, Homo Sapiens
gaggccttatggcccggggggaacttgattgaaaaatttgggattcatgtagcagagacagagctagactgtaaaggtcacaaactagctgtgtcaaggcccgtgatagccagaaagcggcagtttcagtccatatcaattgtgtgaccagggctagtcactttttacttctcagtgccatctataaaatggggataatagcactacctaccaagtgctgtgaggctcaaatgagccaaaggttataaacttgccttaaaactatagtcctatacaaaaattagctgggcgtggtggtgcatgcctgtaatcccagctactagggaggctgaggcaagagagttgcttgaacccaggaggcggagattgcagtgagctgagattgcaccactgcactccagcctggggacagagcaagactcttgtctcaaaaaaaaacaaaaaaaacatatatactgctgtatcatgccaggatttatcagcattcccaagggagcttgcacggtactgaccgagtgctgagactactggtattcccagctgccatgtggcagcagcaggagctactagaatattctcagcacaggaatgaggcttccttggtttccatgtctgtaagggttactgatcacttaccttcttctctttcagacttgaatctgtagacatttctttattgatatggcaaattgcttgcagatatttttaaatgacagcaattctctaatatttggtttaaataaatgtgaataatgtcctttttaccctggtctcactgggagttcatggtgcttcagtccctagcacccagtgatacccccacaggtagccctaagcatcctgaaacatcatccgcagcctggaaccttttt

SEQ ID NO: 42759 - DNA, 719 bp, Homo Sapiens
gtccccttttttaaatgtccattttgcttgcctggaattttaaagttcttccgtctcacaactcacaagaaactttctgggtttgtgacatacagaggttgaattgagtatatatttgaaaaggaaaaaacaaaaaacaaacccagaccccacctgaattgggctttttaacttagaagcaacacttgattaaacatctttagaaagctattgcttttctaatttccttccatatccctcaggcctcagtgttcagagaagccaaaaagaatgtatcacttctctgtctgtccaaaggtttttgagagtctcacttctaaatgaaacaatgcaacatttcactttgatttctccactgaaatttccttgattatatggttagaggtatgtagttaggaatgtctgttaactttctgagaaccctagtgccccatcatattaactgtcagtatcttgggggcattaggttaatagacttaattgcctaggtacaagcaggactttgggacaaatctctttgtgctgtttggtaacacttaactctatttgttgcaatctttctccttaggtcctcacacaattccttacagagcacttattaaaaaaaatcttaagagttgatctgttttctgattattttgtgtaagcttctaaacaaacttcagctgggattaatttagcacatttaaataacgtgttattgtttggtataaagaatt

SEQ ID NO: 42760 - DNA, 677 bp, Homo Sapiens
ccgtgggggggacactgctggtgctgctgcttctggctggggggtccttggccttcatcctgctgagggtgaggaggaggaggaagagccctggaggagcaggaggaggagccagtggcgacgggggattctacgatccgaaagctcaggtgttgggaaatggggaccccgtcttctggacaccagtagtccctggtcccatggaaccagatggcaaggatgaggaggaggaggaggaggaagagaaggcagagaaaggcctcatgttgcctccacccccagcactcgaggatgacatggagtcccagctggacggctccctcatctcacggcgggcagtttatgtgtgacctggacacagacagagacagagccaggcccggccctcccgcccccgacctgaccacgccggcctagggttccagactggttggacttgttcgtctggacgacactggagtggaacactgcctcccactttcttgggacttggagggaggtggaacagcacactggacttctcccgtctctagggctgcatggggagcccggggagctgagtagtggggatccagagaggacccccgcccccagagacttggttttggctccagccttcccctggccccgtgacactcaggagttaataaatgccttggaggaaaacaaaaaaaaaa

SEQ ID NO: 42761 - DNA, 643 bp, Homo Sapiens
gcaacttaagccaaaaaggtctttcaactgaagctttaatcaacttattttggagatgttctcttcccttatctcatgcgtcatccctaaaataataagatacatgggatcaaatagcccttgccttttcaacacaaatcagttggaaaattatggtttgagtcctgttgctgccatggcttctgtttctcagaaatgagtgtgtatgaacataccaatctatgtaataggctacctttttttgtcttctttggaactttgtacacaaaccaagacaatatcagggtgacaggtgaatgaacttaaattctcagtcttgtctattcaccaaaaaagtatactgcctgttttttctttaattattcaaggttgatgacttttaggaacatgttttatactgtattttttaattaaagcaagtgccttgatgtaattccatgtaaatcattgcttaaccctcttatgggatgaggatgagttattaatgtattgcagcctactggaaaggagggggagttggttaatagcagatacttttcttctagaagcttatgttttatgctgtttattatgtaagatcctgtatgtgtgttgagatttagagggttcatttgttttgtctgctaaataatgttactctaat

SEQ ID NO: 42762 - DNA, 836 bp, Homo Sapiens
tgggtatttggaggtgccaaccaatcaggaaatcgaaattgtctacaagtcctgaatcctgaaaccaggacgtggaccacgccagaagtgaccagccccccaccatccccaagaacattccacacatcatcggcagccattggaaaccagctatatgtctttgggggcggagagagaggtgcccagcccgtgcaggacacgaagctgcatgtgtttgacgcaaacactctgacctggtcacagccagagacacttggaaatcctccatctccccggcatggtcatgtgatggtggcagcagggacaaagctcttcatccacggaggcttggcgggggacagattctatgatgacctccactgcattgatataagtgacatgaaatggcagaagctaaatcccactggggctgctccagcaggctgtgctgcccactcagctgtggccatgggaaaacatgtgtacatctttggtggaatgactcctgcaggagcactggacacaatgtaccagtatcacacagaagagcagcattggaccttgcttaaatttgatactcttctaccccctggacgattggaccattccatgtgtatcattccatggccagtgacgtgtgcttctgagaaagaagattccaactctctcactctgaaccatgaagctgagaaagaggattcagctgacaaagtaatgagccacagtggtgactcacatgaggaaagccagactgctacactgctctgtttggtgtttggtgggatgaatacagaaggggaaatctatgacgattgtattgtgactgtagtggactaataaaacccacatttttatta

SEQ ID NO: 42763 - DNA, 712 bp, Homo Sapiens
  misc_feature (525)..(525): n is a, c, g, or t
gcagcactatggtggactgcccatggccgtgtgactttgggggcaagtgggagggcgccctgaataatgattgcaaggacaacaggcagaggctaccctagagcaggacacagggtgtggtactgacaaccctagtgtcacctcaaatccatgtccccacactctgggcatgggtgggacttgtgaccctaccctgtcaggcggaccagtggcccaggagccatgaggacagttgtgtgccactggaagagaaactttttgaaaaaccctaaatcaggtagagaaagcaaaaaatctctggccgtaaaccgtgctctctaatttatcggcagcttctgtggatgacctctgatgagcccgggctgcgtccacgccctgggcaggtaggcgggagcttccctgcgtgggcctcatttcttgctgcagagaatcttttgcactaagtcatgctgtttcctcaaagaagctttgttttttgttaacgtattactcagagtcacccaagcctcttggctgagggtgaangtgggacgggaggcgggagggggctggtggtgccgctcgtgcggtgtcaacgctgcagggagttgtggcaccttggtgccctctgagcacctggccgcctgctgtccccggtgcctgtgaaattcgtcatgccatgacccacctgcattaaacctatttttttaatgtgaaaaaaaaaaaaaaaaaa

SEQ ID NO: 42764 - DNA, 719 bp, Homo Sapiens
agaaaagggctacagtgcatttcttggtaacttaaactgagtcttgaagttataatgatccattcgagttctgtgatccttattgttcttaattgtgtttctctacgtattgttacagatgagccatacgtttctttgtatcaatgtagacatgacttcagatacctctgaggacctacccagcagtctaggaccctgggccaagtgctgggactatggtactaaatccagtagatgggctgtgtagcaactctcccagggaacacactagggtacttagggaggtgctttgtggagcatgttgaagctttgagatctgagcaggaggcagtgatgtccctggtctattcagggaaagatttcagtgtgaaatggtaaacatccaattgacaggatttagattttgcttagtttttctgctttttaatgtttctatcccccatctcagtgttttctttatccatcccagtgatgccttatttgaaactgggcttaaactgcaaaaagaatgaagttggatttaggaagctgttagatcattgagtggtgttgagaatgaagtttcactagcagggaagtttccttgagcctaaaataaaaggaaaaatttaaaaagaatcagttttttttaatttaaaaaatagaaagctgttaagcttctaattccgggggtttttttttgtaaaaacagttttgaaaatccttgattgcatcattta

SEQ ID NO: 42765 - DNA, 873 bp, Homo Sapiens
ctgggtggcgccttcaccgcaccagatgaggcccagcgcccttcccctcaaccaaagagccccccgggtcacccccgccccactgaggccagtagggggccaggcctcccactcctcccagcccgggagatgctccgcgtggcaccaccctccttgctgggggtagatgagaccctactactgaactccagttttgatctcgtgacttttagaaaaacacagggactcgtgggagcaagcgaggctcccaggacccccaccctctgggacaggccctcccccatgttcttctgtctccaggaagggcagcggccctcccatcactggaagtctgcagtgggggtcgctgggggtggagagaacactaagaggtgaacatgtatgagtgtgtgcacgcgtgtgagtgtgcatgtgtgtgtgtgtgcaaaggtccagccaccccgtcctccagcccgcaaggggtgtctggcgccttgcctgacacccagccccctctccccctgagccattgtgggggtcgatcatgaatgtccgaagagtggccttttcccgtagccctgcgccccctttctgtggctggatggggagacaggtcagggccccccaccctctccagcccctgcagcaaatgactactgcacctggacagcctcctcttttctagaagtctatttatattgtcattttataacactctagcccctgcccttattgggggacagatggtccctgtccctgcggggtggccctggcagaaccactgcctgaagaaccaggttcctgcccggtcagcgcagccccagcccgcccacccctgcctcgaggtagttttacaattaaaacattgtcttgtttaaaaaaaaaaaaaaaaaa

SEQ ID NO: 42766 - DNA, 599 bp, Homo Sapiens
gaaaatctgccgtggaattaactaataagtagtaacaataaacttcatatttagaatgcaaagtctataaagaataattttacatgatcctcaatatcaactccagtttaaaaagtgttatttttaaaacatttgaaaccaagtactgtttaatttcaatcagaagatgcaaatacatactttgatctatgtttgattttgctaataatatttgaaggagattgcctaccaaggacaaaacaataaatttaaaaatcaaacgatttctccatacgctcatagtcacatatggaattttgagaaaataaagcatgctgtctttaggaatttttatacttctttgtctttcttccttaatatttgcttctagctgctcttggcaatgatgaattgttatgtatgcattaatgttttgcagcccaaaagttgttcacatttttcctatataagatctgtggagtgtgtgtttcaaagagagaactacagaaatgttaaagcaggaaaacctgaatgtgatgtgcacattttcatcccacatggacaatgtatgtgttttaataaatggaattttcagattcaaaaaaaaaaaaaaaaaaaag

SEQ ID NO: 42767 - DNA, 556 bp, Homo Sapiens
cattttcagcaagactcctctaagcatttactcatttactgtattcctgctctgaagatgtggatacagaattagtcactcttgtcactttatttatttattggtttttttttaaccatctgtgtacattcctttcatagggtagagttctagttctagaagttcttattttgtttttgttgtaatgtttgaatactatttaatatccggttttaatattgctggatttgctacctttggttacttgtgcagtgttaaaagtaatccactttcttgtttaatataccagatacatagcaaaagcagcttggaataattatagctgtttatttggctgtgctcagttactatattaagatcttgtactgtgtaacagtaactcttttttgcttttcagtaatttaatatgttcacttaacaaaatacgaactttgagatgcactaaagttttgtttcagcagtggctcaaaaaacttcagaaattacttttgtaattatttgcaattaattgttcttttatcttacaattgtttaagcctgtgatctttcttctccc

SEQ ID NO: 42768 - DNA, 608 bp, Homo Sapiens
tggactttgtggacatcaacgtcggctgccccatcgacctcgtgtacaagaagggtgggggctgtgccctcatgaatcgctccaccaagttccagcagatcgtccgtggcatgaaccaggtgctggatgtgccgctgactgtgaagatccgcacaggcgtccaggagcgtgtgaacctggcgcaccgcctgctgcccgagctgcgggactggggcgtggcactcgtcacgctccacggccgctctcgggagcagcgctacaccaagctagccgactggcagtacatcgaggagtgcgtgcaggccgccagccccatgcccctgttcggaaatggggacatcttgtcatttgaggatgccaaccgcgccatgcagactggtgtcaccgggatcatgattgcccgtggcgccctgctcaagccgtggctcttcacggagatcaaggagcagcggcactgggacatctcgtcgtccgagcgcctggacatcctgcgggacttcaccaactactgcctggagcactggggctcggacacgcagggcgtggagaagacccggcgctttctgctcgagtggctggccttcctgtgccggtacgtgccccgtggg

SEQ ID NO: 42769 - DNA, 846 bp, Homo Sapiens
cggctggaccggtccggattctcgggatggcatgttagtgaggagttctgatattaagcacacacacacatgcacacaaatggacttctctgaagctgtgtttagtgaaatgagctcaagtacatgaatgttagttgttatcacatacagcaaattcctttttttttctttttctatgagcacactctgctgcttctaaactttacatgcctgatggcaccttactccagcagcctccaggtgctttcattttcacttccagtctaagccagtggctcctgccactgccctcccattacctagatggcacctcctttggtgaaaccacggccaatgttccttagctgcaccaggcccgaagctgttcccatgcttgagcttccatggggaggatgctgagtgagcagtttcctacgccgtggatctagcaagccatggagacaggtagcatttgtaagatgctgcacaggagcagcattatccccaaagatattacagggtagacacgttttaactgaaatcaatcaagataactttattcaaagagcagcccgctttgtgtgactaaaatgaaacaagacagttgaattgtgtgacttgaagattaccaatgattttgaggcttttctataataaaaagaggttctaaccattatttgggaacaaagagagttttcatcttttttcagatcaaaaccattctgtaaaatctttgttgtttaattaaatgtgccgttatttacccctgatgttatttatgactatgtgccgattcctgcttgggctgttttgctgttggctggtaataatatatttgatttaaatgctgttgactgtgctattaaa

SEQ ID NO: 42770 - DNA, 602 bp, Homo Sapiens
ggatatctataagtatgtatacacattatatttaagcttttctctgggccaaactgcttcatccttttttctttctttttttttttttttagccttatgatgaatttgtttgaagggcattttctttatgaacaaaggcttggatgcatattcctttctttctgtgaatgggtattattccctgaggaaagttgcacagtgaaaaccagtctggttgtgacccactacatgttttgtttttaatcactattacctgagttgaactttgctcaccatgtttgtacttgttggtctgtttaatgaagtttggttgatgccatcctttgcactgccgaagcgtaatcttgtgtattacttagctctctgctgatctcagtatggacagtgtaacaacaaaaccaaaatggctggacagacttcttgtgttttgtaaatataaactaggacagttctgtaggtttgttcagtgtgctagtggagtatttccttaatgtaaaacttcacttaacagagagattctttgtttagcaagcttggagtgatgataaaatggtaagaaataatataaatgttgaagaaagcatcacaacagaactatagga

SEQ ID NO: 42771 - DNA, 748 bp, Homo Sapiens
agcggcagtgctattctgagatctgtagatgcttagaatatcagtattttggatgttgctgcattttacaatttatttggagtcttcctttattttcccccagatatatgaaaatatgcaatacctgcttatatcatgtagaaaagcttagcaattattaatttttcttttatttttttttatttgaccaaagtcggtgctgcacttgacgcagtgtgttttaggtgtttgtctttgtacttttttgtgatttttgaatgcacgtgcgcaggaagggctcctcttagagaagcagtcaaactgtgaagcactaagctgaccctgcttcaagcaattttgtttttacaactgttcctttcacaagcaagccttaaaaaaaaaaaagacaacttcctttttcttcagctcccacaccccatttttcttagcagactgcagtcaatccacattcaataaaaagtatttaatggcccatttttatatgcacgtttttaaacttccaagttctgaaaatggtttactgggttatctctatttaaggaaacaaaaattaaattaaaacatttgggattttcatatgtgtctgataagtggttgaatagtcgtatggcgctgtggtatggggtgatggtcaggtgtatgggtgtcacttcctatagccagccagcatacttggccttcccctatagcacttagctgggcattactttattatgaccttatgtgccctaaaaaatgacccaggaac

SEQ ID NO: 42772 - DNA, 796 bp, Homo Sapiens
aaatcaaagctgaccaaaacatggtccccaccttttggagcttacagtctgttctggggaacagagattcagccaaagtcaagaaacactggatgccagctagattatctgttctgtgctttggtgtctataagtacatatgtggatatgggttcattttatccctaaacttagtaccaaaccagcatttaatatctaattataaatctaatttggcctaaactttattattgcacactgcctgaacaaaacctatttgtctctatgtaaattttttcctcatggaacaagggtgtgaaatgaaaatattttaggatttattcaaaaacagactattctgttttcagcttcagaattgttctttgaatcctaaggaacctctgtcaacagttgaggttgctgttgaaaagaaagaagaaggaggcggaaatctctcagggagaattatttcctttcttttctattttagatacctggaggggtggggagaagtaagaattgtaagggaggttcagtagtggggaattctgtgacagctgattgaagatgatgatgaagaacctctgcattctagttaccctttgcttcccttcacctcttgtaaaatttggcttggcaacaatgacattgtcatgcttattgtcccaatatccatcctgtcgtagatcttaatgtttttgatcgttgcgttaaagtggaagtgccacccacagtgaaaccagatcccattaataaataagcttaaaggcaactgcagttttaattccatagttattgaatatccagtgtgtgtaag

SEQ ID NO: 42773 - DNA, 347 bp, Homo Sapiens
attgcagtaccttccgcgagctgcacctgctcatggccagtctggactgaggaaagcagtgggcaggggcgctcggcagcccacagggcctggcctcagcccccactcctgttccttgtgcacccactggcccatgagcctctgcctggcccctgctgctgtcctgtggccgtcctggaggaggtgatgctggtccctggccacctctacagccctgaactcttgagacaactctctccagcaatagctgcccagctttgcccaactgttgcttcttggggcagcgaactgagccctggggctgctgctgtaatttataaggcaaattttattaaatttgtaactat

SEQ ID NO: 42774 - DNA, 709 bp, Homo Sapiens
cagcaaaggaggcagcaaagcccagccctgccatggatgtgcagttcccggtgccaaatctggaggtcctgccccggcccccagtggttgcttccacacctgcacccaaggctgagcctgccatcatccctgccacccggaacgagcccatcgggctgaaggcctccgacttcctgcccgccgtgaagatcccccagcaggccgagctggtggacgaggatgccatgtcacagatccgcaaaggccacgacaccatgtgtgtggtgctcaccagccgccacaagaacctggacactgtgcgggctgtgtggaccatgggcgacatcaagacgtcggtggactccgctgtggccatcaacgacctgtcggtggtggtggacctcctgaacatcgtcaaccagaaagcctccctgtggaagctggacctgtgcaccaccgtcctgccacagattgagaagcttctgcagagcaagtatgagagctacgtccagacgggctgcacctccctgaagctgatcctgcagcggtttctgcccctcatcacagacatgctggcggccccaccctctgtgggtgtggatatcagcagggaggagaggctgcataagtgccggctctgctacaagcagcttaagagcatcagcggcctggtcaagagcaagtcaggcctgagcggccgctctagagtatccctcgaggggcccaagct

SEQ ID NO: 42775 - DNA, 790 bp, Homo Sapiens
aaacagtaaagctttctgattaagtaaaatttaaatgggcagtaccataatttaaaaaactaatactttaaagagagagacaaagatattttgtgcctttgacaaattaaatctaatagtggaaaaatgtttcttaattaagcactttactagtgaaaaagatctcacaatttatgccaaatcaggtactgtattttcatgtattaacacataaccttttgtttgaatactttagttttcagtggacagttgctattccaagaaaattaagcttttgagtactttagcaattcccagcgtattacatacacccagtgataaggttctttgcatgttttgtgttatgtattactctgactctttagagattatataaatcctccaaaagttagacgaaacaagatagtacattatgagtcttaattttatcattgtggaaaaatgtgtactaactcctgattttgttaattttataacataggttgaattttagagtggggtttttataagtaatggaggataaaatgggtgggagaaaatggcacacagcacctgaagaaagatggggcagtgacctctagaactcatgcattgccattggaaagcctgtgttgggcatcgatgtcagatcctgaagaatcacctggaaaaaatcccatcctagaggcaaggaggctacaccaaaccatacactacagtactttgtcacatggttgtccattatcatgtattagagtctaaatgattacttgaataaagaaaaaaaaccacttaactcttaaaaaaaaaa

SEQ ID NO: 42776 - DNA, 502 bp, Homo Sapiens
attcggcacgaggtgtaaggtcgatcccagaggctgatctgcaaatcaagctacatgtatttgtgtataagaccctgtgttcaggactgggtgacttttctaagaaatatggggtttagaatggggttgactgtattttttaacctaattctggagagaagattgtattttttacagttttttgggtttggcttccttctcacatttctttagctttgaatttttactaaataaatttcctcctgattaaatttttttttctcatctgggaatttgaaatctcggtgcttactgttacaccaatttgtccaaagagttgaaatcactttaatgccagaacatggtaaatttgcagccatttcaagcaggtggtggtctttttttataacatcgttaacgggtaccattaaatattctgagaggtgaatgtaaaatataaaaggtatagggttttttttttttttaaagaaaacaataaactttcaaagagaaaaccaaaaaa

SEQ ID NO: 42777 - DNA, 584 bp, Homo Sapiens
tagtagctgagatctgcaatatataacgggacagtcaaagggcaatgtttttctgtaacatattggaaaaagaaaatgcagttatattccttttttatttgttcctttagtttgttttggttcagcagtcagcagttaagtatataacatggcccgcaaggacaatgaatccactcacattgcagaacaattccgaaaatggcaaactactactactactgttcagttttttaaaagttttgaaatgctgcacttacatttaaaaaaacaacaacaacattttttcaacaatttcaacaatgacacaaaaattcacatggaaatggggaagatggtctgttttgacagaaactgacaggaatcaatcaaaacaatcgaattttgaattgagtaaagtgcaatttcattggatagctaaatatctttgtaagatagagattgttgaaaattctatttttgtttttctagtcctttcaccccaggactctaaattattggggtaaaaaacagccttgcaagaaaaaggggagctatttttgctttttatgttttttattgttaaacttgtatccctttaaaaactg

SEQ ID NO: 42778 - DNA, 507 bp, Homo Sapiens
cacggagctgctcctccatctcgacggcgctgcctcaggtcaacgaggaccttgtgtcccttccacaccagttgccagaggccagtgagcccccccggagcccctctgagaagaggaaaaatacctttgtgggagagccgcagaggctgggctcagagacgcgcctcccacagcacatcagggaggccactgcggctccccacgggaagaggaagaggaagaagaagaagcgcccggaggacacagctgccagcgccctgcaggaggggcagacacagagacagcctgggagccccatgtacaggagggagggccaggcacagctgcccgctgtcagacggcaggaagatggcacacagccacaggtgaatggccagcaggtgggatgtgttacggacggccaccacgcgagcagcaggaagcggaggaggaaaggagcagaaggtcttggtgaagaaggcggtctgcaccaggacccacttcggcacagctgctctcccatgggtg

SEQ ID NO: 42779 - DNA, 686 bp, Homo Sapiens
  misc_feature (641)..(641): n is a, c, g, or t
ttttttttttttttttttgagggagactggagctttattaaggaaacaaaaaataccagtaagagcagagaggagggtcgggcagccccagggcgggcgggcccgcctcagtgttgcttctcacagaagctgcgactctagaccaggcctgcagccagaacgccgattccgggagcttgggagccctgcgtcagggcccagagcctcgcacttgctgtgtgcgaagatcgccttgctttactgtgaccacagccccgacgcggggctgtttaacaagaacttcagcgcagccggcgtttctgttaccccggccgcggctcttggcggcgggagaggcgcagtggctgcaggctgccccctgccggccacaagggagcagcgtccgcgccgccgcccaccggccctcccgccagctcctcagcctgctccctgggaggcaggctccagaagcaccccgacggggggccttattaagtgcgagaagcctctccagcgagtcttccccgtgtgtcctcatctgcggcaggcaggagagggggagcaaacaggaaattccacagctgcctccagaaacattaaccacccctctctagtcttactggtattttttgtttccttaataaagctccagtctccctcanaaaaaaaaaaaaaaaagccggattctgcggcccctcgtgccgaat

SEQ ID NO: 42780 - DNA, 607 bp, Homo Sapiens
tctctggaccctagggtcactgtgtgtgacatggcccaggttcctctggaggatgagtctgtggatgtggctgtgttttgcctttcactgatgggaaccaacatcagggacttcctagaggaggcaaatagagtactgaagccagggggtctcctgaaagtggctgaggtcagcagccgctttgaggatgttcgaacctttctgcgggctgtgaccaagctaggcttcaagattgtctccaaggacctgaccaacagccatttcttcttgtttgatttccaaaagactgggccccctctggtagggcccaaggctcagctttcaggcctgcagcttcagccatgtctctacaagcgcaggtgacctctggatcttccttgaaaggggaggcagatctcaaactccaggctcagaactgtgaagactgtttccagcctggctgtgagccaagacctggttcctggtggaccctgaggacaaagtgtgataaaacctctggctcagacttgctctgctgaaggcttcttggttataagatgcataaagtcactggggctagctaaacaataaagagtttattgtgagaacaaaaaaaaaaaaaaaaaaa

SEQ ID NO: 42781 - DNA, 711 bp, Homo Sapiens
  misc_feature (692)..(692): n is a, c, g, or t
agggattgcttattatattattttagctgatgaacctcaggacaacgtctacacacacacacatacatacacgcacacaaaatctcagctgttgaagagtgggcttggaatcagacttctgtgtccagtaaaaaactcctgcactgaagtcattgtgacttgagtagttacagactgattccagtgaacttgatctaatttcttttgatctaatgaatgtgtctgcttaccttgtttccttttaattgataagctccaagtagttgctaattttttgacaactttaaatgagtttcattcacttcttttacttaatgttttaagtatagtaccaataatttcattaacctgttctcaagtggtttagctaccattctgccatttttaatttttatttaattttatttgcttgagcacactgatcaaccactgaactgccttcttccattgtcctgcaatgatataagggttacatttttgtgtatatggctttcatagttgggatttcagagcactgataccagatattttcagtttgttctctgggggaatttcatttgcatctatgtttttagctatctgtgataacttgttaaatattaaaaagatattttgcttctattggaacatttgtatactcgcaactatatttctgtaaacagctgcagtcaaaaataaaacactgaaagttntcattttgcagtggaaaaa

SEQ ID NO: 42782 - DNA, 668 bp, Homo Sapiens
  misc_feature (641)..(645): n is a, c, g, or t
  misc_feature (647)..(654): n is a, c, g, or t
  misc_feature (657)..(663): n is a, c, g, or t
ggcagaactcatctaggtaaattacagttcctaggtataattcacattgtattcagagttgatggttgtacatataagtgattgctggttttagttgcaactttgtataaaagggactgagaaatttataaacttttttcttactgtcttttttctaaagtaaaaacaaagaaattatgtgccagatttatgcatattattttatgttgcatagaataaaatttttaatctttaattttacatttcctaaatatattttaagacgaaacatttgttctatagcttttccctttttttaagtaaggaattttatttttttctgaattattttctctcgtgagtatattgatccagaaagaaaacttgtattatgtgtgttttaaaatgagaaatctaaaaaacgaaaagtctccaaagtctctggaatttgaaacactttgcataacgtataaaagcctgtttaagagacagccaactatggcctgtggatcaaatccagcctgctgcctgctttttatggcctgtgagctaggaattgtgtttataattttaaatgtttttttttaaagacttttatgatacttgaaaattaacatgaatatttagtgttcataaataaagtttgttgaaactcaaaaaannnnnannnnnnnnaannnnnnncttgt

SEQ ID NO: 42783 - DNA, 1044 bp, Homo Sapiens
ggagagggcagccaacaggttctaatgtcagagccatcctttaccaggtgggcctgcttgtccccgtcttgcctgccacatcactctactttttggaaggccatggctgattaaagaagttcttgtagtttcccaagcaaagtggaatctagaaacagtgaaaaaagttcagataactttgaattgcattcaagaagaacacttctttcccattgtccgtggctcttggagtctccgtgatgccaggctagagtctgattatataataattcaaaatggtaactcccaaggtaatgctttcttccatttcatcaggttcttttatccccactgcaccccctccccttctcccttgcctatctggatggcttctcagaagctcggccctagtcctccctgccttggcggggccagagcccactactgctgaggcagcactgctctcgtcagctgtgttgcctttaccaagtgtcttcagagggttatgagttagagtagctggcctggggagagggtgcctccctgggtttgatctttagggtctgactttctgcagagaagatgttttacagatgtgtcaaagctgatgtaatgtggttgggggaggaaatccagacccaaagtgtttgtcagctgggtgtgcaactgcctatgtgatcctctgtcctaaaatgatttctgtctgtgctgcgaaacaaagacaaggtgaggtgttttttcttttttggaataatataaagcctgtgtgtttctgaattggatgattcactatgggcattggttttctcctaagggctttttaataagggaaccaatccaatggtggtaaataaaggaaggtccttttcccgggtcccctttattttttttccccccgttattattcctttaatggacccccactaaaatagcttgggccattgggtcatggccattggccaagaattaagaaaaaagccacactacccttttgggccccgggggttcgaaaatggcgaaaatccacgaggagccctctaggcggtcctcggtcccgaacttttg

SEQ ID NO: 42784 - DNA, 925 bp, Homo Sapiens
  misc_feature (741)..(742): n is a, c, g, or t
  misc_feature (840)..(840): n is a, c, g, or t
  misc_feature (886)..(886): n is a, c, g, or t
ctttccgactttgacccctggtggacaaacgactgtgagcagaatgagtcagagcccattcctgccaactgcactggctgtgcccagaaacacctgaaggtgatgctcctggaagacgccccaaggaaatttgagaggctccatccactggtgatcaagacgggaaagcccctgttggaggaagagattcagcattttttgtgccagtaccctgaggcgacagaaggcttctctgaagggtttttcgccaagtggtggcgctgctttcctgagcggtggttcccatttccttatccatggaggagacctctgaacagatcacaaatgttacgtgagctttttcctgttttcactcacctgccatttccaaaagatgcctctttaaacaagtgctcctttcttcacccagaacctgttgtggggagtaagatgcataagatgcctgacctatttatcattggcagcggtgaggccatgttgcagctcatccctcccttccagtgccgaagacattgtcagtctgtggccatgccaatagagccaggggatatcggctatgtcgacaccacccactggaaggtctacgttatagccagaggggtccagcctttggtcatctgcgatggaaccgctttctcagaactgtaggaaatagaactgtgcacaggaacagcttccagagccgaaaaccaggttgaaaggggaaaaataaaaacaaaaacgatgaaactgctttctggnnggttggttacttagttacctgccctttgcatgcatgtgtgaaccagctgtgagctgcaaggcagtggccagagcctcgccctcctgactcttcctgcnagtggctcaggaaggattcagcctggccacttggctaggactctgncagcacccatctgagactgacctctttcggggcctttgg

SEQ ID NO: 42785 - DNA, 619 bp, Homo Sapiens
  misc_feature (572)..(572): n is a, c, g, or t
tacagccgccaggagctactcaggaaggaacgtctggtcctaaccagtgagcactggttagtactggtccccttctgggcaacatggccctaccagacactgctgctgccccgtcggcatgtgcggcggctacctgagctgacccctgctgagcgtgatgatctagcctccatcatgaagaagctcttgaccaagtatgacaacctctttgagacgtcctttccctactccatgggctggcatggggctcccacaggatcagaggctggggccaactggaaccattggcagctgcacgctcattactaccctccgctcctgcgctctgccactgtccggaaattcatggttggctacgaaatgcttgctcaggctcagagggacctcacccctgagcaggctgcagagagactaagggcacttcctgaggttcattaccacctggggcagaaggacagggagacagcaaccatcgcctgaccacgccgaccacagggccttgaatccttttttgttttcaacagtcttgctgaattaagcagaaagggccttgaatcctggcctggaatttnggcagatatagcattaataaaactgtgcatctcaaaaaaaaaaaaaa

SEQ ID NO: 42786 - DNA, 477 bp, Homo Sapiens
cacgcgtccgggctgaggtgggactacatgcacacaccaccgtgcctggccagaaaatctggattcttattcctagttcttcatttctgtcacatgcacttagttgacattacatctacatatattagctttttcctacatgagccatctatttacttagtaaccagtgttcttaatgaagtatttagtcttgggtttcttgtaaaatttctctgcattccttagacagtgtactatacatgaaatattcttgttgacctagtaatttatattattccatttaattcttaaacctatggcctttttattgagcacactcttaaatcattatttggcttgtaaacattcatctgaattgtggctacaatcctctttaaataatctaggaaaaaagaaagataaagcttacattttcacagttttggctcttaaacacattccacaaatgccattaagaatttattttgttttaggcca

SEQ ID NO: 42787 - DNA, 755 bp, Homo Sapiens
atccgtgaaaattggagacctcttcaatggccggtatcatgttattagaaagcttggatgggggcacttctctactgtctggctgtgctgggatatgcaggggaaaagatttgttgcaatgaaagttgtaaaaagtgcccagcattatacggagacagccttggatgaaataaaattgctcaaatgtgttcgagaaagtgatcccagtgacccaaacaaagacatggtggtccagctcattgacgacttcaagatttcaggcatgaatgggatacatgtctgcatggtcttcgaagtacttggccaccatctcctcaagtggatcatcaaatccaactatcaaggcctcccagtacgttgtgtgaagagtatcattcgacaggtccttcaagggttagattacttacacagtaagtgcaagatcattcatactgacataaagccggaaaatatcttgatgtgtgtggatgatgcatatgtgagaagaatggcagctgaggccactgagtggcagaaagcaggtgctcctcctccttcagggtctgcagtgagtacggctccacagcagaaacctataggaaaaatatctaaaaacaaaaagaaaaaactgaaaaagaaacagaagaggcaggctgagttattggagaagcgcctgcaggagatagaagaattggagcgagaagctgaaaggaaaataatagaagaaaacatcacctcagctgcaccttccaatgaccaggatggcgaatactgcc

SEQ ID NO: 42788 - DNA, 612 bp, Homo Sapiens
ttaagctctacatagattaaattggagaaacgtgttaattgtgtggaatgaaaaaatacatatatttttggaaaagcatgatcatgcttgtctagaacacaaggtatggtatatacaatttgcagtgcagtgggcagaatacttctcacagctcaaagataacagtgatcacattcattccataggtagctttacgtgtggctacaacaaattttactagctttttcattgtctttccatgaaacgaagttgagaaaatgattttccctttgcaggttgcacacagttttgtttatgcatttccttaaaattaattgtagactccaggatacaaaccatagtaggcaatacaattttagaatgtaatatatagaggtatatttagcctcttttagaagtcagtggattgaatgtctttttattttaaattttacattcattaaggtgcctcgtttttgactttgtccattaacatttatccatatgcctttgcaataactagattgtgaaaagctaacaagtgttgtaacaataatccattgtttgaggtgcttgcagttgtcttaaaaattaaagtgttttggtttttttttttccaaaaaaaaaaaaaaa

SEQ ID NO: 42789 - DNA, 982 bp, Homo Sapiens
  misc_feature (597)..(597): n is a, c, g, or t
  misc_feature (600)..(600): n is a, c, g, or t
  misc_feature (603)..(603): n is a, c, g, or t
  misc_feature (907)..(907): n is a, c, g, or t
  misc_feature (913)..(913): n is a, c, g, or t
gattttctttgcctttgtgtttgatgccgtcgtgtgggaaaagtcaactccgatgccaccattgcgggccggacgaaggatgctttcttcctagaggctccgagctgagctgcgaactcgccccccgcccttgggacaagaagacccagtcacatcactgcacccgtcctgtgtcctcaccattgctatgcaaagtgattcttgttgtacataagatttaaataatgcacctatttaagacatgttgacaaattgcgggtctgggacccgcctcttatttatgaagtctttgaccgtcccccccgcccgaccccaccgccctcccgcccccacctggcgtgtagtactgtataaaccagtcagctgtcgggttagtggtagtattattgttatttttttaaaggaaacaaacagacaacaaaaagaagaaaaaaaaaaagaacctccttggaaaaattaattgctttttcgtaatggattctctatgctaatgctctctcgtctgtctgtctgtctgcccactcccccacccaccactgtgcgtttctgatttccaaatgtctccaactccctcacgaggtggggctcaggctgganganganggattaagatccccttgctccactaaagcccaagctctttctctcggcaccttttaaacttgaatgggaggctgctaacccgccctctcagtccaccccggaaaagagctgttccccaccccccaggagctcctgtccctgtcagcctttgctgtcccctgtccccaacggagactctgtcacccctgggctccccctgccatcgggggtttacctgggcccatgcatggccgcctctctgcatgggctcttgggaaaaaagaaatgggtgcctccgcccaatcgaatggccttccaaacccancccggnaacccccaaatggtgaccacgggaacaaaaacatcctttttgcccccccggttccgaaaacaaacaacc

SEQ ID NO: 42790 - DNA, 672 bp, Homo Sapiens
ttctttattgctccctcccagacactccctgtggctgcccttgtgattccctcagatctgccctaatcccgggcatttgggtgggggaatcttgcctttccctttcagagccccaggatctcatctggggaactgtcattgccagcagaggctgttccttcctgctgtttggagatgtgactcattcattcactcactccaccctgcctctgcatcccttaatggagaaacgggcctaaaaccaaacgggtaaaaagccctgggccatccctgtcttcctgtcccttgtctgcccagttgacacctactggtgacttctagggcactgaggagtgaaagcgcctagggctggagaatagcgctgagttgggtttgtgactcttccctctccctgcctcacaggattgtgactccccagcccctgccctcaaagcttcagacccctcaggtagcagcaggaccttgtgatcttggccccttggatctgagatggttttgcatctttccaggagagcctcacattcttcttccaggttgtatcacccccgagttagcatatcccaggctcgcagactcaacacagcaagggtgggagacagctgggcacaaaggcggaattccgttcagcatgggctctaaacccacagaactgacaaagccctggtttccaac

SEQ ID NO: 42791 - DNA, 576 bp, Homo Sapiens
gtttccaaggcctccggaagcaccaacccagttctcagttacctcctctggccggaaggcctcacgttgtcctccagagctgctctgggcccagggctggctccgtgaccacctgatggacgtgctgggcagcatgggctcccaaggcagcatccccagctgctctcccaccccaccccagctgcccggcggctgggcccacgagggctctggggacacttccataggaaaggggcctggcactttgtgattgccacgtgtttcctgttaagccgcctgcccccagtgcaaatctctgtgttttgctctctcctgaacaaaaatgtaaaccgacgccggaaagcaaatggtatcgaatacctttcttgcccataagggtttttacaaagaacgtgtctcactaggaactaggacactcatcggcccgagaccaactcctggataaaaggaataaggagaatcgtgtttgtaacgagttacaggattgtttctttcctggattttaaacttttgttaaattgtgaaattatggaggagtttttatagaaaaaaaaaagtgaaataaagtcagatggg

SEQ ID NO: 42792 - DNA, 708 bp, Homo Sapiens
  misc_feature (566)..(566): n is a, c, g, or t
tagaagtgaaatttgcataatgaatgtaaaagggaaataaaagtcttttgaaggtagctatactagcacttttgatcatcttcagggcccacaaaaatgttgtcaagattttaaaggtttataattctgcttaagctctagtttggacttaggtatcctaactatgttggaggtatttgcattgtttaaagttaggataaaagcaagttcctcctgtgactgcaacgtcttactgattgggacagttgccaggaggataccaacttgatagcagagggggttttatgcaaacgcactcacctccgccttggggaatgaaagggtcacttctgcatcatcactagctagttttctagtgttagagaggcttacaaatgtttgccattctcataagtgttttgaacttgatctttgtgacttgtgcttttttagcttctctcttgaatcagagtatcattgtcttcctccaaggagttagaatttcccagtttaaaacaaaaagggaaatgtcctaggttttctttgagcttctcatatttcctttggtgattcaattcctgtgattnctggtctcttcccttgaagtgcttacagtgcatggaatctccatcattgctattctaacgatagtaattcacagtcctcagaagcctatttttaaagcagaagcacggataaccacaattaccccccttcctcttttctctc

SEQ ID NO: 42793 - DNA, 807 bp, Homo Sapiens
ggaagagaaatttctacatgaacaaggcaatttcagtgtcttacagcggccaaaccatgacgtgaagaatgagataggagacaggagatcaccataagcgtccctgatatagcagcacacattttcacgtttccacttaaatcgttttgcacaaagtcttgcttcgctcagatgagatgagatatgatttcctagagatgtaaaaataagaatgaatgtggcgcccccttcttccagatgtaatagaaagctctgccctatcacaaggggggtgttgaagcgccccttgtgttttaactgtatttaactgagcacaagatgcacaagctgtggtgggaaaccctcagtttacctttggagtcttccctgcagatcgcagacctgtttccaggctgatgtttctggtgtgtaattgctagcgtttctgaagggttttcccaattgttttagccttgtgaagtattcttaattataacttgcctttcagcgatggtacatgacttgattcaacgtttggttctgaacttacacactgatgcgtttactcatctaacataatctgacaggccctcagcaagggagccatacatttttgtaacattttgatatgttttaatgcatctgacttagatcttactgaaataaagcactttttcaaagaaacaacccccgtaaccgcactatctgcctccctcttttacaccctcgggaaaagaagcgcccacgccccactccaaataaatcaccttggtttgcgcgcgccctgcgggcccctcgaaaaaaggctttttctaagaaaccactttc

SEQ ID NO: 42794 - DNA, 566 bp, Homo Sapiens
ccgcgtccggtgcttccctctccatggcttaactccctgtcagtgtcggagtgtataagaatgcttgtaaatactgtaatatatttattaatatttgaaaggcattcattcagtggacagtgggaattaactctcccaaggcaagtgaaaatgaatgattgacgtacgttgatttaacaatcttactagattttaattcttaaggatttcaaatgaaaccagaaggtggttatgtaagaggcttaaaatgatcttatgtttaaagagattctgttattagcaccatgaactcgtactatgaaatttttaagccttttatttttctaactatattactgtaggactggatattaggtgtcatataggaaacacaaaagttattgctgtttgctaaagcaaaatagcagaaaattttgtatatgaaaaactgttgaaggaccatagagaaatgtgtactactgacggggcttttactaggcttcctgcgtgtgtaaaagtcgaggtattgctggcattcagggtgacatgatggtactaaatgttttccattaaagtcttctatttta

SEQ ID NO: 42795 - DNA, 1089 bp, Homo Sapiens
gtgatgttacatttcgtgcgactgctttttcttcaaaggagttcagttctcaccatggagtgagtggcctttagcgtcatggagcaaggtgggtctgggaggtagatatgggtccgggatgtgccatcgtagttaccagagttgggggcctctgagtgtgtctggctctgagagagtctgagtcttgcccaaacattctttctttttgtgccaaatgacttgcatttgcaaagagctcaattgctctgagctcagccaagtaggagaggctaggccatcactcttgggaagctgtgtagtgatgatgtataagaatcctcctcactgtcatgggatgttgtatccagcccctccttgttccagccggtggtgtgacttcgttggttgaggtgtgtctccaacctacatcagaccatgaagttcaacccctccagggaagctcctgatttcccctgcataattgaaaataggatatttctcagctattgaacagttactaatttatggggtggaaacagcattaagaatactgaatcaaatggaaaaacaaatgaatacaggaagataagtgttcgttcttttctgaaaaagagtatgtgtaccacaagagctggttttaattgggtgaattgtttttgtcctcattctgtacagaaatttgtatatatgatggttcttagaacttgttttaatttttgtggtccttctgtttattataataggcgtccaccaatgattatccatatgtgttcttaatttttaaactgctggaagtgttaaaacacacacacacccacacacacacattttttttttttccgaactccccagtccctgaaaatttttggtggcaccatgatttctttaaaaaactaccttttgtataaccctacaattttggaatcctccccctctaaaattttttttaattccctcaaaatcctggaaaccttctttcaagtaaaattaaaaaaggtttattcctttggccccacgaaaaaaataaaaatggttatttttaaacacaaaaaaaaaaaaaaaagaaccctccgggggcttttttattgtccccggagggccgcgaaacaa

SEQ ID NO: 42796 - DNA, 619 bp, Homo Sapiens
ggcatttaggcctgactggggtaagaaatgtcgctccactttacagaggtagctgtggtgttgaaacactggacttggatatggggtgctgggatcgattcctagctttaccactaactagctgtgtggccttgagtaaatcccgttacctctctgagcctcggttaccctgtctgtaaaaagggaggtgagaatacctacctcacggaactgttgggaggctcagatgagatgctatatgtgaaaacattctgtaagcttcgtacaaatgtgaagtattaatattatcgcagtattattgttgttattattattgttattattaacaatcttgggtgggtagtaggagagcaaaaagtatgaatgggatggagctaagaagtctgaatacttaatgaaatggactttttggaaagaaatcagatgaaggcataaaatttagttcttagctcttgaacagaagcctaaaattcctggttctctcagggcttcgccttcaagggttctggaggagggaagggtctgcaggttccatgggtgacagcctgagatctgtcccttcaacgggctgggctgggtatgtgcctaccgatgacaatgtgtaaataaatgcgtgttc

SEQ ID NO: 42797 - DNA, 697 bp, Homo Sapiens
  misc_feature (688)..(688): n is a, c, g, or t
  misc_feature (690)..(690): n is a, c, g, or t
ctctggctaggctcggcggccttttccggcttcaggcctgaacaaaacaggctgtttgctgtgaggagctagatgacaccaagacacagacacgtactcttcaccggctccttttgcttctccttcctgcaggacgtgagttatgtctggtcccaaaacccttgagtaaactagctgagccattgcaaatgaaggtacagatggattgaaacataaaattgtagcttttggtgtccttctgaagggtcagaatatgtaattatttgataaccaaggaagtcaagtcagatggctaagtagtaactttccaatatgatttctccgtggtacttcacctggtggcacttttggggggcaatgttaacaactatcacattttactcatcaagtctctttcatttcggcagtttaaagacacaactgtgggctttctgaggcgatgcccgttgggcaaacttaggtttatgtgtttggtttttcagctgacgtggaagccctgggtgggcgtcccctggctggcctggcttttgggttcaagtctgtatgtatggagtgggttggggccccaaagctttgctgctattgatttgtccccgacagcaggcaaagcctcacattgccctcaattttccccctttcatttgaaggaccagtttttcatggtacttgtcttgatctttttcatagngntcaaatc

SEQ ID NO: 42798 - DNA, 718 bp, Homo Sapiens
gatcagattgtcttgaatagggcagagctaacctgtaatcacctgtgtgatgagaaacagctttgactgcattttactcctgacctggcctaagctttctgtttacataagatttttcaagaattcaacttcaagtagcagccgagagagctgcctcaggattctctcaaaaactgggaataatatgggaacatttgttttcttctaaaaataaggcaaatgttacattgaatgatttggggggtgaggtttaattggaaatggtctctggggactgaaaactgatgtttttgcagattacctcagggaaacggaggtttgttgagtttacagacacattaaaccaaaggccgtgggaaaacccctctccagctccagggattggtcaggaccacccactaaccagtgccttccttcttaacattcacttttagcagcttgtgtttattttacatgggcagttttgatgggaaattgccatgaccacaggggtttggagttctgcttttttttttcttcttctttttcgggggactgggggactcctcccaagatcacattttagcatctttctctcctactccatttagaaaaataagtaacaggtgaaatgtggtctcagtgttaacgggataattctgctaccggctcctccctgatgattctgaaatacactactgaacgagctctggctggtcctttctatcctggatgtggt

SEQ ID NO: 42799 - DNA, 909 bp, Homo Sapiens
tccgaatagatgggcaggacatttcacaggtgacccaggcctctctccggtctcacattggagttgtgccccaagacactgtcctctttaatgacaccatcgccgacaatatccgttacggccgtgtcacagctgggaatgatgaggtggaggctgctgctcaggctgcaggcatccatgatgccattatggctttccctgaagggtacaggacacaggtgggcgagcggggactgaagctgagcggcggggagaagcagcgcgtcgccattgcccgcaccatcctcaaggctccgggcatcattctgctggatgaggcaacgtcagcgctggatacatctaatgagagggccatccaggcttctctggccaaagtctgtgccaaccgcaccaccatcgtagtggcacacaggctctcaactgtggtcaatgctgaccagatcctcgtcatcaaggatggctgcatcgtggagaggggacgacacgaggctctgttgtcccgaggtggggtgtatgctgacatgtggcagctgcagcagggacaggaagaaacctctgaagacactaagcctcagaccatggaacggtgacaaaagtttggccacttccctctcaaagactaacccagaagggaataagatgtgtctcctttccctggcttatttcatcctggtcttggggtatggtgctagctatggtaaggggaaagggaccttttcccaaaaacatcctttttggggaaataaaaatgggggaactgtggaaaaaaaaaaaaaaaagggcggcccgcctctaaaggaatccccccgaggggggcccaaggctttacgccgtacccccagcctttcctttgggaacaaagtggggccccctaataagaggaggtccgtatttaataaaggcctcagt

SEQ ID NO: 42800 - DNA, 572 bp, Homo Sapiens
acaaaatgggatctttctgacacacttagggcagaagtgaatgcctgtcacggagggattgatcttcagggctgtttttgttcctgcctttagagttccatgaacaccatacctttgctactactatgtgcaggaacccttggtcacatgtgacatgtctgtgggaagctcccagagtttggtttggtccctggttttcagtcttgctgagactctgtctggatttgcctgcagagtttggataaaaaatggcaggttgggtaaccctccctgttcatcccatgttagctccaaagcatttcccaccctccatctaccccttccagaagcaaaaacaaaccatgactgaggcaggcatggagttgggcgttaggggcaggcagagggcctttgctacactgctgacagctatagggagccccaggtaatggcatgagatagctggtgttagggctatctcaggcaatatggccacacctgggtctttatgcatgaagataatgtaaaggtttttattaaaaaatatatatatgtataaataaatgatctagatattttcctctttttctgaa

SEQ ID NO: 42801 - DNA, 901 bp, Homo Sapiens
  misc_feature (901)..(901): n is a, c, g, or t
gttgcttgtattaacacgaaactagagagaatagtttctgaagccagtttattgtgaagatccccaagggggaggttcggtagagaaaaatagtaagctggtttagaaactgacgagggcaaacagccaggacgcattggagaggaatttgccaaagatctaccctgagataacgcctgtccagtgtcttcaccacgtgaataaccagcgctccaaagtgtttttctgctttgaaaaaaaaaaattccacaagcttttaaaggtgcatttaagaatccatgtgactttagaatggaactgccggccctggcaactgtcacgtgtgctagaaggttcgatgcctctggaatgcatgtgatactcatctccattttgtttccttgattgcatttttgttcttttagcagatctgtccctgtgggtggtgtctaagaagtcggacaccttggtttttgtgttagattgagctgggcagctgcaatcagcttctttatatgcaaattaggcacgacccatctgtggttcctggttggtggctaatgaagtgaggggagggagggatgtcaccccaaaagtaggccctcccattggctttggccaggccagacacttcacatcgtttacatggttctgtgtaattttaaagtttatgtgtataaagcgaaactgtttctgtgaaactgtatattttgtaaataaatatattgctactttgaggttcatgaaaaaaaaaaaaaaaaaaaagggcgggggctcgcgaagttctaaatcgccgacgggccgctctaaagtatccctccaaggggccccagctttaccccgaaccccgctttccttggacaaaagggggccctatagggaagtccgatttataaacctaaggcactgggccggccgtttn

SEQ ID NO: 42802 - DNA, 748 bp, Homo Sapiens
  misc_feature (661)..(661): n is a, c, g, or t
cgccagactctaatacgactcactatagggaaagctggtacgcctgcaggtaccggtccggaattcccgggtcgacccacgcgtccgcaacaaaccacaatacttcctgggaccttttgtactttatttgaactatgagtctttaatttttcctgatgatggtggctgtaatatgttgagttcagtttactaaaggttttactattatggtttgaagtggagtctcatgacctctcagaataaggtgtcacctccctgaaattgcatatatgtatatagacatgcacacgtgtgcatttgtttgtatacatatatttgtccttcgtatagcaagttttttgctcatcagcagagagcaacagatgttttattgagtgaagccttaaaaagcacacaccacacacagctaactgccaaaatacattgaccgtagtagctgttcaactcctagtacttagaaatacacgtatggttaatgttcagtccaacaaaccacacacagtaaatgtttattaatagtcatggttcgtattttaggtgactgaaattgcaacagtgatcataatgaggtttgttaaaatgatagctatattcaaaatgtctatatgtttatttggacttttgaggttaaagacagtcatataaacgtcctgtttctgtnttaatgttatcatagaatttttttatgaaactaaattcaattgaaataaatgatagttttcatcttcaaaaaaaaaaaaaaagggcg

SEQ ID NO: 42803 - DNA, 737 bp, Homo Sapiens
agccagcaccgggcggagagggctaccatggggaaaatcgcgctgcaactcaaagccacgctggagaacatcaccaacctccggcccgtgggcgaggacttccggtggtacctgaagatgaaatgtggcaactgtggtgagatttcggacaagtggcagtacatccggctgatggacagtgtggcactgaaggggggccgtggcagtgcttccatggtccagaagtgcaagctgtgtgcaagagaaaattccatcgagattttaagcagcaccatcaagccttacaatgctgaagacaatgagaacttcaagacaatagtggagtttgagtgccggggccttgaaccagttgatttccagccgcaggctgggtttgctgctgaaggtgtggagtcagggacagccttcagtgacattaatctgcaggagaaggactggactgactatgatgaaaaggcccaggagtctgtgggaatctatgaggtcacccaccagtttgtgaagtgctgatccctcttccttcccagttgcccttaagaactgagaaaggacaaagtactctaagcagcagagcccacagaggctcgttcctttgacccttgtctcctggtggctatacgaaaccttcacaatctgcatgctggactttattacagcttcccaagccccatcaataaagcccctgttcacgctgcactggtgcatgaaggtgaagtaaggaggcagctactccctcc

SEQ ID NO: 42804 - DNA, 824 bp, Homo Sapiens
tacatgatgcccttgtgcaaataataagcaaagaggttggagttgaaaaactagaagcaatgaaaaccctggccactttaaaagaagaaaaacgctaccttcaggatatttggtcataaaaccagaaattaaagaaagaggattaagcttttttgactgaaagtactaaaagtcagctttactagtgccaaacctttaaattttcaaaagaaaattttctttcaacatttcttgaaggacatggagtggagattggatcatttaacaatataacaaaacttcctgatttgattttacgtatcttctatctacgcccttcctgtgcctgtgactctccccaaattgccctgttgccttgagctcttctgagctaaggcagccttcagtccctatcagcgcctcctttacttcccagagaacttcacagagactctgtccttccatgcaaaggcttcctgaaatagggagactgactgagtagctcattcttgtgacttacagtgccaacatttaaaaaagtatgaaaatgatttatttttatatgatgtatacccataaagaatgctcatattaatgtacttaaattacacatgtagagcatatctgttatatgtttatgtaactatcaaatggttatttgttactaaagctatatttctgataaaaaatattttaggataattgcctacagagggatttatttttatgatgctggaaatatgaaatgtattttaaaatttcactctggcatatgatttatctgtcaccattactttttttaaagtcacaatttcagaaattttggggacatttgcattcaattt

SEQ ID NO: 42805 - DNA, 1024 bp, Homo Sapiens
tagacctggccggcctgagggctggcagatgtgagggcaggacacctgggatggactcgtaggctgacccaggcccaaagggggctgcctgttcccaactctttcactctgtaacccattttaaaatgagtttttgaatcttgcctcaaattgacctacttggataaaatcagtgcttttcctaacttgattttgtttgacgtggttccctctaagagaatggtaggaattgaaactatttgtatatgttgaaatttgtaggggttcaggaacccatggcagaaacactaaactatttatttacaagtatgactattttttttttcaaagtaggcaattctttgtatattttaaggcaaataatcacttcacctctggtgccttccatgcgtcgcataagcactcttgtcaatcatggaattggaaaaaaagatgtacatttagttaaacaagataacactatttttgtagcatgattttagattgtgtccttttaatattgttttcaacaatggtagttttgaggttttggccattttctctttacacttcgtatgtatttttaagaagaaaaaaaacaaaaaaaatttcctggctattcctcttttcctctcctgctggctggctttctcctggcatctttgttccctgccttattttaaaatagtcccttgagaattaagaagtaatatttttcctggtgaaaaaaaatttattaaagtccacgtataaaattggcattttggggcatttttttttaaaccaccttggcttccagttttggaaacccccctggtttccccccttcaaacaataaacaaagaaaaaaggggggttccccttattttttcccaaccccaaaaaaagttatctcttccaaaagcccctgtgaccctccctggttcttttggggcgggaaaaaaatggtggcaacaaaccccatattccccacctatccccctccacccctcgggccatctggagcattctgctaaacatacaccccacacctgctacaccactc

SEQ ID NO: 42806 - DNA, 907 bp, Homo Sapiens
gaaatatttctgtgtaacttgatcttctgtctagtacttgtcttataggtaaccaacactgaaaactttgtagtgatgactaccaaagaaatacatagtaaaacaaccttttatttccaaattgttaaagagccagccattgatgctgctacatgagttccatgctcaagagccattgtaagagattaaggggtttctaggtttttggtgattttttgtttgtttttttctttgttttttagggtttttttttcttctttaattttttgattaaaacatacacacagctgttagcataaagtcgtggggggcattttctggaatgctcagcagttctgattaactgccaagcccaggttgcctctcatgaggcaactgaaaaratcctgtgtcttgatagcatgggtgctgtgtgtgtgcatgtgtgtktctgcattcatgccttaactcgggttactgcacaactttagttcttgacttagtctgcaccgtcatctagattgtattgtacatctcggtctgaacttcatcctggcaaaaacaaagttgcaggcacaacagtttaagaatgcattcctccagaagagtatctggtcaggttgaccctgagccttctttggacttgatttggaacttagcctggaaagcgaaagtggactgtccaacagaaagatgtsaacaaggaaaagaggagagccaagcgctacatygccttttgcctctgcatatctgtgcacactgtatgttgttcatgatagcttgtctacaacttgactaggttggagtgctggtaatagtggcaatcttgacattcttggtcagagtttagagagatgtragactttcaattaatgtcttatttacyccyttatgtggattaghmdtggatamatgtgcggatyagaaa

SEQ ID NO: 42807 - DNA, 612 bp, Homo Sapiens
  misc_feature (598)..(598): n is a, c, g, or t
ctggaggcgttcgcctctagtttctcaggatggagcgagagcccagccagagaacagtaagaggagctgctctcctatctgcactcacccaggccttcacccagactttaccacggaggcggctgagtgcagctacagctaggtccgcgtccctcactcttttcatcttctgcacgttcttcgtgaaactggaaggatcccgggtctcagctagaacacggtggaagagaactttcctaggaaacggttcatgtgtcacttttcaggatgtggaaacactgagccatacaccctccattgcttggtgctggggttgtgtggcctccactgggcacttgccgacctgagtctggggccagggagcccaggctgccctgcactcctgcctcccagcccacagccaggtgctttcatcacagctaaacctggttccctccaaacctcccagccactcgggcttgtaactgtctgagccccggatccggtggggtgaaagcagccagctcatcccagtgactcacaggacacagccatccagcggcatctttccttgtcgaatgatactgtaatgaccttccaaagtgaagagtagcacatntaagtgatcttatc

SEQ ID NO: 42808 - DNA, 737 bp, Homo Sapiens
gttaggaaatttcttcttttgagtaagagtattgctataacatatatttttttctgaaatgttttaaaatagaagtacacctaattgttattggttaaaaaaaaagccatatgtgaatgaggttggttttgggttttctttcctgaattgtattagtccaaaagaactaaattagggtacttgtgctgtactaaaatggtaattataacagacagtattagaattactgaattaacaatgagaaagagagaagtgtatctgttacgtggatatatgggccagcctggatatacaacagagtagtaacctgtgaaacaaacatagaatatcctcttagacattgttcctcataatgcactgacagaattcacatagctcttaatgaaacaatttaagattgatgtacgtacgttctgacttggtctcgctgtcggttaactgtaaagttagggggaagaaagaaaaaccactcccacagggtagacacagttgagagtttcattttaaaaagctaagtcttataattatgacattaacttgcttgggctttattgcagtgactttccaagtttaattattcaaaatttttgaactgactgaattacttggtatttaaagttgactttttacataaactttataaaccttttataaaaaggaaattataacattactataattggaaaatcattttacaacatcatactagcagtaatacacctttacaaaatcaactg

SEQ ID NO: 42809 - DNA, 590 bp, Homo Sapiens
cgcgtccgtaattgttacattatggttcagggaaacacagtttcagccattggaccttttagtggcttaaaagaggttagaaaagtagtccttgatactatgaagaatattcatccaatttataacattaaaagcttaatgattaagagagagttggcaaaagattctgaattacgatcacaaagttgggagagatttttgccacagttcaaacacaaaaatgtgaataaacgcaaggaaccaaagaaaaaaactgttaagaaagaatatacgccattcccaccaccacaaccagaaagtcagatcgataaagaattggctagtggtgaatactttttgaaggcaaatcagaagaagcggcagaaaatggaagcaataaaggctaaacaagcagaagccatcagtaagagacaagaggaaagaaacaaagcatttattccacctaaggaaaaaccaattgtgaaacctaaggaagcttctactgaaactaaaattgatgtggccagcatcaaggaaaaggttaagaaagcaaagaataagaaactgggagctcttacagctgaagaaattgcacttaagatggaggcaga

SEQ ID NO: 42810 - DNA, 596 bp, Homo Sapiens
attctgccctcagctgagctgagtaagggctcctgggggttggctggagatgggtgtggcatctgtccaggcctggaaccgtctcaagacagtgctggcaaagctgcagtattgagatgctaaggagctgatgccacctctttgtcttcccctaaaggagaacatggggataacatgggtgtgtgcccacaacactctaggtgcagagcccctgtggcaaagtattacagggtgtgggtggggattaccctgaatcggggattttaatgatggaagcaggcagagcctggtgggtgattctgtcaacagaaaattgcaatcatgcaggggctgggagggttaggatgaaaaaactggggccattggaggcccactgtaggtgggagggagctgattttggggtggggggtgggactagagggcaatactgaaggggttaaacaggtttttgctcctcaagaatttgtttgcctgggcccaggattggagggcttcacaccaataccctgtgtatacaagaatcagatttataatacttcccctttttgttacgtatgaacactataaaccaaattattttgaaaaaaaaaaaaaaa

SEQ ID NO: 42811 - DNA, 681 bp, Homo Sapiens
tgggtctcctggtgcgggggcgtgagtggccgtgccctgggtgtgctgcctgtctgagcaagcttccctagctgtggaaccccgggccccctgctgcgggctctgccttggtgtcatgcctgctgcacccccgtttccactgacgtgccgtctgtggctatgggggtggtcactggaatgacggtcactccagacgtcagccggcagggatgcagcaggctggccgcgcaccggggctcgggcaccctctggccccacactggcaatgatgccacaccttgccatgtccacgctgttggtcaaacccctctgtcatgcctctttaaagagaaaagaagagaaagattttttttttttaatggcagaccgaagtggagatcttgtagcctagataggatagtctgaccttctagcatagtctttttggcaaatgatttgtgttttcagtgtgtggggaagctgtcctgggggctggggcgacagatagcacataggctgtttctggggctgcaggggcttccctgagctggatgttgtgggtgttgccgtgcttcaggaagtgtggcgaccagaaagcgtagacccggggcccagggtctgcccgcccctgcagcctggcctccccgcacaggctgtggcttgcactccagccgctctagtctctcaggaatttgcttgtta

SEQ ID NO: 42812 - DNA, 697 bp, Homo Sapiens
ccctgggaggcacacctggtccctgctgctggctgcacttgcctgccttgtccctctgctgcattgggacatccgcagatagaagttttagaaagttctatttttccaaaccaggattccttactattgacagattttctttaccaaaagaaaagacatttattcttttgatgcacttgaatgccaaagaactgtccttctttttctcctctccctccctcccagcccctgagtcatgaacagcaaggagtgtttgaagtttctgctttgaactccgtccagcctgatccctggcctgagcaacttcacaacagtaattgcactttaagacagcctagagttctggacgagcgtgtttggtagcagggatgaaagctagggcctcttatttttttctcttaattattattatatttctgagttaaacttagaagaaacaactatcaagctacaacttttcctgccattttcctgtggttgcagcctgtcttcctttgaaattgttttactctctgagttttatatgctggaatccaatgcagagttggtttgggactgtgatcaagacaccttttattaataaagaagagacacaggtgtagatatgtatatacaaaaagatgtacggtctggccaaaccaccttcccagcctttatgcaaaaaaaaggggagaatcaaagctttcatttcagaaat

SEQ ID NO: 42813 - DNA, 638 bp, Homo Sapiens
  misc_feature (533)..(533): n is a, c, g, or t
ggagagcaccaaagctgaccacaacatgtgtgttctgacatgtttctaatatgtggccagggcgttcagatttccagttttgaaaacaattgtatagatttcacaacacaaaaaggacatttgtggatgttactgcacattttaaattcttaacactaatttatctgtataagtgttttatatgcatatttttggacataaacagtttatgtaaaattagtaatgaatgatggcaacgagggcactgttatcttcgtttgttttcaatgatcatttagcattcaatgatggaacagctggtataacataagttgttggcatgaaatatttgagattggaaacttcttgccttgaacagaacttatatcttagattctctctcacattttcttggagctggggtttgaataggaaccagatgatgttcactgctgaaattccataatgcttcccattgaagggaagttgagaaccaggaaagctgctttcacgtcattgccatccagtactgacagggaagaaagatgtagttntccagtagtgatgaatcaaattattgaattaaatttcttcttaagaagtaaaaactcagaatgtaccatcttgtttcctttcagtttattaaaatggcatcataa

SEQ ID NO: 42814 - DNA, 581 bp, Homo Sapiens
tcatgggttttcagctacatttttcataactttgtagtacatccatcttgagtaaattaagccacaatttggtacctagggtctcaaactaaaatttatttttataaatgaattttaaaagaaaaaatatctacttcttttaaagttagaagaaaattaacctgctgacaggcaacatttttggggtgctttctgcactagttttccttgtaaatgatttgagtgagtaggtttggtttctgacgaaagtagactggagggtagcattgtatgcctcaaatgtctcagtgtgtttggctcatacgtgggctatactttattattttggtatgcttacaaatgactaaccaatcaaattgtcattaatgtttggaaaatctgttaatgcacatgcacaataatttcctgaaagccataggacatgtctgtagtcagcaccacgatagcaccgtttcatgaaaggcatggcggctgcatttcataccacatcaaaatacagtaacatttctatactaaattaacagtaatacctcaaaactgctccggtagtagtttttaatggattgaaatttacagtttag

SEQ ID NO: 42815 - DNA, 524 bp, Homo Sapiens
gtgtctgtatctaatttaaacagatgttaatggacgtctggccgaaactattatacttttataagatgagctgaatcctcttactttaaaaactggtctttttatttaccctctgtggtagaagagtcaccagcaggttccaaattgatgtgtatgataggaaaaaaaccttaattttaaatataatatagagccttaaactatgccactgggtggcagaggctgtataaaacgcacttgttttcatgcaggagcggggcaagtaaggttgagcctgactgtaaacctagaactgcggaaggactgggacttttgtacaaatttcacatttattttacagcaatcatgctgcatttgtgttagtgttctttataataaaaaacaaagcagcctcctggctggctgtgttacaagtgactcttccttagacagctagaaagatgctgactttgtcaaacttgcatttatatgaaaaccttctgtctctaatatcacagaataaactttctttagatgctgttaaa

SEQ ID NO: 42816 - DNA, 727 bp, Homo Sapiens
ttcctttgttgattcaattcctgtgatttttgttctcttccctgaagtgctttacagtgcatggaatctccatcattgttattttaacgatagtaattcacagtcctcagaagcctatttttaaagcagaagcaaaaaagaaaaacaaaataacaaaaacaacccttcctcttttctctcatctcacctctctgtgttgattactaatcatcttagatattattgctagtggatgtatggtagatgggttgaagcttttctgataattattacacaatttaaaacaacatatatatttaaaataaatatatacagtaaatatattgagccatgttaacctgccaatgagatctgtgaaaaaataatggcctcatttttctctttttaatttcttttacccttttgtgaagcagctatacgtggcatacatgtatttaaagaaaaaaaaatagatgtagagtgttttttttacacttttaacttagcatgtggtgttgaagtattactgtagatcaagtttgtcttccgcactaagatgtgaggaaattgtgatttgttctctccaccacaaatgaattacacatttattatcttctatcattttgaaacactgcagtttaccatgggacactgtatatatttcttgcccataatggtaaggactgattgatatatttacgagttaataactttgtgatttctgctgaaaaaaaacaataaaccaaaa

SEQ ID NO: 42817 - DNA, 987 bp, Homo Sapiens
  misc_feature (741)..(741): n is a, c, g, or t
  misc_feature (847)..(847): n is a, c, g, or t
  misc_feature (856)..(856): n is a, c, g, or t
ctcatggttccccgcctggaaatgtcgtggaagaagagaaagttgatataagtgaagatggaatgaaagcactagtcactctttccagtggagacatgcgtagggctctgaacattttgcagagcaccaatatggcctttgggaaggtgacagaggagactgtctacacctgcaccgggcacccgctcaagtcagacattgccaacatcctggactggatgttgaatcaagatttcaccacagcctacagaaatattacagagttgaaaactctgaaggggttggcactgcatgatatcctgacagagatacacttgtttgtgcatagagttgactttccatcttcagttcgaatacatttattgaccaaaatggcagacattgagtacaggctttctgttggcaccaacgagaagatccagctgagctccctcattgctgcatttcaagtcaccagagacctgattgttgcagaggcctagatgctctgagggccattcacaattctcagggctcagcagtgatgggagaacagaggacagttccaggataaactgctgcctggggctgtgggatgaatcagtcaccccgaatcttggaaaaacccccttccaggagaggatgggcaggcatttaaaaagtaccatttttgtggttgtttggagcagggatgtacaaaataattttaatgtattaactcatactgcctgtcttttataggggaaaaaaataacctttttntattttaagttataaggtttttaccttttagttgcttggatgacagggaattagcctacccccattttggtctggaaacagagactttcaaatttaatatggtccnagtgtcttncctactcaaggtaaacattatctccaaaaattacatttatggattctaataatttggccaattgtggtctggtatctaaattttaaaacgaaaaggtttaatggggacgtcttggggcccgaaacctattt

SEQ ID NO: 42818 - DNA, 901 bp, Homo Sapiens
  misc_feature (664)..(671): n is a, c, g, or t
  misc_feature (675)..(677): n is a, c, g, or t
  misc_feature (679)..(679): n is a, c, g, or t
  misc_feature (686)..(686): n is a, c, g, or t
ccacagagaacctgagttcccgggagctgggccctgcctgcagccagggctggggttgccagaggccctggagggaaggacagtccctgctggggaagaacagccccggggccccctggtcaccgagactcagcctctgctggagaaagccacgccctccctgctagcacagaggcctgactgacttttttgcttaacttccatgttctgggtgatggaaactgccaaacctcctgtcagtgaggactctttccgactgcccagaaagtgggggtggaggaccgaggctacagctccacacgccccggtcccccagagcatctgccccaggtacacctccccctgcgccccgcacgactgcgggagccagactgtccagggaaacagcctctctcttttctacacactcagccacaaagccccccagctcccacaccgcgtcccagctcccctcttttgtaagtatgtgaaaaggaaaaaatgcaaacgttggagtttgggctggagctcctccctccagctgcgacttttaactatgtaataatgtacagaggaagctgttggtgttctaagactctgtgtggctgtgcaatttctgtacatttgcaattagaaatattaaagatttatttagctattttaaaaaaaaaaaaaaagggcgggnnnnnnnnccannnanaccacanccccaccaaaagcacaaaacacggggcgccgcgcgcgacgcggcccgcgcaccacaggccccggccctgcccgcgcccaagaagccccccctgtttctcccgaggggaggaaagttgaatccgccggctcgctccgaatcgtgccgcccccggtaattaatggtcccccccgcccggccgggtggcgttctcgccgccacggcgcccgcactgca

SEQ ID NO: 42819 - DNA, 461 bp, Homo Sapiens
tgcaaagccatttcatcgagaaggggacagaaggagaaatacacacatgtatacacaaacagaatggttgagaaaacgttttaataaaatgtgagggttgtatgtgtgcgtgtatatatttacacttaacctctaaaattctcttctacagtatctctgttatgaatatgatggaaaagcaacattttggtggtgagactattgttaaaataaatttgagaaagacgaaaattttgtgagtcttgataattacaagtcaacagctatcgaaagttagcacagcttgtctgtggtgctgtttttttccccactgcagtggacttatgctgttttcatgtttagaaacacaaaggtttcatgtgattcatgtgtaagatgcacagtatttgacatcctgattatgtaatccctattccatctatccagtcttacacttatggatggcctcaaatctattgcat

SEQ ID NO: 42820 - DNA, 763 bp, Homo Sapiens
aaaggtgggcaagatgagataaagacattttgatacagtaattgttttggttgggttttcatgtcagtttatgtttgactaaagctctcttcatatgcaggtttataaatttgttaggtctgttgtcccatgattaaacatggagtgcctcctctctgatttaatattctgcaggtcattgtaacctgctaggcaaagtcacaacattgcattaaagaggtgatagctttgctaatatcactgttttaaaggacgtacagttaaaggaatattaagtgggagaaagcctacaaggcttttagaatattatcagtatcttcatttctggtattcagatgttatgtgataaaacacattttttttggctttcccagatacactatatatttgttcaagggtaaatctataaaatgtatatactttattttgtggttttgctatttataaatttaatgttttaactgttgctcatttatggtttgttttgggtggtggtgttcatctgtatatcaccatgttaatttgtaatggaagtgcacttcgtagtgtatattgttactgacattaaaatactttatagcattgtctctgagcaaaagctagtatttaattgtacaaatgaataagcaagttacatgttattgtttgctcttgacagggtaggcctcttaaaagaaaaaaaacaacttgttttttctttatgaatcccctatgccaaacacataccttccatgcatgacatgagatctgcagactggatttt

SEQ ID NO: 42821 - DNA, 811 bp, Homo Sapiens
aaaagtatatgccagataaacttgcaagattggatccaagactattttgtaaggctttgtttaaagctttgggcttaaatgaaaatgactacaagtttgggttaaccaaagtattttttagacctggcaagtttgcagaatttgatcagatcatgaagtctgaccctgaccacttagcagagttggttaaaagagtcaatcactggctcacatgcagtcgctggaagaaagttcagtggtgctcactctcagtcatcaaattgaaaaacaaaataaaatatcgagctgaagcctgcattaaaatgcaaaaaactattcgaatgtggctttgcaagaggagacacaaacctcgcattgatggtctggttaaggtgggcacactgaaaaaacgacttgataaatttaatgaggtagtcagtgtgttgaaagatggaaaacccgagatgaataaacagatcaagaatctggaaatttctattgatactttgatggccaaaattaagtccactatgatgacgcaggaacaaatccagaaagaatatgatgcactggttaaaagctcagaggaactcctcagtgcattacagaaaaaaaaacagcaggaagaggaagcagaaaggctgaggcgtattcaagaagaaatggaaaaggaaagaaaaagacgtgaagaagacgaaaaacgtcgaagaaaggaagaggaggaaaggcggatgaaacttgagatggaagcaaagagaaaacaagaagaagaagagagaaagaaaagggaagatgatgaaaaacgcattcaagctgaagtggaggcacagct

SEQ ID NO: 42822 - DNA, 586 bp, Homo Sapiens
gcccgaagccatcggctgagactacacagcttggggcccgaggatgaaggcgtgtaccactgtgcccccagcgcctgggtgcagcatgccgactacagctggtaccaggcgggcagtgcccgctcagggcctgttacagtctacccctacatgcatgccctggacaccctatttgtgcctctgctggtgggtacaggggtggccctagtcactggtgccactgtccttggtaccatcacttgctgcttcatgaagaggcttcgaaaacggtgatcccttactccccaggtcttgcaggtgtcgactgtcttccggcccagctccaagccctcctctggttgcctggacaccctctccctctgtccactcttcctttaatttatttgacctcccactacccagaatgggagacgtgcctccccttccccactccttccctcccaagcccctccctctggccttctgttcttgatctcttagggatcctatagggaggccatttcctgtcctggaattagtttttctaaaatgtgaactaaacttgttttataaaaagcaaaaaaccacacaccaaaccacacaacct

SEQ ID NO: 42823 - DNA, 452 bp, Homo Sapiens
tttttttttttttttcttcagacatattctgcctcattttatcatctaagcaggcaatcctatcaggtctgaggaaaaaaattgcaagccacacttctagagattttgttcaagatcatttcaggtgagcagttagagtaggtgaatttgtttcaaattgtactagtgacagtttctcatcatctgtaactgttgagatgtatgtgcatgtgaccacaaatgcttgcttggacttgcccatctagcactttggaaatcagtatttaaatgccaaataatcttccaggtagtgctgcttctgaagttatctcttaatcctcttaagtaatttggtgtctgtccagaaaaagtcgatttatgtgtattaattggccatcatgatgttatcatatcttattcccttttatgctatgatttattctatcttttgtatttcagaagaccctcgtgcc

SEQ ID NO: 42824 - DNA, 445 bp, Homo Sapiens
  misc_feature (394)..(394): n is a, c, g, or t
gaacgaggattatagacatccagcagagtctggttttctttgttgtcgttgtgttgttgttgttttgtatggaaaagctgctttccccgggttccacttataacctccggtaggtcacagggttcaatgtggatctgacttaaaaacccaccagcatgctcaatcccttgttatccttatggaatctgtatgttaactctctgggtgttcaggcttctatttgactgctgttgtgaccctgtttgcaaaatgaatatgacactctgtggattatttgctctgtaaggcacaagtgcttcttatgattattttgacgtttccaagagcaaaagccaaatttaaactctcttcagcaaacttgagccttttcatctaattccatgtcactcacggncataactttccttggacattcttcaccccatgtcttacataataaattgtg

SEQ ID NO: 42825 - DNA, 1047 bp, Homo Sapiens
ctgggtggcgattcggacgagggaaagagacattatatccgttcctgtaaattgctacccgatggctgcactctcatagtgggaggggaagccagtactttgtccatttgggacctggcggctccaaccccgcgcatcaaggcggagctgacgtcctcggcccccgcctgctacgccctggccatcagccccgattccaaggtctgcttctcatgctgcagcgacggcaacatcgctgtgtgggatctgcacaaccagacactagtgaggcaattccagggccacacagacggagccagctgtattgacatttctaatgatggcaccaagctctggacgggtggtttggacaacacagtcaggtcctgggacctgcgcgaggggcggcagctgcagcagcacgacttcacctcccagatcttctccctggggtactgccccaccggggagtggctggcagtgggcatggagagcagcaatgtggaggtgctgcacgtgaacaagcctgacaagtaccagctgcacctgcatgagagctgcgtgctgtccctgaaatttgcttactgtggtaaatggtttgtgagtactggaaaagataacctcctcaatgcttggcggaccccctatggagccagcatattccagtccaaagagtcctcgtcagtgcttagctgtgacatctctgtggatgataagtacatagtcactggctcgggggacaagaaggctacagtctatgaagtcatctactgaaaacattatgtggtttaacgtttatagttgaattgggccaacatgttttcgaatttatagaaaaaaaaaagttgtaaactttaaaagagaaaaaaaattacaaacacctgtttccaaaaccttgaacaaaaaactacttttgaattctacaaaaaagggaggccgacaagttccatccagcaaaaaaagcccccctgttcctaccttagacccaaagtgggagccaccccaggggcccaaagcgggaacagaaaggggggcccaatgggggctttgtaaaggaaaattgaaagc

SEQ ID NO: 42826 - DNA, 841 bp, Homo Sapiens
gcacttaggtaccagtaaatatataactatatatattgccatcacacacgaacaatcaaataaagtgttctattaacctgatctctttgcccttttgctatgtgaggagtgaatgagtggccttctgatgctctgactcttctctgtatgtcaaactcatccctggcacaagaaattccagtcatgtgaagcaaactgccctttgtcctcaaagaaattgttgaaaaagaaaactttttaaagagattttttgcatattctctgccttgttcttatcaacttgaaatgttggcattttctaaccttgttttgttggctacaataattcagtattcatgtcaaaattgagaagtgccctaattgaatgtgtttgaatgttatccttgcacaattctttaaattgaaagataaaatgttttacctcactgttggacatacattccaagcttttcaactctaggagaaaaagaaaatcatgttttcctgtattgtaaattttagactatttcatatacattgtattaaaactgccatatcaattttaatgtatagattttgcaaatattatgctatatgtaatacctaactgtatctgtagtgtatatgtaatatatttatgcccaataaatgtttttattctttctgacttaaaaaaaaaaaaaaaaaaatttcatagtgtcacctaatctgcgtaaagccgccgcttcctttatgagggtaatgcttcagcaactgataaatacttgatggttggacaacccactaaagcatgaaaatgtttttggaattggagcatgcttatgacctaaacgcaaaaattaacacatgctcttttttcgtg

SEQ ID NO: 42827 - DNA, 643 bp, Homo Sapiens
cacctgtgcaaagaaaaggaggaaaacttagaagaaaaggcagagacaggcaagacagcatctcacagcttgtcaggatcagggcattaccgactattttttcttaccaaaagagcactgaatttcctaggggaaggtgagccacctttacacctcctgtcctccctcccagcccgtcaagcgatcccatcacccagcctcatcactcagcttcttcctagtacaaaactgccatcggttgtacgtcctgagctgtgggacgtcagctttaaccctagcctgtctcagggcctcgccctccagccccccgccccttagggtgatcgtgggtttcttcccttcctcctgcacaatcgcttcccttcactgaattcccttcaaagccaaagtttcttgagcactttttcttgtgtgcagtcttgtgtgtttgggtgttggtgtttttaaatttgctttctattcccccctgcctctctccatgtcgttacgcagctgagcactggttgggatgcattcgaatgacttcagcaagatcctgctttcctcagcccccgctctgttttatttattgtttaatatttccaatgatccaaatcaaagtgaataaacaaagagctattttactgttaaaaaaaacaacaag

SEQ ID NO: 42828 - DNA, 584 bp, Homo Sapiens
  misc_feature (551)..(551): n is a, c, g, or t
  misc_feature (557)..(557): n is a, c, g, or t
aagatttaaaaaattatattgattaaaatgtaccactagaaaggtattacatgtgtataagtatgggtaaaaaggcaagtcactagtttgagatgaaaactaaaattttcatggtaaaatgccagcatgtatgtacttgtgtagtgtgtacttctaaacagagaaggcttataaaagtaaatgcattaaggccaagtgcagtggctcacaccggtaatcccagcactttgggaggccgaggtgggaggattgcttgagctcatgagttcaagaccagcctgggcaacatagcgagactccatctctataaataaaaaaaaaggaaatgcattaaatagaaggttgatagtttatcataaacctgcggggaagaaactcagactttctatttttgatattttgtgcattaatacattacaaacatgaagatgtttgtaaagttttgttttagtcattttctttgcagtcacatcattgtaccaccttcattattgtatagagctgcttcaattctgagtcctctggacttcccctgcctatctgtttgttgntgttgntgaagacagtaaaataagtgttttcaa

SEQ ID NO: 42829 - DNA, 555 bp, Homo Sapiens
  misc_feature (424)..(424): n is a, c, g, or t
tactactacggctgcgagaagacgacagaaggggcaggagcaagtgagagccacgagccaaggtgggcacttgatgtcggatctcttcaacaagctggtcatgaggcgcaagggcatctctgggaaaggacctggggctggtgaggggcccggaggagcctttgcccgcgtgtcagactccatccctcctctgccgccaccgcagcagccacaggcagaggaggacgaggacgactgggaatcctagggggctccatgacaccttccccgccagacccagacttgggccgttgctctgacatggacacagccaggacaagctgctcagacctacttccttgggagggggtgacggaaccagcactgtgtggagaccagcttcaaggagcggaaggctggcttgaggccacacagctggggcggngacttctgtctgcctgtgctccatggggggacggctccacccagcctgcgccactgtgttcttctcttaagaggcttccagagaaaacggcacaccaatcaataaagaactgaccaaaaaaaaaaaaaaaa

SEQ ID NO: 42830 - DNA, 892 bp, Homo Sapiens
ggacgcgtgggttgctgtgggagtcttccttctccttattgcagtggctggactggtgggtgctgtcaaccaccaccaagtcctgctgttcttttacatgatcatccttggtttggtcttcatcttccaatttgtaatctcttgctcatgtctggctattaaccgaagcaaacagacagatgtcatcaatgcttcttggtgggtcatgagcaacaagactcgggatgaactggaaagaagttttgattgttgtggcttattcaacctcacaaccctgtatcaacaagattatgatttctgcactgcaatctgcaagagccagagccccacatgccagatgtgtggagaaaagtttcttaagcattcagacgaagccctgaaaatcctagggggtgttggactcttctttagctttacagagatccttggtgtttggctagcaatgagatttcggaatcagaaggatcctagagccaaccccagtgcctttctatgagactttggatccttctgacttttcttctgctctctctaagctttctcttcctcccttagggaatatctagggtctgtaaccgttttggtttgagaaaaaggaaaggccccttgtcacatcctctaaaattgatggaatagcaagactttatgccttgacatattttagtggggagcagactataaggaaataaaggaaaaactttcttcctctctctccaagaggatatgggaagcttctgtgagtgcataggatggggggctggagtcattcttagctgtttccctttctctgtccatatactggatcacctcaacatacccctggtgtggctctaaagggtaaatcaggggatagggcccaaggagaaaaacaaccaggaactcctttcctgta

SEQ ID NO: 42831 - DNA, 676 bp, Homo Sapiens
cccacgcgtccgggaagctgctaagtcagagccgcgatgttccggattgagggcctcgcgccgaagctggacccggaggagatgaaacggaagatgcgcgaggatgtgatctcttccatacggaactttctcatctacgtggccctcctgcgagtcactccatttatcttaaagaaattggacagcatatgaagacaggacatcacatatgaatgcacgatatgaagagcctggttacagtttcgactcctctctgcaagtgaataggcccagaaaggtgtaagagactctttgaatggacataaaattctgcttgttaagaacaagtttggctctggtaactgaccttcaaagctaaaatataaaactatttgggaagtatgaaacgatgtctcgtgatctggtgtacccttatccctgtgacgtttggcctctgacaatactggtataattgtaaataatgtcaaactccgttttctagcaagtattaagggagctgtgtctgaaatggcactgtcttgtcagtcatttctgtttacctttttcttctgcccagagtgtatttgtgaagagtctcttatattatgttttgtggaaatcagcacacaaccacaatgacatttaagcacaggatcattattagtctatgtttttaataaacatatcaattaaaaaa

SEQ ID NO: 42832 - DNA, 592 bp, Homo Sapiens
attccagaggtgatggtggccccaaggccttgaaggggctgggctccagcccgacctggagctgctgctccggagcagccagcgggaggaaggtgacaatgaggaggaggagtactttgtggcccaggggcagcagtgaccagccagggcaaatggcttagaagcaggccactccccagcctgctgccagcactcactgtgctcaagccgccagggctcatcatggtagctgggagctgtggacgggagtcaccaggtggtggggccaagccagggactcatgacttttgcccctcccttcagagcctggtcacacaaggggcgagcaccaggccagcctgggactggccagagctgggcccaagctgcgctggaatcgcagcaggagaggggagtgggctggttcttcccaccacttcccaggctctgacagccgagactcatttccaaggcacagcagctttctaaagggactgagtttggactgggttttggacctccaggggctggagcttcatcacctgggcagtgtcttttctcagagagcaggtttctttatagtttggaaataaatggttcacggtccactggc

SEQ ID NO: 42833 - DNA, 906 bp, Homo Sapiens
ttatatttttgtgagttataaagtactttgatatattctcattaaatctgtaaatcacctctataagtaagtggtaataataaagcagatatttttgtccccatttaaaaaatgaagaaattaatgcttaatagggtggtaccctggaaaggatctgggaagtggtagaatttctggtctgtacttttacaaatggagcccttgggaggtgggttaggtaaaagaagctttttacttaacgttgtcttatttccagtctaattttacgctgtagcagaaccagatggctgagaaaattctggaactatggatcttgaccccaaggatatattattttattccaagaaagatcaggtaggcgaaaagatgacaggatacagagtcaatccataaactaaatatttataactgttctgaattatacagagtctaaaaatatgtgtcagctacttcattcctgtaaatactcttgctgtgttataaatatggcaagaaataaacatgaccaatatcaatagacttcttgaggctactataagttttgagaaataaggttcaaaaaataagaatgctaacacttaagcacagactagagcttgcttgggtttcttcctgcattacaaggtaaaaatttgttaatgtttgtttttattcagcttgggaaagctttgtgccatgaatacgtcgcatttaataacaagccacacacggcatatagaaaatactttaatttaaaaacttacctagaagattataatatccgacgtgacaaagattggagtttatttgcctggaaaacttggggtttgcctgggcttttggtttccttttcctttaaaaaataaatggtacaggtacaactaccaacgcaaaagttttgcccactattgaaatttgaaattttta

SEQ ID NO: 42834 - DNA, 539 bp, Homo Sapiens
aggatatattattttattccaagaaagatcaggtaggcgaaaagatgacaggatacagagtcaatccataaactaaatatttataactgttctgaattatacagagtctaaaaatatgtgtcagctacttcattcctgtaaatactcttgctgtgttataaatatggcaagaaataaacatgaccaatatcaatagacttcttgaggctactataagttttgagaaataaggttcaaaaaataagaatgctaacacttaagcacagactagagcttgcttgggtttcttcctgcattacaaggtaaaaatttgttaatgtttgtttttattcagcttgggaaagctttgtgccatgaatacgtcgcatttaataacaagcaacacacggcatatagaaataactttaattaaaaaacttacatagaagattataatatcagacgtgacaaagatttgagtttatttgcctggacaacttgggtttgtctggcttttgttttctttttctttaaaaataaatgtacagtaaaactacaag

SEQ ID NO: 42835 - DNA, 723 bp, Homo Sapiens
  misc_feature (625)..(625): n is a, c, g, or t
  misc_feature (692)..(692): n is a, c, g, or t
cttttttgttttgttttttaaggaaacgattgacaataccctttaacatctgtgactactaaggaaacctatttctttcatagagagaaaaatctccaatgcttttgaagacactaataccgtgctatttcagatatgggtgaggaagcagagctctcggtaccgaaggccgggcttcttgagctgtgttggttgtcatggctactgtttcatgaaccacaagcagctcaacagactggtctgttgccttctgaaaccctttgcacttcaatttgcaccaggtgaaaacagggccagcagactccatggcccaattcggtttcttcggtggtgatgtgaaaggagagaattacactttttttttttttaagtggcgtggaggcctttgcttccacatttgtttttaacccagaatttctgaaatagagaatttaagaacacatcaagtaataaatatacagagaatatacttttttataaagcacatgcatctgctattgtgttgggttggtttcctctcttttccacggacagtgttgtgtttctggcatagggaaactccaaacaacttgcacacctctactccggagctgagatttcttttacatagatgacctcgcttcanatacgttaccttactgatgataggatcttttcttgtagcactataccttgtgggaatttttttttanatgtacacctgatttgagaagcctcgtgccg

SEQ ID NO: 42836 - DNA, 695 bp, Homo Sapiens
cgcggaacgcgaggggctgctggggtgtttgtggcagcgggttttcctcggcggtttgcggagctgctaggatggagcaggttgcggagggagcaagggtgaccgcagtccctgtgtcagctgccgacagcactgaggagttggccgaagtcgaagaaggagttggagtagtgggcgaagataatgacgcagccgcgagaggagcggaggcctttggcgacagtgaggaggacggagaggatgtgttcgaggtggagaagatcctggacatgaagaccgaggggggtaaagttctttacaaagttcgctggaaaggctatacatcggatgatgatacctgggagcccgagattcacctggaggactgtaaagaagtgcttcttgaatttaggaagaaaattgcagagaacaaagccaaagcagtcaggaaggatattcagagactatccttaaataacgacatatttgaggcgaactctgatagcgatcagcaaagtgagacaaaagaagatacttccccaaagaagaaaaagaaaaaattgaggcagagagaagagaaaagcccagatgatctgaaaaagaaaaaagcaaaggccgggaagctaaaagacaagtccaaaccagacctggagagctccttggaaagtttagtttttgatttaaggacaaagaaaagaatttctgaagccaaagaa

SEQ ID NO: 42837 - DNA, 872 bp, Homo Sapiens
  misc_feature (857)..(858): n is a, c, g, or t
  misc_feature (865)..(865): n is a, c, g, or t
  misc_feature (868)..(868): n is a, c, g, or t
  misc_feature (872)..(872): n is a, c, g, or t
gaacacctactctttcagttttctggcccaggagtggggtaaatcctttagttagtgcatttgaacttgatacctgtgcattcagttctgtgaatactgccctttttggcggggtttcctcatctccccagcctgaactgctcaactctaaacccaaattagtgtcagccgaaaggaggtttcaagatagtcctgtcagtatttgtggtgaccttcagattagacagtcttcatttccagccagtggagtcctggctccagagccatctctgagactcgtactactggatgttttaatatcagatcattacccaccatatgcctcccacaggccaagggaaaacagacaccagaacttgggttgagggcactaccagactgacatggccagtacagaggagaactagggaaggaatgatgttttgcaccttattgaaaagaaaattttaagtgcatacataatagttaagagcttttattgtgacaggagaacttttttccatatgcgtgcatactctctgtaattccagtgtaaaatattgtacttgcactagcttttttaaacaaatattaaaaaatggaagaattcatattctattttctaatcgtggtgtgtctatttgtaggatacactcgagtctgtttattgaattttatggtccctttctttgatggtgcttgcaggttttctaggtagaaattatttcattattataataaaacaatgtttgattcaaaatttgaaacaaaattgtttttaaataatttgtctgtataccagtacaagttttattgtttcagtatactccgtacctaataaataacagtgccaatttgcaaaaaaaaaaaaaaaaaannaaaaaanaanaaan

SEQ ID NO: 42838 - DNA, 661 bp, Homo Sapiens
ggctgctccctccacagcttctgcagcagactgtccctgttgtaactgcccaaggcatgttttgcccaccagatcatggcccacatggaggcccacctgcctctgtctcactgaactagaagccgagcctagaaactaacacagccatcaagggaatgacttgggcggccttgggaaatcgatgagaaattgaacttcagggagggtggtcattgcctagaggtgctcattcatttaacagagcttccttaggttgatgctggaggcagaatcccggctgtcaaggggtgttcagttaaggggagcaacagaggacatgaaaaattgctgtgactaaagcagggacaatttgctgccaaacacccatgcccagctgtatggctgggggctcctcgtatgcatggaacccccagaataaatatgctcagccaccctgtgggccgggcaatccagacagcaggcataaggcaccagttaccctgcatgttggcccagacctcaggtgctagggaaggcgggaaccttgggttgagtaatgctcgtctgtgtgttttagtttcatcacctgttatctgtgtttgctgaggagagtggaacagaaggggtggagttttgtataaactaaagtttctttgtctctttaacaaaaaacaaaaaaaaa

SEQ ID NO: 42839 - DNA, 737 bp, Homo Sapiens
cagtcacacagactttggtaatattaacggctgctatttgaactattactttttccttctggctgctattcaaggagctaccctcctgcttttcctcattatttctgtgaaatatgaccatcatcgagaccatcagcgatcaagagccaatggcgtgcccaccagcaggagggcctgaccttcctgaggccatgtgcggtttctgaggctgacatgtcagtaactgactggggtgcactgagaacaggcaagactttaaattcccataaaatgtctgacttcactgaaacttgcatgttgcctggattgatttcttctttccctctatccaaaggagcttggtaagtgccttactgcagcgtgtctcctggcacgctgggccctccgggaggagagctgcagatttcgagtatgtcgcttgtcattcaaggtctctgtgaatcctctagctgggttcccttttttacagaaactcacaaatggagattgcaaagtcttggggaactccacgtgttagttggcatcccagtttcttaaacaaatagtatcacctgcttcccatagccatatctcactgtaaaaaaaaaaattaataaactgttacttatatttaagaaagtgaggatttttttttttttaaagataaaagcatggtcagatgctgcaaggattttacataaatgccatatttatggtttccttcctgagaacaatcatgctcttgccatgttctttga

SEQ ID NO: 42840 - DNA, 1007 bp, Homo Sapiens
  misc_feature (26)..(26): n is a, c, g, or t
  misc_feature (967)..(967): n is a, c, g, or t
  misc_feature (977)..(977): n is a, c, g, or t
aaaatatgaataatctcaattatatntcatcacacttttttcataccatttcaagaaacgactagacagtagtaaccacataaatattttactttctccagtataccttgagaagcaaactttgtaggaagccactcttctcccctaaacaacttctgccaaacaataataaagccaactggaaacgaatcggagccattttcattttcctaaccggggcctgacatgctttaaattatctggctgtattctaaatcaacacctaacccctcaaggaaactgaagaatcaatatacagggtaatagctttggctcagagctccaataatgtgcttcagatctgtccatgtggaaatgctttcatccaaatttttaaattggtggttaccaaagagttcacaaaacaggtttgtatgtagcacctttcatgcaaggcatgcaaaaagcctattttaaaatcactgtgcatattatagagttgtagccacctcacaatgaagtactacagcctgtgctgtcttaatggtttatgtcaggaaatgaaaaagatactgtaccaaatctggaattacaatggggagtaataatgtatactaaatgacttttgtattttaagttactttttgtgagtggtgaatttttgtgtttttcttttcagctacacttagtcctgagatgtattttttctttaagtcttgaatgaatacaaaaggagcccattttataatataaaccttgatgtacatgttgagatatttggacaatgaaaatgccttaaaaggaatgcatatggataaagttgcacttataacaccccttcaacaaaatctaattttaaattgcctttttcttttccataaagggttttctttttcagtgtctaccattgtacttaataactggtattaaataccaaatcaaataatataaaagctgtaacatttccctttaaaactaatgctataanggggatttanaagtggaatggcaaaaggtttattacctgg

SEQ ID NO: 42841 - DNA, 503 bp, Homo Sapiens
gtttgctaaaataggcattgcatacacatatgcacacgtatgtgcacgtgccacacattttttgtataatgttgggtttgattataaaagtgttgtcaaatgttttatttatctgcatttagcagtggttggcttttttgaattgaaatttttgcgcattgatgcattgaaataaggaaaattatttatctctgagcactaaacttatttttgcatatttctgtaatattgcagtccccagatccagaacatgggaagttagggaaaatgtgtgattttgtgttttgaattactgtcagaattacatacacaattacaacaaactttttttaaaagacatttcattgtactgcaaaaatctgaatatttatatttcttgtttttttctttatatgttttgcattttaatatgttgagccactggaaatttgtaacagattaatttgttataggagtttaaatttgttgtcattgtctccattgtctttgtccagagcctatta

SEQ ID NO: 42842 - DNA, 680 bp, Homo Sapiens
ctttttctttttttttttacattttgtatagaaacaaattcatttaaacaaacttattattattattttttacaaaatatatatatggagatgctccctccccctgtgaaccccccagtgcccccgtggggctgagtctgtgggcccattcggccaagctggattctgtgtacctagtacacaggcatgactgggatcccgtgtaccgagtacacgacccaggtatgtaccaagtaggcacccttgggcgcacccactggggccaggggtcgggggagtgttgggagcctcctccccaccccacctccctcacttcactgcattccagattggacatgttccatagccttgctggggaagggcccactgccaactccctctgccccagccccacccttggccatctccctttgggaactagggggctgctggtgggaaatgggagccagggcagatgtatgcattcctttatgtccctgtaaatgtgggactacaagaagaggagctgcctgagtggtactttctcttcctggtaatcctctggcccagccttatggcagaatagaggtatttttaggctatttttgtaatatggcttctggtcaaaatccctgtgtagctgaattcccaagccctgcattgtacagccccccactcccctcaccctcgttccgaattct

SEQ ID NO: 42843 - DNA, 748 bp, Homo Sapiens
  misc_feature (676)..(676): n is a, c, g, or t
ctccttgaagtccatggcggaacgggcagccatcagctctggcattgaggaccctgtgccaacgctgcacctgaccgagcgagacatcatcctgagcagtacatcagcacctccggcctcagcccagccgcccctgcagctgtcagaggtgaacataccgctgtcgctgggtgtctgtccactgggccctgtgcccctcaccaaggagcagctctatcagcaggccatggaagaggccgcctggcaccacatgcctcacccctctgactctgagcgtattcggcagtacctcccccggaacccctgtccgacgcccccctaccaccaccagatgccacccccacactcggacactgtggaattctaccagcgcctgtcgaccgagacactcttcttcatcttctactatctggagggcactaaggcacagtatctggcagccaaggccctaaagaagcagtcatggcgattccacaccaagtacatgatgtggttccagaggcacgaggagcccaagaccatcactgacgagtttgagcagggcacctacatctactttgactacgagaagtggggccagcggaagaaggaaggcttcacctttgagtaccgctacctggaggaccgggacctccagtgacaccggcccctccctctacccaccccctttccccgnatgctgatccccctgcccaggtgagggccctgcccctggaagactggagggaggccccaagccacggggcat

SEQ ID NO: 42844 - DNA, 712 bp, Homo Sapiens
atcctgaggctgatgaattgtgaaaattcctcaaaaggaaattatgctggtcatcacaggaacatctcaacgttcgagtaaactggaggactgtggctattcctgaaccttctttgagacagaatccctcagaatctcacacttataacttcctaccttttacttgaatgctttgccatattcaggacagagactctcacaaagttcagaaaacagctggacttaccagtaaaatcaaatgagaggacctattttctctggtagtggttgattactacattattttcttaagtggctggttttttagttactatgtaaatggtcgtttttctgttaatgatgctaatgtgttgtaaacaagattctaaatttaaaaaggaaaacaaaacaaacttgttctttgcagcttatcaccttgtgaatgtcggtaacttacttttccataatattgcaaataacataaaatcttaaaataattccaagctgagtcttctagattgagcagaaatggtgaaaggagtattgataacttggcgtatgtgatgggcccctcttgtttattttctatgtgagtcacattgacatgcgatcagtttgggaaatgtgatgaaaacaaagactagatgggtatgtgtgtttatgtgttgggtaaggaaggtgacgattgccactcataaaataaaggattttataaaattaaaaaaaaaaaaaa

SEQ ID NO: 42845 - DNA, 785 bp, Homo Sapiens
ctgctgacctcagactgcagcgagcgctgttcctgttcctcaagctctggcctgacatgccaggcgctggctgcccaccaggccgtgtatgtgaggtcaaggctgaagcccggaactgctgggccacccgtggtctctgtgtcctgtctgtgggtgccaacctcaccacctttgatggggcccgtggtgccaccacctctcctggtgtctatgagctctcttcccgctgcccaggactacagaataccatcccctggtaccgtgtagttgccgaagtccagatctgccatggcaaaacggaggctgtgggccaggtccacatcttcttccaggatgggatggtgacgttgactccaaacaagggtgtgtgggtgaatggtctccgagtggatctcccagctgagaagttagcatctgtgtccgtgagtcgtacacctgatggctccctgctagtccgccagaaggcaggggtccaggtgtggcttggagccaatgggaaggtggctgtgattgtcagcaatgaccatgctgggaaactgtgtggggcctgtggaaactttgacggggaccagaccaatgattggcatgactcccaggagaagccagcgatggagaaatggagagcgcaggacttctccccatgttatggctgatcagtcatccaccaggaacgaagatttcctgaagaagacctggtccctctggaggttgcggtggctgaaggatgcatcatgtgctcctaccctgctctaccgcttttctgggtcacaagaggcaaatgttgc

SEQ ID NO: 42846 - DNA, 654 bp, Homo Sapiens
  misc_feature (613)..(613): n is a, c, g, or t
  misc_feature (626)..(626): n is a, c, g, or t
gttggagcggccacagtaacaactctcgctgcaattttattttaatttgagaaataaagatttcctccaagccacatgaggactctggcacccacccacaaagcaagacctgtatttataagccgagggctcagggagcctaactgcgggacccgtcagggccccgtgacccatccccgtccccacccccccctccaccgctgggcccatcagtgtgtgttggggggatgcttggcagctgggggtgaggagacaacaaacctcgggaactggagccagagctgcggcctgactgacgccttttgatgctcacgggaaatttctgcccaggatctcagccccaggctggttgtttctacaaatctctctcaaatgtattattttggtgacaaaaatgaaggagctttgtaaatttttttaaaattatgaatcatatcaagtagttgtttacatttcttgaaaaaataggaactcgggcagcagaatcagattggcagaatctttagactacacaggcaataatcaagtctgctgttttggcctttcgtagtagaagtggttgtagtgtttagatatctgtttggtcttgcttcttgtattgcatttttttcantaaacaacaacanaaagaaaaaaaaaaaaaaaaaaaaaaaa

SEQ ID NO: 42847 - DNA, 741 bp, Homo Sapiens
ccgatgtgcgcccattgtaaccaggtcatcagaggaccattcttagtggcactggggaaatcttggcacccagaagaattcaactgcgctcactgcaaaaatacaatggcctacattggatttgtagaggagaaaggagccctgtattgtgagctgtgctatgagaaattctttgcccctgaatgtggtcgatgccaaaggaagatccttggagaagtcatcaatgcgttgaaacaaacttggcatgtttcctgttttgtgtgtgtagcctgtggaaagcccattcggaacaatgtttttcacttggaggatggtgaaccctactgtgagactgattattatgccctctttggtactatatgccatggatgtgaatttcccatagaagctggtgacatgttcctggaagctctgggctacacctggcatgacacttgctttgtatgctcagtgtgttgtgaaagtttggaaggtcagacctttttctccaagaaggacaagcccctgtgtaagaaacatgctcattctgtgaatttttgaaagtcaacagttcaggagaagagaaggaatttgaagagaaaaaggaaaattaaaattactaattaatttttagattcaatatttatatggagttttgaaaaataatagtggccctgaaggaataaattccagctttaaaaaccaagtctgaggaaatatttggcttcataaagtaaagagacggtttggcatttattatta

SEQ ID NO: 42848 - DNA, 529 bp, Homo Sapiens
  misc_feature (18)..(18): n is a, c, g, or t
ccaaagataagtctttangtatattttgtaccaaattaaattagaagacaaaaattgtgctttcatagttgctacaaaggtaaataatggagagatttggtacaaaacaacaaaatatatatatattctcatatatatatatatagctgataaaattacctgaggagtgtaatgcttatttttttgtgtatatctttgcaatctattttatatatattgacaaaagagactgtgaaatacttagccatgcagaatatgtgaccagaccagagcatgtgtaggaagactttacggtaatcattaactctaccccgaaatgatggactacaagttataatgtgtgttacctacacttcaatcagtaatattagcaaatctccaaatgttagtcacattggtttgtctcccttgtacattctttattcatgatattacagtgctgtaactgggtggtcctttttaaacaaaacattatttgcaaaacagagggtattatttgtttttaaagcttttgtaaataaaggcttca

SEQ ID NO: 42849 - DNA, 645 bp, Homo Sapiens
  misc_feature (215)..(215): n is a, c, g, or t
  misc_feature (529)..(529): n is a, c, g, or t
cagagctgagttttggtaggagtgctcatggttctgtcattcttggacctctcctggctgagctctgattccctgtgagcacgatgctgatgcaatagtcctgtgtcatcactgcagcggtcctcaggagctgccagggccaattgctacagagtgtctgggtgtgtggcataggaggaaggtttgcttgtgaaatgaggctgggtgggagcggngagggactagatcagaagagatcaagggctctattcaggaacgttggtgggaggacagagcaagtgggaagggggtatggtgagtgcggcaatccctcatcctcttagaagcacctgtgaatgggaattgagccaactgttatagaaaattggttcagaaagcgcaatcttgccagatttctagcaaataggttcagtgttaccataagcctttgctgtacttcttgaaatgtttctaggggagagcattggtccccttcccccatctagatcgaaggaagatgagggagcagcttggattcttctcagttgtnccctgcatggggagatacactaaccctcagaaatgactgctaagcctcttgccttggctttagtagctaatgatcagagagtttttttttctaccatggtcccagggatcctcctg

SEQ ID NO: 42850 - DNA, 672 bp, Homo Sapiens
cagaagattcagcagaggcagatgtggagctcaacctggtgcgcattgctatccagaacctgctgtactacggcgttgtgacactggtgtccatcctccaggtagtactccaatgtatactgcccaacgcccaaggtccaggacctggtagatgacaagtccctgcaagaggcatgtctatcctacgtgaccaagcaagggcacaagagggccagtctccgggatgtgttccagctatactgcagcctgagccctggcactaccgtgcgagacctcattggccgccacccccagcagctgcagcatgttgatgaacggaagctgatccagttcgggcttatgaagaacctcatcaggcgactacagaagtatcctgtgcgggtgactcgggaagagcagagccaccctgcccggctttatacaggctgccacagctatgacgagatctgctgcaagacaggcatgagctaccatgagctggatgagcggcttgaaaatgaccccaacatcatcatctgctggaagtgaggctggtagtgactggatggacacattgctgtgggtagtccctcctactaggaggcttgtcatactgtctagaggttgactcttagttctgtaaataaagacatccatttcaaacaaaaaaaaaaaaaaaaaaaaaaaaaaaaa

SEQ ID NO: 42851 - DNA, 1085 bp, Homo Sapiens
caaagagctacagacttgggttcgagatcatcatccagagaatggagaggaggcagtgacagtgctggaggatttggagagtgaacttgatgaccctggacaaccggtttctctccgtcgacgaaaacgggaagtactagtagaagacatggtatctcaagaagaagctcagggattaccaagttctgagcttgatgctgtggaraaccagctcaagtgggcatcctgggagctccattccctaaggcactgtgatgatgatggtaggactgaaaatggagcactagctccaaagcaggagcttccttcagcattagaatcccatgaagttcctggcactctcagtatgggtgttcctcaaatttttaaatatggagaaacctgtttccccaagggcaggtttgaaagaaagagaaatccctctcgaaagaaacaacatatatgtgatgaatgtggaaaacacttcagtcagggctcagcccttattcttcatcaaagaattcacagtggggagaaaccttatggatgtgttgagtgtgggaaagcattcagccgaagttccattcttgtgcaacaccagagagtccacactggagaaaaaccttacaaatgtcttgaatgtgggaaagcctttagccagaattcggggcttattaatcatcagagaatccatactggggagaaaccttatgaatgcgttcagtgtgggaaatcgtatagtcaaagctcaaatctttttagacatcagagaagacacaatgcagaaaaacttctgaatgttgtgaaagtttaagaaattgaaaaaaaaaaaagaatcagcmctcaggtctttttyttcagaaatgragacaaaatttaaaatwtgaratgatgcagaatagttttttccyattgactgtcagaaaaccmctgggaaatgtaaaatctcmctcaccmttatgwwwttwtcttgaagaaattgkktatcctgcctagaactkgaattttaacytwatyhrggcttaatsctwattttcmtktgaaktttaaryykgtwtactccccaaaaagracaccygatymttkcccttyttgargtttttttt

SEQ ID NO: 42852 - DNA, 749 bp, Homo Sapiens
ataagatctcagataagaagtgatggtgataaaacatcaaaaagtgaatggaacaccttgattggggaagatatgcaaatactttgatctaagaattgaaatgtatcaagaatttatattttgcctgcaggaaaattcaaaagctactcatcctctctataatttggagtcatcttactaatgaaaataatgttttcccatatattattaamaagcatacagtctaaataataaacagttgtaaaataatgaaggtagaaattataacactagggaaaaatttgtagcggatggcagtgttgaaggcaaatgtaaacataagggtaatggtctgtcatggcttttagaaaaagatgatagagttcatcattattttgccttcatctttgttaaggacagamaattccctgacaggtgggcaagtatcaggttacctattttttattcccttggtacaaaagggttgaacgtcaggctaaammagcagccatgcatttattattammcattttctaccgacaaggcactgtgctaggtactgtmatcctaccataagtaggtaggtatttcttccactgtaaatcataggggtttgctgttttatgtgagttagcctcttccccttgtctgagcattcctcaggggaggtcacctgtgaggttcccagaactgtagttttttttaccagggtgttgtatttggagggggaggaggactcggctcaaaagagctagctggctctccagtgt

SEQ ID NO: 42853 - DNA, 612 bp, Homo Sapiens
cagagggcaggagtcaagatgcccgagggtactgaagccagccacgctgcgcccggccctgccccgggccttcctcgtgcctgggaggtcgttctagggatgctcctgacctccgtctcttggacctaagatggaatgtgtccccagctcagggattgcctgaaccaagaggccaggagcccccatgggccgcccagtaccatgcacactcctgtcccgaactccctgaggcctcccctcccttcagggcacccactggttcccaggctggaaccagggtctctctttacctcctaccccatggtggcaccacagaggccctcagccgagtcctgcctgagtgttgcaagctcaggcctttaaggactgctgatgccccctcaggcctcccccaagtttgctgggctttggtggaagccctgagagcttcaggtcctgctcagcccgaggagcagtctggcatgggagtgaggccccgtccttctcactgcctggtcacatggtgcctagggatgcagggctggaggccagaggtgtcagcaacactgtgacccaccacaacctccagcctcccttttcagagcacagcattaaagtttggggaattctgta

SEQ ID NO: 42854 - DNA, 700 bp, Homo Sapiens
gggatcctgaactttatgaaaaactgacatcttcaaatgaaataaacaaggagaagagtgacacagttgctgatatagaaagtgaaccagtggtagaaagcacagaaactgaggggacataatcatcactcagtaggtaaaagataccttttgtaaagttgtcatctctctgtaatagataatggctgactggaccatagttgttcacttttgtctgccagaattaagttaatctgatgttcatgttcacctttctcttaaaataattgtacaactgacttgtatagacattgttcttaatatgaacatggtaggtaaactttttttttatttttttctgataaaatacaaatgttggccccagattcttttaacgtcaaggaaatgaataacagcttgtcagagacttcctatggaagaaagaatttttttagatactatcattaggttggatatggtaatagatatatttcagaatagcaagtggtggtatatcttatccatatctttaggctgctgcagaattttaaggttatagataaagctgtgatattttatgcaaagactggctctaggtatttgaggagcacaatacagagattttaaaaagtgattttgtaaaatctacactacggtctctgtttctccaaagtaagtgtttgtgatttgttcctcatactgcagtgagtaaaaaaagaaa

SEQ ID NO: 42855 - DNA, 570 bp, Homo Sapiens
  misc_feature (544)..(544): n is a, c, g, or t
  misc_feature (551)..(551): n is a, c, g, or t
cgaacttagggttacctcagtctttagccattactgcttatttcttttccccaagtcacaaaaaacttgtaagctgctgggttaaagcagaggccacctgtcagatctaccctacccttatttggttacatggcacctgagagtttcactcagaccagggatcttccttaggagggtcaaagtgcagatcagaccatgcaggtaaggtgaaccagctgcacggaccaggttcccgcaaaacattgccagctagtgaggcataatttgctcaaagtatagaaacagcccacctgtgcccactttgaccattggtgaggatagatataaaatcacttcttccaacgaagcctaggtgaaaatctatttataaatggaccacaactctggggtgtcgtttttgtgctgtgacttcctaattattgctaaagaactactgtttagttggtaatggtgtaaaattacattcagctccttcttgtcatataaaaggaatttggagggtgtcgcttaaaattttattccacctgtacatttgtcactttanaattaanattgagctggtatgagaaa

SEQ ID NO: 42856 - DNA, 593 bp, Homo Sapiens
ggtggcttcctgtttgaagggctctcagatgatgaggatgactttcacccaaacaccaggtccacaccctctagcagtactcccagctcccgcccagcctccctggggtacagtggagctgctgggccccggcccatcacccagagtgagctggccaccgccttggccctggccagcactccggagagcagctctcacacaccgactcctggcacccagggtcattcctcagggacctcaccaatgtcctctggtgtccagtcagggacgcccatcaccaatgatctcttcagccaagccctacagcatgcccttcaggcctctgggcagcccagccttcagagccagtggcagccccagctgcagcagctacgtgacatgggcatccaggacgatgagctgagcctgcgggccctgcaggccaccggtggggacatccaagcagccctggagctcatctttgctggaggagccccatgaactccctgcttcccctgaacccccagcaagttgcagaggttactgcccttgggaggcactcatgaaggtgcctccatctctcccttccccaatatacctgatggtcaactctc

SEQ ID NO: 42857 - DNA, 813 bp, Homo Sapiens
tcatctcatcagccaagcaggtagctgcctccacagcccagctccttgtggcctgcaaggtcaaggctgaccaggactcggaggcaatgaaacgacttcaggctgctggcaacgcagtgaagcgagcctcagataatctggtgaaagcagcacagaaggctgcagcctttgaagagcaggagaatgagacagtggtggtgaaagagaagatggttggcggcattgcccagatcatcgcagcacaggaagaaatgcttcggaaggaacgagagctggaagaggcgcggaagaaactggcccagatccggcagcagcagtacaagtttctgccttcagagcttcgagatgagcactaaagaagcctcttctatttaatgcagacccggcccagagactgtgcgtgccactaccaaagccttctgggctgtcggggcccaacctgcccaaccccagcactccccaaagtgcctgccaaaccccagggcctggccccgcccagtcccgcagtacatcccctgtcccctccccaaccccaagtgccttcatgccctagggccccccaagtgcctgcccctccccagagtattaacgctccaagagtattattaacgctgctgtacctcgatctgaatctgccggggccccagcccactccaccctgccagcagcttccagccagtccccacagcctcatcagctctcttccaccgttttttgatactaatcttcccccacccccagctacccatagggggctgcagaagtttataagcccccaaacgggccatggctccaataaaaaagggattccta

SEQ ID NO: 42858 - DNA, 643 bp, Homo Sapiens
ttttttttttttttttttttttttttccaattttaaaaaataaagtttattagatcataatgttgtctgaatttaccacctttgtcagaagtcaactcaaagcttccaatgtagtcagtctataattccttaatcaaagtcagcaatttatggacagcttcagcatctacagttgacctttcactagccaggcaaacttcccgaaataatcgtagtgactgattcatcttctcaaattctcttgcttttctatgtcccttttgaataacttcctctgggagattagcaagccttgctgcattaaagccatagcttttaggacaagctcccttaatgaatttatagaggaacgtaatagtctcctggctggggtcttcacattcattttctaccatgcatgccatatgtcctaggcgcacagcaacattttgagaataatcttctactaatgaatggtagtgagttgaaaataatgtacgacattttatagtctcagcaagttctttaacaactgcatttgctattgccgtcccatcaaatgttgcagtacctcttcctaattcatccacaagcaccagagaatgtgctgttgcatgcatgagtatgctggcagtttcacttaattcaacaaaaaatgtacttt

SEQ ID NO: 42859 - DNA, 670 bp, Homo Sapiens
ccacgcgtccggggaggacgactaggcggcctgcctgcagggctggggaccaaacgtcaggccacagagcatctccaaggggtctcagttcccccttcagctgaggacttcggagcttgtcaggaagtggccgtagcaacttggcggagacaggctatgagtctgacgttagagtggttgcttccttagcctttcaggatggggaatgtgggcagtttgacttcagcactgaaaacctctccacctgggccagggttgcctcagaggccaagtttccagaagcctcttacctgccgtaaaatgctcaaccctgtgtcctgggcctgggcctgctgtgactgacctacagtggactttctctctggaatggaaccttcttaggcctcctggtgcaacttaatttttttttttaatgctatcttcaaaacgttagagaaagttcttcaaaagtgcagcccagagctgctgggcccactggccgtcctgcatttctggtttccagaccccaatgcctcccattcggatggatctctgcgtttttatactgagtgtgcctaggttgccccttattttttattttccctgttgcgttgctatagatgaagggtgaggacaatcgtgtatatgtactagaacttttttattaaagaaacttttcccaaaaaaaaaa

SEQ ID NO: 42860 - DNA, 879 bp, Homo Sapiens
  misc_feature (790)..(794): n is a, c, g, or t
  misc_feature (798)..(798): n is a, c, g, or t
  misc_feature (800)..(820): n is a, c, g, or t
  misc_feature (823)..(826): n is a, c, g, or t
  misc_feature (829)..(830): n is a, c, g, or t
  misc_feature (832)..(832): n is a, c, g, or t
  misc_feature (834)..(842): n is a, c, g, or t
  misc_feature (850)..(850): n is a, c, g, or t
  misc_feature (852)..(853): n is a, c, g, or t
aggctggaccggtccggaatcccgggatccgcagggtacttctgtgcttgccctcgccctgccagcaggcagctgtgcccctggcctgcccttcccgggaccccttattccaactcagctcctctttgcactggaatggggcactccaacacccctcagggaccaccctccccacagtatgcactcagccccacagaacccaccagtctttctgggaactcacacctgcccgccatcttggtactttaggttaatccctcaagcatgaaagctggatcttttggggtttaagaagcccaagccttgttcctgccctggcctagggagcactcaggagggttccttggtcctcatctctcccacctccgttccctctgggccccacactagccacagcgcgggccttgtgctggagtttgagcctgggacagggagagggaggcttggagacagtctgacccagtgccctctaggccacccacttctaggcctgccctgccgccgtggagccctgggcaagctctttcccctttctgggcctgggtctccccatctcttcaatggggctgataccttcacagcccacagcatgggcacttatgaggacaaagtgaatttaacctggaaaagaatgtatttgagagtttcttttaaataatcagcgggtgttggtgatttgtagcccttctgcccttaaatgcttccttgggcaagagctgtctgtcctccctgcaggaggctgagtgtaaagagtatcattcattgtttctctattaaattattttctctnnnnnaaanannnnnnnnnnnnnnnnnnnnnttnnnnaannanannnnnnnnnaaaaaaanannaaaaagggggggccgctccaaaaaat

SEQ ID NO: 42861 - DNA, 600 bp, Homo Sapiens
ttacataacctggaagactgagaagggtatattatttgaaggatctttttatttccccgaggtctttcgcactggagacagcataaaagagtgaacaaatgttgggatgagagaagatgacatcaatgtgggagttcagtataactggggataaactagaagaacctgtgattttacagtcatcttattacctgccagggctcatctagccatggcaatgtttgccttgaatgggggtgaaagcctttctttgttggatcaaatactactacactattacacttccacactatttatttggggatgggctgggagtgacagtagcctagtagttcagctacctgattactgccccattcttttagaagcacatgtctgccaaggagtggtttgtactgctgtgtttggtacatctagtcttttttctgctataagttttccttacctgtcctttagtgtagattttattcatcacaggacagaataatcaaggacaaccaaaatccttttgttagtttcagtacctcagctatcaacatttctgagctaccattcaatgttcctctgtgtcatggagtgaaattcttgttttgtgggtat

SEQ ID NO: 42862 - DNA, 498 bp, Homo Sapiens
  misc_feature (497)..(497): n is a, c, g, or t
ttttaaaggttctatttttcaaagtcataacaatgattgttcttgttttctctcatagaatagactgccatcggataaagagtggtccctagcttctatttttccaagcaaataagtagaacatgttcttgggattataccattaaatgttaattttcttgaagaagaaagattgttgtctgccaagattttatgttagcgctcggattgaggcagaaaacggaagcaccaggtttaacactgggatgacttgggttgtgttcctggaggtttgaagtgggccttcccgccttttgagggggaaaactgactgttttgaacacatatcctggattagttgggttgttttgtattgaggatccctaaaagacaaaagagtcttggaaaggactgctggcttcgtcttgaacgttcgccccatcaccagtgtgagtccgtggggaagtcttcctcaagtggggttcagtctgtaattttcctgtctgttcttagcttgnt

SEQ ID NO: 42863 - DNA, 889 bp, Homo Sapiens
tttttatttaaaataaacattttgagggaagttaccaaggcagcttttttcctcaaaagtaacctgttcctctttggaatagcacattttaggggcatggttaatacctgagatttttactcagtaaatcctgatggttactgtgtgtaaaatatctttaagtaggattgaaggcctctgtgggggaataaaatattaccaaagtctataaaaataaattttacatgttctcttttatgacagagagcagcactggttctgttatttttaaaatgaataattgatttcttgataggtgtttaatatttcttccctcactgctgattcttagatagaaaccattctttatatttgatagactgctttcagaaaacccttatcaacaagtgtacaatacttatctaaaactatacatttagaatggagcagtttaatactagatctcagaagttttgaaaaatagcaaagaagactggatttggaaagcatggtctacaattggttgttaaattctgaagctatgaagaataaatgtttcaactttggattatgaaaccccatttatgattttttaaatacacttgaaataaaaatgattaaactaaattttggtccagtgacattactttgcactgcataatccattatacgttgtacgacttttttttttttgttttaatttattaatgaaagccttgggtggagctacagcatatctaaaccagagaatttctggattccttataccggcgattatattatattggaggcctttggagtgcgacctgaaaaactggattcttggctttttgggaaaccggatcagggactaaagggccgttaaaaaaactttctggaagcaatggataagctcttaatgggacgcaaa

SEQ ID NO: 42864 - DNA, 586 bp, Homo Sapiens
cagatggtcctctgcaagaagggacctaatccggagagacatcctgtactacaaaggccgcattgacatggataaatatgaggtagttgacattgaggatggcagagatgatgacttcaatgtcagcatgaagaatgcctttaagcttcacaacaaggagactgaggagatacatctgttctttgccaagaagctggaggaaaaaaatacgctggctcagggctttcagagaagagaggaaaatggtacaggaagatgaaaaaattggctttgaaatttctgaaaaccagaagaggcaggctgcaatgactgtgagaaaagtccctaagcaaaaaggtgtcaactctgcccgctcagttcctccttcctacccaccaccgcaggacccgttaaaccacggccagtacctggtccccgacggcatcgctcagtcgcaggtctttgagttcaccgaacccaagcgcagccagtcaccattctggcaaaacttcagcaggttaacccccttcaaaaaatgatacctacagggaggcagataattttaaaataaagtaaataaaattaaaaaaaaaaaaaaaaaataggt

SEQ ID NO: 42865 - DNA, 699 bp, Homo Sapiens
cccacgcgtccgcccacgcgtccgctggcatcacctgatgccactaatttgtgaacaacaagaaatcatttccccattggttggagtattccctcagcctatagcatcaaagcagaccagtggccaacagccccaaggggagcccaattaaatacctgggttcagtatcctaacctgttatgtcctgacagcaatggtaaccccagtaattctgtaatgttgtaatttccgcatggccctgagctcccttttcctcaactcagtgaggccaggatttgctctccaaaaggctttgctagtgtgttcaatgggacctgctgtggggagtcctaagacagacatctaattattctctctttttccccccctctctatgtgtatatttctaatggatctataagaacagcaacaagagagttctaacaattctagtgtgaagccaaatagtgatcttttagtgctttggggatggggtgggctggggtggatggatgggcaacagtgactttgattacccttgctgctctgcatttgccagtttattcttttgtttcttttatctgactgactctgtcaaacaagtgtcaaagttgtgtgttaaaaaatgtttaacaaaaaaaatgttgtaatgacacaaagccttatgaaaatatttatggagttcaataaaagaagtaaaaagacaaaaaaaaaaaaaaa

SEQ ID NO: 42866 - DNA, 632 bp, Homo Sapiens
  misc_feature (72)..(72): n is a, c, g, or t
  misc_feature (200)..(200): n is a, c, g, or t
ttttttttttttttttttactatgtaaatatggtttgcagttgtttttgtgtggaatcttgtctttccgtanaagttgtaagctccttgagagcaggatccatgtcattcctttatttttataaattattccccctatcattcctttacagtgcctagtgctgctcattatgtgttcattgaatttgactgacatagttnaaaacttaaggtttattttagactttcaaggaaacaaaagactttagagtcctctctctgtaattctgccccactcatttgtttaccctgggttttatacagttctcttccttctcccctcccacctttccctggctttttgcctccattccatgaggcatacagtaaggctgcctgctagtaagcagtcacataagtgggtacctatccagccattctcttttcagagcatataatactatcttagccaaacttgcctttgcttcactcatcatgcagccttctgggttggttgctatatatatcttttttccttgatgtcccattctcttccacagccctgaggtcttacgaatttttctactttctttttgctgttgatgaattgtttcattattaaatatatgcatgtatcaaagctaaaaaaaacct

SEQ ID NO: 42867 - DNA, 588 bp, Homo Sapiens
atacactctcgctactgtatcctaaactttagacttcccactgttctgaaaggagacattgctctatgtctgccttcgaccacagcaagccatcatcctccattgctcccggggactcaagaggaatctgtttctctgctgtcagcttcccatctggctcagcatagggtcactttgccattatgcaaatggagataaaagcaattctgactgtccaggagctaatctgaccgttctattgtgtggatgaccacataagaaggcaattctagtgtattaatcatagattattataaactataaacttaagggcaaggagtttattacaatgtatctttattaaaacaaaagggtgtatagtgttcacaaactgtgaaaatagtgtaagaactgtacattgtgagctctggttatttttctcttgtaccatagaaaaatgtataaaaattatcaaaaagctaatgtgcagggatattgccttatttgtctgtaaaaaatggagctcagtaacataactgcttcttggaagcttggaatattttatcctgtattcttgcttgaattcctcctctatttaagatatataca

SEQ ID NO: 42868 - DNA, 562 bp, Homo Sapiens
cgggagatggaggcacgtgataagacaaaagactgcaccaactcaccctgacacagttacatagtcactgagagtggggaagatgggacagcccacatgctgcataagatgggccttatgcagcaggcccaggtcgtcattaaggagtgacccctttcctgtaacctgcactttgggatggtagaagtttctttacctgctgacaggtttggtggcactgctggttacccctgggccctgaatggagctaaaatcacatttggtaccagcagcacctatcccaagtgtgatccttcatcccaacactccctcttggagctgttccctgggtagagctagcatgccagcagcttctgcaggctccaaacccaggccagaagccagacccaggcctgctgcctgcatctgcattccctccttccagtgttccttagaacagacatttaggtatctcaggtcctttctaagtgtccctttcctatgtatgcatttcctttttttgtctttactatgcactttagcttataaagccaattaaaaacgatgattgagaaaaaaaaaa

SEQ ID NO: 42869 - DNA, 622 bp, Homo Sapiens
  misc_feature (542)..(542): n is a, c, g, or t
ctggctttgaaagatttcattgttggtagaaataacaggttgagaaagagggagttagcatcacctaaaacctgcacgtgaacaagggttgacatgatacactatggccttagaaaagggccaggtgaaaccccaagctaatcactgcggtctttcagagccggacagacaggtgccagcagagcccggggctcactctcctttcagtcattcctcagcccttcgaagggaagcccaaacactttgcacgctgtgctgcagacattctggcctcgtgtgtctgaaagttgcatcagtcctcacggtgcaaacacagttgatttaggaagtcacacaatgacactgaaatcctacagaccaaaatccacttgtcagcaggagcagcagcccaggcccagcaccagcggtcttccggctcctctgagggctgccacgttgggcgaggggagccatgccaagggtccaggctgctttaggccatctgtgccccactcatctggggacagatggtttttctttattgtaaaattgtggacttttanacctgttgactaaacagtaattaatttatatttgtgaaaaatgccactgtcctagtgatttctgatgtaaataatgttgt

SEQ ID NO: 42870 - DNA, 576 bp, Homo Sapiens
attgaactctatttaatgcatttttaaaccaaacttttaaacggactggtgaatgtgcaatgttagtaattagaagttttaccacatggaaaatttgtggttttaaactttctaaatcatggtgacttcattgaaagccattagttgctattctcttagggcagataaaatgcggctgtgttaggaaaaacatgttacactgtaaggcagatgatcgtccccgtatgatgattgtcagaagacaggactaagtagcagagaatagctaagagataaattgggctggggaaacttgtcagaaagcactgaacaattaagaaattttccaagaaaatgtgcagtattctctgctacttctgaatctgttttgtcttcctaatctatcacaattgccacccatcgggttttgggtgtgtgttttcatagcgtggttactttctataatgctgtacccagattctaagaacctggagaaggattagcagttcttagtaagtttactgtgtataggaacggtttgtatttcattacagctattcatcttttctacattaaaaatatttttctctaaaaaaa

SEQ ID NO: 42871 - DNA, 719 bp, Homo Sapiens
ctacccacgaaaaggacacggaagccatcaagtcgctgcaggtggagatgtggccactgttgactgctgagcagaaccacctccttcacctcgttctgcaagaaaccatctccccctcaggacagggagtctgatccatcccattcacccagtgacttctttttgcccaggcctggactttttgcatcagtcacgttaaccagatgactttgcctgttaccaaacctcatgcatccacgtttgcgtctggggaggaataaaaagacatcgttcccgcttctgcgttttgttattcctactgccgccataggaattatttcgttggctgaacgttaccagcaccccgagaacacattttgatagaatcagagtagaggacatggctgtcttctaaaaagccacgacatgaaaatgacaatccctttcgtctccttcctccgctgcttccacctaacgcagcctcctgcctccgcctttgtttcatagtgaggattttattttgcacggcgccctccctctaaatacctaccctagatgatttcatcctgcccctcacttcttaacatattcctgtgtctttgtaatggccaaatttctccttccactcgtccgcacggtacgtcttcatgggagtcattttattccttacagcttccttgtaaccacagccctaaatccatgataaagctactcttgtactcctaaaaaaaaaaaaaaag

SEQ ID NO: 42872 - DNA, 701 bp, Homo Sapiens
atggaattggcttaatttgatgacataataaatcacttataaaattttaaatatcaagtgaaaatttagaaaggccattactattctataaaccttataaacttgctctgggagaatgcattctaaattatatatagtgtttcagctcccattgtggtgttcatagtcttctaggaacagataaacttaagtattcaattcactcttggcattttttctttaatataggctttttagcctatttttggaaaactgcttttcttctgagaaccttattctgaatgtcatcaactttaccaaaccttctaagtccagagctaacttagtactgtttaagttactattgactgaattttcttcattttctgtttagtccagtgttaccaaggtaagctggggaatgaagtataccaacttctttcagagcattttaggacattatggcagctttagaaggctgtcttgtttctagccaagggagagccagcgcaggttttggatactagagaaagtcatttgcttgtactattgccattttagaaagctctgatgtgaattcaaattttacctctgttacttaaagccaacaattttaaggcagtagttttactggccatttaagctctttgtacagtgtcaatttgtaaaaaagaaaaaacgaaaaaaatctcaaataaaacatgagataacattttaagact

SEQ ID NO: 42873 - DNA, 787 bp, Homo Sapiens
gggacgagataatgtgaactagctggaattttttattcttgtgaatatgtacataggcagcactagcgacattgcagtctgcttctgcaccttatcttaaagcacttacagataggccttcttgtgatcttgctctatctcacagcacactcagcacccccttctctgcccattccccagcctctcttcctatcccatcccatcccatcccatcccatcccatcccgctcttttcctacttttccttccctcaaagcttccattccacatccggaggagaagaaggaaatgaatttctctacagatgtcccattttcagactgctttaaaaaaaatccttctaatttgctatgcttgaatgccacgcggtacaaaggaaaaagtatcatggaaatattatgcaaattcccagatttgaagacaaaaatactctaattctaaccagagcaagcttttttattttttatacaggggaatattttattctaggtaaaattctaaataaaatataattgttttttatcttttctacagcaaatttataattttaagattcccttttcttggtttatcagccagttgttattacatcccttgtgggcacatttttttttttttaaatttttgtaaaggtgaaaaaaaacctttttattgagcctccatgttagccaatccaggattttttccctggtgggaattggataaataaaattgagaatatgaatttttataaggttaaaaatactccaaagaaataaggacaaagaccctgaaaatgttaccctgt

SEQ ID NO: 42874 - DNA, 734 bp, Homo Sapiens
tgggcctcacggtttctcgtcagccccgtcactgatgggaagcagcactgaagtgtgagggcagaaaggacaccgctggagtcaggcgctcccctgcctgtgacccttttccaacaagctgatgctgagccagcggcctgctttgtccctcatactcctcccaacagtccaaacccctaccagacagaagccacgtcgcttctgcacacgtgtctgagagcgtctgccatagacgtctgtgcgtttccgtgaagcactgcgccctaaggacccaactctgactagcagctgcctcccactcccaaacactaaccccgctcaggagactcgcactgggtgtagactgcgtctttgcagagggagatgatagaggcttctgatgacgccagagctgtaagtgtcgtgacgagctgggcgcccagcccttcttaagctgttctgtttctgtggctttaactgacatatttctgtagcatctgccttcatctcatctcagcgtaatgaaatattaatgaaatcgctgaaaagctttgccttcgagaggccagaagcctcgcggaatgtctgcaagtccaaagacgcgtgtgggttgtgcctgaagtgcgtccagcaggcgcgtgcgcgggcggctgtgcgtgtggcttgctcttccttcttctgtttcgttttaattgggggtggaagcggccattgtcggaaattcccctttgtttgcccccgtgggcgcgctcgcc

SEQ ID NO: 42875 - DNA, 1076 bp, Homo Sapiens
  misc_feature (763)..(763): n is a, c, g, or t
  misc_feature (771)..(771): n is a, c, g, or t
  misc_feature (795)..(795): n is a, c, g, or t
  misc_feature (800)..(808): n is a, c, g, or t
  misc_feature (810)..(812): n is a, c, g, or t
  misc_feature (817)..(817): n is a, c, g, or t
caaagaagtacagtctttaaaacaaccatacctgaagaagaggaggaggaggaagaagcagctggagtggttgttgaggaagaacttttccaccagcagggaaccccaagagcatccaatagaagctgtgcaattatgtaaaattttcaactgtcttcctcaaaataaagaagtatggtaatccttacctgtatacagtgcagagccttctcagaagcacagaatatttttatatttcctttatgtgaatttttaagctgcaaatctgatggccttaatttcctttttgacactgaaagttttgtaaaagaaatcatgtccatacactttgttgcaagatgtgaattattgacactgaacttaataactgtgtactgttcggaaggggttcctcaaattttttgactttttttgtatgtgtgttttttctttttttttaagttcttatgaggaggggagggtaaataaaccactgtgcgtcttggtgtaatttgaagattgccccatctagactagcaatctcttcattattctctgctatatataaaacggtgctgtgagggaggggaaaagcatttttcaatatattgaacttttgtactgaatttttttgtaataagcaatcaaggttataattttttttaaaatagaaattttgtaagaaggcaatattaacctaatcaccatgtaagcactctggatgatggattccacaaaacttggttttatggttacttcttctcttagattcttaattcatgangagggtgngggagggaagcgggaaaagaaacnaaaannnnnnnnntnnnctacncccgcaatcccctcgccgaccccatccctttccgccccctctttcccctgtccccccttttttcccctccttctcccctcttttccctcgcccctcaccccttcacccaccttttttctcttccctctcccccccttccctcctccgccaccccttctattctcccatccgctttcgctacgcaggcccgccgttttatccgcttatcccgcccctgtcggcccccacgctctttttccccctctcgcccataccttcc

SEQ ID NO: 42876 - DNA, 648 bp, Homo Sapiens
atttagcttaaaggttttccatggagaagagtggtaagagctgtagttagcaaaattggcatcctctttagggtgtcaattctgtgctgctttgcaaattgttgaaacttttgattttctgtttggcaatgctagtcagtgttcacttcttacagattagccaagaatttttatctaaatgcagaaacttattaatgaaatccatttaaactatacttacacaacattttgggaggccctgctggtaaaattatatatggatgcagaagtattgcaagagtccattttccatttttaaatctgcaatatctgattacattgatgaattccgttgtattgtatgtgtgaatataaatatctgaattctcccgggggacttggttttcgtccaaggatgttggcagtggacacttagtttacctcaggaattgcaatcatgtaagactatattcggaaaaaatgctggagtatataattttggatactgatataaaatcatcaagatggaagttaagcagaattgtcacgtgtagtccatagcgcttttatatgcattattctgtaatttgtttgtactgcggcaactttttatactttcaatgtatcatttaataaaaaaaataagcaagtcaaaaaaaaaaaaaaaag

SEQ ID NO: 42877 - DNA, 1016 bp, Homo Sapiens
ggcaattccggacgaggccaggaaggaaaaaaaggtggatcagtgattttacttgaaaacaagctccatcccttttctatatttataagaagagaagatcttgagtgaagcagcacgcgacccaggtgtgtgtgaattgaatggagacgtttcttttctctttctttaatttttgtttttgttctttttttctttaaggaaagttttattttactgttcattttactttcttggtaacaaaaactaaaataaggaatagaaaagctgtttttcaggctgacagtccaattaagggtagccaagaccttgcatggtagagtaggaatcatagtgtcagtgaggtcccgtgagtctttgtgagtccttgtgtcatcgttcgggcactgtttttttatgcaagggcaaaaatctttgtatctggggaaaaaaaaccttttttttaaattaaaaaggaaaaaataaaagatattgagggtcttcctagtgttacttaaattaagatcaaggtaagaaacattgtacaaaaaaattacaaaagtgctatttgtttccctaaaaaccagtgatttctattaaaaaggtgtcaaaaactggaacaccacccccaatatcacacaacaaactccaagccttcttatggtcggggtgcggaaaaaagaggaaaatgaaatgggaccatggtccattagcctgttttcctgaccccaacttttctttgtacaaaggtgggaaatatcttgcccggtttctccccatatagggagtccgaaataaattttcgaataagcccagggttaaccctgcctttaaatgaaatcggcctggccgtacccccgggaaaatttaacacccggccctaaatggagcgggggctttttttttttggggatccccaacaggatctttttcctggagaatccctttttttatcttgggaaagaaaaacctcggttggctttggcaaaaacaataaataaaccaccctctctcaccaggggcggagtattctgtcttcg

SEQ ID NO: 42878 - DNA, 609 bp, Homo Sapiens
cgtccgccgccatggccacggaggacccccagagcgccacggccgggactcccgtgatggctgggggggctacggctccgacaagaggctgagtgaaggccgggggctgccccctccccccaggggtggccgtgactggggagagcacaaccagcggctagaggagcaccaggcacgcgcctggcagggtgccatggacgcaggcgcggctagccgggagcacgccaggtggcaaggtggcgagaggggcctgtctgggccctcggggccggggcacatggcaagccgcggtggagtggcggggcgaggcggctttgcacaaggtggacattcccagggccacgtggtgccaggtggcggactggaaggtggcggagtggccagccaggaccggggcagcagagtccctcacccacaccctcatccccccccgtacccccacttcacccgccgctactaagtcccactcgctgcgagttttcgggtgggcagacgcactgttgaatctggtagccagggttccctcgaacttgggggatctttttaaaagcaaagtaaatcctgccaccatgttgtagctcaatacaatgtgaactcactttttttttt

SEQ ID NO: 42879 - DNA, 730 bp, Homo Sapiens
cacgaggctgatctccccagaagctcttgtggtggtggctgtgccccctatgccctgtggcatttctgcgtcttactggcaaccacacaactcaggggaaaggaatgcctgggagtgggggtgcaggcgggcagcactgagggaccctgccccgcccctccccccaggcccctttcccctgcagcttctcaagtgagactgacctgtctcacccagcagccactgcccagccgcactccaggcaagggccagtgcgcctgctcctgaccactgcaatcccagcgcccaaggaaggccacttctcaactggcagaacttctgaagtttagaattggaattacttccttactagtgtcttttggcttaaattttgtcttttgaagttgaatgcttaatcccgggaaagaggaacaggagtgccagactcctggtctttccagtttagaaaaggctctgtgccaaggagggaccacaggagctgggacctgcctgcccctgtcttttccccttggttttgtgttacaagagttgttggagacagtttcagatgattatttaatttgtaaatattgtacaaattttaatagcttaaattgtatatacagccaaataaaaacttgcattaacaaaaaaaaaaaaaaaaaataggtgcggccgcaagcttattccctttagtgagggttattttagcttggcactggccgtcgttttacacgtcgtgactgggaaa

SEQ ID NO: 42880 - DNA, 788 bp, Homo Sapiens
gcgtccgctattctcttttggtgtacattccaagcagagtggccctcatccttcagaatgtggatctgccgaattgaagaggcctgatttcagctccaccagatgcagatttgtgttttgttttcttgttatcactgtcacacagcttataacatgtatgcttttcagaatacagttgtctagccaagccatcaagtgtctgaaattcaatattggtttatgcaaatacagcaaacttttatttaagtagatgggagaatatgtttaaaatattaggaatcctagaccatattttcaagtcatcttagcagctaggattctcaaatggaagtgttatatataatatgttaaaaacattttgctttcctggctaattatttgatccttttaaattcaaatttgaatcatttgtcatgtatgattatttctgttaaatgtacacagtatttaagatggatatttggtggctctatttgttctgatatcttttggtctaaattatgaggtaccaagattgtttctttgtttctttttttcaaattgtgtttagaaatactgtaataaatatgcagtagtgatataaagaattatatccaaggtaatataaaagccattacgtatgaactcatccgtgtctcattttgtgttttattttgtgatctcttgtccactaagtatcttgttaaatgccagtatctcagtctttctgaagccctgcaaatggtaattgtagcatttcagaaaatgtctttcatttcaatcaataaaaagcttttgtaaaaaaaaaa

SEQ ID NO: 42881 - DNA, 516 bp, Homo Sapiens
ttttgattcaaacctaaagacataaaaacataaagacattttaactttgggttctctttagctgggatctggccagaaggaggcttaaagttagaaattgctattattttagaataggttgggtgggttggggggcaagggtgtctatttgcagcagagatattttgaaaagaagaaaattgttttatataaaaaggaaagccatgaccacctttctacctcagatccatcttcatccattgcattggaaactgctttatgctgctgcagtctgcaaagtctagagcttttatcaggccatgtcatacccaagaaagcacctatttaaagaaaaaacaattccctgagctctcaactccaagttgtagatttggtgtcttccttgttcttactttaaaaagtcatgtgttaattttttttctgcctgtatttgtatgcaaaatgtcctctatctgctattaaagaaaagctacgtaaaacactacattgtaaccttctaagtaataataaataaaa

SEQ ID NO: 42882 - DNA, 936 bp, Homo Sapiens
  misc_feature (43)..(43): n is a, c, g, or t
  misc_feature (96)..(97): n is a, c, g, or t
  misc_feature (870)..(870): n is a, c, g, or t
  misc_feature (893)..(893): n is a, c, g, or t
  misc_feature (913)..(913): n is a, c, g, or t
cttttttcagccttgcgctttttcagtttttgaccataggagnaaatttttttataatacaaaagtaaccacttggaattttaaagataatgttanntgtgtgtatgtgaaatatatatacatatatatatatatttcctaaaagaagaaaagatacctttctgttcaacttgtatcaactcctcttttctaattgctgtgaaatggcaactgttgataaattattgtgattgttttaaaatctaatgggaagtaaaatatattttgattttacccagcttaatctgtaaagtagcacttaaatatatctgatagcaacacttaagatattgcatggggattactttcctatcatccatatgcatttgtgcaacttcaaacatattgggtgcttctgaattcctgatgattggatttaagctattgaaaattggataatttaaacttaatgatttttataattttctgatcttaaaatttggttaatgcctataatctgttgctttttctcaatatgtgtcctattggaaattcctcaaatcgttggtgccatcagtgatttacaaacaatattttgatattgcagatgacttgcttactgtatttgcattgttagaaaacagtttgtagacaatgattcttttttaataaaatcaaataattctaaaagtgctagagaatttaactaaaagctggttcccaaatgcatagctggcattttaatttaaattcaaatctacatagagaaccatccgtgtaatcatctaactggattttcccattggtcattcccaacacacctatggtcctagaatccttaagagaagcaccctgtaaccttttatgtgttttgcctttaagagccccagntgcttctcctttatgatttgagntggcctcctcataaattagngctggttactttcagaggagcag

SEQ ID NO: 42883 - DNA, 558 bp, Homo Sapiens
gcacgagaagaaaaaaatagagaaagggctattagaattaaaaaaatttgaaagtaacttaatctaacatttatggcacagtttggacatatccataattttttttgggaacacacatttctgattttttttttcccccttaaagaagaaagtctcaattccattgattttcaattcttagccactggctcattgctttgagcaatgcttgattgattctatttatattatatgatattgggttgataaaataccagttcaatgatgagttttcttaacagaatttggtttgtacttgcagtggctgaacaaagagcatggcttgagaatcaaagggatctgcatttagcaatgtgatgtcagtaaatggacataacaggattgttgtaaaggttgggcatgatgtatgcaaagtactggccagggtagactaataactgatggcatttatatgctgtgctggaatattgttaccaagctgatgtgccgttctcaccctgcagaatactggttttgtcatttcataaatgatatttttataaaaaaaaaaaaaaaaaa

SEQ ID NO: 42884 - DNA, 776 bp, Homo Sapiens
atgttggataagacagttcggtccggattcccgggatgcagtggccctggctcccacctcccgcccccaacaaaacgttttcaaaccccttacagttcctggggcaggcggaaacaggctcacagattgtgtgtcggctgcagcagtgattccaacaagcagctattgggggggaaacacagcatttaaaaagatcatcattaaaaaacaagatttatacaacaattacttaggatgtttgtgatctgccgaccttgctatagatgccatgttaccaatgatttcctgtggtgggggcttgccattgtttactctcttatttaccaacttctggcctaggcatgacagtgggcaccttcccccagccctggctgggcccagcgcctgtgttctgtgttagaaaggttttatatatatataaaattacatatatatgtagaaatatatgtaattttgggggccctgttccttgcacattttacagttacctcatttttcccatgtatgtatttgagaaaatgctaatatatagagaaaaaaatggttcttaaagcttaaatgtgtggttttttccattccatgggattcacattggtttgtagcatttaacataactagtatgttgtattatatatatgtgtatactgattgaaatttttaacagatttgtactttttttaaaatgaaagttgctagttctgcttgaccaagtagtggcatcattatttttttttctattgttgctgattccgagggatattccctataatgtatga

SEQ ID NO: 42885 - DNA, 759 bp, Homo Sapiens
agcgagtgatactcccgcttcctgcatgccacacactgtgctgggaatgctcatgggttgtcctgtttcatcttctccgtagccctgtgagatcggcaatattagtccccctacagccaaggaaactgcccagagccacacaactcttgaggggcgaggagggcttgaacctgagtctgcccagctccagaactgagcttgcagccattagccacagctgtcccctgcatgtctgagcaaagaaaggcctttacacagcatcaccctgtgccatcccatgcaccgtgggactcagctaaaggactgtgcaaagagggggctcctgagttggatttaggcaaaaggggcagaattcgtttgatttttagagaaaatctctggagagtttcttttgattcatagaattccttttagatttctttccagcataccaactagctttagtagtgctgctacaaccagctcttataagtaagagtgaaaaagtattcttttcttctttaaaaaaataagtttttcttgcttatagttaattctagaaaggcaatactaaaggtatatatttttttcaaaatgctattttttactgcacttgataattatcctgacagctctgatctctgtaatagattcactcttcagctctgggcagaaccagaggcagggttcacaccaaattgtaaataccatatgtgggtctggtgtccaggaactttttctttctgttaacaaaaagacaaaaaaaaaattctccaggct

SEQ ID NO: 42886 - DNA, 575 bp, Homo Sapiens
aatttttaaaatttctggttgtctcattagactgatgaggtgagttttcttcttcatatgaacagctagttaataacagcagagttctcactcagtgctcagtacttaattttccactgcaccacaactgtcttaactaaatgtgctgtatttttctttaaaagttaagagttctatttggtgttttcaggaatatacgtgaaaagacatgccatgttttggtaaataccatcagagttgtgtaaaggcgtgtactaagtgcaatcttaatttgtggaaataatcttcatttacccctcctaaaactacactcagtataaacactttcccataaggtgtgtgcagtaaaaatgttatattactccaacactggcaggagcacagcacagcagccttattggagagagccttataaaagtgattaaatggaggcattgagctcattacctttaagtttactttgtgctgacctttgttcctgttttgagaatctcatgtaattattaaaaaaaaaaaaacaattaaaacgaaacggcggggcctagctgtgtataaatgatccttgctgaatatct

SEQ ID NO: 42887 - DNA, 604 bp, Homo Sapiens
ttgaaggtgctgagtggaaaaccgaaacacatggttattgcgtattggacctagaatgaaataattgcctcaatatttaacaacaagccattcttatctcaaagatttaaattcccgaatgtcccattcgcaaatcatatgcaattgaagtgagcagcatgagcatctgggtcatgagggccttcatttacgtaaatttgtcactaaaacccagtagtagctctacaaaatcttaaactgctgcagtgctcaaggagatggaatatctttgtcattggtgctgaggagagcatttcggtagaagacagttgcgcctgaagattgagtgtaaatcattcaaaccagtggttctcagtgttggctgtatacactttgtagtcactttggaatgttggaagacacatcgatgcttgggttccgtatgccaagattctgatgttggtctggaatatgagctggtcataaggatttttaaaaactttctggtcatttcaatatgctgccaaggttgagaaccactgttgtaaaattcaccttgagttttctcatctgcaaaatagaaaaaaaaaatccttgctccctcccttcactacctcacaaggat

SEQ ID NO: 42888 - DNA, 869 bp, Homo Sapiens
ggctttcttgtgatgacagacagaatggaggagagatctgcttatgggaagtagaaccatgaagtgactgtcacacatgcatgtccaagaaacatcctgaaaacacatgaagtcgtaaactggagaagcagctctacagcagagatcatcttcgtgtttcctctttctactgggccagaaaaatcctcagggttgcagttggttgagtgggcagttgacatatgcatgttgcacccgatgttgtctctaagttagcaatgtgttatttccagctttaaaggtgagattgtagagatgctgtcaaagggataaggaaatagcaagatttttaagtagtgtgtttgtgaagactgatcccattttacaactgcctgttctttctccagtccttttttttccagccagcttgactattagaaaagtatgaaactggttgggttttatttaatatttttaatatattgagaagcatggtctgcctggactgcacttctctaaaagtgagatataaaattgtgcagctattttaaaagttgtatataatatgtgtgtaaaaaaaaaaaactgtaaaaaagaaaggacaaacaggttgttttgttctagttctaatttcttaaaaaccactacatggttacaaaattggaataacatttggggacaactgggttaactacaaagaggaggattttaagaggagatgtgttgtattgactcattttgtattatttttggcttacagttcccatagctgttagagtctgggtttgtttttgtttttactctcaaaatcctaagtaaagatctctcagtcctcctggctaaaggattggaagggaaggcaaatcctattttctaatttatacctatat

SEQ ID NO: 42889 - DNA, 669 bp, Homo Sapiens
ttacgtgagatagctaaatgcatgggggaaagcagggtcctagcatccatcttgtattcagcttatcattatgcagggaaaatgcttttaatttaaattaatttttaattctttggcaagtgatggcaaggacttgatgtgtcattaagcaaaagaatgtatggaagtgatggaaagacaaattcatctgtagtagtaactggccgatgctaaagagttcataaggaggtgagaagtaatttttttaaaggagaaaaattttttggctttagatttaaagtaaattgaaatgttttaaagaaaaaagtattcacagatttaatacctattaataatataagagctgaaatgtaagtcatttcttcagtccttctcctctgtcggaatcttttttgttttaccataaattcacctgacgagggcactctgagatagcactgctctggggccatctgatcaccatcgggagcaaatctctgacctccttgcctgcagcttttacttaaccctgtagtttctgggacgtttgtgcagtattgaaaagacaggagaaaagaaaacagaaacctggttataacctgacgctaaaactaaaaacaaggaaatgtacctctttcttcagaattaaaactaaaatcttaaataaaacagaaaacttgatgatgacaa

SEQ ID NO: 42890 - DNA, 849 bp, Homo Sapiens
ggaatcaccaatatttaaaataaaaactttcctgaaattgggactgtcatgttatccagaagggctggtacatccgcccaccatgtccccctgctgggtcaggagccaacacaggaccctgcgtgtgagcgtgcctgacatctcacgcacggccactccagagccggtccctgtccttggaaagctgtgaagccttgcgttgagttccttctcgatactgacggctccgtgctgacattctgagctctggagtcacaccagcgcaggggcgtggaggaactgaggtttggaaggaatgccaggtctcgcacagcttggcctcgagaaggtgagaggaaggcaaaggccagggaggggacccagagaggcctggcacacaaggcccaagcaccaccgtcaacacagcccagtccatacagaaatgggtttcatgcctgaaaagctttttacagaaagatgccgcctgtagccagtgacagccgcaaccctacaggcctcagttccttgcagaggtgaggggtagagagtcagcctccctcccttccagcagcgacccagcttccctccacttccaggtggtgctgggctcaccgagggagcactggtgggtgctctgaaaacccacaggatcccacctccaggcccacctgggtcccatctcactctcttcttctttcaccaattgctaacatagaccttgttgggatcacgatggcttcacaagccagctgttgggtttgctatgtcactgtggctcagtcacatcctgcgtgtatactgtctgcggggcacatatgtatccatttagagctcaaggaatcagtgtacactaaagttaatcctaataaa

SEQ ID NO: 42891 - DNA, 581 bp, Homo Sapiens
  misc_feature (495)..(495): n is a, c, g, or t
atgcaacttcctttgaatcaaagaatattttgtctgagagctttaaggatctggtaatagacttcaaaatgttaagtgaaatttttttttcctctatttatcaatgatatatttcacttttaaaggaaattttagaggaaaattaatagctgctttttgcctaaaaaaccttgtgggtggaaacattcctctgagaatggcttttataggtattttgcctggtaatgtattcattcatgattgcccatattcttgaatgtcttcattccaatggggtcaggtcaatattatgaaaataatttttatatttatatttgtaacttaaggaatttatttctccctttactacagcatgtaaattcagctcaaattgcatgatctgaggatttaaattcacaaaacctgccactacattctggtttacattagttacttcatgctggctggggttagtgaccatttgcatactcttttaaatcaaggaggctgtagtgnaagcagttttaagattcttgaaggcaaaatttgaaaaacagtgaatacttctaattgtttccttttagtgccagaactaaggacat

SEQ ID NO: 42892 - DNA, 676 bp, Homo Sapiens
aaaattcttttgactaccattttcctgtgtacttcatctatttgtgtacaaaatgatgtcgttttgagggaatttaagtgtttaaattgcttcatagtctaaattattaattttcttaataaaataactgtttaaacattgatttgcagttaagaataaaccttaaagcaaagacaaccacattttaatttgttcacagtatgtaaatctgtctaaatttcagtgaatttctggtcagtatgatgcagcctctgagcagaatattgaccagtaagagggtaaataaagtgggggcaacccctggatatgaatgttaccccctaagtctccaatattgcaggtttccctgtataacgtaaacacacttgccctcatgcctcccagaatatgaggtctaattaagaagtcccatcaggtttattttgtaaccaaagtcttttttagaggtcagacttcctaatcaaaggcctgggcctgcagtcctttcatcttaatgcaacttcctttgaaatcaaagaatattttgtctgagagctttaaggatctggtaatagacttcaaaatgttaagtgaaatttttttttcctctatttatcaatgatatatttcacttttaaaggaaattttagaggaaaattaatagctgctttttgcctaaaaaaccttgtgggtggaa

SEQ ID NO: 42893 - DNA, 1136 bp, Homo Sapiens
  misc_feature (631)..(671): n is a, c, g, or t
  misc_feature (673)..(678): n is a, c, g, or t
  misc_feature (680)..(681): n is a, c, g, or t
  misc_feature (683)..(685): n is a, c, g, or t
  misc_feature (687)..(687): n is a, c, g, or t
  misc_feature (689)..(691): n is a, c, g, or t
  misc_feature (693)..(694): n is a, c, g, or t
  misc_feature (697)..(699): n is a, c, g, or t
  misc_feature (704)..(706): n is a, c, g, or t
  misc_feature (711)..(712): n is a, c, g, or t
  misc_feature (717)..(718): n is a, c, g, or t
  misc_feature (720)..(720): n is a, c, g, or t
  misc_feature (722)..(723): n is a, c, g, or t
  misc_feature (727)..(727): n is a, c, g, or t
  misc_feature (737)..(737): n is a, c, g, or t
caagaagagcgcgtggcaggccaccacccagcaggcgggcctggactgccgtgtgtgccccacctgccagcaggtgctcgcgcatggcgatgccagcagccaccaggcgctgcatgctgcccgggacgacgacttcccctccctgcaagccatcgccaggatcatcacgtagctcccgccagcgtggccagagctgtcgcaccgtgagcgtccttcctccttcctctccgggctgccaggcagccaggtaaggcctggtgaggccacttggcctcttggttggccaggcccaccaggaagtcaccaggacagtccacccgccctgttggcacactcaagcgggagtccacccctgcctcagtggtgggccagtctcggtttgcattcttgtgcttttgggaggtgccaggggagggaagggctgggatgctgggacctgttgttgctggcaaagccagaggtcacagtggcctgatctgggccctcccaaagctgagggctgcagcccgtggggcctcagagctgaaagctgcggcgccactggtgccagagtcagatgtcacagatgtgttgtgtaaacagttggctgtttcatgcttcaagaatgttcaggattaaaagcagaccagannnnnnnnnnnnnnnnnnnnnnnnnnnnnnnnnnnnnnnnngnnnnnncnntnnnanannntnnctnnnagggnnncaaannttaanngnanncaanttttctgggnccgacccggaaccttccctgagggggggcctaaaacttaaagggtacccggcccttttgttgtacaaagggggccccttggtaaaaaacggctaatttaggggaaaccgccgtggacgcgaacctttacttcccgggggggagcgcggggaaaagggggcaatcttgggaaatctttgtgttaaaggcaccgagggtccatagtgggggggccttaaagggggaaaaggtgctctaaacggagtttgggaaatccttttagcggcattaaaaaaaaattttctttagcgggaaaaaaagggtgtaaaaaaaaaaattggtatacccgggggagcttttggaaaaactttaggggttaccggggggtatagaaattttgcgacaaagtataaagcacccc

SEQ ID NO: 42894 - DNA, 681 bp, Homo Sapiens
gtggatcccccgggctgcaggaattcggcaccagggaatgttctgtagagagagacctagataggtcatgcaagtgagaaagacatctgaggaaaatggaagacctaaggcagacaggaaggaagcacaaaagacaagcattgggtcagacccataaaccacctcccaaaggctgtcatttcattgcactggaattttgctttatcagaagcaaggaagtaagggagtcattgccttgggcctgggaatctaagtgggagacaatattaatttggatccgattaattggagattactaactgtggacaaaagtttatctttgcacaatcaataaaaatggcatttttttagtaaattaagagcataaacaatattgctagaggtggcatgtttagtctaccaaaaacaatacttttcaggcactttagaaatatccttttagaagcagcgagtgcatgggctaattatcatcaatctttatgtatttgttaaagaaacatctacaggatctttattggtgaccttttgtaagacattagtttgaggtactacctatgtacttgaaaataataaagtggcatttctttatgaaaaaaaaaaaaaaactgaggtttacccatctttataaatgatgctacactactaaactgtgatgcattggacatctctcatttttctggg

SEQ ID NO: 42895 - DNA, 969 bp, Homo Sapiens
  misc_feature (796)..(796): n is a, c, g, or t
  misc_feature (865)..(865): n is a, c, g, or t
aaagctgaggagagtaagcttcctgagatattgaaggagtgcatgaagttatttcgctctgaggcactattcttgctgctctccaacttcacaggcctgaagcttcatttcttggccccttcggaagaagatgagatgaatgataaaaaagaggcagaaaccactgatatcactgaagaagggactagccatagtcctcctgagccagagaataatcagatggccatcagcaacaacagccaacagagcaatgagcagacagacccagagccagaggaaaatgaaacaaagaaagaatcaagtgttcccatgtgccaaggggaactgaggcattggaagaccggtcactacactttaattcatgaccatagcaaggctgaatttgccctagacttaattcagtactgtggctgtgaaggctgggagccagaatatggcggttttacttcttacattgccaaaggtgaagatgaagagctgctaacagtgaatccagaaagcaattctttggcattggtctacagagacagagagactctgaaatttgtcaagcatattaaccaccgaagcctggaacaaaagaaaaccttcccaaacagaacaggtttctgggacttttcattcatctattatgaatgacagcactgggcaaagctgaacaaaaatgtgacccttcgtaattactgggaagtctgaaagagctaagcatggagtcaaggagaactacatggtagcttgcctgacagtgttcttaaaactggttgtcttttactaggactcataatgattgtcctcnacccgagaccttgagcttgcagctacgtacttatctcttgattaaaaaaaaaaaaagtgggcttttttntttttttacattttagtcctttttttccatatttggccttccttcagtggaattttttaagagttcaatttggtttttttattgaaggttaaaattaattttat

SEQ ID NO: 42896 - DNA, 788 bp, Homo Sapiens
  misc_feature (21)..(21): n is a, c, g, or t
  misc_feature (696)..(696): n is a, c, g, or t
  misc_feature (712)..(712): n is a, c, g, or t
tacttgctgtaggattcaagnctgtctttgcactagctctaaagaagattttcttctggttttagagaactaattttgttttagcattaaactgttgaacttttttttgtacttagaaaacctagatactgcagtcagattttggaaactgccgtatagtcactgttttaaaaaccccggaggggctgtattaatttgtattgccccatggctgacaaaagccttttttttttgttttgattttttttttgtaactgttggggggaaaaaggctttttaacccatttttgaagagggtgaagtttggagaacaaatttaaaaaccatcagtcatgtgagcagattttttagaagggataggagacacacgcgcacacacacacacacacacgaaacttgaaatggctttgctttggctgtcgtcttctgccgtgtgccagatgagcttgtgatctgggaagccggggcacccccgttttgtttctctgggcggttgtggcagctgaaggcggacgttgtttcctaaccataggtggaacgaggagacgggagcgagtgggctctccaccagcacatcactatgcatctgttccaggaaagaagaaaagcgagcgaggaagacggaaaagactgcctgccttggaggggtcacatgagggagacctgtgcctgatttcattaggaaatccattctgntattttttggtgctgntggctactttatcaaaaaacccttcaatagcatccttaagatttaaaaaaaaaaaaaaaaaaagatctttaattaa

SEQ ID NO: 42897 - DNA, 522 bp, Homo Sapiens
gctgcttacatcactgaacaacaacaaaaaaataataatggagtagctgttgcccttctccggttgtgtgtacagtatgtgtggaataaaaaagggaaactgttttcacaagctgttctttgtttcataattggattcatcaatcccgtagctacccatattgcactgagcttgccagtggtgactgccaggaacgtcctatgatccactttgttggttgttgttgcagaagactgaactgttttggaatatttaacaattacagaaacagtcaagtgttttccaatgtggttgtccggtttctatggccttgctgtgtactttccctctttttgacagtaaacttctgcctatggcttacagtttgacatttaatttattagcgctgctctgcacccctcccttgggagggagacttcatgtggtttattgcgagttttttgtttacttttcaggtttgtactacaaggtttaataataaaaacaaagttttttggaaaaaaaaaaaaaaaaaaaaaggac

SEQ ID NO: 42898 - DNA, 915 bp, Homo Sapiens
  misc_feature (633)..(633): n is a, c, g, or t
  misc_feature (766)..(766): n is a, c, g, or t
  misc_feature (789)..(789): n is a, c, g, or t
  misc_feature (820)..(820): n is a, c, g, or t
  misc_feature (830)..(830): n is a, c, g, or t
  misc_feature (880)..(880): n is a, c, g, or t
acagatgcagtttatgttgctttttagtcgtcagggaaagcttcgactgcaaaaatggtatgtcccactatcagacaaagagaagaaaaagatcacaagagaacttgttcagaccgttttagcacggaaacctaaaatgtgcagcttccttgagtggcgagatctgaagattgtttacaaaagatatgctagtctgtatttttgctgtgctattgaggatcaggacaatgaactaattaccctggaaataattcatcgttatgtggaattacttgacaagtatttcggcagtgtctgtgaactagatatcatctttaattttgagaaggcttattttattttggatgagtttcttttgggaggggaagttcaggaaacatccaagaaaaatgtccttaaagcaattgagcaggctgatctactgcaggaggaagctgaaaccccacgtagtgttcttgaagaaattggactgacataactctcctcccttgttgatgacttcttgtggcatttcacacactgtagatggtcactcccttcatgtccatgttagctcatggtgtaagatgatgtcttgtcagtattactgttttgctaagccgcttcattcatgcctacacaatttttttttanaagggaactttagttaattaagtgataagggacttaaatatgaattagaatggtgcagaaagagataccttttctggatattttttaagtttaaaggtcagtttctcctaatctgattatgtgcacatatganaatggccatcatatacatgtaanatcagggcagatacatttattaattactggnatttgacaanggaaactctttaaattataatgtggaaacctggggtttattgaaccacangactaggggcagcattttcagcctatgttaaaaac

SEQ ID NO: 42899 - DNA, 352 bp, Homo Sapiens
attttgttcttctcataatttctggtttagaaaattatggagccttacatcctgatcatgctgggccttagaattctgacacagtgagtcatcacatttcctcccactgcctgtggccttgttccaccatgactctcacagtacagtgtaggcttagtgtagtagtattcccttggaaagggtctggcctaccatcacatgccccaagaaacttctggttggtaaagaagataggctgcttattgccatgtgtagtcacttccaagtgcccactgcctttccatcctgcaattgtggcctgtgtataattaaatgattttagcctcaaaaaaaaaaaaaaaaaaaaaaggac

SEQ ID NO: 42900 - DNA, 578 bp, Homo Sapiens
aaagggaatatggataagcatagtaccaaaacccaccagaatctaagcagttttcaccccctcagaaaccactgtcattagtttacaaagttagcactttgaagtaaaactaaatgaggaaggaagtaatgttacctatccttgataccatgaccatttattagatgttttgctatataaattaccgagagaatagtttgtcatccacttagtgtgttagctggtagggtacaatataacctctcatctcaggctattttaaaaaaacaatatttgcttctataacaaaaggaaacaaatctaagaatcattcctgtactacagaagggttaaggcaaaggtagccttttgggctttttaatgaacatgacccctatagaaaagtcaaggaaaaaaaacccttgtataaattattttatttattattgtaattagatcttcacaaagttgtcttttcactgtgttttgtcaacgtgaaattaaattgtagttataagcaaaagttggttgcctagggaacaattgtatattcagtttaacagaaataaaagaatatttgtcttaaaaaaaaaaaaaaa

SEQ ID NO: 42901 - DNA, 626 bp, Homo Sapiens
cgcgtccgctggcaggagcacagcacagcagccttattggagagagccttataaaagtgattaaatggaggcattgagctcattacctttaagtttactttgtgctgacctttgttcctgttttgagaatctcatataattattaaaaaaaaaaaacaattaaaacgaaacggcggggcctagctgtgtataaatgatccttgctgaatatcttaaggttttttgtaagaaaaaagaaaaaccaacaaaaaaagcttattttcacattaaaatgaaacctcttttgcaacttaagaattctatggaaaagcagtttttatcatattttgtgtccatgcaccatttttcttaaaatggcttacaaaaaagaatgtaaacaatttgtgatctggccagttgtacttttagctcccagagggagagttggtggtattatgagttgagtaaaaaccatccaggggaacttgagggagcagtctgttgccagtaatgttccttgtgtgccattaaaccacctccagatgagtggaggaacatcactttttaattttttaattgtatttggaattgttgccgtgtactaagaacttgacctaaataaaatcccacaaagtataaaaaaaaaa

SEQ ID NO: 42902 - DNA, 661 bp, Homo Sapiens
gctttagttacaaccatctgtaaataacttaaaagacttattatgtggggttcaaattgagtggaataaagtatagattaaaagtatacaatccttagcacgttatctcagggcttatgaaatgtaattaaatttattaagaaaatagatgaaaaattagggtacacagctggccaccaaatgcgaagtcaatctgctacttaaccctgaaaacaaaatcagttttgcatattaccactaacactaatacatatagagagcggaaccataactcattgaattttggagaggaataagcttagcgttaatattgacaatattaaggcaatattcttgtaggaatactatgtgcatgtttgatattttgccaaataacaataattaataattgttcaatgtttaagaataatattaacaaaataaaggagtttaatgcagtgatctttgtttttggcacatcaaaaattctcagtcattattcatgtttctttatgctgctggcttttgtgccctggaagatcataatagtgaccaaaatatacatgcagacttgttttttattattgttgtttaagcataatttaagaaaaaaaatttttacctgggtgaacttgctatctgtctgtttctagttaaatataataaatattatcttcctgtc

SEQ ID NO: 42903 - DNA, 705 bp, Homo Sapiens
tttatagctacaacttaactgtagcttatcagagaagctctgtagtcctacactgaagtgtgttcccttggctgttcatatggggctgggtttggttgaacttccattctgtataaatgctagaacacagttactacagattgattcacaaactgcatgtgctggtgcttgaggcagccaaaatggaatgctgtggaaagcatatctatatcttaaaaaacactcagacaggagttaaggacagctttaataatttttttgtttaccacttaatctttatcaactttgattttagttagggcttagctcatggttgaagaaaagtggaaaataacaagtgcccatttaggtttgaagaatccagaatgttttacctttgactttatgagttatagaagcttggctttgctctaggtttcatgttcccaaatgagccatctgtcagtatattcacttaattcttactaatttcagtttcctgtaaaggaaacaacttacatattgatgcttaaatccagaaagtgtaaaaggttttcttaaactgttaaaatatagtgtctgatataaaggatgtaagttactcagctttctgctccctaagccaaacagtgtttgtcttcagtgtgaaatttaactgtaaaaactacttgtaatgtcaagagattatagatcatattattaataaaatggaaaaaaaaaaaaaaa

SEQ ID NO: 42904 - DNA, 912 bp, Homo Sapiens
ctggaccggtccggattctccggaatcgtcgaccacgcgtccgttccgcgtccgggggaaggatattcatgaaagaatttaggcaacctgttatttataaagccttcacgtctgtaaggtgcttggcctacttttttttttaaattagtatacatgcataaaaccttgtatcatcaatatacaaattattctgttaggggacatgtttttgttctccatgtttctgtttctattgtggtatgagttgtatttgtatcactgagataacctattgttatattctaattcattgataatatgttttgtaagaaaagctgacatccttcattgcaagtgaagaacaggtttaccatgaaatgaatgcctttattcaacttagagtcctaatgtttctgatttcacattcttgttgctgaaatgcagaagaaacagctacagcaagagcagaaggaaaactcttagacttaatgtctccaattgcaagaattgtttcactaaagaaacagtcatcattcaactactgaatttgaaagcctcagcagtttcaatgacaaaaatcatttttgattttttaaaattaatcccaatggcatgataaattttcatataaaaagtaaagtttcaattttagtttttaataatggtttaatgccttttttgaataactgggtttaacctaattttttttaaatgtaatgtattaatgcatataccataatcaaaaagtttgaaatatcctgttttcttaaataatgaaaaacatttaatcaccatttaaccaagcattttgtacattcaaaacctggaatattaaaagtgaaaatggattaaccttttgaaaaaaaaaaaaaaaaaagggccggcccggctctaaaaaaattcccctcggaaggggcccccaaacttaccgcc

SEQ ID NO: 42905 - DNA, 500 bp, Homo Sapiens
ccaggttctctttgtctgatgctgagggcagggtggggtgtgggaccaccactcttgttggcctgtcaagtagaccctaggacagaaaatggaaagaaggaaatggctcggtgctctcaactagcagagagaattgaggagaggtaagggttccttctgcaggccagcctgggactccacagcgccagcaggagtgacttggccacaagacattccagccccagggactttgcaggcttcattccctgtctgtgtcttttccttctggtgtgttttacagacttctgatggggaagcttcaaacttgagcaggccagagatgtccttaccaaattggaaaggaaggtgaaactgttcctttctttagccaaagaacccttctcaaagacgcctccagaaatggacaaaatggccttcccttcgttcctttccaggcaataatgacatcattagtgatgcaattctatttgtctttctctttcctctctgtcctttttttt

SEQ ID NO: 42906 - DNA, 508 bp, Homo Sapiens
  misc_feature (395)..(395): n is a, c, g, or t
  misc_feature (429)..(429): n is a, c, g, or t
  misc_feature (470)..(470): n is a, c, g, or t
cggtgttaaaaaaaatcatggtaaggctacaatactcaagtaacaaggtttgggacaatgtctaagggttaaagtgccaaagccatttctgtactaactgttctcttgttccggtaccggggagaaggatgacccctccttattctccaattcatgtacagtattttgtcctagcagcataaagacctagctcttttcttacaagaggcagaaacaagacaggctagttcataaacaaactgtgtaacttctcaaaatgaatctatttcataactcggacaatttctgggtggtgactgagtacccctttagtgagtacccctttagtgctatatttgtgccattcattatctggttcatatttcttttctgttagatgatacacatttcttcanaaaaatttctaatgtcacttttgtacttttttanataaagtatgtttaactgttgggctctcaataatttgtganatttcagtgttttctataatgttaatggggaaattcag

SEQ ID NO: 42907 - DNA, 692 bp, Homo Sapiens
gacacagaagccagaggacccccccccgccccacagctgggtcagcctggaaaatccatctattagggactttttggcagccagatggcagcaatagcccattaggtctcatcccgagttccaagtcttggctgcaaatgagcctcagttcgccttactggagagcacccccagattcctgggcacagttcatttccagccctttctagatctgatcttttagggggaaagacagcttaaaatgttcttttcattttaaagaaaattattctgtctgcttaagttggaggctacttactctttcacctgacattttctttccttttattcttccagatcaggaatgaaatttccatgctgctcataaagataatattattgtactaattatttttattaccattgtaattatgatcattatgttgatattttagtcagggttttaaatgcacatttattccaagtatctttgggttttctctttaatatttaaacttattctctctgtgagtatataagtagactggagggacatccagatgtccagttttgtcagcaaaaaaaaaaaaaaaaactcaaggggggcccgtacccaattcgccctatgggagtcggatacaataactggccgcggtttacacgccgggatgggaaaacccggcgttcccacttaatgcctggagacaaccctt

SEQ ID NO: 42908 - DNA, 594 bp, Homo Sapiens
ggtctgtcatccccactgacctgctggtgcagcaggccggccagctggcccggcgcctctgggaggcctcccgtatccccctgctctaggccaaggtggccgcagtctgcctttgcatcctgtcctccagccacccttgcttgccactgttccccatgacgagagcctcctgtctgcagtggccatcctgaggatagggcagagtgcccagggtggccccagggcttctaaaaccccacctagaccaccctccatgtcaggtactgagcaaggccccagatccttctctctggaggaagagggaagcccaggggtcctgtttgtaaaacaacggtggcaacagctcctcttccagagctgcctctgcctttatcctgggagatggggaggaagccccatctctgctgttccctgcgtggaggaagcccagccagcaagctctctcctaccccaggtaaaaggtgctcctttgcctgggtttgaattccagcgctgccacttcctctctgcacctcctggcaagtttcttctattccccacgtttaaagcgatggcacctccgtcccagggtggtgtgaggattacccagtgtgg

SEQ ID NO: 42909 - DNA, 596 bp, Homo Sapiens
cttcttttggttttgtcctctcattgaagttccagtggtttgaaattagttttggacacattgtcttaatgtactgaaaattgctctgctgtattttgcagcgttcttcatttaatttataatggtccatattagacacatttggtaagagaagtccaggaacacatttagggccatggaatagtattttgtaaaatccatttgggaagttgcaatacccacaatctgacatgtcctaaaatgtaagggattatctctaaggggttgatgggagaaatatttagatgtaccctgttaacagccagtcattttgatttacttatggaaatcaagtgaataaaaggcaacataatttgggaaattttattctaatatctaataaaaacagtttgagtggttgaagacatctgcatgaaattgcacctaggtgcattacttgatataactctcccctaaaactgttgtaagtgcattttttcccttttcttgggacccctttagaaatgtactgaagtcgcatttttcacccatttcagccatgggacatttttcataatattaatgtcaagatgtttgtgttactgtttatacattac

SEQ ID NO: 42910 - DNA, 586 bp, Homo Sapiens
tttttcctttttttttttttttttttttttgttggctttgcgttaggatgctctgatctgacatttgacatgaacacaaagttgctagatgctcttgttgacttccagcagatgggatgggggaaacacagcagttcttggtaaagtcctttgtaataatagtttgatttttttatttcgagagaatctttcattttcctatgtatgcttttttccttttttgcccagtttccttatcacttgctgtagatggcttattttgcattcatgcagactatgttgcaagtctgtttcatctagtaaactgaaaattattgcttaatcaaactgccgtttgtcttttatatttaaggccttccccccccttccttatgagttctaacttagtaatttcaaatgtgaccttttatatctaagaccagtatagtaaacttagcccacagtggcaaataatgagtaatattgtaatatgttccagttgcacctcagtatgttaaacaggtaatgtaagaagttctctgaaatgtcagcaagtaagttctgaaacacatcatgcatgagtaggaataaaacccaagttccccat

SEQ ID NO: 42911 - DNA, 501 bp, Homo Sapiens
tggcaaaccagaccctgctgtagatatagtctaaggtagttaaccatataagccttttcaactcttaatgccctccacatgaatcagcagttaagaaggttctagaacccatgaaagcttttgtatgtattactaggttttgtttttcttatgtttgctgattttacagttctgactaaagctgacctaaatggatcagtttatgtgtaatattctagtgctttaatgactctttttttctttggagggagggtaacattatttggacagatgcagaaggaactgttagtgagtcaagacaaacacatctgaaataaaggaactgtgtattaacatgttaacaattcataactgcactttttatgacattttgaaaatctatttataggtacagaacaatgggttttgttaaactgtatcacatttatacttgcagaaatttatttcattgttattagtaggaattttattggttcaataaaattggcaaaactgaacacc

SEQ ID NO: 42912 - DNA, 596 bp, Homo Sapiens
cacggaaccgaacgtcgtgcccgtgtctgccctgcggggccacgggctccaggagctgaaagctgagctcgatgcggcggttttgaaggcgacggggagacagatcctcactctccgtgtgaggctcgcaggggcgcagctcagctggctgtataaggaggccacagttcaggaggtggacgtgatccctgaggacggggcggccgacgtgagggtcatcatcagcaactcagcctacggcaaattccggaagctctttccaggatgaacggacgcccacagaggcctgcggggtgggggcatcgctgcctggggagctgaggcgttaccgctgtgttgggggcagcttggtgtcaggtgcagcagggtcctccttgtctggttctgcacccgtctcgctcccagccatttgctgggatgaccgtgcaggccggtgacacggccgcacctgccccaaagcgggccgcccgagcgtccactccaagcctgagcatccacacaattccagtgggccctcggtgcctgctgtgaactgctttccctcggaatgtttccgtaacaggacattaaacctttgtttttacttcaaaaaaaaa

SEQ ID NO: 42913 - DNA, 447 bp, Homo Sapiens
tggttttccaatgttttgactggagggcaaaattttactactactcatctttttggagaccagggctgccctgctggcagcctgccttctaagtgaaatcgactctgtttccccactttaaccccaaattggggcttggaccaagggaggtgagaccacctcccccaggtcccctcccctttcaaaatccatctcattttgccacttcatgcccctgccctaactgggtttttgttcattttttaaaaacagaccacccatcccatccgttttggcttcttgtcccctgtaaatagaccatgacttcgatcagtatttcttgtccccaccccttcctatccccagatgtgcccccatcccctgaaggagctggctgtctcagtcctgggctcgcgcacttcaccccggcagatggagggggcgggaccgggtgggcggggccccctt

SEQ ID NO: 42914 - DNA, 521 bp, Homo Sapiens
ctgcaaaagagggaaccggtgactcagaaagacagatgttttggtaatttaccccaaatgtgccatccacatagtgctttttcctcttgcccttcggcttgtttgaatctcacaattatgtatttaattctcaaagaaatatgtatctgtagccgtttgttgacactaatacagatgattaaggaaaacagctgatctttggggaagggagctaccaacactttatacacacacacacgtgcacacacacacacacactatatatatatattatttacagggaaatttttcagggtttacaaaagagtatgtgattggtagtaagagacacacagaatgtttatgaagaaattgcattttctttttcctttacatttgaacttctttatagtttaaatataacgtcttgagatggcacattcctacgattgaagaaggggtcttgagatcccctaaacttgcatacccagttttttggatattgtaataaaaaaaagtattatgacaaaaaaaaaaaaaaa

SEQ ID NO: 42915 - DNA, 547 bp, Homo Sapiens
tactccagtgagtttctgctgtctttttcaagtatgtaccataggacttaaaggtgatttggatgcgttgtaacactgctaaatatgctaagtacagaattttatctacagtactgtgagacagtcagttattgcctagggtagttcaaaaatatgatgtgagctagttaagcctttgcttgactgatttcagtgatattcagaagtgtgtaccaatcaaggctctttaaaatacggaacgactcacttaataaccagggaaccagccaaatactgtgcagccgcagaatatgcatatcaatgagttggaggtgattattctctgtaactccctaatgattgttttctaagcattgtggcttctcagtggcttgacagcatcttcctggttgtatgtggcctgtttacatgatgtattgaataatgttgtttgttgtgagcatcaatgcctgtaacaccaaactaaacacgtgtttttgggatatgtttccaatctttaaatgaccttgccctgtccaataaataaatgattgtctcaaaaaaaaaa

SEQ ID NO: 42916 - DNA, 669 bp, Homo Sapiens
  misc_feature (569)..(569): n is a, c, g, or t
  misc_feature (602)..(602): n is a, c, g, or t
  misc_feature (617)..(617): n is a, c, g, or t
ggtaaaaggtggcgacagtttcccttaggggtctgcctggcaggagccacagctcaggagagttgtgagggatgggacggaggctggcgaccaggcgaggcctaggccaggctcgggagacttttctgtgctcctttctacacatgccttaaaccttccttcctgtggggtgcctggaccccttccccatctctggcagctcagagggtctctgctgctctcccctgggaaatcccctcatcctgccctctggctgcctcccagctgggcttgttctctgagggaggttccggagactcatggacttggggctctgcctgtaggaaggaggctgggccggagggaccagccaccattgtctctgttcagccaagtgtgcaagtaggctgcccgccaagagggggcctctgctacccgctgctgcctgccggctgacacactgcctccccagccttcctgctaggccaccctcctcccttcccatgcttgtaaccagctctggggcttgcacctccacaaagtaaggttggcccttggaggccatgtttgggtctccggccagggcctanggctaggccatgcacccaatgggtgcacaatanataacaggtcaacanagaaaaaaaaaaaaaaaaaaaaaaacacttaatggggcggccgcaagcttat

SEQ ID NO: 42917 - DNA, 669 bp, Homo Sapiens
aaattgttgaagaaaaaataaattatttactgagggtagttatgttaaagttttgcgaacttaaagggctgactttagttccttcatggtaatggcttgagtaacatcatctttgggattttttaaatactggtccagtctaggagaacctggaagatgaccagaggtatttcagtttccctagggagagcttcgttatccatgtggatgataagtctgcttgatttattattaaatcattatagcagtgaagtggtgccattttctctctcttaagccccatttgaaaggctagagaaggggatatatatactatgttcaaggtttgtaaggttgttaatgtacataattgcagattgcaataaaagcttagatacattttgtaaacccaacccactaaatgagcaggttacaagacaaatgtcaccagcctcaagtattttatgaactatttactgagggtagttatgttaaatagattataatgtggtaaattatttcctgaatcctttatcacaggaaaaacacagaccctcataaaagggataattaaaacggatgtgtctgaacatttagtgaagatgagacttaaaacatgaaagtgtatttgtgtattttgagggttttagaaaccggttgccttagaggttagacttttgaagaaaaaaa

SEQ ID NO: 42918 - DNA, 741 bp, Homo Sapiens
  misc_feature (13)..(13): n is a, c, g, or t
  misc_feature (23)..(23): n is a, c, g, or t
  misc_feature (25)..(25): n is a, c, g, or t
  misc_feature (740)..(740): n is a, c, g, or t
aataagggacagncttgtcctgnancccatacctaatgaatttgtgctcttaaatattgtacattgtgtttgaggcttgtcaaaactgggattatggcaagaaaggttgcctaactcatacctttctgcctcaaattccaggtgctaaaggctaatggcattttaaacatcttacatttttaaaaatttatattgcctctgccaaacaggcctaatagttaaaagcaagttgagacaaaccaggcagattcagtgtgtggaacaggaaggatgtgctttaaaaaaaggtggaatccctcaaaaattctatagggagacagcagccttaatctacataattcttcatctcgccaattcagccgcagcctttaaagagttagtgttaatggctttctggtttgaaaacaaaaatgcatctatgtggttgaaagtttgggaggagattcaccaatatctgaggagaagatggagtgaagggaattcttactttttgctttatacctttctataatatttagatttttttttactgtaagtatggatcaaattgcaaaataaagaaaaatgccaaccttagaaaagacaataaatgcacaaaagatataaacaggaacagcaaatatttatattttttccattttgctctttttaaatctatgtttagaactttatatcttgggacttatgtatatatataccttttaaataaaataaattttctaaataaaaaagtgaaaaana

SEQ ID NO: 42919 - DNA, 709 bp, Homo Sapiens
gagcaaagtttcaaagtatgcttttgaacttgtggaataaacaggctttactggactcagaaggcaatgctgacattgatcaggttgataatttgcaggaggggcccagtaaacctgtgcatagtagtactaattatgatgatgccatgcagtttttgaagaagaagcggtatcttcaagcagcaagtaacaacagcagggaatatgcgctgaatgtgggtaccatagcttctcagccttctgtaacacaagcagctgtggcaagtgtcattgatgaaagtaccacggcatccatattagagtcacaggcactgaatgtggagattaagagtaatcatgacaaaaatgttattccagatgaggtactgcagactctgttggatcattattcccacaaagctaatggacagcatgagatatccttcagtgttgcagatactgaagtgacttctagcatatcaataaattcttcagaagtaccagaggtcaccccgtcagagaatgttggatcaagctcccaagcatcctcatcagataaagccaacatgttgcaggaatactccaagtttctgcagcaggcttggacagaactagccaaaatgatgcctatttgaatagcccgagccttaactttgtgactgataaccagaccctcccaaatcagccagcattctcttccatagacaagcaggtctatgccaccatgcca

SEQ ID NO: 42920 - DNA, 643 bp, Homo Sapiens
cacgaggaggagaacggcatgccgtggtgcaggcttccaagctgcccatgtccatcatcatcgtgggcgtgggcaatgcggacttcgctgccatggagttcctggatggggacagccgcatgctgcgctcccacacgggggaggaggcagcccgcgatattgtgcagttcgttccctttcgagagttccgcaacgcagcaaaagagaccttggccaaagctgtgctggcggagctgccccaacaagttgtgcagtatttcaagcataaaaacctgccccccaccaactcggagcccgcctgagctccagtgcccagcagcagcatgtcagctgagcctcctgccctcccccaggaacatgcacgctcactctgcttccttgtgggtggcctttttttaccgatccccttttttattttttacaaccggacctccacccccaacttcctccagcccagctgggcttcctttgttggagtcaactgttgatgcttccaggccaaactggcttcctctcctcctctccccacctttgccattcttaagtattgaatgtactttgtataattttagtggaattgttattgagaataaaatttttacaatcataaaacaaaaaaaatatataaaaaaggctctctcag

SEQ ID NO: 42921 - DNA, 518 bp, Homo Sapiens
catcccttccttcatctgacttattgaacttttacaaactaacagtcaccagcaccaaagaattaagtcaactaacctgccttgaattttagaccagcaatccatatggctttatctggtataaatcttctgcctttgatcatttctggaccgtaggaaaaaggaatagcaatcattaaaatcttgggccagagaacactatttttacataacagtttcttaacctaaagtcaaggccttggactcttccctgagggttgcctgagattccttcatgctttctattcaggactaagtcccttactgcaaatgtgttagctctaacatctcccacaagctagaggaacttgcgagtatattaacaaggacacatctgacatcctgtgtttggttagaatatacagcacattgtgataacataaagtggattcatcttgtatcattataggcagaaggtatttggcaaatttttatgtattgttttatgtactgtacaagtaacttattcttgaataatg

SEQ ID NO: 42922 - DNA, 1009 bp, Homo Sapiens
tcctgttctagttgcctgttaagcaaaatctgccctcccaattgaaaaagccaaagagaattgttagagggaaaagcatgtagccattgcagtctgcattgcagccagcgttgtccagagagtacacgctcagcacttagcttctactgtgtgttgtggtctggtgagtgttgtttcccctgagcgctctattatttatttatttattatcaatcagtgaccctgaccacatagtgtgataggtgcagcattcttccctgtgggaaagaattaaagatggttccatttcctaggctacagacaggaatggggctctaaatggttttcatagactggctgttaaaggccaaaaattttggtaaatcaatgctatattatgctcttgaactattaaaacagccataattattgtcccaagatagaatatagtcctttttcaaagatgattatacgtggctaggtgacagacattaatgactgactctggagagtaagtcatacctgcactctgtggacttgatggttctttttctagagcaaacagagcgtggcattttgttttgacttgttcttccttggggtcaaatttatatatatatatataaatttttgtttgggcgaccaagatctaataattaaaacccaggtggaccatggattcagacctgcctttttatgtttttgactcttaggttcatcgtggtccagactttcttcacatatttcgtgaaggtaagatattctgggtggcgcttgggcctcccttttcacgcattatttcattgccctctttggatgaagtggttaccaaaaacgttaaaactaccttttttgtttccctgggggtaataagggccagtaacctattgaagcgcccttcttctcctccatggtaagagtttgtggttaaataaaaaccccttttttatggggtaaaaaatttggggaagggagggcccaccccaccctttataaattgaggttggggcccaaaccaaaggggccacac

SEQ ID NO: 42923 - DNA, 752 bp, Homo Sapiens
gtccatttggtgcgctgcagaagtgctcccaaggacagcagctcagacctgcaggcccagccgggttttattcacaacagtgaactgcttttagtcagtggtgaagtgatgcatgattccagtttttctgttaagagaaagctgcctgacggccacttaggggccgaagaccagcggcatggggaggagcagcctcccatcctaaatgccgatgcagccccgggtccagaaaaggtgacgagtgttgtgccttttaaaagacaaaggaatgaaagcagaacagagggacctattgtcaaggacgaggctcttcagattttagcattagatcctaaaaaatatgaaggccgttcttatgaagaaaagaagcaatttcttaaagattatttccataagaaaccatatcctagtaaaaaggaaatagaactgttgtcctcactcttttgggtgtggaaaattgatgtggcttcattttttggaaaaagaaggtatatttgcatgaaagcaataaaaaatcacaagccttctgtacttttaggctttgatatgtctgaacttaaaaatgtgaaacatagattgaactttgaatatgaaccataaaacttgcaaaaaaaaaaaaaaagtaactctaaagtagtaggtagatttttttcagttgaaatttcacagtgttgtcctcactgtgttggtgaaatcacctcagtggtcactgtgctgctctgcagagttacttcaggtgctggagagacccc

SEQ ID NO: 42924 - DNA, 522 bp, Homo Sapiens
gtttcaggggacatggcgaagtttacagactgagatctcagtctccatggttggtacagtaagtctttgaccacattttctgaaggtcatgtttagtggagaaacgggcttttctctagctggtttaggctggaagctgtgtccgggtcgatgggatggcatattgttaaagaatctccattgtcgtcactgtcctgtggatgttaaacctcgtttttttccccacacgatattaaaacttaaagcaccagaaccagtcatggagaccagccagtttagatggtaagtcatatttctggtggtacacagcagaggaaccccttcactctatctttaggtagaaatatttggaggatgtgacagcctctgagaaacataatgttactatgtggattttaaaaaatataatacttgcatgtaattgctataatgttcatatttgaggcagttgtgaaactggtttatgattgttggtgtactctgttgtaaattcaaagagagcttgttgaacatttttttttt

SEQ ID NO: 42925 - DNA, 733 bp, Homo Sapiens
ggaatccatgcattgtagagtctataaaatgttgagtttttttagatgatataaactttgattctgggcactagtgctagtagatattactaccctcctgagggaaatcagaaatgatttaaccccagtggaatacattaattcttaaagcggctcttttcagtagtgtgacttttagaaagtgtctcagtagttaaggaagctaacagtcttagatctacttttaaaacggatggccttcttaagaataaagcaaaaggtgattttctacataatttttgctttccaaaagtgatgatatgctctcctacagcaacatatgagaagaaaaaaggcttatctagattcgaaaattaacagcaattatagtaatatatcccctccttctaaatagtaaaaagctctgattgtacaagaattacctgtgctagtcaagttgttgtttttccttgaacaactttggaaaaatggatttgacagtacataatcagttctactaaccaaagcttgtatttggaaatttactttttgtacaaattgaattatataatgcttaaaatactttgtcactttataagcaaaatgcatagtacttaatttgtttatactgtaaagtatatgttaaatgcttttatcacttttgagataaaaagttactaatgctgttgtattttactttttaaaaactacaccaacctttgacttttaacttaaaaatgtttcaaatcccatc

SEQ ID NO: 42926 - DNA, 1077 bp, Homo Sapiens
  misc_feature (600)..(605): n is a, c, g, or t
  misc_feature (609)..(609): n is a, c, g, or t
  misc_feature (611)..(614): n is a, c, g, or t
  misc_feature (616)..(620): n is a, c, g, or t
  misc_feature (624)..(624): n is a, c, g, or t
  misc_feature (626)..(626): n is a, c, g, or t
  misc_feature (648)..(648): n is a, c, g, or t
  misc_feature (668)..(668): n is a, c, g, or t
  misc_feature (671)..(671): n is a, c, g, or t
  misc_feature (681)..(681): n is a, c, g, or t
  misc_feature (692)..(692): n is a, c, g, or t
  misc_feature (694)..(695): n is a, c, g, or t
  misc_feature (707)..(707): n is a, c, g, or t
tccggataatcaaatgaatgattaaattatgaagctcatatccttttgaaggtagttgcaaagagacatttcaaaactgccctaggccattgcagcatccttagatgggacgcataatcattaccttaaagcatcaccactcattttgaccatatagattttattatgttagtttaaaaggtcaatcagcctcatgactttatagttatgtcttgtatttaaaaacattttttatacatttggttatgttgataaaccaaaaacatttgattaatagaatatctatttgaataaattatgagctatcctttcaaacagctattggcaagttttaaacccaaaatatatacacatagttctgtaataaaactgtttgacttctcaagtaacatgacttccttatttctgaacagtactggttactttcaaaatgaatttttattgagattttccattaactatttttttcaaagactcaaattttgtaccaagtaaatccaggctttatgtacaaacatgttgtttgttttatttggggctgggggaggtatatgatgagcagacttctcggaattcataataaattttctaaaagcctannnnnngaanannnnannnnnaaananacaaaaaaaaaaaaaaaaaaanggaacaaaaacaacaaaaanaanaaaaaaaaanaaaccaacaancnnaaaacccccccncaaccacccaaaaccaccccccccaacacaccacccaaaacccacacacaacgggggggggggccccccccaaaaaaaaaccccccccggggggggcccccaaatattttggtgggcccccccttttttttttttataacaaagggggcgcccccccttaaggggggcgcatctattaaaaacaaaaccgtgcgcattgtgggcccccctttttttataaaaaaagctgggggggggggggggaaaaaaacaaaaggcgcccacccgggggggaaatatttttggggggaggagaaaaaacccttttttttttgtgggggggggggggacgcaaaatatgggggggggggaaaaaaaaaatactcccgag

SEQ ID NO: 42927 - DNA, 706 bp, Homo Sapiens
ttcccgggattgctgccccaggaagactcctctaggctctccatctttcccttgagagctggctccccaccccaacctgctcaggcaccacagaggatctaggtctctggctccccatacctggacccacatgggtgggtgcctgttgcatgtttaagagagaggggctgtgaggtgacagggcactagggccttcactcctttctccccttccatcctttctttaccagtgccacccatgtccctagctcccgggtattggggctgaggctctggggcctgtctccctgccagcgtgagggcaagaccccagagccttagctgagcaagcccagaggggcagcgtggcccctccctccccttttcctgccccgtcccatgcctcagcttgctgcttgtgccagttgcctgtttcgcttcagtgtttgattctagcacttacatgtgtcctccccaccaagccctctatctccttctaatccttcaacccctggccccctccccgtaacagtgacttttccagggaggaagaggcagcaggagctgttggccttggtttgcacagagcgggtagggctgtagggaaagcgggtgagctgttgtgctgctgggcctccctttggccctcgcttcccaccctacgatgtatgaaatgtatgtacagaccagagatgtttatacagccgataaagatggagtttccgta

SEQ ID NO: 42928 - DNA, 676 bp, Homo Sapiens
ggacagtgaaggcttctccctcccctcccacctgacttcatctacgcctcggcaccacggggtgtgggaccccagcccggagagaacagagggaaggagccgcgcccccacctggagctgaatcacatgacctagctgcaccccagcgcctgggcccgccccacgctctgtccacacccatgcgccccgggagcggggccatgcctccagccccccagctcgcccgacccatcctgttcgtgaataggtctcaggggttgggggagggactgccagatttggacactatatttttttctaaattcaacttgaagatgtgtatttcccctgaccttcaaaaaatgttccaaggtaagcctcgtaaaggtcatcccaccatcaccaaagcctccgtttttaacaacctccaacacgatccatttagaggccaaatgtcattctgcaggtgccttcccgatggattaaaggtgcttatgtttttgtgagttttaagtaaatatttgtattgtattgttataaatgttaagtgtgcctggctttcaatcatgcacggaaacccagtctcagtcccacggacagaatgggcgaggcatggattctggggttgcagtaccgttctgattagaaataggaagtctccccaccccagccctggccaagaacgtgcaataaattg

SEQ ID NO: 42929 - DNA, 956 bp, Homo Sapiens
  misc_feature (722)..(722): n is a, c, g, or t
  misc_feature (829)..(833): n is a, c, g, or t
  misc_feature (835)..(835): n is a, c, g, or t
  misc_feature (837)..(838): n is a, c, g, or t
  misc_feature (840)..(840): n is a, c, g, or t
  misc_feature (863)..(863): n is a, c, g, or t
  misc_feature (867)..(867): n is a, c, g, or t
  misc_feature (869)..(872): n is a, c, g, or t
  misc_feature (874)..(874): n is a, c, g, or t
gaagtccatgcaagcatagacatgcagtttgcttgcacacaccagcagagctaagactggagtctcctgtggcctaactttcaatgagggaaccggatgctgttcacactttgactggatggagatgcatttacaaaacagactggagaaggacttaatactcagatggattggaactatcatggtcactgctcctctcccctccccacaaaaggaaaaaaaagctggatttgattttttttttctggtcactcgagcacatctaagatcacccattaggttttatctgggacctgcagtttggctttgggattgatcatcttgtggattttattcctgacgattcccttgctgcctacccttttctctcctctggttctcaacctcaacgagttcaaatcagttgtcctttttagctcccgtggaactgttttgtatctgcctctttactagtctaccttagtgccatccaccagctttactctctgacacacacacgcacacacacacacaattttaacttgtttttttgtacataatgtacatactgtcaattttttattaaaagaaatatgctttgatgtgctagcataactgctctagcttcttgtgtaccatagtactgtggcttcagatttagtacctatgaacagatgtacaagacatttatttacctttttaccaaagggagttacccattgtagaacttttggtgaaaaacnttgtcttcccccttttgcccccaacctttttttttttttttttttttggaaattaaaataaaagcctcggttttcctaacttttaagggaaataaacttcccccccnnnnngnannancacttcacacacaaacaaaaaanaaanannnncncctctcccggagggtctttctcatttctccggggggggccgggagaaaaaaaagggggaaattggacacattgggccccacc

SEQ ID NO: 42930 - DNA, 813 bp, Homo Sapiens
  misc_feature (645)..(645): n is a, c, g, or t
  misc_feature (775)..(775): n is a, c, g, or t
  misc_feature (787)..(787): n is a, c, g, or t
actacctagaaagcagagtggaagctttcttaattaccatggaaaagtccatagaggacatgacagaagaggccttccaaaaacacattcaggcattagcaattcgtcgactagacaaaccaaagaagctatctgctgagtgtgctaaatactggggagaaatcatctcccagcaatataattttgacagagataacactgaggttgcatatttaaagacacttaccaaggaagatatcatcaaattctacaaggaaatgttggcagtagatgctccaaggagacataaggtatccgtccatgttcttgccagggaaatggattcttgtcctgttgttggagagttcccatgtcaaaatgacataaatttgtcacaagcaccagccttgccacaacctgaagtgattcagaacatgaccgaattcaagcgtggtctgccactgtttccccttgtgaaaccacatattaacttcatggctgcaaaactctgaagattccccatgcatgggaaagtgcaagtggatgcattcctgagtcttccagagcctaagaaaatcatcttggccactttaatagtttctgattcactattagagaaacaaacaaaaaattgtcaaatgtcattatgtagaaatattataaatncaaagtaaattacaaaatcttatagatgtagaatattttttaaatacatgcctcttaaatattttaaaatttttcttttgattctgggagaaatttccccattttacaatgctttaaaatggaatggatnttcctatagaanctttcctttcctattttgggaaaata

SEQ ID NO: 42931 - DNA, 599 bp, Homo Sapiens
agctctgcaaacaatccctttcataccacaaagccaagacgttccatggtatttgtgcaaaagagatgaagacttctcaatatgcttattttgctttgcataattggctctttttaagagcccaagaaagtgtttctaaaattgcttgcactgcccaatcccagtaatgctgctgcctgacagaaacacacacacagccacagttgccaaatcccgtactccttgccaccggcttcctagagcagcgtagacagctggtaaactgaagagcacaactatattcttatgaaggaatttgtacctttggggtattattttgtggcccgtgaccctcgttattgttacagctgagtgtatgtttttgttctgtggagaatgctatctggcattatggtaatatattattttaggtaatatttgtactttaacatgttgcataatatatgcttatgtagctttccaggactaacagataaatgtgtaatgaacaaagatatgttgtatgagtcgtcgtttctgtcagatttgtattgtttccaagggaaaagcttgggggaggactcagttcacaaaatgcaaaactcaacgatcagattcac

SEQ ID NO: 42932 - DNA, 635 bp, Homo Sapiens
  misc_feature (404)..(404): n is a, c, g, or t
  misc_feature (600)..(600): n is a, c, g, or t
ccaaccggtggctcatggtcaaaatcttcctcatcctcattgtcttcttcatcatctttgtggtcttccttgcttgaaccctctctactctgaggcactctgttggggtttgggaccctcctgggaaggcaagtggccagtgctgccactgagcctgtgcagggtacttgggagaaaggccctgtttccctggaactgctaagaatgaccactgcccctgatcccccaccccttgcctctggccaccctgtcctccccccaccaccctcaggcctatgaaacacacagggttctagatttgaactctgctgtgaagtgactggaagggagcagaggccagctgggggccagtgggggaggttgtttccactaggagatttttataaaccctctccagcctctcncaaaggaagcgttggcagcaaagggagatgatgcccttacccaccttcctgtgagtgaagagaggaagcagccccagggaccaattttcccaattgacctctttcttcctctttcaccatgtgaggcagggagccctgagcccttcagctgcctgcacaacccctgacattggctgctggtgactcaatctgccanatgtgctgcagctcgttttctcccaattacagcaa

SEQ ID NO: 42933 - DNA, 996 bp, Homo Sapiens
  misc_feature (820)..(820): n is a, c, g, or t
gaacccggcatcttgtcgcccagcatcgtgctcaccaaagctcaggaggctgatcgcggcgaggggcccggcaagcaggtgcccgcgccccggctgcgctccttcacgtgctcatcctctgccgagggcagggcggccggcggggacaagagccaagggaagcccaagaccccggtcagctcccaggccccggtgccggccaagaggcccatcaagccttccagatcggaaatcaaccagcagaccccgcccaccccgacgccgcggccgccgctgccagtcaagagcccggcggtgctgcacctccagcactccaagggccgcgactaccgcgacaacaccgagctcccgcatcacggcaagcaccggccggaggaggggccaccagggcctctaggcaggactgccatgcagtgaagccctcagtgagctgccactgagtcgggagcccagaggaacggcgtgaagccactggaccctctcccgggacctcctgctggctcctcctgcccagcttcctatgcaaggctttgtgttttcaggaaagggcctagcttctgtgtggcccacagagttcactgcctgtgagacttagcaccaagtgctgaggctggaagaaaaacgcacaccagacgggcaacaaacagtctgggtccccagctcgctcttggtacttgggaccccagtgcctcgttgagggcgccattctgaagaaaggaactgcagcgcccgattttgagggtggagatatagataataataatattaataataataatggccacatgggatcgaacactcatgatgtgccaagtgctgnggctaagtgctttacgaacattccgccctattcgggatgacctccggaagctgaaggctcctacccaccctaaaacccccgtggccccaaaccccacccgggtttaaaaaaccggggtggggggctcgcggaagggggtgtgaaaaacctttaacaaaggggcccggggtggcccc

SEQ ID NO: 42934 - DNA, 629 bp, Homo Sapiens
agtctgggtagcttgtttagggtacaagaagcctgttctgtccagcttcagtgacacaagctgctttagctaaagtcccgcgggttccggcatggctaggctgagagcagggatctacctggcttctcagttctttggttggaaggagcaggaaatcagctcctattctccagtggagagatctggcctcagcttgggctagagatgccaaggcctgtgccaggttccctgtgccctcctcgaggtgggcagccatcaccagccacagttaagccaagccccccaacatgtattccatcgtgctggtagaagagtctttgctgttgctcccgaaagccgtgctctccagcctggctgccagggagggtgggcctcttggttccaggctcttgaaatagtgcagccttttcttcctatctctgtggctttcagctctgcttccttggttattaggagaatagatgggtgatgtctttccttatgttgctttttcaacatagcagaattaatgtagggagctaaatccagtggtgtgtgtgaatgcagaagggaatgcaccccacattctcatgatggaagtctgcgtaaccaataaattgtgcctttctcaaaaaaaaaaaaaaaaaaac

SEQ ID NO: 42935 - DNA, 645 bp, Homo Sapiens
cttgaattttattttgttgttggtagtgtcttgatgtattttcagtggtagggtaaagaattatcaataatttatttaacagattttttttaaagttaacagcttttaaattctttttttaaagctatttatttggaagatttctggagaaatatctcactaatttagatgtaagaatgtgaaggtttttaaattatttttgatagtgtgtgtgttacatgtggggaagggccacagtaacagtaactagtctggactcttaaatttgatattcaggttaaagtcttaaacagggatttgatgcattaattattttaaattaagatgtatatgaaaatcattttattttatatatttcatgtgttttttataagctattagcttcgcttttgctaacatccaaggtgcatactgttatccaggttgattaccttatatcccaccttccctctgcactccccatcattttgtgatgacccagtaagactcttctctttgcagggaaacactttcgtagccaatgtgtaaggactccatgaaagatccctcatttctcatttcgtttgacattgtgattttcttctcaacattaaaaaaaataggcttttgcattttcatttctgctgatgatatctgggtcccaaa

SEQ ID NO: 42936 - DNA, 755 bp, Homo Sapiens
  misc_feature (641)..(641): n is a, c, g, or t
  misc_feature (718)..(718): n is a, c, g, or t
  misc_feature (725)..(749): n is a, c, g, or t
ccacgcgtccggagaacttccaaataataacagaaccaagaatggagatgaacaatctgattctagaaatatcttgaagttgtttgggagaagcagaggtttgttagtgataaaataaaaacctcagccttcttcaaggtctcagacccaactaagctaagcaaacagaagaagcaacagcgtcttgaacccttgtacaaccgctatgaggaacccaatgcctggagaatatctcgagctttccgacggcgctgaaaggcaagattgttcctttgcctctccagcagcagtagccagggcttggacttatcgatgacaggctggtcctgaggatacagctgtcccgtgactgactgtcttaactgagcattttctcaactcgactctcatttcttccctgctggtaaaatagaaacagggatttaaacctggctttggcaagagcctgcagcctccatcaccccaagtccttgggcccagttgggagctcatatctaacacagagacacattgcatcaacttcaagaaagggacaatttgtgcagctccaggatgggaaggtggagtgggtgagcatcttgtgcagggacatggtgagtgccctgatgccccagctagcaggagctactgtgctcatctanagtgtttgccccacttcccaccccgtctccagcccctgtactttggcttgacctcgtggaaatatttattttcttanggaaacnnnnnnnnnnnnnnnnnnnnnnnnnaaaaag

SEQ ID NO: 42937 - DNA, 716 bp, Homo Sapiens
  misc_feature (632)..(632): n is a, c, g, or t
aaattactaaaagatgcaattcaaagataggtcccagtttaacactgaattgcttgacttctgtggcttttctttttctggccacatttatttatttaagcaatttttgtatgccttgttatttcatttccatagagattatattgtatcagtgtttatgtaagctggaatcatcctcagttttttgctgataatttttcaaataaagatacatggataattgtaaaatacactaactcttagggtgttgtagtagctgaaacatggagatgcgtagctgtcatgctttttctgaatggacaggagaaacataagctacggagtattcacttctgaggatgcttttccggaaaaagaaaggctagaaaatactcgcacttcctcagaaccctctttcttgtaacgggtatcttttgttggtgtgttttgctcttacattacagatagactatcatatatgactttatgaataatttcagttattttgcttttgtataagctgtctgaagccttgctatgctgtataagttgtgtttgatggatcagtgtgagtataaaataaagcaaatcacttttcttttgtattatctatggatgccactatgaaagctgacattaagccactaaagagntttctatgaataagtgtaagtaaatgctttgatatatataaacctaaataaaaagattgtattgatacagagacattggagaag

SEQ ID NO: 42938 - DNA, 648 bp, Homo Sapiens
  misc_feature (552)..(552): n is a, c, g, or t
ttttctcttttcttttttgttttcatttcattggaagatctccaatggactgaacagctccagtcagcagcagttaccacaaactgtgaatctgggccccaccactcttccctgttaaccagttctgtcagcatccccctctccagcagcacttccatgaagttggttctgagactctggccgtgaacacccgtttcttcagtgatttgttttgggcttttggctcaaaaccccaggctcttgtttttgtctagactcttattctgtttcctgagcagcaggaggtagggaccactttgatgtcagacttctggtagctggacatgttctcgagatgggtggctgttcgcgacttttgtaccagagtgaaattgttagaaggagggtttctggctgtggttctaaatggagccccaggaagctgccctctccccagggtttgtgctcagtagagccctgtggatcacagtcttgaggtcctctagcaggggtgagggagagcagcgacttcagctgagtccctgccagtggttaagcaaacaatggtttcanaattcaaggtccccaaatggcagcattttatgttctgacctgtttgtgttatatagtggttttttttttcctctttggaactcttgtgttgttaat

SEQ ID NO: 42939 - DNA, 528 bp, Homo Sapiens
agcgggctgatttagactgctgcctttgctgctgacttgcagtgtgactcgggcccattgttcaatctctgtggccctgagacaccagggaaaatctccccccccacaggacatactagttccctggcaggcaagggcttccaactgaggcagtgcatgtgtggcagagagaggcaggaagctggcagtggcagcttctgtgtctagggaggggtgtggctccctccttccctgtctgggaggttggagggaagaatctaggccttagcttgccctcctgccacccttccccttgtagatactgccttaacactccctcctctctcagctgtggctgccacccagccaggtttctccgtgctcactaatttatttccaggaaggtgtgtggaagacatgagccgtgtataatattttttttaacattttcattgcagtattgaccatcatccttggttgtgtatcgtgtaacacaaataatgatattaaaagcatcaaacaaaaaaaaaaaaaaaactctccagcgct

SEQ ID NO: 42940 - DNA, 859 bp, Homo Sapiens
  misc_feature (791)..(791): n is a, c, g, or t
tcttcctgagttgaatgtccacgtggaatggggtcatgaattataaaagtccctgataaaagttttgtttactggggtgaacatctttccagtaaccaggtagtcctggtactcctttagttttaaaattaggagttaagagagaagaggtgataaacatagtagggaagggaatatcggattcatgcatcagtttatggtgaatccaaatcaatgtcttgaatcctttgaaaacaggcactgggacatcacaggcttcagtacctgaccagtattagttgcatatatcattgaacacacataccagagatgttttagaaatgtgagaaaaacatccttttggaccatttgaaataagaaagacaaacactaaacaatacaaccatgaaattgatcaccgggattgcaaatctaattgggaaaagagttgagcaaacagcttggactgtttggagttgttgccttactttttaatatgtatttataaagtattccagcaaaagaggatgtagcctctgggaaaaaacaaacatgttacagtgttttttgtagattctcgttctatatctcatcacagcgccagccctgtttttagccggaaaggattcaggataaacattattatgcattctgaattggatgcatattcctaactactgtatttgttaccaaaagtggttctacaaatgctactgaaaaaaatctggaaattcctaatgtcctgagtattaataataaagtttaaaaatgcttttatatcaaaggtgcatcgtgaccaaattgtttaaganaaaaaacaaaaaaaaacaaatctagggctggattttatatatatatatatatatatatatatatatat

SEQ ID NO: 42941 - DNA, 791 bp, Homo Sapiens
cggaaaccaccccaagcactggcaaagcaggggtccttgtaccatgagatggctattgagccgctggatgacatcgcagcggtgacagacatcctgacccagcgggagggcgcaaggctggagacacccccaccctggctggcaatgtttacagaccagcctgccctgcctaacccctgctcgcctgcctcagtggccccagccccagactggacccaccccctgccctgggggagaccccgaaccttttccctggatgctgtccccccagaccactcccctagggctcgctcggttgcccccctcccacctcagcgatccccacggaccagaggcctctgcagcaaaggccaacctcgcacttggctccagtcaccagtgtgagagagaaaggtgctggcataggatctgcccagaagagaaaatgacccatgcgcagttgggctctggatacggcgctgtctatagcaagttggccagtctggcctcctgttcctctgctggacctggggtaggctgcaggggtgggcagaagcccctcttaaattgtggttgccatggtaccgagggactcattcctggggctcgctgggacctccctaaacccttcctggaagaaaactggaaccaactctgccctacctccctgcactaaccagctttgaggatggcactgaagaacccttggagcaaacatacctcccttgtgactcccacatcaaccattaaagttatttaacagcagccttcacctggctcctgaggacagggtgcctctctctgcctggtct

SEQ ID NO: 42942 - DNA, 838 bp, Homo Sapiens
gctggtacggtccggaattcccgggatgacgccagcgccatggaggagtacgctcgggagccctgcccatggcgaattgtggatgattgcggtggagccttcactatgggtgtcatcggtggcggagtcttccaggccatcaagggtttccgcaatgcccctgttggaattcggcaccggttgagaggtagtgccaatgctgtgaggatccgagccccccagattggaggtagcttcgcagtgtgggggggcctgttctccaccattgactgtggcctggtgcggcttcggggcaaggaggatccctggaactctatcaccagtggagcattgaccggggctgtgctggctgcccgcagtggcccactggccatggtgggctcagcaatgatggggggcatcctgttggccctcattgagggcgttggcatcctcctcactcgctacacagcccagcagttccgaaatgcgcccccattcctggaggaccccagccagctgccccctaaggatggcaccccggccccaggctaccccagctatcagcagtaccactgaggaagccactgccaccatgggagctacttctcggttccctccccgatggtctacctcgaagggagggctggctcccagttagccctgggaccctccagagagggtttctactctgctccctagtcccagggtgggggtggggcaccccagctgccctgacagatgggtcccctttttctctctcagggcaccccagccccacactcacatgtacgaagttctcaccccagctcctttgtgtggcaccctgatgagtatttaaagcccgttttgaaatgcc

SEQ ID NO: 42943 - DNA, 920 bp, Homo Sapiens
  misc_feature (592)..(596): n is a, c, g, or t
  misc_feature (599)..(600): n is a, c, g, or t
  misc_feature (602)..(602): n is a, c, g, or t
  misc_feature (604)..(604): n is a, c, g, or t
  misc_feature (606)..(606): n is a, c, g, or t
  misc_feature (608)..(608): n is a, c, g, or t
  misc_feature (612)..(612): n is a, c, g, or t
taaaatgtgtcactgattttttagctcaaaatcatcactgttaatttccagtcaccccaaatatggttaaaagattttttttttaatcatgaagagaaaattagtagcatttctttctctccccattatttattggttttcctcactaatcttttttttttagtccaaaagccaaaaatatttatcttggttttacattttaatttccattcttaattgtaatttttttctttaaataaggaaaccaatataatctcatgtataaaaacttaaatattttacaagttacatatagcatcattctaaaataagaattttttttgttttctgtctgcttttttcttatgtctcttgttgagttttatattttcagtggttatttttgcttgtgttagatcattattaaaatatatccaatgtccctttgatacttgtgctctgctgagaatgtacagtttgcattaaacatcccaggtctcatccttcaggaattttgcagttcaatgagaagagggagacaaatataaagatgaggacagaagcatctctacagatgaaaattacataaataaaacattctccatcaacaacnnnnnaannananananaaanaaaaaaaaaaaaaaaaaaaaaaaaaaaaaaaaaaaaaaagggggggccgcctgtggggggtccctcaaggggccccaagagtgggcccaacccacgttttctggaaaataaggggccccaagagggcccccaaaatagaaaactaagaaaggggccgggcattttccccccctcttgacgggggaaaaacgggtaaaataggggaacttttggggaaagaaacccttaaaggccggggtgagggtacaaaaagggggaaaatatttggtacaagagaatttaaagggtgtttgggggaactttaaagg

SEQ ID NO: 42944 - DNA, 579 bp, Homo Sapiens
  misc_feature (556)..(556): n is a, c, g, or t
  misc_feature (571)..(572): n is a, c, g, or t
gtatgttcttcatagagagtgtttttcagattcttcattgggatattaaaatattagccaaatttctctctgttttatatatgtcagtttatttcagtttgtggtttctgcaaatttgtaactgcctctgttttaggagtataagtattacttccttgtggtctattgtgaagtaaaaagtagacccttgcatatactattcttgtttgtgttcatcttaatgtttttgtacagctaaatcaaatgtaatttatagagttagtttcatcaacctaatgaatgctagttaaatttgaattccttggaatttatcgtatattgtattcactgagattatgaagggacaaatgttaatcttttgtttccagaaaaagttgggctttcccaagcagttctattacccggttcagaattgcttcatccaaaaatcatctgatggtatagatggatcctagtccttttcattacctgatggtagaaataaaataattgattttaaattcctttgcttttcttgacttatagacgtggctttatactttaaggtttctagggngaaaaagatctttannaagtatt

SEQ ID NO: 42945 - DNA, 738 bp, Homo Sapiens
  misc_feature (718)..(718): n is a, c, g, or t
cagacagtttctcccaagcagcagatgaagaggaggaattgtctactgccacaaagaaactacacactcatggtgataaacaagacaaagtcaagcagaaagcgtttgtggagccgtattttaaaggtgatgaaagagagactagcttgcaaaattttcctcatattgaggtggttcggaaaaaagaggagagaagaaaactgcttgggcacacgtgtaaggaatgtgaaatttattatgcagatatgccagcagaagaaagagaaaagaaattggcttcctgctcaagacaccgattccgctacattccacccaacacaccagagaatttttgggaagttggttttccttccactcagacttgtatggaaagaggttatattaaggaagatcttgatccttgtcctcgtccaaaaagacgtcagccttacaacgcaatattttctccaaaaggcaaggagcagaagacatagacgttgaaacagaaacagaaggatgaaggacagttttttccttcttagttatttatagttaaagttggtactaaacattgatttttttgatcttctgtaaatggatttataaatcagttttctattgaaaatgtttgtgatattttgcttttgcacctttaaaacaataaggcgctttcattttgcactctaacttaagagtttttactttatgtagtgatacctaatacaattttgaaaatacnaaaaaaaaaaaaaaagggcg

SEQ ID NO: 42946 - DNA, 670 bp, Homo Sapiens
cgactttgatcagatgtaccccgtggccctggtcatgctccaggaggatgagctgctaagcaagatgagatttgccctcgttcctaaacttgtgaaggaagaagtgttctggaggaactacttttaccgcgtctccctgattaagcagtcagcccagctcacggccctggctgcccaacagcaggccgcagggaaggaggagaagagcaatggcagagagcaagatttgccgctggcagaggcagtacggcccaaaacgccacccgttgtaatcaaatctcagcttaaaactcaagaggatgaggaagaaatttctactagcccaggtgtttctgagtttgtcagtgatgccttcgatgcctgtaacctaaatcaggaagatctaaggaaagaaatggagcaactagtgcttgacaaaaagcaagaggagacagccgtactggaagaggattctgcagattgggaaaaagaactgcagcaggaacttcaagaatatgaagtggtgacagaatctgaaaaacgagatgaaaactgggataaggaaatagagaaaatgcttcaagaggaaaattagctgttcctgaaatagaagaataatccttaacagtctgcaaaacttgacattaaatcctagattgttgaccatttactgaaaaaaagtcacaaaaag

SEQ ID NO: 42947 - DNA, 615 bp, Homo Sapiens
  misc_feature (589)..(589): n is a, c, g, or t
  misc_feature (597)..(597): n is a, c, g, or t
  misc_feature (603)..(603): n is a, c, g, or t
ggattgattcagatgaaaaatggctctgtcggcagtgtgtttttgcaacaacaacaaagaggggtggtgcacttaagaaaggaccaaatgccaaagcattgcaagtcatgaagcagacattaccctatagtgtggcagaccttgaatgggatgcaggtcataaaaccaatgtccagcagtgttactgctattgtggaggccctggagactggtatttgaagatgctacagtgctgcaaatgtaagcagtggtttcatgaggcttgtgtgcaatgccttcaaaagccaatgctatttggagacagattttatacgtttatatgctctgtctgcagttctggaccagaatacctcaaacgtctaccattacagtgggtagatatagcacacctatgcctttacaacctaagtgttattcataagaagaaatactttgattctgaacttgagcttatgacatacattaatgaaaactgggatagattgcaccctgcagagctggcagacacaccaaaatctgaaagatatgagcatgttctggaggcattacatgattacaagaccatggaagtaagcaatggcaaaccccncctccccntaaaanacaaaaaaatgt

SEQ ID NO: 42948 - DNA, 961 bp, Homo Sapiens
  misc_feature (849)..(849): n is a, c, g, or t
catccaaacctatatctgattcaagggaagtaagcaatggcatagaaaaaaaaggaaagaaaaaatctgtaggtcgtccacctggcccatatacaagaaaaatgattcaaaaaactgctgagccacttttggataaggaatcaatttcagagaatcctactttggatttaccttgttctatagggagaactgagggaactgcacattcatccaatacctcagatgtggatttcacgggtgcttccagtgcaaaagaaactacctcgtctagcatttccaggcattatggattatctgactccagaaaaagaacgcgtacaggaagatcttggcctgctgcaataccacatttgcggagaagaagaggtcgtcttccaagaagagcactccagactcagaactcagaaattgtaaaagatgatgaaggcaaagaagattatcagtttgatgaactcaacacagagattctgaataacttagcagatcaggagttacaactcaatcatctaaagaactccattaccagttattttggtgctgcaggtagaatagcatgtggcgaaaaataccgagttttggcacgtcgggtgacacttgatggaaaggtgcagtatcttgtggaatgggaaggagcaactgcatcctgactgtacgactgaacattatgttcactgcactctgattttctgtaggtacagttcaaagccctaaaggagtctggcttttactatctttcttaaaaaaaaaaaaagtcaaaaaaaattcaaaaaggggatgatactagcccttaacatgtaacctgtcaatggtatggaaaattgtcctaaaaagagaatcttttaaaaatcncaacggagactttatttttttaaaccttagcaattgtaaaatggttcttaggataggaaattaaaaatgcttgcaaccccggccatgggggtaacaccttttttccaataat

SEQ ID NO: 42949 - DNA, 544 bp, Homo Sapiens
gtgagtgagtgtgggtgtgtgtggctgcacgtgtcactggggtggccgtgagtgtgtgctcacaggtacgcggtggtgtcgggttcctgggcctgaggggcctgaactgatctcacttggctccgaaagcctttgctgtgttccctgcagcccctggccccccagccttggggctctggctccccccggcggaattgggggactgtttcctgacatcctggacaagggaagcccactagaggctggaacaggacctctccagcctcctcaccagcaccgtgcccatctcaactggacttcccgccctccttctccaccttctagtgcccgtggccggggattcaaagccgccgttccccaggtccctgggctgggccctgacagggagccgcccccctccccatggtaaccaggaagcccgtttcatgttcagttgcttttgtagaggaagcaagggctgggatggggacagctgtcaatcacaagcccttaaataaagcagccagcgcacaaaaaaaaacaaaaccccaccaaaaaaaccccg

SEQ ID NO: 42950 - DNA, 844 bp, Homo Sapiens
ttctgaggtcttggcccccctggccaccgcaagggactctttgcttgtcagggcttgcaaaaaccaaccttcgagaaagaaaagggaactcttcacgttgaatgttgactttgtgtgtatgcgtgtgtgtgtgtgtgtgcacgcgcgcgtgtgcgtgtttacttcatggaattttgttttgtgaaattcccctccaatcgtgtcagaatttacctccatgccccagtcacactgttggttctgcgctctgaacctgggtgtagctcatttgaaggactctcttctgcgtttcctaacagttatttggtggtctcaagagttgaggttgtggagggttgggagaaactgaagttctatacatttccatagagtttacatcctgcagttaaaaggcagggagggctcagcccgggccccacagctccaggccatcccctacgggctgcccacagtgcccccttttctctagccgaatctttttcgaacagcccgggaaaggaaaacggattcacttgctgattttgttcacggcggaagcaccatgttccgttcctttttcaggttcagtttgttgtgtaaatggcggttttttctggtgtgagctttggtgatggtggcagggctcctttgaagagatggttccacctcgtggtctgaagaacaaaccagagaagagtctggtttggccagaggccccctccggcccacgtcaccctgagtacacccctctgattgctctgctgtcaagaagcacgtttccaccagctgtattcaacactacaatgcattttttaaactatatttgcatccaagacaataaagacaccttattttttttgaaaaa

SEQ ID NO: 42951 - DNA, 518 bp, Homo Sapiens
gcacgagcaaaatggagtctccttaccatggacaatacatgcaaagcaatatcttgttcaggttagtacccgcaaaacgggacatagtatgtgacaatctgcatcgatcatggactactaaatgcctttacatagaagggctctgatttgcacaatttgttgaaaaatcacaaacccatagaaaagtaagtaggctaagttggggaggctcaaaccattaagggttaaaaatacatcttaaacattggaaagctcttctagctgaatctgaaatattaccccttgtctagaaaaaggggggcagtcagaacagctgttccccactccgtggttctcaaaatcataaaccatggctactcttgggaaccacccggccatgtggtcgccaagtagagcaagccccctttctcttcccaatcacgtggctgagtgtggatgacttttattttaggagaagggcgattaacacttttgacagtattttgttttgccctgatttgggggattgttttgttttg

SEQ ID NO: 42952 - DNA, 898 bp, Homo Sapiens
  misc_feature (745)..(745): n is a, c, g, or t
  misc_feature (769)..(769): n is a, c, g, or t
  misc_feature (835)..(837): n is a, c, g, or t
  misc_feature (876)..(876): n is a, c, g, or t
  misc_feature (878)..(878): n is a, c, g, or t
  misc_feature (884)..(884): n is a, c, g, or t
ggacgcgtggggtatttggaagctacaggtcaacttcctgttaaaaaaggaaaagccaagaactaactttgcttactgtgagttgactgactctaattgaatctgcgtggttttgatactttgatggattccagtggaataaattcaggctgctgaaacaagaaattctgagcccaggaagcgggctcttctttcttcaaaagaagcccttcttgttcatattcaggagcttctgttatattcaaaggtaattctatgtctatctcaactctattgattggttttatagttcattgaaaatcctcaaataaaatataattattactgaaatatgtttaatatttaaggggaaaagagactaatttcagttatacttttaagcttagaatgtatgttcatttccaaattttgtatcataagagttttcaacatagagaaaagctgaaaaaatgcaaagaataaccacatactttccatctaccttcctttgttaacgggttgtttatcatataataatttgttttgtcatatttgctttcactgtctattatctgtttaagtctcataactctatttttagtttgctgaagacttgaaagtgaatcgcatatatcatgacacttcttggagtgtcattaatgggcaggcttttctgttgaagagtggattccgtatgttcttcatagagagtgtttttcagattcttcattgggatattaaaatattagccaaatttctctctgtnttatatatgtctgtttatttcagnttgtggtttctgcaaatttgtaactgcctctgttttaggaagtataagtattacttcccttgtggnnnctattgtgaagtaaaaaagtagaccttgcatataccaantncttggnttggggtcaaccct

SEQ ID NO: 42953 - DNA, 842 bp, Homo Sapiens
gccttaattagcattgtactctaatcaaaggactctttctaaaccatatttatagctttcttaacctacacatagtctatacatagatgcatattttacccccagctggctagagatttatttgttgtaaatgctgtatagatttggttttcctttctttacttaccctggtttggatttttttttttttttttttgaatggatttatgctgtcttagcaatatgacaataatcctctgtagcttgagctacccctcccctgctgtaacttacgtgacctgtgctgtcactgggcataggacagcggcatcacggttgcattcccattggactcatgcacctcccggatggtttttgtttttttcgggggttctttggggtttgtttgtttgcttcttttccagagtgtggaaagtctacagtgcagaaaggcttgaacctgccagctgatttgaaatactttcccctgcgcagggccgtatgcatcctgccaagctgcgttatattctgtactgtgtacaataaagaagtttgcttttcgtttaccaagcacccgaacctgcctctttcttgccctcattggtctaattttaaagcaggcaaaagccccctggctttctctccgcccccgccctagccctctcaacaatttagccttaccaatggacagtggcatcgagggtagttagggaactctgttacctggaaatagatgtgcacagctcctctttaactccagctaaaaatttaatccaaagaggtggaaaagtccaagagatcctcttcccccgccaatgggggaggctgagatccccctccatcccccttgagccccacccagc

SEQ ID NO: 42954 - DNA, 810 bp, Homo Sapiens
cgaaaaaacactcactttgtctctgcagcaaagagttgccccttctttctactgttgtttctctgtggactgggcaaggtggggtatttattcctcactagctgggttaccatcttcaggcacttttaacatctggcattcggaatggaaatgtaataatggacattagggagccctgcctttttctactggttcccccaatgtttgaaagaggcattaggctcctggtagccttttctgtgcattgctgtatacacacagacacacacatgtatgtttgttaccaagaactggtcagaccttgcgagtttatttgtaaacactggacagatggagttaaaaagagcttttgttgagatttggcatgaaggatatggtgctctatttgtaatagaaacttccaaggctcttccagctcccctttctcgccattctttagctgtagtcatgaatagtctccatgattttcaaaattgattccctttaaagtgcaaaatggtcaccttctaaaagatatattcatagttattaatgaccctattcccaccacaaattttaaagtgctcctaagcccataacttgcctgtttgaactatggtaatgggtggaagaggagttcaccagtttcaaagatcagactctgtatcaaaagtacctttgcccttaggaagagtgagtattggagtcatcttatctattactccaaacctccctttttatttcttgagcctggcttggaccttggcattccgtttgaattccttctaactggaacatttgtgttgtatctgtaacactggcactgaaata

SEQ ID NO: 42955 - DNA, 749 bp, Homo Sapiens
atgtattcttgaacctattatggctgtggaagttgtagctccaaatgaatttcagggacaagtaattgcaggaattaaccgacgccatggggtaatcactgggcaagatggagttgaggactattttacactgtatgcagatgtccctctaaatgatatgtttggttattccactgaacttaggtcatgcacagagggaaagggagaatacacaatggagtatagcaggtatcagccatgtttaccatccacacaagaagacgtcattaataagtatttggaagctacaggccaacttcctgttaaaaaaggacaagccaagaactaactttgcttactgtgagttgactgactctaattgaatctgcgtggttttgatactttgatggattccagtggaataaattcaggctgctgaaacaagaaattctgagcccaggaagcgggctcttctttcttcaaaagaagcccttcttgttcatattcaggagcttctgttatattcaaaggtaattctatgtctatctcaactctattgattggttttatagttcattgaaaatcctcaaataaaatataattattactgaaatatgtttaatatttaaggggcaaaagggactaatttcagttatacttttaagcttagaatgtatgttcatttccaaattttgtatcataagagttttcaacatagagaaaagtgaaaaaatgcaagaataccacatactttcatctacttcttgtta

SEQ ID NO: 42956 - DNA, 922 bp, Homo Sapiens
  misc_feature (765)..(765): n is a, c, g, or t
  misc_feature (873)..(873): n is a, c, g, or t
  misc_feature (921)..(921): n is a, c, g, or t
ttttaatcatgaacagttacatgatttataatttcactgattgagattactttgtaagtagctgttcagaagaataaaatatgactgttttagggactagaccatgtgcttttttaacacttatatatataatggtctatttgaagagctcacttcaacctaacagctagatgtctttacaaaccttaaaccaaaggagtaaaaaaaacaatggtaagcactgaagtataataagtaacctttggtacagcaggtttgctgcagtgtttttttctgtccacatgcaaattttggattctatcccagacccaggttttctagttcagaagactaaccagcttagtcagaagatggttccatggaagaaaaaggccaaggagtttgaagatttttcttctagacatctcaaaatgtggtactcataccatccacatcagaatcccttgtaggattttctaaaattacagattgttgagcctaccataggtcaaaaggactggaattttccttcttaacaagtatagtcatggcaccacgtaacattttggtcaatgacattgtataaagggtggtctcataagattataccatatttttactgtccttttctatgtctaaatatacaaatgttttaccattgtgttacagttgcctacagtatgattacagtaacattctgtcagtgctatagctgaagagtaataggctaggctatctgtatagcctaagtgtgtaacaggctatatacatatcatcagggtctgngtaagtatctctgtgatgtcatacagtgatgaaatcacccaaggacacatttctcagaacgtaccccatcatgaagtgacggactacagagatttctggaaagccctncaaaagtatgagatggtatggaatgtactggacctgtggattaaaagna

SEQ ID NO: 42957 - DNA, 763 bp, Homo Sapiens
cctgcacaattattagagtgaatgaaaaaccactttcctgctttccatgttataaattctaagcttaagataaaagtggttctttacatgactgaatcaattacaatttatgggctagagccaaataggttgaagacaatcatccaaacagatcaatggaatagaatttcattggaaatgtaaaacactttcccaacaatggtcatgactttcttctgtttttgagaagagtttcatatgctggaccacattttagcttttattgtttttttttcccatgtccaaaaagttaagcaacaagtggccacacttttacgtgactacaacctggagttctgcaaagaaggtaatatttacttggtctttgactaaagttatctccccattctatggttacattttattttggactatggggacttctaatacgtttggtaaagaagagagtataaagaaaattcttgtcaaatttcactcaaaagtaatttcatgagaaatcaatgatttaaagcattatccaaattaaattatcatttgcagcaaactgtacaacagcaggaaggatatggaatggaacatgaggtatatatctttgcctttataattttaacatcttatattgaagattctgaaaactatctttatttagaggaaaatctcaatcttcagtttttggcttctgtcaccagaatgataaagtgcaatagttgtaaatctacttgacactgtaataaaactgaactgactttcaaaaaaaaaaaaa

SEQ ID NO: 42958 - DNA, 739 bp, Homo Sapiens
agctgcaggcctggctgcaggcctgactactgcccacaccaacgaggtgatctagcagatacatggcaacgtgtgaactgcaacaacgcctggtgccccagcaccaaccttccaagtgtaaaaacaatgtgctgctgcttcacttccgccctccggttatcaagcaaaatgtctcttgtggcccatcttactggaagagagttccgggaaacatagcctcaccaaggtgacacattacaaagccaccctaccatgaatccgctcccaagggtctcactgctcacctgaggataactcaatataactatgttgctgaaaatgcaaagctgaagaccatggatttcatggtgattccagcaagtacagagattctatgaagcccacccagaaaaaacttgctggtcctggctatttttgtgtcatttattcaagtattgagaacctggcctgtggtaggcactgtacttaatactaggatacagaaatgcaaaagatacggcccatgcaattttattaaatgcatcaatatgtattacaaatggtgaatggatttccaactttatcatggaatttaatgctgaatatatagaattcagaaaattgttgggaggacagcccttttgtgaaccttgtttggggcacagtaggaattggaaataatttagtttctatctctaagctgttctattttaaaattatttttaaatttttattgtcccacttaaaaaaaaaaaaaaaa

SEQ ID NO: 42959 - DNA, 805 bp, Homo Sapiens
  misc_feature (15)..(15): n is a, c, g, or t
  misc_feature (17)..(17): n is a, c, g, or t
  misc_feature (766)..(766): n is a, c, g, or t
  misc_feature (770)..(770): n is a, c, g, or t
  misc_feature (774)..(783): n is a, c, g, or t
  misc_feature (785)..(786): n is a, c, g, or t
  misc_feature (788)..(788): n is a, c, g, or t
  misc_feature (790)..(792): n is a, c, g, or t
  misc_feature (794)..(795): n is a, c, g, or t
  misc_feature (801)..(801): n is a, c, g, or t
tggtagtcagaacgnanataagtaaaacaggttttactgtttagctgagttcagttaatacaaaatgtacataaaacgttagtcctttgagactgacatgattaatgatcagtgtggtgggaaatgatgtagttattgtacacaagcacttgcaaactctttatccctatttctttaaaacaaaataaggtgaaatacgaagtccttggtctgatataaagcccctattggattcttcggatgcgtaaaagaaattgcctgtttcagccagaagactggtgaaaacacatacatcagactatgttgtgagccaggttgattttttattttattatatgcaggtgagtgttgaaactgttaaaattccaatttgttttcattcagtattagtttagttctaaatatagcaaaccccatccaggtgctatcagatgaccagttactgcttagttaactaggtgtaaagttttacatatacattaatttcaatagtttattacaagttgtgtaaaatggactctagtttaataatgggggaaaaaagattaggttgctcctgaaactgactgtagagcatgtaaaatgattttactggattctgttcaactgtaatcaatgaaaaagatgtacgttgtagacaaagttgcagaattaaaaaaagaaatctgcttttaatttattctttttgtattaagaatttgtatagtatctttacattttgcaaaacagtgttgtcaacacttattaaagcattttcaaaatggangganccannnnnnnnnncnntntnnncnnttcccntttc

SEQ ID NO: 42960 - DNA, 622 bp, Homo Sapiens
tgtgatgaaatttataacatcaaagtagaaaaaaaggtgtctgtgctatttctgtacagctatagagatgactactacagaatcttattttaaccctaaagaactgtcgttaacctcattcaaacagacagaggcttatactggaataatggaatgttgtacattcatcataatttaaaattaaattctaagaagaggctgggtgcagtggctcacacctttaatcccagcactttgggaagccaaggcaggaagactgcttgaaaccaggagtttgagaccagcctgagcaacaaagcaagaccccatctctataaaaactaaaaaaattagttgggcatggtggcacatgcctgtagtcccagctactccagaggctgagatggatcatctgagcctcaggaggttgaggctgcagtgagctgtgactgcgccactgcactccagtctgggacaacagagcaagaccctgtcttaaaaaaaaaaagaaaaaaaaattttttttctaagaagctgtcctacaaagttgagctttgttagtttttcatgtgtaatatattataaatttatcttttgggatataataaatgctttcatataaaaaaaaaaaaaaaaaaatggc

SEQ ID NO: 42961 - DNA, 1067 bp, Homo Sapiens
  misc_feature (1067)..(1067): n is a, c, g, or t
gaacacaatccattacacggttcgggtatattcagcatgcagctttactttttcaaagattccttcaccatacaccttatcaaaacggattaatggaaagtggagtggtcagagtgctggaggatgtggaaatttccaagagactcacaaaaataaccccatctaccaattccatatagaaaagactgggccgttactgattgagctacgaggaccaaggcaatatagcgttggatttgaggttgtaacagtttctactctaggagatcctggtccccatggctttctgaggaaatctagtggtgactataggtgtgggttttgctacctggaattagaaaatataccttctgggatcttcaatatcattcctagtacctttttgcctaaacaagaaggaccttttttcttggactttaatagtattatccccatcaagatcacacaacttcagtgatggagaaatctcaagttactggcttttatacttaccaaacatcagttcttcaaataaggacgcaaatcttcaggacagtaagcagaacaatcagaatggaattaaatctctaaaaacgtgttacagtggaatctggtgcttgtcagggtgtctggtaagaactgtatatagtcagaattacctaaatcactagaggtaccgttactggtttggtatatcgaagttgggtggcatttaagggccattcggttaaaagtgcctatgatctaatttgaatccagcatcctgggagatgacttgtaagaagatcaaggagactgtgaccgctgtgaaaaaaaggttaaacctcaaggagaaagggaagtatatacacgaaaatataccaggaggccaacttgagagcggagaggaaaacagccgagcaaacacaactagaagaaaataaccagtaagcgcgagaataagaacagtagtgagagcaaaaatagcagagacgatagataaagcataacgaaactacaacaagacaagaagaagtagtcacaagtcacatcagtaacagacaatgtagctgtctacactataagttactactacatgtatcatgagn

SEQ ID NO: 42962 - DNA, 540 bp, Homo Sapiens
  misc_feature (504)..(504): n is a, c, g, or t
  misc_feature (508)..(508): n is a, c, g, or t
  misc_feature (532)..(533): n is a, c, g, or t
gggattttgtggtggatgcaacccgcaagggtaacaaaattcgttttgcaaatcattcggtaaatccaaactgctatgcaaaagttatgatggttaacggtgatcacaggataggtatttttgccaagagagccatccagactggcgaagagctgttttttgattacagatacagccaggctgatgccctgaagtatgtcggcatcgaaagagaaatggaaatcccttgacatctgctacctcctccccctcctctgaaacagctgccttagcttcaggaacctcgagtactgtgggcaatttagaaaaagaacatgcagtttgaaattctgaatttgcaaagtactgtaagaataatttatagtaatgagtttaaaaatcaactttttattgccttctcaccagctgcaaagtgttttgtaccagtgaatttttgcaataatgcagtatggtacatttttcaactttgaataaagaatacttgaacttgtccttgttgaatcngaanaaaaaaaaaaaaaaaaaaaaaaannaccttgt

SEQ ID NO: 42963 - DNA, 500 bp, Homo Sapiens
gttgagaaaggaagttctcgacaccagaaatgcatcggaggaccacaatcagttctatgctgccaaagattaaaaataaataaaaacataaaaaattaagaggggccaagaggaagacattctttctgcaaggaaatttcttttaaattctgaactgctactacacacaagtgaaagtcaaccctatgtaaactggtgtcctctctctagccctctcccttactggcccacttctctctccgtagagagcctgaaaaactgccccaatgccacggtaaaggcgaggaagtcttggctggcgttgctgactcacagtcgccatccatctggacacaaagagagacctgtgggagtcgtagagggtactgttagccccggtccatgcagggggttcagccgagcccaagactcaaagctgctttcctttcaggatttgtagtaacgtaaggtgataatggccaaaagtggttctctctcattaaaccaaccagtaaaagcgt

SEQ ID NO: 42964 - DNA, 826 bp, Homo Sapiens
agctacgccgctgccgctgtcactatggcccattacaaagccgccgactcgaagcgtgagcagttccggaggtacttggagaagtcgggggtgctggacacgctgaccaaggtgttggtagccttatatgaagaaccagagaaacctaacagtgctttggattttttaaagcatcacttaggagctgctactccagaaaatccagaaatagagctgcttcgcctagaactggccgaaatgaaagagaagtatgaagctattgtagaagaaaataaaaaactgaaagcaaagcttgctcagtatgaaccacctcaggaggagaagcgtgctgaataggattcttctcagtttgaaagacaatgaaaaatggttttgtatgacttgaatagtttgtatagtatataatcttttctgaacagatgctatagaactcttttaatatgtttaattcacctatcacactctgttaaaaacacatagaatcatcaataaaaactcaatataactttctttgggtcttaaagcaggagaatccaaagtaaatcctgaacaaaacctaaacacagccatctaactcattaccttaaaagacattctgtttattagtctgattaggaatgatggcactggttgtattttagccaagacagtttagcatggagctattccttggtgcagttcaggatatgaacacaggtacagtcattctttgaaggtgacactgttctgtatattccctataggcagctggagagatctgtgtgacacaagatgcttttgtacgggttcccatgaatcttctgctcttgtttgtgtgacatggaac

SEQ ID NO: 42965 - DNA, 430 bp, Homo Sapiens
attcttctgggtgaaaaagcttttgtttgtgttcttattttaaataatcggagtcaatttattaaaatgttcttgaaagtactattcccaggattttaatgcacaaaccatattgtgacaagagatgagcctctgtactgtaaataagaaatgaagtagagaaatgttaaatattttatgagtttagaatatagtaaataaaaggtgatgtaaatgaatgctgcacaaacggtgttcatgatacttttagtagtactttaggaaaaactacacattctcagaagctcttgatgtctctaatgaagggggggaatgctgttaatgagaacagtcataaattttttagcatataattacaagaacagcctgtggatatgatcacttaaatgattttgtggtgattcgtgccattgctttttttatttaaaga

SEQ ID NO: 42966 - DNA, 575 bp, Homo Sapiens
gcatgaagaaagtttgccatttagccctaattgagctgactgccctctatgatgtattgggtattgagctgaaacaacaaaaagctgtgaaaatcaaaacaaaagattctggtcttttttgcgttccattgacagcgctattagaacaagatcagaggaaagtaccaggaatgcgaatacccttgatctttcaaaaactgatttctcgaattgaagagagaggtttggaaacagaaggcctcttacggatccctggagctgccattagaatcaagaatctttgccaagaactagaagcaaagttttatgaagggacttttaattgggaaagtgtcaaacagcatgatgccgccagcctgctgaagctcttcattcgggagttgccccagccactgctcagtgtggagtatctcaaagcctttcaggctgtccagaatcttccaaccaagaagcagcaactacaggctttgaaccttcttgtcatcctcctacctgatgcaaacagggacacactgaaggcccttcttgaatttctccaaagagtaactagatcataccacaaaaaacaaaaaaaa

SEQ ID NO: 42967 - DNA, 591 bp, Homo Sapiens
ccagtgtcctgagccccaggagagggggctggtgggtgcctaggcctgggcagtggatggccgtgaatgggtgcccacagtgtcaggcactgggcatgaggggttcctcccctccagctccctgtgcccccagggtcctgggaggagagacactggtggggataggccagccgcgcatcagactgtgaaccccacgaaggagcccattgtggcctaagaggctgccctcctgtgctcagccctgaggacagatgcctccttcctcttttccttcccaaagcaagcaagaggccgtggctgctgtgggaaatggtactgtacagctggctctacttccccatggccctgagcgagtggagtctgccacccaggatccccaaggcacttgagggggaaggattctgctggcctctgcgagtggtttcttgtgcactggcaccaagtgcgggtccggcagcttctgccccctgcagaaccggagagccagctaaggggtggggctgcgggggttccgtgtccacccccatacatttatttctgtaaataatgtgcactgaataaattgtacagccggcaaaaaaaaaaaaaaaa

SEQ ID NO: 42968 - DNA, 695 bp, Homo Sapiens
ttttttttttttttttttaacctggacatgcattaaagggtctattagctttctttccgtctgtctcaacagctgagatggggccgccaaggagtgccttccttttgctccctcctagctgggagtgacgggtgggagtgtgtgtgcccaggtgggggtgtctcctggctgggaaggagggaaagggagggagagttttgcgggggttggcagtggagagcaggctggagaggagatggctaatagctgtttaatggaaacctgctgggctggagggagttaggctgaatttcccgacttcctctgccagttattgacacagctctctttgtaagagaggaaagaaactaaacccacccaagggatgatgtcagggggagaggtggagggcagatgtcctgggcaaaccgggcccctctgcccacacacctcacttgatccttttgccaaacttgtcaaactcaggggaactggcttcccagttgcccctttgccatattccaagtccccctcagacttcatgtctctgctcatcagcactgtcccaggatcctggagagggagaacccctggccccaggggaaagaggggggggtctcccgtttcctgtgcctgcaccagccctgcccccattgcgtctgcacacccctgcgtgtaactgcattccaaccactaataaagtgcctattgtacag

SEQ ID NO: 42969 - DNA, 997 bp, Homo Sapiens
tgtgtccagagtgaatgtgatatgatgtttcagaaatgaaggcagcagagcttcaaatattctacctgtacctgtcccctacttcaaccacagaagaaatgtttaaagataatttattctatagagtgcattcttgcactctataggtgacagaaaaacaaactgtgctttaaataccaaacaagtaaatcagaaagcttattttctatttaaaatatatctaagacacacttatataaaaagaaaacagaccctcctaacatgtaacattaccgttcgtggcaattgttctcaacctttcactctccttttgaccttagcattaagctcctttgctcacttctgagctctcagttacagttcttgaggtggcatcctaaccaatttgcactatctttcaggtgaggcgctggatatttaccagataattgaactcaccaaaggctccttggaaaaacgaagccagcctgggccatagcactgcctgggggctctgtatttgctcccgtggagcttcatcggggtggtgcaggctcccaaactcaggctttcagctgtgctttttgcaaaagggcttgcctaaggccagccatttttcagtagcaggacctgccaagaagattccttctaactgaaggtgcagttgaattcagtgggttcagaaccaagatgccaacatcggtgtggactacaggacaaggggcattgttgcttgttgggtaaaaatgaagcagaagccccaaagttcacattaactcaggcatttcatttattttttccttttcttcttggctggttctttgttctgtcccccatgctcttattcagttcccttggtcttcttagaaaggtggatgagaaatttttcatactgttctatggcaaagatgaggttagggattggcttggtttcccgaagaactctggccatggctgtggcaacggcagcaggtttctcctttttctctcccgtatagttcagtctcttactcttatt

SEQ ID NO: 42970 - DNA, 963 bp, Homo Sapiens
tctagcgaggtgacagcgtagaaccaaaaaggaagtaaaggtcatggcttagctgaaggaaatgctccagaaattggactgtgtaaaccatcagtacaataatacgctgtgtatgtatgtgtatataaaatgagaattatggcataattggagcatttgcattaatcaacaaactcacattgagacaaaacttagttttacagctgtcttgattaaagccaagtgttccatgttgctgtgaagaatagcctctttcaaatactttggaaagtagttacttggaaacttgtaaaggtattacatttttatatttaaacacctatagagatcttcaattccttgagtctgagcttgtgggtggaattctaaatttgtatcataatctgtcttttgtgaaacattttgaaaatatgtatatataatattgtatatgcaaattgtgttgtttcacttgtaaagggaaaaggcttatttttctttatatttctgataacttgttttgcatatgaccagcactgactgaaaggcatgtgtagctgcaaacactgttgctttttttgtgaaatgaaaataaaagtatttatattacaaaaaaaaaaaaaactcttcctcgctggatccgggcattaaggcctgaatccttccaagggggggcccgggaaccaactttttggtttccttttagtgaagggttaaatttccaaaccttgggcggaaacccacgggcccaaagcctgttttccccgggggtgaaaaattggcttattcgcgtctccacaaatttcccaccaccacactctcaactgataaccggtgaaaagcccttaacaagtgggggagaaaaagatccgtggggggggtgggccccttatacaggtgggggtggggagggccttcataaaccctccccccccacatgtttaaaatattggtcccacaatatgttcagcccgcccccccccc

SEQ ID NO: 42971 - DNA, 566 bp, Homo Sapiens
  misc_feature (502)..(502): n is a, c, g, or t
agtaagtctgccctttgccatactgaacagctgtggaccccgattggtgagggctctgcatatgcctgtatgaaggagatacaggtgtgtgtgcacatgccggtatgaagaagacacaggcatgtgcttctcagttttgctaacagtgggagctcaacggggcagagggaggaaggtccatgatgctcagccacatactgtagagagaggcaatttaatgttaaatgacgcaccatcctccctcccacccttctcccagtcaactttttttctttttctagaactactaattatctctcaaggctgaaaaattaattgccttaggtggagaacttaattcctagtatccaccaaacttaactccgtatctccatatggtgtctccatatctactgtgtgagctacttaactgacgccctcttcctccaactgaaggatcgcccaacgtttttggattatagaattattatttcctgctttctttctttgggacttttgaatntctttggtttcgtttttaagaagtaacccaacatttcctacaacactaaataaaatggtactta

SEQ ID NO: 42972 - DNA, 627 bp, Homo Sapiens
agagatgacagaagacgagttggtggtgctgcagcagatgttctttggcatcatcatctgtgcactggccacgctggctgctaagggcgacttggtgttcaccgccatcttcattggggctgtggcggccatgactggctactggttgtcagagcgcagtgaccgtgtgctggagggcttcatcaagggcagataatcgcggccaccacctgtaggacctcctcccacccacgctgcccccagagcttgggctgccctcctgctggacactcaggacagcttggtttatttttgagagtggggtaagcacccctacctgccttacagagcagcccaggtacccaggcccgggcagacaaggcccctggggtaaaaagtagccctgaaggtggataccatgagctcttcacctggcggggactggcaggcttcacaatgtgtgaatttcaaaagtttttccttaatggtggctgctagagctttggcccctgcttaggattaggtggtcctcacaggggtggggccatcacagctccctcctgccagctgcttgctgccagttcctgtcctgtgttcaccacattcccaacaccccattgcacttattttattcattcttaggaaatc

SEQ ID NO: 42973 - DNA, 1083 bp, Homo Sapiens
  misc_feature (1010)..(1010): n is a, c, g, or t
  misc_feature (1048)..(1048): n is a, c, g, or t
  misc_feature (1062)..(1062): n is a, c, g, or t
tcaccttttgcttggttatttcaaccatgctgctatatataatcaggtgtggcacagtttgtcagtttgattataggtgtgagtggatagaaatcattacactgtgctgttaacgatccttgtctgcttgctgttacctactttttacaggcatcataataaaagctagactatttctttggggggaaagagacttatttaatgtaatttaaaaaacttttccaatagaaaatgaaatattattgaaaataatatctattttttagctttcagcaattgatggtgctttgttgtggtgtctgctggaagtctactgccattatagggaaccttgcttgttagcttctctagatctctattctaaacaatctgttagtgatgataaattctgtaggagggtctattctgagccgttaacttcctgtaaggggaaaatgggtgggttaccagaaaataccattgaagcagggtgggctgtggggtggaaagttggggtatttgtcttggaaaataaaaactaccaaaacacttttgtaccccaactgaatttttttaaaaaataaacccctttttttaaagaaggttgaaaaaaaaaaaaaaaaaggggcggccccctcctaaaaagaatccccctccgagggggccccaagcttttacccgtacccccagcttttcccttgtaaaaaaaagggggcccccctacaagaggcaggttccccatttaaacacccctaggccaccccggccccgacactccttttcaacccccccccatgcggcaccggggcgaaaaaaattcgcctcacccctgggagacttgctctttatccacaagccaactcctttactcctaactcatgggggcaggtcaaccaccaacacagtggcaacacactactcaccctctcatcgttggatctcaaaaaaaatctcccccacggcgccaaactttaaactcctcttctttaccaataactacacaatatattcaacactttacaaaaactccntgatcctcacttcctcccctattcccacccacttcacnccccaccaccactntacctcgatatcaagccagcc

SEQ ID NO: 42974 - DNA, 467 bp, Homo Sapiens
  misc_feature (456)..(456): n is a, c, g, or t
cccgggctgcaggattcggcacgagaaaggaaataagtcaaaaaattaatacaccaaggatatcggcaccattacacaaaatgccattaagtgaagtttttggttgtattagtcataacagttgagtgcagaaatctctgcttctaaaattatttgtagagattacaggaaacaaatgcttttaagtaagtttttctcaaattttgtttcagttctaggtcccttgtcacagcttggtttttagactttttatgtatatgtttatgtacagtatattactcttgacagtttgaatttcttcacctaaagataattctctgaaagtactgtttcttcattctattgcggtatatgagaattcctgggtgcatcttattctgctgtttgagagaaaaatttggtgcattgaacacttggatcatttttaataaaaattaatttccattttccctttcngggtaaaataa

SEQ ID NO: 42975 - DNA, 770 bp, Homo Sapiens
gggatttctaaacttttgcgaaagtgggtcattttttgtttgactataatagcaggaagaattatagcaatctgtcattttacctgaaacagacaagcctatgtattatgaatactttcaagcttccctttggaatatacaagacatgcgtttggagttacctttgtttttctatcgtaaatttagattctggaattggggtttggtggtgcaatgtgttgctcacaagtggccagaactcctattcctaaaaggattttgagatggaggaacacatatttaattcccctttatgccttggttcttgctcctctttccacgttggataacaattttttggttgttttgtttaagttggtgctctgaagcttaatctcagtaccctttactctgaattgtcaaattttgataaaacgtgccattttctttggtaagagaaagcaggtcttaatgtctgccagaacacaatttatatgccttattggcttcattaaacttttagaaaactttagcatttgttacttttttccattgcatttactttcaaatgcacctaatgaattcgtcacccagtcgcaacttttcccttctctgtcccattgctttctcctttccccgacgcacagaataaacatgaagctcagcagtagaagcgtaatgatttccctcaggaaaaacttctgacagctaggtttttcaagggtttcccctgtgctagctgagatgcaaaacaaatcctggaaggattgcataccctgggtgggaatttc

SEQ ID NO: 42976 - DNA, 1062 bp, Homo Sapiens
aaaagacttaatgaaattgttgatgcggcaaatgctgttatttctcatatagatcaaacagccctagcagtttatattgcaatgaagactgatcccaggcctgatgcagctactataaaaaatgacatggacaaacaaaaatccaccctcgtagatgccctttgtaggaaaggttgtgccctggcagaccatcttcttcacacccaggctcaagacggagccatttccactgatgcagaaggaaaggaggaggaaggagaaagtcctttggattctctggcagaaacattatgggaaactactaaatggactgatctctttgacaataaggttttgacatttgcatataaacatgcattagtaaataaaatgtatgggagaggccttaaatttgcaactaaacttgtggaagaaaaaccaacaaaagaaaactggaaaaattgtattcaactgatgaagttacttggatggacccattgtgcatcttttactgaaaactggctccccatcatgtatcctcccgattattgcgtattctaaaataggaaacaagactttaaattttaaaaaaggaagttttatagtgaatggatataaaaacaaatttgtggcatatttagtctaatgcatgttttcatccactatccagtactgattattaaaatgacatgtatttatcagaaaaaaaaaagaaaaaaaaggcaggaccgctcaaaaggaatacccgcaaggggcccaaagataaagagcatccaagacataactggtacaaaggtggaccacaataggacagagcaataaaaaggcagagcaaggacgtcgaaaacaaagcagtgacagggagaaaaatggacagcactgggaaaacactgggagaacaggaacacaacacaccggagagcggacacaaaatggggcaagaacaaccaccggaacatcaaggcccacacggaaatatcaaacataaagaggagagcaaagcagaagacacaacagcgatagcatacaggagaaagttggacaacggacacatagcggagaaatcttccacggagcgtaata

SEQ ID NO: 42977 - DNA, 757 bp, Homo Sapiens
agagaggttcattctgacaagctgcactggatggtgtgcccgtctgcagaggcacaagatccctttccaactgtgggacccaactcggtcctgtcgcctcagagacttgtgctggagaccctctgtaaactcagtatccaggacaataatgtggacctgatcttggccactcctccatttagtcgtcaggagaaattctatgctacattagttaggtacgttggggatcgcaaaaacccagtctgtcgagaaatgtccatggcgcttttatcgaaccttgcccaaggggacgcactagcagcaagggccatagctgtgcagaaaggaagcatggaaacttgataagcttcctagaggatggggtcacgatggcccagtaccagcagagccagcacaacctcatgcacatgcagcccccgcccctggaaccacctagcgtagacatgatgtgcagggcggccaaggctttgctagccatggccagagtggacgaaaaccgctcggaattccttttgcacgagggccggtgctggatatctcgatatcagctgtcctgaactctctggttgcatctgtcatctgtgatgtactgtttcagattgggcagttatgacataagtgagaaggcaagcatgtgtgagtgaaagattagagggtcacatataactggctgttttctgttcttgtttatccagcgtaggaagaaggaaaagaaaatctttgctcctctgccccattcactatttaccaattggga

SEQ ID NO: 42978 - DNA, 591 bp, Homo Sapiens
ctttttttttttttttttttttttttttttttaaaaagcttcaatattcacttttattatttataaaaaaaaattaaggtaccagagtgcatatggggtactgtgatcttggttttgcaaatttattcatgtgttttacattatttcaattttaataaacatatcatatgtgtatctttacaatacctgataaagattcagctgtctggcacttacacatgtattcatagagttcattctgatgctctgaacctcaagaggatgtgaaaatgacttgcctgtaattaccccaagatgaaaatttattgaagcagttatgctccagcaactgccactcatttgggctggttctactttttccccttaattgaatgtaaacatttgccaaaaaaaaaaaaaaaaaaaattctggaaatgaagttctgttagtttttagtccaataaataattttagctacgcttaatgtagcttttttaaggccttcatacaattgaaaaaaattaaagttgagcacgttaaaaccctgttcatttataaaataaaaaatagtactttataggtttgcagttaaaagttaccttccaaaacct

SEQ ID NO: 42979 - DNA, 580 bp, Homo Sapiens
gctaccctcacatccccttggagcacagccttcctgaaatgccctcaccccatgcctttgccattgtgtgctctcagatttcttccactgtttgacaccctctttagagggctgctcttttttttccagagataatcctagccatcctctccactcccacgggtggggacaatggccacttactacctgtgcactttgccactcgggacacctggatggtttctcttaggactttgcccacctccttctcatggcacttgctgtggaaaatgcctggctggcctcgtggggcctgtctcacttttccaggagacatgacccactaacgtggcaactttaacccaaaggcccctcagacatgttacagcaaatctggagccacagacaggttccctccattggcagcccattgtgtttgaaattccatgtcgggtttacttggaatgaaagatacttgaattattgtgcgcctgtgagcgcccagcttctgtttcatagtcttaacaggtggccattgtcgtgaaacgagtgatgcctgaagatctcagtgatgtttgaaccttctgtgtaactttttatt

SEQ ID NO: 42980 - DNA, 750 bp, Homo Sapiens
agctcatagcactttaatttggcaagccatttttcctgttttattataaatctatattagatgtttgaatatggtttgaaatatttcactaccgtgctgaaaaaggttggttgatagcagcttggagtgctaactggaagatcaaaatcatgtctcttgctgataacctaagagcattaagctctgagtccagtgaggtcatagcagtgtatgctccttgcccttacggagtgtctgtttttagaaatttagattttaaaaggcgtgggacatacgaccaggccctatagccacataaatataaatttcatagaaaaagaataaaagcggagatatattttttgacacagaggcacccaaagaaatacaaacattgcctagctgctgccatttctgtaactgcccagaagggtgacagatttctgaaggggaaaggattcagatatgaccttttctttagtcccaaccactagttttaacaaatgtgaattattgaaatgtgaagggacaaaaagaatcatacatttaaactgtcttgttcagcataccaatattgtattgttacaaatcatcatttctaaatctggattgattctggtgtgtgtttttgactgtttctaaagtaagtgtgtattaaaagtctcctttttaaaaagatcatattttttaaataaagcatttttggtagaaagtgctcaaaaaaaaaaaagaaaaaaaattttgggggcgggggccgaaaaatttttaaac

SEQ ID NO: 42981 - DNA, 641 bp, Homo Sapiens
  misc_feature (541)..(541): n is a, c, g, or t
tctgtattggattttaccagcttgacttttactgctcagatgctttctttcccccccttagacgctgtaattctcttgggaagagtaactattcttaaggtttttacagatacccaccttagttgtaaattggatagtttatatttctgggactttttaaatgaaaatgtggaatgttaagttacaaaagacttttcatcagaaaatttcaaacaaagtaaacatggcgttttatagtcctctaaaatctaggtgctcccacccaccaaaggcatatcctgcaaagggctgtgaactatcttggtgaactgtcttgggtcccctttccatgtatgttttcttgtcactgaaaacaaacaacgctgagtttatcaagaaaatttaaattgggggatcataataattccaaccaagtgacaactctgacatcaaggttattaggagctgtacatccaattcaagttttatttgctgctattctgggagaataaacttgtatatggagaataaactaataaacttgtatcgaggaaatccatanagttattaattagcctgaaaaatatttcaggtaatggggtggattggcctgctttgacttttagccaccaacagagatctttgcaaccttggtcctagct

SEQ ID NO: 42982 - DNA, 760 bp, Homo Sapiens
  misc_feature (221)..(221): n is a, c, g, or t
atgcacaccatcaaatagtttctgtactttttattgggtaaaaatggaattgaacagcaacctcaacataagattttttttctagtagcctcccactgattaaagaagcaagtttgaggtttcatccttcaaaagggggttccgagagagcaccgtagggcttttctcaaatagaaaagccagattttgaaaaaattttaaagataaaataggacatattntgcagatatatatatatatatacacaaacacatctccaggtatagagaaccatccagatgttcacttttgaaaatatctaatgatgcaaagttttattcttgaacttggacactgatgccatcaaacaattaacaaatatatttaagtactaaaggtgattttttttttaaagactttttcaaattgtcaaatgatttaatgcagatgaacatatttctattttaagtaacgggaatctgtaagaatgtgtgcttgagatatggttaacttttctcttttgtgggttttgacttagatggacaccatgagatgttaatattcatacgtgtcataacatagaatgatgaagaaaaacacaacaaaaaaaaaaaaaaaaaaaaaaaaaaaaaataatcataaaaatctatcctatagaatagatgattggaaactgtgctgtagagtgaagaaccacagcaaacgactgagcccggaaacgactgtacctaagcaattagagataactagacggacttgagcgaggggggaaattggtctt

SEQ ID NO: 42983 - DNA, 983 bp, Homo Sapiens
aagatccatttgcctttctgggagcagaaacagccattgcggccccaggaggggaactgagtcacgctggggctctctgagactctttagagcagctttgggatcccaccctggggacccccacgattggccacctgtagccatctgcacacacctccgagacagtccagtgtcacctctctcagagcatctggctgtttagcagaactcattctatccccaatcagctccttttccgttctgttctgctgggagttctagaaccacttcctgctacaggaggggtctcatgtcctgctggcttccagcttcaggcaccagcatccaccttggctctgccagtggatcccctgcggtcaggctgggcagccccagagagaggatgtggaaagcactttttggctgacttcatctggggttggcaacaggacagagttcacaggaggccagtgggcgggccatgagggacagggtcttttttcatttcttcctcagctggttactcagggttcatctgtccatggcctttctaattacactgttgagttgaagccacaaaaaaacaaagacacaaacaacacgggagggcgcgacaaaagaattccccacaggggggcgccaaaagataacgtatacaccagaattatctgtgtaaaaagaggggtcccataatagaggagacaatatatagagataggcagtaggacggcagtttcataaacgggtgagacgtggacaaatgcggactgggggactttggtgaaaagagagaacacataatattcgtgcgagagcggagaacatatctgtgggacaaaagatctcttgacagagaattttagggacccggcaggggaagatttcgctctttagagcgggcatatcgtgtgttgtcaagaaggacatatgtttggcgagtagtgaaaaattgtataaagaagagaattattatgcaaacttttcgggaagtagatagtgaaaaa

SEQ ID NO: 42984 - DNA, 571 bp, Homo Sapiens
tacatttaagataaaattagcttgtgctaagtgttttaaaaacattgtttactgttaaaggggaattgcacattatatttaactgggattgctccctccctcagttctttaaaaaacaagagtcaaggctcacaccaacttgtaggctgtgggagctttgccataggtagatacaatgtagaagtatacttttttaaagcatgaagaagacaaggaacttcattataatgtaccaggtagaggacattattattcaaaggattatgcacagctcagtgaagatgaagttacaatttttctcgcagctttgttgctattattttcttctgcataaatgtatgctcatttcattatgtgccttgctccctgattgtgcaaagctatatatatatatatatatatatagatagatagatagatatatgagagagatatattcagtactactgaggatgtttttctgaggatgtttttgttctgctggattaagttattttccaagttactcttgccagttatgtcagtaaactattgtaatggcttagcacactagtcgtacagtcagtgtaaa

SEQ ID NO: 42985 - DNA, 706 bp, Homo Sapiens
ggatccggagccggagcacagtcccgttctgttagtaggtctcccgtgcctgagaagagccagaaacgtggttcttcaagtagatctaagtctccagcatctgtggatcgccagaggtcccggtcccgatcaaggtccagatcagttgacagtggcaattaaactgtaaataacttgccctgggggcctttttttaaaaaacaaaaaccacaaaaattcccaaaccatacttgctaaaaattctggtaagtatgtgcttttctgtgggggtgggatttggaaggggggttgggttgggctggatatctttgtagatgtggaccaccaaggggttgttgaaaactaattgtattaaatgtcttttgataagccttctgctcacatttttgtgaatgtctgaagtatatagtttgtgtatattgacagagctcttttataactaaagcaaatttaatttttttgtactagaaaaavatttgaacattttagttcttggttataaaaatgttaattcagaattagtttaatgccttaattaaactaattaatagctttggacacttaamagagctctaaatttgcttgtacataaaggcttaatttgttttccttgttagggtcaagggtgtcctccactctttaacagctgctggacagacacattagagcagctgtttgttattgataataaaatattataaaacta

SEQ ID NO: 42986 - DNA, 935 bp, Homo Sapiens
  misc_feature (604)..(604): n is a, c, g, or t
  misc_feature (881)..(881): n is a, c, g, or t
actataaaatccatttaactggtgttcttaaaatcagagcgtccagaggaaattcttcctaaaactaggattcctgttcctttgtcttctcactcgcactctggcactgctccctctgaagtgcagtgggatctcgtgtgctttgtcttgattctgtgctgcgctgccgctgggcgatgcagaccacctgtcttctactgaaggacagtccgctgtctccagtgggggcagcagctgtcccccagcctcgatggagacattggggcagtctgccttgtctgtggagctgctctctctccctcatcccaccccaaatacttaaaatgacactacacccagacggcgcccagctggctgcagcacttgtagcatgcacatgactctggtagtaaccaacaaaaacttgttttatggattcctcgtttactgaggaaagggaacatgctggttctggaaaagccacaatattgaatctaaaaggaaaccgtttattgtttgatgaaagtttcactggttaaataaaaaactaaattaataactggagcctctaaatttattatccattatccagtgatggaaagttgtatttctcaatcatgcttanggccaaaataggtatataaaatgtgtcacagaaaaacacgcatttgcaacgttaacctaacgaaatttccatgaagaaccaagtcagggcagcatctccttagtcccagctcaggctctctgccttccagagcccgcttctccagtgactaacctccctcctctggctccctccttgcagacagttatccccttgtttagaacacgaatttccatttacctggtggggacaccaaacagggagtctctttctgttctgcaagttttgatggggtaangagggtacccttttttttcaaaagaaggaattctccttttttcaacctgttcct

SEQ ID NO: 42987 - DNA, 655 bp, Homo Sapiens
gatactacaattcgattatgggatctggtggctggaaaaacaagagtgacattaacaaatcacaaaaaatcagttagggctgtggttttacatccaagacattacacatttgcatctggttctccagataacataaagcagtggaaattccctgatggaagtttcattcaaaatctttccggtcataatgctattattaacacattgacggtaaattctgatggagtgcttgtatctggagctgacaatggcaccatgcatctttgggactggagaactggctacaattttcagagagttcacgcagctgtgcaacctgggtctttggacagtgaatcaggaatatttgcttgtgcttttgatcagtctgaaagtcgattactaacagctgaagctgataaaaccattaaagtatacagagaggatgacacagccacagaagaaactcatccagtcagctggaaaccagaaattatcaagagaaagagattttaatgaatgtggaattttttctctctctttttttttctttttaattaaaaaaaaaaaagcttggcgttcatgaggatatccagtcattttgtgctctggctgggaatataaaggagaaattcacttgcttcaatcattgctgcttcatattttacaataaact

SEQ ID NO: 42988 - DNA, 697 bp, Homo Sapiens
gtttcagaaagctttgatgaacagatgacaaacatctgaaaccccctccgcactgttacccagtgtgtatataatgacttgttatagctcagtgtgcccttgaatccatacagtttcttaaaagacaataaaatcttattaataaagttaatgtaacttctaagttctagaaaatgctgattctgtctgccccattcaattgggggctactaattgatttgttgcttggatttcctgagaatttctctatttgtaggaggggttttttctttttacggtctgttgatgacaattactttatgggtgtgatgcaccgatggtagccaaggaatctgttggggaagttcggaaagaaaccttttctttcttttattcagtttaaagtaaactttatcctggatgtttagaatcaacattaagagttatattatggtgttcagagattaagctgacttggatacaatattttcttttgaaaatgaattttctttttcatttgtgatttttaaaaaatgttgcaccagttatgcttcatgcatcgttacatcttcatcaggttaatgtaatgtctagttcctttgcaataaatatattgctgcagcaaaaaaaaaaaaaaaaaaaaaaaaaaaaaagaaaaaaaaaaaaaaaaaagaaaaaaaaaaaaaaaaaaaggggggggggggcaaaaaaatccccg

SEQ ID NO: 42989 - DNA, 575 bp, Homo Sapiens
tggcctgggcgcagcgcaaggagcgggaagtgctgcagctgcaggaagaggtgaaaaacttcatcacccgagagaacctggaggcacgggtggaagcagcattggactcccggaagaactacaactgggccatcaccagagaggggctggtggtcaggccacaacgcagggactcctaggggcccagtaaggacagtgcccgccagggaccatgtatgtatcatggcggaagagttggccctgacctggaataaagcagttggtgttgcttatgaggaaggttcagccttatccagcacagccttcacgttttgccctctgctgtcaccacttggtcagaaacttccaaacgcagtgccctgttctgccggtgtgtacagcctcagcgcaccaggagaccctagagtggtttccatctcacagagaatcagacagggccacagccccctcaggcagccaggtcatctgagtatcattaagagtagtgatgggaagattacagtctgagggccaaacgtgcctgcttcctgtttttgtaaataaagttttgttggaacacaaaaaaaaaaaaaaag

SEQ ID NO: 42990 - DNA, 763 bp, Homo Sapiens
ggcttccccttttatgtgaaaagttttgagaactgtgaaatgtttaggaacaaactgttgaaatccattggaagggaaaaaagaaagtggtaccagtgttaccagctcaactaaaacctgcaattctgcatttcaactcttcacttcctcagcctacaaatagctcattagatgacattcacgcatgctgggtataggcaaggaaagtaattttcaaagtacatttgcagttctctttttcagagatgattctatgatagtgcctctgaaagttgatgcagcatttttgcctttccaaaaagtatttatcctcactgctttttgcagtacttgtattttcacagatggattatctggggtaattttcttcaaagggagtttgttatacacagtgaaaatgtattatagagtagaatagtaaagctctaggggtttcagaaagctttgatgaacagatgacaaacatctgaaaaccccctccgcactgttacccagtgtgtatataatgacttgttatagctcagtgtgcccttgaatccatacagttttcttaaaaagaacattaaaatcttaataataaaggtaaaggtaaccttctaagttctagaaaaaggctgaattctggctggcccaatttcaatgggggggctaccaaattgaatttgttgccttggattttcctggaaaaattttcccaatttgaaaggaagggctgcttttccctttttaccggtcctgttggatgaacaattaacttttaggg

SEQ ID NO: 42991 - DNA, 551 bp, Homo Sapiens
gttctttctctgcctgtgtgtgacctctaactatgtgcctggaaactgaattacatgtaattaatgctgcaaacaggattttcttattgcctaagcatgaacttggtatgaaaataatagttaataatttactatgtaacttggattcttataacctggactgtaagtttgttttagctccagtgggagtttccttttcaaagtatgatgaaaccatcctcatcttttctacccctggactaatcatttaaaatggatacagacactttaaaactgctgagtttatcttgtgttaagcaattaagacttctctgtctaatcatgctacttgttctgcttttgtcaattgatactctcatagcccttttgaaaaagtatgtttttgtagaaattaagttgtatgccctcaggacgtacaacttggttttttttttttggtttttttggttttttttggtttttttttagttctgaagcatgtttagatttttctgtacttgtataggtctgattgtttatgtggcttaactaaggtttcctaaagcatcttc

SEQ ID NO: 42992 - DNA, 645 bp, Homo Sapiens
  misc_feature (409)..(409): n is a, c, g, or t
  misc_feature (414)..(414): n is a, c, g, or t
cacgaggggaaactcaagcacgaggacaccaacctggcttccagcaccatcgtgaaggagggtgccaacaaggaggtgctgggaatccttgtgtcctacagggtcaaggtgaagctggtggtgtctcgaggcggggatgtctctgtggagctgccttttgttcttatgcaccccaagccccacgaccacatccccctccccagaccccagtcagccgctccggagacagatgtccctgtggacaccaacctcattgaatttgataccaactatgccacagatgatgacattgtgtttgaggactttgcccggcttcggctgaaggggatgaaggatgacgactatgatgatcaactctgctaggaagcggggtgggaagaagggaggggatggggttgggagaggtganggcangattaagatccccactgtcaatgggggattgtctcagcccctcttcccttcccctcacctggaagcttcttcaaccaatcccttcacactctctcccccatccccccaagatacacactggaccctctcttgctgaatgtgggcattaattttttgactgcagctctgcttctccagccccgccgtgggtgggaagctgtgttcatacctaaattttctggaaggggacag

SEQ ID NO: 42993 - DNA, 624 bp, Homo Sapiens
tttttttttttttttgttcagcccctttgttctatggttgagaatctgaggccttacgaaggttaagagaactttccccgtgtctcacaggtaggtagaggcagagctggaactagatatctggtctgttgactctagctcagtgtcttctggtaactgttgaaaattgtcttagtttgagagatggctgaaataatgaacataaaatgctatttataataacaagtatatgtgaaatttcttattgtaagactactaccggcttactgttgaatagtttggttatagtgtttaggctagaaatgcctcccacattggtaataaacattacaaaatacaatgtatttttaggtaggcattttataaaatgcattatgccatggttgcttttgagatagattgtagtctgggtagcatctttaaaatgtatgtgggcttaactgttgttcatatcaggagatgctctgattgtataggtgagactctgtttctgttatttttaattgctgtatgaaatgtgatcagattattttactaccaacagttatagtttgaaagtccaactgtattaattgactgataatatgatgatatagagattaaattgtttgtcctcgtgccgaa

SEQ ID NO: 42994 - DNA, 500 bp, Homo Sapiens
aactggactctgagatatgactaaagttctgtgtgatacgtgtgccttatttagctcaagacattcctggagcacctataaaaactgacttgtaatccaggctatgtctctttttagcttcgtaatctttggcaaggccattggattcttcagctgtacaattaggagactcgatcaggtgattgcctttctcagctgtcagttctctaatttcaggcttggtagcttgtaggaactgaaattgcaattaaaacctttataaactcaaactaaatcatgaattacagaaaaagtccattcttccaaaacttgatgttaccacacttacaagtttaaaatatgaagtcgactgtttaaaggattctgcatatattctagtgtgcacattcagaaacatttttcttggaaaaagtacccaacattttttataactgcacatattaatttattgccagaataaattgcattgcatgctaaataaagtcagataattcaaatcc

SEQ ID NO: 42995 - DNA, 644 bp, Homo Sapiens
ggaggcgggagggggcagcgctgggcctcgtgtcgcttgtcgtcgtccgtcctgtgggcgctctgccctgtgtccttcgcgttcctcgttaagcagaagaagtcagtagttattctcccatgaacgttcttgtctgtgtacagtttttagaacattacaaaggatctgtttgcttagctgtcaacaaaaagaaaacctgaaggagcatttggaagtcaatttgaggtttttttttttgggttttttttttttgtatgttggaacgtgccccaaaatgaggcagttggcaaacttctcaggacaatgaatccttcccgtttttctttttatgccacacagggcattgttttttctacctgcttgtcttatttttagaataatttagaaaaacaaaacaaaggctgtttttcctaattttggcatgaacccccccttgttccaaatgaagacggcatcacgaagcagctccaaaaggaaaagcttgggcggggcccagcgtgcccgctgcccatcgacgtctgtcctggggacgtggagggtggcagcgtccccgcctgcaccagtgccgtcctgctgatgtggtaggctagcaatattttggttaaaatcatgtttgggactggaaccatttgtatgaattattt

SEQ ID NO: 42996 - DNA, 575 bp, Homo Sapiens
  misc_feature (278)..(278): n is a, c, g, or t
gacacaggatccggagctggtgctgataacagcggaatcccccgtctacctctctccttggtcctggaacagcgctactgatcaccaagtagccacaaaatataataaaccctcagcacttgctcagtagttttgtgaaagtctcaagtaaaagagacacaaacaaaaaattctttttcgtgaagaactccaaaaataaaattctctagagataaaaaaaaaaaaaaaaaaaggaaaatgccagctgatataatggagaaaaattcctcgtccccggnggctgctaccccagccagcgtcaacacgacaccggataaaccaaagacagcatctgagcacagaaagtcatcaaagcctattatggagaaaagacgaagagcaagaataaatgaaagtctgagccagctgaaaacactgattttggatgctctgaagaaagatgtaagtggggaaatgctgctcgctcttttaattaaaaaacaaacactttctcagctactaagagtgaaaccccccgccctgcggggtctggcactcgctggtactgcgttctcccaggcgggagggcccggcct

SEQ ID NO: 42997 - DNA, 708 bp, Homo Sapiens
  misc_feature (591)..(591): n is a, c, g, or t
  misc_feature (593)..(593): n is a, c, g, or t
  misc_feature (653)..(653): n is a, c, g, or t
gggggggcaagaattgagtttcacagtggaattggctttggatctggcctatagattagtgacataaaatattttctctattttcccctgttctttttgtgttatgcacttaattttatgactgccgggggggtcagctggagtgctgcttaacaagtatctctcctactctcagtggtcagaggctgtgttggacccatagtagaattttccaggtcacagacccaagcttccatgggttgttactgtgctgtaccacttggtgggtctgattctgaacctgatgtgtgtgttaattatattttaagcaacacacacacacacacacgcctcatgtaatggacttttataacaaaagaaaaaatttggatttctaatttacaaatggcaaattatttatccctctctggatgcaccaaagaccagtaaagtttatagcttttccatctatatttataaagcaatactgtattataaaaatcaatatttttatcacatgcttgaaatttttattttgttgttttaaaatgtgcactctaaacatatcagaaccttatttcttcctatgaacttaagctgcctgcgcacaananaaaaaaatttacaaatggagatgcatgagtcatagctctaaactaaagaatggatcaggngacagtattgtctgagtacgactgctgactgtgtggtctatcacagatcatcagt

SEQ ID NO: 42998 - DNA, 714 bp, Homo Sapiens
tgaagtttgtgtgttttgtacacttagggatatatatatatagctacattcacacactcacaatttaaaatatttcccctagttttttggggggataggaagaaagatttgttactgtatttttttaactacataaaaatagatcaataaatgtcagcattggcctctgtgtacaaaccaagagcttttacagatccagaatttattagtttaaaatgcaggtgaacttttttttgcgtttggtttacttgtctgtcaaatgtttccttaaacatgaaactgaataaggagaagagtatttttaacacttaaatttcttggcaaattttaaaacattttttagtctgtaatacactccacttgaagcacttaagtcttccttaaatgacttttcttaagtaatgatactgtgtgttttcccaaagcacttttaaaaaaatttttataaattactatctgttgaaaaggtgtccttttcctttcttctagtatttttttcttaccaaaattcactaatcttgaatgtttgtgatattaaatttcaaatgcagaatacttgactcatttaaagctaaattttgttactgattcaattataattgtaatggatttttgactttgtaatggattcttttcatcaaaaagccttatttttttatctatgtggaaaacacaataaaaaatcctcaacactattgtaaaaaaaaaaaaaaa

SEQ ID NO: 42999 - DNA, 561 bp, Homo Sapiens
  misc_feature (561)..(561): n is a, c, g, or t
ggtgttgaatttgacatttgtgtgtaatttcatggtggcctagtgttgtggtgcttctggtaatggtaatagaagctcaactatttttttgtggatttcagtttttatcatcagaagtcctagacagtgacatttcttaatggtgggagtccagctcatgcatttctgattatacaaaacagtttgcagtaggttatttgtcatttcagttttttactgaaatttgagctaaacatttttacatgtaaatacttgtatttaccaaagatttaaatcagttgattaattaattaactcaaatactgtgaactatctttaaaacactagaaaaaagaaatgttagtatctcaattacaccaactgtgcaaatgaactttgataaaatagaaataatctacattggcctttgtgaaatctggggaagagctttaggattctagtagatggatactgaatactcaggcccacttaatttattaatgtatacattgtgtttttgtctttatgctatgtacagagaaatgtgataattttttataataaatattttttatgatgatn

SEQ ID NO: 43000 - DNA, 581 bp, Homo Sapiens
ttatttagccccacctttgtattttaaaatccttcagaatacatttatgaaccaatgcgactggacttagccacacacaatggaaattcagaccttgactatttggtgtttccagttcacaaaggtgatgaagactgtcttgggagcagcttaatcccaaaatttgtacatttcttgctgctcctggcgtggaaacttaagtgagaccaccaaatacattggtcctgtccaattctactgaatgggggtggacctggcatttatctggccaaaaacaggagccagagaaatatgaatataccaaagttgtttgtttagcctccaacttaaattacattagtcaacttatagatactcatatgatcacttttctttttagatactacatcaactagattcaggagtatatcatttgcagtgcttgtattggtttaaaatgtaagattttaagatcctctaacactgtactaaaacatttcaataaaatcattctgactgcgttaaaaaaaaaaaaaaaaaaaaaaagggccacttgtcctcaacctgcaggccggggccgttaaactatttaaaaaaaaccc

SEQ ID NO: 43001 - DNA, 654 bp, Homo Sapiens
ccagccaacccccacttgcccaagtcactggtgcaataacttttctgccttcctcagagcagagaaattgggaattgtgttaggtgggtgtgggcagctctgctgagccaagcagacacggatgtcccctcttctgggaggagggtagtgctcccaggcctcaggagtccagacagagacccccaaagcctgactgccaacagaaaccctctcctagtgaggggcaggtgggtgtgccccaggtccccacacccacagggaggcttcacacactgcccagtaccggggatgccaggaggcaggcccctctgctgctgccactgctgccaacactgcccagcttgtgaggccaggaggagcccctgtcccactcggtgctgctgctcttctgacccctgctgtgaggaatgggattcttggtcgaaaaaattggttttccttttttgtataaatgaaaagaatccaggagaagctgccaccctcccctcccagcgtgatgcgctaccttgcttcggcgtcttgtcgccctttccgcctttggtccaaggacagcccagcagatcctcctggttctgacctggggggtgtttgcatcacccccttttacttgttttaaaaaaaaatgatgggttgaaaatgtcctggggatttaat

SEQ ID NO: 43002 - DNA, 744 bp, Homo Sapiens
gccaatggtgccagagggcaggtggcccaccctcgccgtcagggagggtggctggccccatccccactgccacccagccccactcactgttggaagagggaccagcgcgaggtggtgcccagggtgggcactgctgcttaatgcgaggcacacctggggcagctgagccccccgaaggctgcgggtttgccaaacacagagaggccaggccccagtgtcaggatgcagtcagcctctggcgcagctctttccacgacctggttcctggatgtcctgcttgctccacacccatctacagggaggatgtgagggggctctgcctcctagggccaggtcccccctctcgggagggggtattgggtaggaccatccaagaaagggcagaagaccaagggcagtcggggtctagaaaggagggcgctggccctgctgggcgcttcggagcccccactgtttcccactcagctttgtgctcagatcccaggtcccaaggagtgacaggggcttcctcccaccttctgtccttgtccagtcatgtaaataatgtgctttttctctccccgagtcttttttttttaaacctaccgtggttcctcagctaactgcattccctacccaggcagagactgtcctatgcctcgagcttccaaacgagaatcagaccgcgacacagcaccgtatttatggattgacacacataattaaggccaaaaccatcggtctctgtgacaaaaaacaacacaa

SEQ ID NO: 43003 - DNA, 707 bp, Homo Sapiens
ggatgtctgggggttgcgctgtgtctagattagaaactgggtttcaagctttgcatgatgggagagcgtcctctcctctatcagctgcgtgtgttctggataggacagtagcccggagatggaaaccaccttcagtaccattagcccaccataccaagtaacaagttaggcaggaatcgtgggaatttattgagtcagctttgagtgtttgagagaatgtaaacaagattggctcgaattgtaaacgtttgtactttggatgagttcatggttctttaggtcaccttaataccagctatctttggtagaagctacagcattcagtttctctggaaactgtatcacatttttgcattttaaaaattttacagtatcaaaaaaccaaaatctgcttatgaaacaaaacatgaagcaggacatatttggattctatttatttaaaattaaattctttgcaaaattgaacttctcaactaaaacgtgtccatgtcagaattttaactgttagcaggtagtttgtggcaaagatggctaaataatgaagcaaattagaatctgtgtgtatactaatgagctgctttttttctgttgagactatcattatttgtcttattacccaagaggcaattacctgaatttggatgtctgaattataacttatgcaggaatagttctgtaaatacatttaaataaaccgtaaagatatt

SEQ ID NO: 43004 - DNA, 754 bp, Homo Sapiens
ctcctcagcaaaccagcagataggggttcctttgatatttataccccaggttttttcactctcacgtgacatctatgtggggccaatgaagccaattcttcttttgtacatatgcagtcctgtaagaatgcattcaaacgggatccgctaattaggaattttctcctggaattctcaacagtctatggggccagaagctttccacaaaccagtgaaggtggcagcaaagaaagcctcttagacgaggagctggcagcagctgctatctagatagacagcaaaaaccaaccactaattcagcaaacacaacctcatacctaaccgcttccctttaaatggccttcggtgtgtgcgcacatgggcacgtgcggggagaaccatacttattcccctgttcccggcctaccacctctgctcccccttctcttctctaccatttaactgtctcctctgctttgtttcttatcactgctgctggtgtctagagccagccagcagtacctggcagacatcgcgaccctgcgggcagcgcttaggactgcacatttacatttcccaaatgatctgggtagatggggacaggtgaagacttggggaaacggaaatatacgaatgacatgagacatgcatatctagtgtcaatccattcgactgggcacaggacagcagactgctgacagtgctatgtacagattatgagtgatcctccctctattatgcaaacagtctgtaagtaactgattaaaccttaaac

SEQ ID NO: 43005 - DNA, 606 bp, Homo Sapiens
actgagagtaccccaggaaagaatacccttgaaagggtctccccttccccatggtgaagtcaggcctaatggagagagtggctacagcctactcagtgattgggaaattccctgtcttgccctgggccagagctggtgtaccgctggtggatcaggtcttacaagcaaagaacctcacactcccaactggtaagccagaagcctcttgctagggtgtgagcaaaacttggacaggaactctcagtagatgtttgtgtttgtcaagattctccagacaaacttccttaaaaggattggcttgtgttgttattattaagtctaacaagtccaaaagctggagtgtgaggcaggaggctggaaacccaggaaagctgatggtgcaaggtccagtccaaaggtatctgttggaggattctcttgttctgggaagaggacggtctttttttctcttcagaccttcacctgactggatcaagcccactaacatcgaggaggacagtctgcattactcagagttcactgattgatttaaatgtcaatctcatataaaacaccctcacagaaacacctagaataatgtttgaccttataattggaaaatcagag

SEQ ID NO: 43006 - DNA, 686 bp, Homo Sapiens
cctcacgtcatgcaggtcaagaactttggacgctcaggtcgcaccaaatacactcaccttgtggatcaagataccacctcctttgactcagcttggggccaagagagtgcccagaacacaaagttcttcaaacaaaaggcagctggggtacgagatgtatttgagcggccatctgccaagaagcggaaaactacctagggtccaactgcttattcttccaactgtggaacacaaggggagtctcagcatctggtccttgatttggttttttcattgtttccttggcccctgtatccagatattggacttactgctatacttgtgatactgggtagcccagactttgaaggtgctttgtgaggtttggactcatgctgagaaacccacaggaaagcactgtccaggtaggattagaggcttcccacttaaaactatttctgagaaatcttaggttttatcactgctatggtttcccatatttacttgggactgttctgactttctttttccagcccttagcttgggttagaaaagtggacatgtaagtgaacaatgcattacttctaccttaggtttaggagtaatatacccggaaatctaagctcatggaaacatgttttccatttttgcttggagtccgtttttctagttgtacatactttttgatccatatatgtgtgcatgtc

SEQ ID NO: 43007 - DNA, 880 bp, Homo Sapiens
ggggtcgatgtggcagaatataaagaagaggagctgctgaaggatttggaagagagtgtccaagataaaaatactaacacccttttttcagtgaaactagaagaagagctgtcagtggaaggaaacacagacattaatactgatttgaaagactgagataaaagtatttgtttcgttcaacagtgccactggtatttactaacaaaatgaaaagtccaccttgtcttctctcagaaaacctttgttgttcattgtttggccaatgaatcttcaaaaacttgcacaaacagaaaagttggaaaaggataatacagactgcactaaatgttttcctctgttttacaaactgcttggcagccccaggtgaagcatcaaggattgtttggtattaaaatttgtgttcacgggatgcaccaaagtgtgtaccccgtaagcatgaaaccagtgttttttgttttttttttagttcttattccggagcctcaaacaagcattataccttctgtgattatgatttcctctcctataattatttctgtagcactccacactgatctttggaaacttgccccctatttaaaaaaaaaaaagaaaaaaaagagtttgttactctattggatgttacaaaagaactatagactgtgggatgcagtttaaagatgacctatgcccacaaatgccttgtattatatgggcactggccgtaatccaggtttgtttttaattttgggaaataaaagttccccgggaactttttttttcccttccccattgttacaatggatttttttaaaaaaaaggggacaaggaaaatggtggaaaaccccaattttaattccccccaattattttaattttgggaagattccccggccgcccc

SEQ ID NO: 43008 - DNA, 747 bp, Homo Sapiens
  misc_feature (625)..(625): n is a, c, g, or t
  misc_feature (664)..(664): n is a, c, g, or t
ccagactctaatacgactcactatagggaaagctggtacgcctgcaggtaccggtccggaattcccgggtcgacccacgcgtccgggcagcctggcatcctcgctacaacctcattgttgtgggccgatacccagatcctaatttcaaaagttgtaccccttatgaattgaggacgatcgacgtgttcgatggaaactcagggaagatgatgtgtcagctctatgacccagaatcttctggcatcagttcgcttaatgaattcaatcccatgggggacacgctggcctctgcaatgggttaccacattctcatctggagccaggaggaagccaggacacggaagtgagagacactaaagaaggtgtgggccagacaaggccttggagcccacacatgggatcaagtcctgcaagcagaggtggcgatttgttaaagggccaaaagtatccaaggttagggttggagcaggggtgctgggacctgtggcactgtgggactgggacacttttatgttaatgctctggacttgcctccagagactgctccagagttggtgacacagctgtcccaagggcccctctgtatctagcctggaaccaaggttatcttggaactaaatgactnttctcctctcagtgggtggtagcagagggatcaagcagntatttgatttgtgctcacttttgatatggccaataaaaccataccgactgagcttttgaaaaaaaaaaaaattccttaatcct

SEQ ID NO: 43009 - DNA, 1000 bp, Homo Sapiens
  misc_feature (806)..(806): n is a, c, g, or t
  misc_feature (916)..(916): n is a, c, g, or t
  misc_feature (949)..(949): n is a, c, g, or t
gaggactcactggcccgtgagcgggacaccagccggcggctgctggcggaaaaggagcgggagatggccgagatgcgggcaaggatgcagcagcagctggacgagtaccaggagcttctggacatcaagctggccctggacatggagatccacgcctaccgcaagctcttggagggcgaggaggagaggctacgcctgtcccccagccctacctcgcagcgcagccgtggccgtgcttcctctcactcatcccagacacagggtgggggcagcgtcaccaaaaagcgcaaactggagtccactgagagccgcagcagcttctcacagcacgcacgcactagcgggcgcgtggccgtggaggaggtggatgaggagggcaagtttgtccggctgcgcaacaagtccaatgaggaccagtccatgggcaattggcagatcaagcgccagaatggagatgatcccttgctgacttaccggttcccaccaaagttcaccctgaaggctgggcaggtggtgacgatctgggctgcaggagctggggccacccacagcccccctaccgacctggtgtggaaggcacagaacacctggggctgcgggaacagcctgcgtacggctctcatcaactccactggggaagaagtggccatgcgcaagctggtgcgctcagtgactgtggttgaggacgacgaggatgaggatggagatgacctgctccatcaccaccacggctcccactgcagcagctcgggggaccccgctgagtacacctgcgctcgcgcaccgtgctgtgcgggacctgcggncagcctgcccgacaagcatctgccagcggctcaggagcccaggtggggcggacccatctcctctggctcttctgcctccagtgtcacgggtcactcgcagctaccgcaantgtgggggggcaattgggggttgccaactttcnggggacaatctggggcaccccggttcctaccttctgggggaaatcccggcc

SEQ ID NO: 43010 - DNA, 600 bp, Homo Sapiens
gttaaaacttaaattgggtgatttgtgggcagctaaatgcagctttgttaatagctgagtgaactttcaattatgaaatttgtggagcttgacaaaatcacaaaaggaaaattactggggcaaaattagacctcaagtctgcctctactgtgtctcacatcaccatgtagaagaatgggcgtacagtatataccgtgacatcctgaaccctggatagaaagcctgagcccattggatctgtgaaagcctctagcttcactggtgcagaaaattttcctctagatcagaatcttcaagaatcagttaggttcctcactgcaagaaataaaatgtcaggcagtgaatgaattatattttcagaagtaaagcaaagaagctataacatgttatgtacagtacactctgaaaagaaatctgaaacaagttattgtaatgataaaaataatgcacaggcatggttacttaatattttctaacaggaaaagtcatccctatttccttgttttactgcacttaatattatttggttgaatttgttcagtataagctcgttcttgtgcaaaattaaataaatatttctcttaccttataaaaaaaaaa

SEQ ID NO: 43011 - DNA, 566 bp, Homo Sapiens
  misc_feature (28)..(28): n is a, c, g, or t
  misc_feature (45)..(45): n is a, c, g, or t
gttccttgtgggggcagctccttcatgnaggtcccacctccgggngaggggcacagggctccagatagtaagcacttaaggcaaacagtggatggcaccaacttttaaaggtgactctattaatggcttcacctctaaattatatttttacagatatgcacctatgcaacttaacgtggctcttctaagcaggtgaggacttcctcctcaatgctctctataaaaattatttgtgttctatatagtgagttttaccagtaaatgtggcttaatattttaattcttataatgtgtcttctctacgtgatgtgactaaattctgttttgtttgtggaatgactagcacaggccgactccctctctccctcacttaacaaaagaccaatgagctgttaatcgagctgttatctccatgggattacttgctaaatgcactgatttcataactatgtggaatccttttccttttgaatctgtatatcatagataagactgaatctacttaataaacactgaacaacaaactgaaaaaaaaaaataaaaaaaaaaaatcttgattctgcggc

SEQ ID NO: 43012 - DNA, 540 bp, Homo Sapiens
ctctgcctgagatccattcttcctttacttcccccaccctcctctcttggatatggttggttttggctcatttcacaatcagcccaaggctgggaaagctggaatgggatgggaacccctccgccgtgcatctgaatttcaggggtcatgctgatgcctctcgagacatacaaatccttgatttgtcagcttgcaaaggaggagagtttaggattagggccagggccagaaagtcggtatcttggttgtgctctggggtgggggtggggtgtttctgatgttattccagcctcctgctacattatatccagaagtaattgcggaggctccttcagctgcctcagcactttgattttggacagggacaaggtaggaagagaagcttcccttaaccagaggggccatttttccttttggctttcgagggcctgtaaatatctatatataattctgtgtgtattctgtgtcatgttggggtttttaatgtgattgtgtattctgtttacattaaaaagaagcaaaaataaaaaaaaaaaaaaa

SEQ ID NO: 43013 - DNA, 548 bp, Homo Sapiens
cgcgtccgagtaaacatgtcctagaaaacagttgctaaatgtaggacatcttttgaggaattagtttatgagaaataaaattttacttgtttttactatcctgttagaagtatttgtttatcctgataattttaagccaacatagtagtcttaaattacttttgaatttctaatctgtgaaggcagtaaatgaaatatctgttctgcaactgttgaaacaaataattggctacattgaccataattaaagttaaaattttgccaatgatgtacagttttatggttaaagttgctgtggttggttgcattacatgacacagaaaactgtcctctacctcacgtgaaataaatattttatatggttttactaaaaataagactcatgtatctggtcacctagtttacaaattttgaattatatttattgaaacatgacatactgtgctctgagcttatacctcaattgtattttgtgctgttttccattttcatgccttgtaaataacttgtatagattgtggatcaaatactaaataaaaacttttaat

SEQ ID NO: 43014 - DNA, 851 bp, Homo Sapiens
cagtttcttacccaatactttctgcatcagcagcctgcaaactgcaaagttgaaagtttagcaatgtttttgggagaattaagtttgatagatgctgacccatacctcaagtatttgccatcagttattgctggagctgcctttcatttagcactctacacagtcacgggacaaagctggcctgaatcattaatacgaaagactggatataccctggaaagtcttaagccttgtctcatggaccttcaccagacctacctcaaagcaccacagcatgcacaacagtcaataagagaaaagtacaaaaattcaaagtatcatggtgtttctctcctcaacccaccagagacactaaatctgtaacaatgaaagactgcctttgttttctaagatgtaaatcactcaaagtatatggtgtacagtttttaacttaggttttaattttacaatcatttctgaatacagaagttgtggccaagtacaaattatggtatctattactttttaaatggttttaatttgtatatcttttgtatatgtatctgtcttagatatttggctaattttaagtggttttgttaaagtattaatgatgccagctgtcaggataataaattgatttggaaaactttgcaagtcaaatttaacttcttcaggattttgcttagtaaagaagtttacttggtttactatataatgggaagtgaaaagccttcctctaaaattaaagtaggtttaggaaaacagaccctcaaattctgacattcattttcctaagcaactggatcaatttgctgacttgggcataatctaatctaagcatatctgaatacagtattcagagatagata

SEQ ID NO: 43015 - DNA, 598 bp, Homo Sapiens
  misc_feature (570)..(570): n is a, c, g, or t
catcaagaagactattaaaaacacctatgcctatacttttgtatctcagaaaataaagtcaaaagactatgatatcatagttttttataccttatttaagagaaacaacctgacgtgcaccaatcagtctgcacatcccaacccttcacattttataaattattgtagatcatgttttgttaggagcacttttatgagagacattttccatgactaaataatcagcattagtcagtaaatcctttagaactgggttttgaaatgggagttttatcatattaaatcatttcttgtagtcttacattttttgttgttgttctggaatctacctgtaaaggaaagtagacctggattcatgtgggctcttccatggcttaagtgttgcccaagagattttgtaggtaacgatttttttttttctggccacaatgccagatactaagctaattggtctatcatacacatgcttgcagtagtttcatgaagtttagtctctggcgtgaaatttaatcaccaatgaaggagagaggcacctgtaggtaaatttactttagtcatattttatataanacaagggttagtattcatgtaacattga

SEQ ID NO: 43016 - DNA, 1444 bp, Homo Sapiens
gggaagggtgatcttcactccaacctgcttcttgggaccaggtgaggcttcgagctctgaggaagagcctccatccccagatgataaagagaaccaggccccaaaacggactggcccacatctgcgcttcgagatcagcagtgaggatgggttcagcgttgaggcagagagcttggagggtgagtggggggagtgcagtggcaggagggagagtgtccataaaacaccatcctgactcagctctggctctgctgtctccccaggggcgtggagaactctgatcgagaaagtgcaagaggcccgagggcatgcccgactcagacatctctcctttagtggaatgagtggggcgagactcctgggcatccaccatgatgctgtcatcttcctggccgagcagctccccggagcccagcgttgccagcactataagttccgttaccaccagcagggagagggccaggaggagccgcccctgaatccccatggggctgctcgggcagaggtctatctccggaagtgcacctttgacatgttcaacttcctggcctcccagcaccgggtgctccctgagggggccacctgtgatgaggaagaggatgaggtgcagctcaggtcaaccagacgtgccaccagcctggagctgcccatggccatgcgttttcgtcaccttaagaagacgtccaaagaagctgtgggtgtctacagatcagccatccacgggcgaggcctgttctgtaagcgcaacatcgacgcgggggagatggtcatcgagtactctggcattgtcatccgctcggtgttgactgacaagcgggagaagttctacgatgggaagggcatcgggtgctatatgttccgcatggatgactttgatgtagtggacgccacgatgcatggcaatgccgcccgcttcatcaaccactcctgtgagcccaactgcttctctcgggtcatccacgtggagggccagaaacacattgttatcttcgccctgcgccgcatcctgcgtggtgaggagctcacctacgactacaagttccccatcgaggatgccagcaacaagctgccctgcaactgtggcgccaagcgctgccgtcggttccttaactgaggccgtggctgcccaccacgacccctcacacctcctgctgccgtcgctgccatcttgcccctagcctgggggctccctagcccctcccagagcatctcacccccaccctcatgttcagggtggatgtgggcatgcaggtgacaagggccctgcctccacccctccagcccatccagcaatcgccccctttctgccctgggggcccaggatgtagatattgtacaaaggtttctaaatcccttcttttctatgcacttttttatttaagaggtggggtcccaggtgggaacccccccacaataaagtctgtcaatgtttggaaaaaaaaaa

SEQ ID NO: 43017 - DNA, 606 bp, Homo Sapiens
accaaatgcagcccaaaatccatggcaaacaagtcttctggatcagactgttgttggttatctggtgtggagtaagtgcacttagcatgctgacttgctcatcagttttgcacagtggcaattttgggactgatttagaacagaaactccattggaaccccgaggacaaaggttatgtgcttcacatgatcactactgcagcagaatggtctatgtcattttccttctttggttttttcctgacttacattcgtgattttcagaaaatttctttacgggtggaagccaatttacatggattaaccctctatgacactgcaccttgccctattaacaatgaacgaacacggctactttccagagatatttgatgaaaggataaaatatttctgtaatgattatgattctcagggattggggaaaggttcacagaagttgcttattcttctctgaaattttcaaccacttaatcaaggctgacagtaacactgatgaatgctgataatcaggaaacatgaaagaagccatttgatagattattctaaaggatatcatcaagaagactattaaaaacacctatgcctatacttttttatctcagaaaat

SEQ ID NO: 43018 - DNA, 598 bp, Homo Sapiens
cagggaagggcagcaaggaacatgggaccagaagcctgtcctcagtaatgtgactatagtgagctttagcaaaagtttttctatataatgacatcttacttatcttttaccctttcctcagttttcccctgcctttaactaataaagaattgggagacagaaattttaaagtcctccttattcaagattttgaaattcttagcctgggagtgctggagagaacctgatgctttctccagaatgaagagtcccaatttgtatatcagtgttaagaagaaaacaaaacaaacacataggtgagattttcgtggactattttaaaaatgtgtcattaatataaaaaatttatattagcagtatttaatcattctcacctgtaaagaataagaaaaacagaaggtaaatattcttacagagaatagcagagctttaagattcattttcattttaagtccattttattttgccagtgtattaatgtttagaagtctgttttactaatgttatttattaattctttttcatttccctaccccgctagctaactaaagagctttttcaagcccccatgtctgtaaaaaaatatttttaaataaag

SEQ ID NO: 43019 - DNA, 876 bp, Homo Sapiens
gcaagcaggcccacgtggagctggccgagaggatgaggaagcgggaccccgggagtgcgcccagcctgggcgaccgcgtcccctacgtgatcatcagtgccgccaagggtgtggccgcctacatgaagtcggaggacccgctgttcgtgctggagcacagcctgcccattgacacgcagtactacctggagcagcagctggccaagcccctcctgcgcatcttcgagcccatcctgggcgagggccgtgccgaggctgtgctactgcggggggaccacacgcgctgcaagacggtgctcacgggcaaggtgggcggcctcctggccttcgccaaacgccgcaactgctgcattggctgccgcacagtgctcagccaccagggagccgtgtgtgagttctgccagccccgggagtctgagctgtatcagaaggaggtatcccatctgaatgccctggaggagcgcttctcgcgcctctggacgcagtgccagcgctgccagggcagcctgcacgaggacgtcatctgcaccagccgggactgccccatcttctacatgcgcaagaaggtgcggaaggacctggaagaccaggagcagctcctgcggcgcttcggaccccctggacctgaggcctggtgaccttgcaagcatcccatggggcgggggcgggaccagcgagaattcactaaagttctgggactctttaacacacacaacccaaaacccgaggggccccaatgccggcacgcggcgcaaagcccgctacggactgcgcccaggggccaaacctggtttccggacccaagttactgtggccacggtgggcacaattggccggccccctaatgggggcccaatacatccgaaaccaggtacg

SEQ ID NO: 43020 - DNA, 753 bp, Homo Sapiens
  misc_feature (703)..(703): n is a, c, g, or t
tcttgattgccttaagagttactagcgaggtcagtgttaggcttgcaatagggattttaaaatacactaactagttccttagctaccttcacatacattctataggccttcttaaattagcactaacctccacttccttctctgccccattgcctcccaaatatgctatggagctatttttgttaccacgttataacgtgaatatttatacagtagcctcttcaggctttgtaattttcattccaaaaatgcccggtgtgatgctttacactctacaaagtatggtttaaaggcacaaggtcatggcctttgtcatagcagttgaatgtgcattgacatatttttctatgattttttaaaattacaatagaaaaataagctgttgtaacgtgtaaggtcatgacaatttttgtatttatatttgaaatcagatttctataactcgtatttgtgtacagaattctcaatggatttatatattgtgaaatttttatctgagattgggatgtggattatgcttaacagtgagagctgaaatgagaccatttactttgtttaaaatgctgtactgtgcaagtttggaaatgtaaattaatttactgtatataatatcttgagtttgtttatacctccaagtttttacactgaagataaactagctttaattcaaaactttttttttctttataagggaataagctgntgagctaaacctggatacttgggctttttattttctggatgcacaatgga

SEQ ID NO: 43021 - DNA, 841 bp, Homo Sapiens
  misc_feature (681)..(682): n is a, c, g, or t
  misc_feature (735)..(735): n is a, c, g, or t
cacgaggggggaaaagagctaggaaagagctgcaaagcagtgtgggctttttcccttttttgctccttttcattacccctcctccgttttcacccttctccggacttcgcgtagaacctgcgaatttcgaagaggaggtggcaaagtgggagaaaagaggtgttagggtttggggtttttttgtttttgtttttgttttttaatttcttgatttcaacattttctcccaccctctcggctgcagccaacgcctcttacctgttctgcggcgccgcgcaccgctggcagctgagggttagaaagcggggtgtattttagattttaagcaaaaattttaaagataaatccatttttctctcccacccccaacgccatctccactgcatccgatctcattatttcggtggttgcttgggggtgaacaattttgtggctttttttcccctataattctgacccgctcaggcttgagggtttctccggcctccgctcactgcgtgcacctggcgctgccctgcttcccccaacctgttgcaaggctttaattcttgcaactgggacctgctcgcaggcaccccagccctccacctctctctacatttttgcaagtgtctgggggagggcacctgctctacctgccagaaattttaaacaaaaacaaaacaaaaatctccgggggcnnctctggccttttcctgcctctcgctctctgccccaccgagtaaggggcactanagagatgtgtgccacgcgtctctgtgctgcgctagcggggcgcaactggtctctgctgcactgcaagagctcctgtcccgcctgctgacgtagacgtcgtcctctt

SEQ ID NO: 43022 - DNA, 795 bp, Homo Sapiens
tcaggtggggagcacgggtggaagggccggctgttgacagacagactaagctgtgtggtgctcttgccgcccttcctgggtacagagcttgagaaaaatgcagccgaccactccctgtgtttgtacagagcaaagcccaaaagccaacctcagatctcctgatttggcagctgaagaaatcagcagagtcctgattgcctgattcagtcccaaaaatgaatgtcaggccccgccccctccccaccaacattgcctctcctacattctccttctgcccctaaatcagacaggaggccagagaggagtattgctcaatgcgtgctatgtgcaactcctcaggccttgtgccacctccatgctgagccctgaagcagggtgtcctgggtgcctgtgtgtcagctccctcctctctacctacctctgaccttcttgtgggtgagggtggccatgcttatggccatcttaaaactggagaggcagagaactacttatgagtctgtagaccacgtgttgtcttccatggcctgtttctcctgctgtctgggtgagtgagcctgcaacgcaatgcccatgagagtaaatgcctcctgacctaccctgctcagcactgttctagtgtcttggccttgaaagaaaagcctgacttcctgctgacacatgtggtaggggcatggcagctatgaggcacctcctacgtctgttttctggctgtggtgacttgggatttttaacccttatatatctttttcctttactcaaaacaaaacaatttttagcacactgaacaaaaaacgc

SEQ ID NO: 43023 - DNA, 744 bp, Homo Sapiens
  misc_feature (649)..(649): n is a, c, g, or t
  misc_feature (716)..(741): n is a, c, g, or t
ctggctgctgccctcagctccgcctcatcagctatgtgaaggggtgtgtgtggagtgatcctgccgccccctccctgggctggtccagagatctcaaactccgatgcccctggggccacgtatgttgtgtaaatggatgaaacaggcccttgagttgggagcctgcttcactttgactttcccactgttgctggagacaaagacatcgtgatgagagaaagttcgcacaatctagtcggtaacagccactttccttgagaccaagagagtgcggtggggatgggggggagagcacgggtccccgtctgacagtggccgctgccatattcaggtgtagctaattgctctggtgtgggaatgcaggcctaatgacagaaatctggagaagccagaaatacagatttgtatgtgagatgtcctgattttttaagttgttggcagaaattaattcagaaatcaaatctgcaggccaaacaaggtgcaggacccagctttggccccatgcccctgtaggtccctctgggacagtcaccgctggggtcctggctgctctgtcattgagggatgctgggcactgctgccgggtggcccaggtatggggcatgtgcccagcaatgtggctccttgggcccgctggccagtgtcctgngcccctgacaggcgctggctgtgagtggtttgtacatggctacataaatgcagctggcagcattggnnnnnnnnnnnnnnnnnnnnnnnnnnaaa

SEQ ID NO: 43024 - DNA, 634 bp, Homo Sapiens
gatgtgtttcttcagcacatttggtcattttgatgccaagtttgacatactgtttaattgggcagcacctttgctcctttaccaggtatgtatcactttgttactccaggtgccattcttggtgatgacagaatgtttatcactatcgtgttagcaagaggaagctttcaatataggaacttaacatcttcccatgagtataaatgaatttaagacatttgaatcaaaacttcagtagagggaggttttagaattcataaaactggtttaaggaaattctttttacttttcccaaggttaatctttttaaatatctctagacatcaaatactttctgtatgtattagctgtgtctgtctatgatgcaagtaactctcctcctatttgggggatagttcagagaggtaggagcattatctcccatttttctggtgacttcttggagtatagaattcaccattttatccgtaagtcttcaaaggattatggtggactagaacttacatagtgcaaaatagtcttctatttttaataggaacttagaaaaaaacttagaattatatatacgagttgtttcctttagaaaccagagctatttatttgtatttaaagcactgtttattatttgtactga

SEQ ID NO: 43025 - DNA, 630 bp, Homo Sapiens
cttaatttttaaatatttgatcattttctattgtccaatcatttcagcacctccaaaggtccctaggacactttgcctctcttctccccctgccccccaccctgctcccacatctgggggcccatgggccaggagtggataagcctgcattaatacaacctttctccattcactttctatttacaaattaggaaagcaaccttttggtttatatatattttttttaatacctcagtgctgcaagtatcaccagagaggctatggaagaatttttttttaatttattgtagatgtaaacagaattttaaaaataaaaagtataaacatcactgcactgtgactggtgggaaaaactgacagtttcctctttgcacatgtttaacatttggctgttataatatatggtcctcggttggggaaagatacttatgatgaaggatattttttaatttaacttttttttaaatattggtaataggtcggcaacagcaactatagaagtacaactcaatagatggcattaaaacatattgtagtgtggatatatattttttcttttttaaaatgtgatattgacgttttattaatattttttaaattgttacgtttataaatttggtacttaaggca

SEQ ID NO: 43026 - DNA, 912 bp, Homo Sapiens
accagccccagttcccattgttgtgtttttttcaaaatatggcaaaggttcaggtgaacaatgtagtggtgctggataacccttctcctttctacaacccgttccagttcgagatcaccttcgagtgcatcgaggacctgtctgaagacttggaatggaaaattatctatgtgggctctgcagaaagtgaagaatacgatcaagttttagactctgttttagtgggtcctgttcccgcaggaaggcatatgtttgtatttcaggctgatgcacctaatccaggactcattccagatgcagatgcagtaggcgtaactgttgtgctaattacttgtacctatcgaggacaagaatttattagagttggctattatgtaaataatgaatatactgagacagaattaagggaaaatccaccagtaaaaccagacttttctaagcttcaaaggaatatttggcatctaatcccagggtcacaagattccacattaattgggaagataacacagaaaaactggaagatgcagagagcagtaatccaaatctacagtcacttctttcaacagatgcattaccttcagcatccaagggatggtccacatcagaaaactcactaaatgtcatgttagaatccacatggactgatgtgacaactaacatcctttagtacaaataggtattaaatacacaggaatattcctgaattcgtagtacatagtcaaaccaggtgggactgtgtaaactcggtaaagttttagaaccgttttgacaatgtgggttatccaccatttagtaaaaaaaaggggggcaaaactgagggcgaagccgttgggaaggcaaagggaaaaagagggggaaggaggagaaggggggatcgggtgccacgaaaattgggtgtgttataaaaagagc

SEQ ID NO: 43027 - DNA, 413 bp, Homo Sapiens
tcagtactgagatgaagatcgccagctgcaggacaccccaggacaagttagagcactgtttagctcctttgtctgtgtgatagacctaagaactgtattagtgttgtaccagcctattaacctcttgtctgtgcacagcttcaaatgttaccgtctagttagatttttatttaaaatatgaaaaactgcttttcccaagatgttttttaaaaacaaagctacaattttaatatttaacatatttaaagtttcaaagcacacctgtttggcttgggtgggggtggggtgggggggacattctttttcagtcttaatttttaaatatttgatcattttctattgtccaatcatttcagcacctccaaaggtccctaggacactttgcctctcttctccccctgccccccaccctg

SEQ ID NO: 43028 - DNA, 677 bp, Homo Sapiens
  misc_feature (528)..(528): n is a, c, g, or t
tgaaaataaagatgacagctccagtgacaagctacgtggagcctggttcaggtccttttagtgagtctaccattaccatttccctgtatattccctctgaacagcaatttgatccacccaggcctttagagtcagatgtcttcattgaagatagagccgaaatgactgtgtttgtacggtctttcgatggattttctagtgcccaaaagaatcaagaacaacttttgacattagcaagcattttaagggaagatgggaaaagttttcgatgagaaggtttactacactgcaggctacaacagtcctgtcaaattgcttaatagaaataatgaagtgtggttgattcaaaaaaatgaacccaccaaagaaaacgaatgagaaaaatgaaaggaagttctgctgtcagaggcaaaacatctgtttatcatagacatcaacatgacctataagtaaagtgcgtgtctagtgtcttctattgagagtactactattaattaagcttatttccaatgtgcctttttaatgctngaagttttatctacatacacaggtaacagaggacagtagtctgtaaacatttaaatcggtcataactatcgtggtctttatttctgtgaggatctaaggaaaattcatggcacttccctacttcactgatttacaatcatatttcctta

SEQ ID NO: 43029 - DNA, 711 bp, Homo Sapiens
  misc_feature (17)..(17): n is a, c, g, or t
  misc_feature (42)..(42): n is a, c, g, or t
cctgctcccacatctgnggggcatggggcgggagtggataancctgcattaatacaacctttctccattcactttctatttacaaattaggaaagcaaccttttggtttatatatattttttttaatacctcagtgctgcaagtatcaccagagaggctatggaagaatttttttttggtgtagggtagatgtaaacagaattttaaaaataaaaagtataaacatcactgcactgtgactggtgggaaaaactgacagtttcctctttgcacatgtttaacatttggctgttataatatatggtcctcggttggggaaagatacttatgatgaaggatattttttaatttaacttttttttaaatattggtaataggtcggcaacagcaactatagaagtacaactcaatagatggcattaaaacatattgtagtgtggatatatattttttcttttttaaaatgtgatattgacgttttattaatattttttaaattgttacgtttataaatttggtacttaaggcacagccagtatgagacactgaatgcgacatttattataaagagctgctgcactcctatttttataaattttactaacaaagtagactaatgtagacattcacagacatggtagggcaaaagcatcttcaaactaaagactccaaaatgctaactcagaaagaaagaaaaaacccgttttcaat

SEQ ID NO: 43030 - DNA, 752 bp, Homo Sapiens
  misc_feature (683)..(683): n is a, c, g, or t
  misc_feature (698)..(698): n is a, c, g, or t
  misc_feature (711)..(711): n is a, c, g, or t
aaagccccgtgctgaaacccagtagagaaacctgtctcaggacacacttgccatctagggctagcttgaaagagcctgaggactgcctttaactgaatttgaattcagcattgtcctttcttcttagtatttgctgcataattgagagcagttcacatcgatttcctggtaggcgtctgcattccctgttgtgttcctgcttctccttcagtagctgcacaacttgcgcagatcgacacactgttgtcacttcattctccccgtctgagaaggatcttgtgttcagttagagtcgtggaaaaatccctgatccttcaaggtcagtcagacagttggcaacattataattaaaaataagaaattaagactttaaattaaacatttggtagagtcatcataaaacaccagaccacttagactcaggctgaaccatactctttctattcttatttttcatccttgttcctcacggttcagtgaacaggctcatatcatgacagaatggacttttaaaagttagtacttaaggaaacttctttaggtggaagaaagtaaagttcttattgtcagtgaactttattagcaccagaaatctctattgatgcttttaatgcattgcctgccttcaggttttcttcttaccccacccctcaataagatttggtgaattgtaattctagtanaacatgtcataccanttggttttcctanattatcaactttctttcattaaaaaaaaaaaaaaaaaaaag

SEQ ID NO: 43031 - DNA, 904 bp, Homo Sapiens
gtccggattcctgggatcagtcccaccaaccagagagagtcgggtgaaggtcctgagaaaactggccgccactgcaccagctttgccccaacctccctcaacccccagagccaccacccttcctcctgccccagccacaacagtgactcggtccacgtcccgggcggtaacagttgctgcaagacctatgaccaccactgcctttcccaccacgcagaggccctggaccccctcaccctcccacaggccccctacaaccactgaggtgatcactgccaggagaccctcagtttcagagaatctttaccctccatcccggaaggatcagcacagggagaggccacagacaaccaggaggcccagcaaggccaccagcttggagagcttcacaaatgcccctcccaccaccatctcagaacccagcacaagggctgctggcccaggccgtttccgggacaaccgcatggacaggcgggaacatggccaccgagacccaaatgtggtgccaggtcctcccaagccagcaaaggagaaacctcccaaaaagaaggcccaggacaaaattcttagtaatgagtatgaggagaagtatgacctcagccggcctactgcctctcagctggaggacgagctgcaggtggggaatgttccccttaaaaaagcaaaagagtctaaaaagcatgaaaagcttgagaaacctaagaaggagaaagaaaaaaaagatgaagaatgagaacgcagacaagtttcttaagagtgaaaagcaaatgaaaaagtctgagaaaaagaagcagccggagaaagagaagagcaagaagaaaaaagaggtaaaacagaaacggaagggtatcagaaaccccccaacaaaactttacgcagagacccaaaaattggtgggcaactg

SEQ ID NO: 43032 - DNA, 780 bp, Homo Sapiens
gtacttttctttgttatttattcatgtctgcaacatcaatcgtagtagtctagatcaatgcaactcaaagcaccagtctacaaactgttacttatccacaggcaagataagcatgcacaagaatttaaatctagagatactttttaggtcaatgacaggatttgattttttagcaaaattttattaatagctaaagcaatgtattgatttacactctgatgcaagtaatttatctcttcattgactggtagcaaccaattcatggaccagtaccatggaccacactttgagaaacacttctttggataataatagatatcctgggatagtgcatgttcaccatctattttgtcagataatggggccttttaaaaaataatactttgctttcatgatatattgtattttgtggaaagttaagtttagcaatatagactctaaaagcaaattaaatttttttaagccataagaaattatactatatcccagtatctgtatgtctgtataaagcagtgtattatcatgttttcatttctgtgattgtaagttaagagtcttaactgcagaggtattgtggaaagtagtagccttaagcataataaaatatggtctcttgggtactccctctggccattaccacattcttagcatatatgatgtccatctttgcagctttctgagagtaattttatctggttgtctttctgaaatgtacatggtatacatggtacctactggaatgggtatgttgattttttaaaaatgatattactgctaaaa

SEQ ID NO: 43033 - DNA, 739 bp, Homo Sapiens
aagcagtccctggagaacttcctatccaggttccggtggaggaggaggttgctggtgatctctgctcctaacgatgaagactgggcctattcacagcagctctctgccctcagtggtcaggcgtgcaattttggtctgcgccacataaccattctgaagcttttaggcgttggagaggaagttgggggagtgttagaactgttcccaattaatgggagctctgttgttgagcgagaagacgtaccagcccatttggtgaaagacattcgtaactattttcaagtgagcccggagtacttctccatgcttctagtcggaaaagacggaaatgtcaaatcctggtatccttccccaatgtggtccatggtgattgtgtacgatttaattgattcgatgcaacttcggagacaggaaatggcgattcagcagtcactggggatgcgctgcccagaagatgagtatgcaggctatggttaccatagttaccaccaaggataccaggatggttaccaggatgactaccgtcatcatgagagttatcaccatggatacccttactgagcagaaatatgtaaccttagactcagccagtttcctctgcagctgctaaaactacatgtggccagctccattcttccacactgcgtactacatttcctgcctttttctttcagtgtttttctaagactaaataaatagcaaactttcacctaaaaaaaaaaaaaaaaaaaaaaaaaag

SEQ ID NO: 43034 - DNA, 660 bp, Homo Sapiens
cgtccggaggcagttcgggtgcggtacgttgcattccggtaccggacgccgagagcggtttgtctccgtctctggagttgtaggcgagaggtgatcatgtccggtcgcgggaaacagggcggcaaagtgcgagcaaaggccaaatcccgctcctcccgcgcgggcctgcagttcccggtgggccgagtgcacagactgctgcgcaaagggaactacgcggagcgagtgggcgccggggcgccggtgtacctggcggcggtgttggagtaccttacggcggagatcctggagctggctggcaacgccgcgcgtgacaacaagaagaccaggataattccccgccacctgcagctcgccatccgcaacgacgaggagttaaacaagctgctgggcaaagtgaccatcgctcagggcggcgtcctgcccaacatccaggccgtgctgctgcccaagaagacggagagtcagaagacgaagagcaaatgaccctgacgccgccctcagggagctggctcccccagcaaaggcccttttcatggtcgtcccgcaatgcttttgaatgtgctggatgtcatggagggccggtgacatctagcggggaggtgggcggcgagggtcccggcgggagccaataaagttggtgaaaatcgaaaaaaaaaa

SEQ ID NO: 43035 - DNA, 606 bp, Homo Sapiens
cgacagtaaaccagttcaggaagccccaagtgttgccagaataagcagcatcccacatgacctttgtcataatggagagaaaagcaaaaagccatcaaaaatcaaaagcctttttaagaagaaatctaagtgaactggctgacttgatggaatcatgttcaagtggcatctgtaaactattatcccccaccctccactccccaccttttttttggtttaattttaggaatgtaactccattggggctttccaggccggatgccatagtggaacatccagaagggcaactgtctactgtctgcttatttaagtgactatatataatcaattcatcaagccagttattactgaaaaatcattgaaatgagacagtttacagtcatttctgcctatttatttctgctttgttctcagtgatgtatatgcaacattttgttgaaagccacgatggacttacaagctttaatggactcgtaagccagcatgggcttgcaaaaatttcttgtttaccagagcatcttcttatctttccacagagctatttacatcctggactatataacttaaaagaagtaaaacgtaattgcactactgttttccagactg

SEQ ID NO: 43036 - DNA, 645 bp, Homo Sapiens
  misc_feature (643)..(643): n is a, c, g, or t
atttctatcccatccctcacgttattggaagcatgcaacagtatttattgctcagggtcttctgcttaaaactgaggaaggtccacattcctgcaagcattgattgagacatttgcacaatctaaaatgtaagcaaagtagtcattaaaaatacaccctctacttgggctttatactgcatacaaatttactcatgagccttcctttgaggaaggatgtggatctccaaataaagatttagtgtttattttgagctctgcatcttaacaagatgatctgaacacctctcctttgtatcaataaatagccctgttattctgaagtgagaggaccaagtatagtaaaatgctgacatctaaaactaaataaatagaaaacaccaggccagaactatagtcatactcacacaaagggagaaatttaaactcgaaccaagcaaaaggcttcacggaaatagcatggaaaaacaatgcttccagtggccacttcctaaggaggaacaaccccgtctgatctcagaattggcaccacgtgagcttgctaagtgataatatctgtttctactacggatttaggcaacaggacctgtacattgtcacattgcattatttttcttcaagcgttaataaaagttttaaataantg

SEQ ID NO: 43037 - DNA, 915 bp, Homo Sapiens
cgcctgctgctcccagctcgcccggctgcacaagctctctgcgggtccatcctccccgcaggaggaggggtccgtcctcgcaggccctgcccggctctctgcagaccctcaagcgtcgtctgcatgagtgagcaggcgtgggtggactctggccgcggcacacttggtgctcaccagctgcttcggccttcaggtgacctccctccccacggcatcctgctctccgggtggaagagcagctttctgtctcccagaaggcatcgcttttccctcttgagcagatcggagcccctgggaggtttggaagctgcctccaatgcctaggacacggaccggtggccggggcggcctctggcccctgacgctggctgagacaggcccgtggggcggggttttggggcgtgaacaaggctggcagtaagtggacaagctgctcccctggctaaggcctgccctgccctcagccagaggtgcctggccatgcctgcacactcctccccattttaataaatggtcgcaaccttcaaaaaaagaaaagaagcgacaagcaacaaacagcagagagactcacacacgacaacgcaaacagacacacagaagacaagacaaaaacgaacagggggccgggcgagccaaaaagaaaaccacgcaggcgggagcggcagacagacgcgagcagcacacccaagcacaactgcacagaaaaaagagacggcacaccaaaaagcagcgaagcagaaagagaaaaaaacagacagacaggaacgaaggcccacaaagacgaacaaaacaccgcaccaacggcgagcgagaacacacaagggccagcagaggagggaacaagcgaaagcagagagagcgcccaacaacacggggggaacggcgaccaacaccgcaggaccaacacacacagaa

SEQ ID NO: 43038 - DNA, 828 bp, Homo Sapiens
cacgaggggattctgtggggactgtggacttcatcgaggtgtgtgttcgcggaacggacaggtgagatggagacccctggggccgtggggtctcaggggtgcctggtgaattctgcacttacacgtactcaagggagcgcgcccgcgttatcctcgtacctttgtcttctttccatctgtggagtcagtgggtgtcggccgctctgttgtgggggaggtgaaccagggaggggcagggcaaggcagggcccccagagctgggccacacagtgggtgctgggcctcgccccgaagcttctggtgcagcagcctctggtgctgtctccgcggaagtcagggcggctggattccaggacaggagtgaatgtaaaaataaatatcgcttagaatgcaggagaagggtggagaggaggcaggggccgagggggtgcttggtgccaaactgaaattcagtttcttgtgtggggccttgcggttcagagctcttggcgagggtggagggaggagtgtcatttctatgtgtaatttctgagccattgtactgtctgggctgggggggacactgtccaagggagtggcccctatgagtttatattttaaccactgcttcaaatctcgatttcactttttttattatcagttatatctacatatctgtcatctaataaatgctttcaacaagcactgggcattaaacagctcaaggggtttaataaaaaccgccatcttgagctgatttctttttagtttattaaagtataacacgaaagctacttgagctgatgctctcccttgggaactaaccagaatccctggggtatgaattca

SEQ ID NO: 43039 - DNA, 1068 bp, Homo Sapiens
  misc_feature (759)..(759): n is a, c, g, or t
  misc_feature (811)..(811): n is a, c, g, or t
  misc_feature (933)..(933): n is a, c, g, or t
tcataatcacagattcgggtaatcctcccaaatcaaatatttccatcctgcgcgtgaaggtttgccagtgtgactccaacggggactgcacagatgtggacaggattgtgggtgcggggcttggcaccggtgccatcattgccatcctgctctgcatcatcatcctgcttatccttgtgctgatgtttgtggtatggatgaaacgccgggataaagaacgccaggccaaacaacttttaattgatccagaagatgatgtaagagataatattttaaaatatgatgaagaaggtggaggagaagaagaccaggactatgacttgagccagctgcagcagcctgacactgtggagcctgatgccatcaagcctgtgggaatccgacgaatggatgaaagacccatccacgccgagccccagtatccggtccgatctgcagccccacaccctggagacattggggacttcattaatgagggccttaaagcggctgacaatgaccccacagctccaccatatgactccctgttagtgtttgactatgaaggcagtggctccactgctgggtccttgagctcccttaattcctcaagtagtggtggtgagcaggactatgattacctgaacgactgggggccacggttcaagaaacttgctgacatgtatggtggaggtgatgactgaacttcagggtgaacttggtttttggacaagtacaaacaatttcaactgatattcccaaaaagcattcagaagctangctttaactttgtagtctactagcacagtgcttgctggaggctttggcatangctgcaaaccaatttgggctcagagggaatatcagtgatccatactgtttggaaaaacactgagctcagttacacttgaattttacatacgaagcacttggggatttaatgtgcctttttgntactttttccaattggaaaatagattttcggtttaaggctttaaagggaaactgattctgaaacgataagtaaagacccaaatatattttgggggggggaaacctaaatttaaaccatgaattgcctttaacacc

SEQ ID NO: 43040 - DNA, 692 bp, Homo Sapiens
  misc_feature (640)..(640): n is a, c, g, or t
  misc_feature (656)..(656): n is a, c, g, or t
tatttccctcttccccctttctctctgtctcatggggcctcactctgccaagttggaaggcactaagacattgtcctggccctcagggtctaggggaagaggtgttggggcaggaagtgagtctctccatgggctggacccactgtagtaggagtgcctccttgtctgcactgctggtatggggttaggccaggtaggacattccagaggggcttctgaaaaccaagagtccctggggaaagggaacagagtaaggcaggccttgttctcactgccctctaagggaacttggtcactcggcacttttaagcctcagtttctccagttcaataataaggacaagagcttttcccatgcattctctttccccgggaaagttgactgaggtgaccagtaatagaattgaaaagggagagtgtcttcagtgcaatgtggcatcctggattgggtcttggaacaaaaacaggacattagtgggaaaattggaaatctgaaaaaagtctgaattttagttaatataccaatttcagtctcttggttttgacagatgtaccatggtgatgtaagatgttgaccttggggtaggctgggtgaagggtatacaggaactctttgtactatctctgcaacttctctgtanatctagtatcattccnaaataaaagtttatttaatttaaaaaaaaaaaaaag

SEQ ID NO: 43041 - DNA, 879 bp, Homo Sapiens
  misc_feature (769)..(769): n is a, c, g, or t
  misc_feature (782)..(782): n is a, c, g, or t
  misc_feature (816)..(816): n is a, c, g, or t
gttacccagtgcccaagggcagtcttgatattatcattctcatatttgttctttcagcaattgttccagacaagatgcagaaggctatcaacaggctgagcaggcttctgaaacctggcgggatgatgcttctgcgagattacggccgctatgacatggctcagcttcggtttaaaaaaggtcagtgtctatctggaaatttctacgtgagaggtgatggaaccagagtttacttcttcacacaagaggaactggacacgcttttcaccactgctggactggaaaaagttcagaacctggtggatcgccgactgcaggtgaaccgaggaaagcaactgacaatgtaccgggtttggattcagtgcaaatactgcaagccccttctgtccagcaccagctgagaggcacctgctgccaacacgatgcaagcccattgtgtttccgggctttttttaaaaaaaaaattgtagcactgggcgtggtgcatgcctgtaatcccagccactcaggaggctgaggcggggaggatccattgagcccagcagtccaacctgggcaaaatagtgagagaccctgtatctgaaagtaataataaaaataaaaaatataaatgaggtctcgttgatgttggacaattcaagaattcagacttgaaccttaaacctaggaaaagttactttgtatcaggattctaacaattatgcttcatatttgtgaagtcctttaaaacataattttctcaagttctttctttgagatctcaatctgncttaacattttgnaactaataactgaaattttattcaaaggaattgnaaaccttaaaccccccaatttatttccatgtgaaaaagtgttacatatgacaagtgttttttg

SEQ ID NO: 43042 - DNA, 659 bp, Homo Sapiens
cgcgtccggtggcccagacgctgctttgtgctaaaagcatgggaaatgtaaaggcagtctttctctgggaaatggatgctattctattctgctgcccctacctgttcctgaggcctcatttagaaagaaaatcccctcagaaggctgtctggcacccagtgtcctagccaggccaagtatatgagaaaggtaagtccattttccccttcaggtcctcagtggattacttaaccactgctgtccctcggtccctttttcctaaacgggtttagttctgtcttttttctccttttttctaaatgctggtaaatatttacattcagccagggaagaggaggccagaggtcgggccagctgccccattcttttaacgttgtagggcctgcccatggagcggaccctcctctttgggcctcgtgagcttttttgcttatcatgttccatttcgtgccgctttcccccttcaagatgccatttggagggtaggggatctgcttcccactgtgactgggctatgggattctgactaccttgcttacagattcatggtttgataaatttgttgtattcaaaaacttgaaatgcaggacgccattaagtgtctgtttatatttttggaatatttgtattacttacaattaattaataaaagtgggttt

SEQ ID NO: 43043 - DNA, 527 bp, Homo Sapiens
agcatatctattattctgctcaattagaagatattgttcatgttgtatagagataataagtaattgtattgatctgcagatgcatccatctcttggattctcattccttctaccactgcagaactttcacctgtaatcactttcctttggccttaaggataacttttagggttacttttctactaaatttccaatttttcaccagatataatcttatattgtgctcttcctgaaaaatactattgttgtggatagaaatctgggttggtagttatttcttcagcaatttgaccatgtcattccactgtgtccctggcctcctgtatactggatgtgaatggatacaattatatattgtgtttatagttttcctgtgctataggaacagtattcgaatctgatgcaaaggacaacacaccctagagattgtaacagtgagatgaaccaagtgattggatggggttttgagttgctggaataatggagttacagtgtacaatgcataagcaacataataaattatatat

SEQ ID NO: 43044 - DNA, 631 bp, Homo Sapiens
aggattcctaaactgtcatttcatttattggtaggtcatgattgctgagggttttgctttggatttttcatacctataaagtcaatcttgagttgatcagagaaagggaaacttactcctaataaacagactcagaacagaagggacatatgcataaatcaggataccatctcattaatttacaaaggataatctttcttttcattgacaacacctacacccacctgttttccagtgttcttctctctaaacagcaaagccaaagcactctgcacaccaaatcacctgttcagaggtttatgcatgagcatatttcttttaggccgtggtgaagttgataaaccacccctgctttgtaacaaaattattttaaagtgactggaattatctagtccccagattgatcatctcccctggcaacgtgactctgttttttgtgtgtgtttccatgctgactagtcccctactgttaatatcactactaattaggctataaccaggtctttcctggcctgagaaatattctcttaaaatgacctttgttttaatctcattcatgatgttgattttttttcaatgtggtgcaatatatacaataaaatttgtcataactaaaaaaaaaaaaaaaaaa

SEQ ID NO: 43045 - DNA, 566 bp, Homo Sapiens
gcttcctcaaggccactcggccatcagaggcagaaatgaaacaggaacccaggcctagaatcacaaaggtcctagaaaccacttggctgtctggcctctcaggtgtcagggccatccagagtgagacagcattggagggacaagtgtgcatgcagatgtcctcagacgggaaggtttgagaagggtcagatggtaggcgggcctaacaagggctccgtgctagccactgtctcgcacacagacaggatcaggtcatcttgatatggagatcagtccccaaatcactgaattgtcccagcagtgctatgccctaggtactaccaatatcactcctctatttcccagaggaggaagcagcagctagactccaggaccttggggtcatatctctcagaaagccaagagtgcaggatgagagctgtctgtctcttacctgcctgtatttgtgccccatttttaaagagcagagggcctgggccacaggaaaggtatcagcccttggtgataggcacattttttaccagtctatcatttggtcattaaatttgtttacaatatactttgct

SEQ ID NO: 43046 - DNA, 755 bp, Homo Sapiens
tgaaggcagcggcaaaagtagtagaaagcaaaaggacaagaacaataacttctcaagataaacctagtggtaatgatgttgaaatggaaactgaagctaatttggatacaagaaaaaggtctcacaagaatcttttcttatctaagttgcaacatggaacccagcaacaagaccttaataagaaagaaagaagagtaggaactcctcaaagtacaaaaaagaaaaaagaaagcagaagagccactgaaagcagaatacctgtttcaaagagtcagccggtaactcctgaaaaacatcgagctagaaaaagacaggcatggctttgggaagaagacaagaatttgagatctggcgtgaggaaatatggagagggaaactggtctaaaatactgttgcattataaattcaacaaccggacaagtgtcatgttaaaagacagatggaggaccatgaagaaactaaaactgatttcctcagacagcgaagactgattgtgtttgtaaaagcttgatgaaaggacagttaagtattttgatcactgcattttgtttgaaacttgtgtcattgatgtaatttaaaacttttgtttaaagcattacagtatttttctgtgaccatcaattaatgagggtttgtgctaccagagttaaagcatatgctatcattgtattctttaagaaccttattttgataaaatgtaaatttgttgaaccctgccacatttagtatccccacccccaaatcctgttccaatg

SEQ ID NO: 43047 - DNA, 792 bp, Homo Sapiens
agacccaagaggagagggtggtccgcagacaccccgggatgtcagcatcccccgacctgccttctggcggcacctcccgggtgctgtgttgagtcagcaggcatggggtgagagcctggtatatgctgggaacagggtgcaggggccaagcgttcctccttcagccttgacttgggccatgcaccccctctcccccaaacacaaacaagcacttctccagtatggtgccaggacaggtgtcccttcagtcctctggttatgacctcaagtcctacttgggccctgcagcccagcctgtgttgtaacctctgcgtcctcaagaccacacctggaagattcttcttccctttgaaggagaatcatcattgttgctttatcacttctaagacattttgtacggcacggacaagttaaacagaatgtgcttccctccctggggtctcacacgctcccacgagaatgccacaggggccgtgcactgggcaggcttctctgtagaaccccaggggcttcggcccagaccacagcgtcttgccctgagcctagagcagggagtcccgaacttctgcattcacagaccacctccacaattgttataaccaaaggcctcctgttctgttatttcacttaaatcaacatgctattttgttttcactcacttctgactttagcctcgtgctgagccgtgtatccatgcagtcatgttcacgtgctagttatgtttttcttcttacacatgaaaataaatgcataagtgttagaagctcttccaaaaaaaaaaaaaaaaaaaaa

SEQ ID NO: 43048 - DNA, 561 bp, Homo Sapiens
gcaaatcggagaaccccacgtcacagggcctcccagtaaaaggccctgctgtggccacccagtgctctgcctacctgccccacccctcacagccccagggagcagaagacagaatgaagagactgagcatctaaaatgggcagcctccatccacccgcttcagggaggaactggactctctgggggcaggtgccaagatttgcccccccagtggccctgggctgggcctggcctctacagagccttttagggggagggggtactcatgtggatgcctacttggaacctgggcctctgagacatgtcctgaccaccccccagggcatttgcctccatcttcaccccagattgtgggtttcccatccccctgactttacccctttcaagcctggggttgtctatacccacagcccttagggacttaaagttacggggcttcgttgaatgctccttcccctaggcagctggtaatagaggggtaaagctctgggcccctcctccctgctgccacttatcccagctccaagtttttttaaaaataatattattaaaaatgtaagt

SEQ ID NO: 43049 - DNA, 777 bp, Homo Sapiens
tctagcgaggtgacagcgtagaaccagttggagatgggtggtgtcaccggccggtgggggtggggagggattttttttcaaactgatggccatttcacccggatgtcggtggatgccccgcactagtgtgcggaagaagtcaccctgtgctcccccacgcaggtgctggacgtcattgctcctccttatacctctgacttcgtgcaacttttcctccccatcctggagaatgacagcatcgcaggtaccatcaaaacggaaggcgagcatgaccctgtgacggagtttatagctcactgcaaatctaacttcatcatggtgaactaatttagagcatcctccagagctgaagcagaacattccagaacccgttgtggaaaaaccctttcaagaagctgttttaagaggctctggcagcgtcttgaaaatgggcaccgctgggaggaggtggatgacttctttacaaaggaaaatggtagcagcttcagtgagaaactgcccttacaaacagtcccttctctgctgtcaatccaatactgctcccaaatcctgttttcagtgttcatttccctcaaggcaggcgctgggctcccacgacccctcaggacagatctggccgtcagccgcgggccgctgggaactccactcggggaactcctttccaagctgacctcagttttctcacaagaacccagttagctgaatgttttattgtaaattgtcttaattttgctaagaacaaataataagtaaattttttaaaaaacccaaaaaaaa

SEQ ID NO: 43050 - DNA, 612 bp, Homo Sapiens
ctccttggaggaggaggaacacgttcaggggattgtgaggtcttgcacaagccacgtggggcaccttggcttcccggcaggaggtggacacccagccagaggcctggctcaaggtgacctcaccttcaccatgggcttcctgggtgcgcgggcctgagcgcaggttgttttgtacatattggaatatgtgttaacttatgccccgcatcccaactcacacggaagcacgggtcttgtctcagtctcttcgctgcatttggaaagcagtctcctctcgggccagcgccgggctgaggtgtccagaggcggcggcagctggcagtgccctcagcccccaagtgtccagcctggcacttcccattcaggccacctgctttgggtcaacagttcctttgccagcagcatctcctaaattgtaaggactctgtccaccggggccctcccagggctgtgaggacggaaacaggcagggagtggagctaacagcttagtcaccaggacccccagacctgcaaacgtcccctcctggaaggggaagccaggaacagcagaactgcccacaaaacaaggctgtgaacttttcgggaactggaactgtttaacttgaaccca

SEQ ID NO: 43051 - DNA, 569 bp, Homo Sapiens
tttgtgttttttttttccagctgtatgaaatgggctttctgaagtttaaatagtccgacttcacccatggtgttctgtgcttgcagtgcgagtgttgctgtaattcagtgttgccgtcagtgtctcttttcttagctttctgtctttctttcaacgtagtgtgaagtgtcttatccttttctatgaattccaatttgccttaactcttttgatgctgtagctgtttcagtaaaagttagttcaaactaatgatgtagaatgctttgaccaaatgagctggtctattatgccttgtaaaacagcagcatagggcttttaaaaggtagtcaataaaagttgctgaaattttggcttttttaaatatgtagtaggtgtttttaatgatttttcacataatgtgtaaggtagtgaaatgcaagaagggaaaaatgttttgtgtgaaacacattttctgactggggaacttttattagggtaaattgtttgtaaggctgtacgccaacagtttcctctgatagtttgactgatttaggatatctgctgtatgatgcaatgtaaagtcttttttg

SEQ ID NO: 43052 - DNA, 663 bp, Homo Sapiens
  misc_feature (640)..(640): n is a, c, g, or t
ggtccctgttctgcctgctaggtcataaggatgaaggcatgtggctggggtacttatgtcaagtccagaatggggcagtgtccctctcctacctctctgcggagacgcaattgaaggtcaagtagactcagtgtagggcaggcagctgtcatgctgcaaagaagtttagaggagtctttgggttggggaggtgacaggtaggtaggacaggatctcttaagatgggaaagatactggggagaggagggctgcttggccccagggaactgcagtgaggtggaactgagctccgctcctgaatctccaaaggagcccatgctgcccggcttccctgagtcattttttccagcatcctgtcagatccctcaatgtactgatttcccccttgtgttaactataccgatattatttttttagcaattgaaatgcacttttttatttcaactcaatcatgattttaagtataaaaaatttatagattgttaaaactacttttttgtgtatttttaaccactcaatgtagcattgtatattttattcttgtgagactctggtacaggtgtgccgcctaatgatttttctgagatgctgggcctttggatgtgtacggtaaccaacttaatgctaatgttcaaagtanaaaaaaaaaaaaaaaaaaaggac

SEQ ID NO: 43053 - DNA, 967 bp, Homo Sapiens
cccacgcgtccgcataagtgttaatgtacactggacatgaaaacaaagactggtttagcagcagacattggtttactctgcagcctgtgttttctgtttccccctttcccacctccttccccccacccaatccttttttttttcttttttgcttttcttttctttttttttagtttttatttactttacctagtatgcctttttttagttgcttctcaagtcagaaaacttttcaggaaggtttccctgtgcatttgcaccagatgaatgtttgatgctatgaaaagctttccatatcatcaaaactaatttgtgtagatttttgcatgaaaaaaatcataaatttccctcaaaatagactgtgttgcagtacacaagttgccataatagtataaaacagtaaaatgtgcttaaaaggccatccttttcattttcagagataacataaagatctttgcatgaggtaaatctacagcatagttcatttttagattttgttgagtcctgtaaagaagaagaagaaaaaagtttcagttgtggtagaataccgtgctgtgtttaaatgttacttgttttcaaactttgttttctatgaaaatgatatggaaacttctaaaatggaatttggtgcatatgtactgctgaataaagaccgatgaagaggtttgagtagatgtacaaatcaagtaatggtttgaacacctttaataatatgcctaatctgttcaattgttttagaatctttttatcttagatgtaggcagcccatgacaatctattttgagccactttagggagaaaactttgtatttttaaaacttgcataaaagttatgcaagtggttttttataaattggaaaaataacctcagtttttgaggttattgcacactaaattaaatggtgaataaaattaatttggaaacaaaaaaaacttcttttaataaggtgggctcatttgaaagaaa

SEQ ID NO: 43054 - DNA, 549 bp, Homo Sapiens
gcgaattcggcacgaggccctgacaagaggctctggtggctgaagctgactgccctggcagatttggaagattgggaagagctagagaagttttccaagagcaagaaatcacccattggctacctgccttttgtggagatctgcatgaaacaacataacaaatacgaagccaagaagtatgcttcccgcgtgggtcccgagcagaaggtcaaggctttgcttcttgttggcgatgtggctcaggctgcagatgtggccatcgaacaccggaatgaggctgagctgagcctcgtattgtcccactgcacgggagccacagatggggccacagctgacaagattcaacgggccagggcacaagcccagaagaagtgaggagtccatcctgtacatctcaagcaaggggttcctcccctagcacctgggcttggcagaagggccatagttcatccagctcctcccctagagcaatgctgaggagcgggggcatggtagcagggctgtctggttttaaataaagttggaacacttaaaaaaaaaaaaaaaaaa

SEQ ID NO: 43055 - DNA, 556 bp, Homo Sapiens
ggattttttgctgcagactcatcctttttaaatgagacttgttttcccctctctttgagtcaagtcaaatatgtagattgcctttggcaattcttcttctcaagcactgacactcattaccgtctgtgattgccatttcttcccaaggccagtctgaacctgaggttgctttatcctaaaagttttaacctcaggttccaaattcagtaaattttggaaacagtacagctatttctcatcaattctctatcatgttgaagtcaaatttggattttccaccaaattctgaatttgtagacatacttgtacgctcacttgccccagatgcctcctctgtcctcattcttctctcccacacaagcagtctttttctacagccagtaaggcagctctgtcgtggtagcagatggtcccattattctagggtcttactctttgtatgatgaaaagaatgtgttatgaatcggtgctgtcagccctgctgtcagaccttcttccacagcaaatgagatgtatgcccaaagacggtagaattaaagaagagtaaaatggcaaa

SEQ ID NO: 43056 - DNA, 818 bp, Homo Sapiens
gaggacgtggagtcatcagtgttgcccttgcccctaacctcagcccgagggtctccaggatgtgcctggcccaggacttgggacagtggccttgatctttgtcctccccaccccccagccctagggacaccccaggcagtcctgggtgtggacacgatgaagcaccggctccataagacacctttaggggaagtggttgtgcatattttatttttctttgagctcgtgtgagttcaaagtaaacaccaccaccgtggacaactcttgaattaaatccactagagcgagctttaaaactaatctgagcataacccccaacgtggctctatgcttgtgtacctttgcacatatttcgtttagtacagtttcatatttgagtttgcagaattatctaatagtctttttttggctaatatttttataacgtggttcttatttaactgtctagttttgatagaatttaccaggtctggctgaatgaagatgttggcacgtgtcattttagtggtttaaatcctcttatttatggtttgaactctaagaaaattttaaaaggaagagatgtttggatgacaaaaaaatgccttattgaaaaagtaaagcaaattctttataggaagaaaatatgggaattggattacacatagatgatgatgttgattgaaagaaaaaaacaacaggaacaaaaaaatcctagcctccaagttgccgttttcctatacatatgagctccgtgttatcgggtgaattactaacactgatcgactttcagccttacgggctagatccttgagaaagctaataagcgttacgagata

SEQ ID NO: 43057 - DNA, 583 bp, Homo Sapiens
  misc_feature (535)..(535): n is a, c, g, or t
cagttcaacgctgccccggaagtccccctttgtccgaaaactttggaaagacgaacccttcgctataagcagtcatgcaggtcttccctggctgagctcatggcccgcacctccctggacttggagctggatctccaggcgtcgagaacacggcagaggcagctgaatgaggagctctgcgccctccgtgagctgcggcagcggttggaggacgcccagctccgtggccagactgacctcccaccctgggtgcttcgggacgagcggctccgtggcctgctgcgggaggccgagcggcagacaagacagaccaaacttgactaccgtcatgagcaggcggctgagaagatgctgaagaaggcctccaaggagatctaccagctgcgtgggcagagccacaaagagcccatccaagtgcagacctttagggagaagatagcattcttcacaaggccaaggatcaacatacctcctctcccagccgacgacgtctgatggagtgcattgtgcacatgaagtatttatccacctggtntattttcatgaagttcttagactagctgaatttgtcttttaaatattt

SEQ ID NO: 43058 - DNA, 629 bp, Homo Sapiens
gcacgagctactataggaaccacacttgaagaactagttctacaattcagctgtatgttgtaaaggagtcaagtcaatgaaggagttataaagagttgctgaaaaatggagtaacagtgtatgggacttcacatcagttctccttattgattgttagtttgatccctcttgttcttttgttgtaaacattttctataattaggaaatgccatttaagagtgagagaggtatatatctatgagccattgtgtttggtgttttacaagaactttaccatactggtgtgtagtccattctgtacagtttaaaagtgattcacgatttgcaggctttttatcagatcacaaaaaaatcagtctttaagcatttgcttggtaaggtttcttaagattaggtttataatacaaccatctgtaatgtatctctcgtttgagcttgtgggccatacaattcattaactagatgaatacattgtggacagcatcctcactacccctctctactcactcacaaagaaccatgatacactggaatgtttttctctggaatcctctttctactcttgtattaaaatttttccccacttcatgattatattcaaaataaacaactacatcattaaaaaaaaa

SEQ ID NO: 43059 - DNA, 724 bp, Homo Sapiens
  misc_feature (630)..(630): n is a, c, g, or t
  misc_feature (696)..(696): n is a, c, g, or t
  misc_feature (699)..(699): n is a, c, g, or t
ttttgtaattttttctattgatacctgttttaaaaatattttccaaggaagttgattaaaattatatttgttaccttttagaaaaagcattgaaatgagtttctcttgctttttcattttccctctgctttatatgctcttcgcaatacatcatgtccaacgggatacctattgttctcatgacacccaaaattgatgagagcaaaggggtcgcaccatatggaaatgttgaaaactattgtaaagtagtattatgaagtagcttttgtgtcattcatgtcgatgacatgaaagtgaagtaaatttattctatgtaaattcacactaaaaccagtacagtaccataagtagaatacatgtaagaatcacctagtcttcactatattgagtaaatataacatgctaattttacaattaatgaaactaaacttttaaacatctccattatatctacatccttttgaaggtatttatcatagttgccaattttaattttaggattgactttctctttctgaatgacttcataaagtttggtgtgaattttgaagacttgggttactaatgattgtatctttgctagtcaacaacttatgaaatatactcaatgcgtctgatgtgtcattaagngcagaaataactaagacacaaataacctttgcaaaccttcaagctgtgtaatattccaatggtggnttntttctttggatatatacctatatca

SEQ ID NO: 43060 - DNA, 846 bp, Homo Sapiens
gcaccctggaggagaggatcgagttctccgaactggacaagaaagagaagatccgggagaagttcgtggaagccctgaaaacagagttgctggcaaagggctgaggttctctcgaggaggcatgatcagcttgacgtcttccccgagggctgggacaagcgctactgcctggatagcctggaccaggacagcttcgacaccatccacttctttgggaacgagactagccctggtgggaacgactttgagatctttgccgacccccggactgttggccacagcgtggtgtctcctcaggacacggtgcagcgatgccgggagattttcttcccagagacagctcatgaggcgtgaccggggcccacatctgtgtgtcgtgacttctgaagagtttggcctaggcctaaagagaggtcctggtgttggatagatgccagggcccctcctctggcccaggacgcctgctgcaagcccacccagatggggccagagtctgtgtggacaaccgtccccagccagtctgctcctagtggcactggcttcgtcctcccagggcccagagtgttccccatgctccacctggtggcccaggccacagctgctgcttgtatttcggtacagaagaggtttctttctgcaccaggaggaggcgtgctcaagtatcggtacgagatctagcctgccctgcctgcctgcctgggcgatgaggtacggcgggggaaggtgcctatcttagagaacttagtcacagtattacagttcccagaaccacagaagaacaggacaaaaaaaaaaaaaacacaaacacaacaaaaacaaaaaaacacaacaacaccaacacaccac

SEQ ID NO: 43061 - DNA, 697 bp, Homo Sapiens
cccaggcggcctaggggccaaggctggggcggctttggtcccttttcctggcccttccttccccacttctaagccaaagaaaggagaggcaggtgctcctgtaccccagccccactcagcactgacagtccccagctcctagtagtgagctgggaggcgcttcctaagaccctttcctcagggctgccctgggagctcattcctggccaacacgccctggcagcaccagcagctcttgccacctccagctgccaaacagcagcctgccgggcagggagcagccccaggccagagaggcctcccggtccagctcagggatgctcctgccagcacaggggccagggactcctggagcaggcacatagtgagcccgggcagccctgcccagctcaggcccctttccttccccattgaggttggggtaggtgggggcggtgagggctccacgttgtcagcgctcaggaatgtgctccggcagagtgctgaagccataatccccaaccatttcccttggctgacgcccaggtactcagctggcccactccacagccaggcctggccctgcccttcaccgtggatgttttcagaagtggccatcgagaggtctggatggttttatagcaactttgctgtgattccgtttgtatctgtaaatatttgttctatagataagatacaaataaatattatccacata

SEQ ID NO: 43062 - DNA, 495 bp, Homo Sapiens
ggcacgaggtcatatattaggtattgatgatcttacttcttttctgttcccctgtacaaaacacttacctaacccagcttgtggttttaggacagccaaagctcactgttgttggttagtcctaatcactacacgggtctcataaatgagacttgtttgaattttggtacattggagcatgttggttggtattacacggcagcatttcgaatgagtgcagctctgtgtctgtcagaaaggagagataagactactttgaagggaattaaatatgtgagtcctctttttaatggtgctttttgtaacctttaatgctgaggtacagagctgcttttcaatatttcataaaggagtggcagacaagagtggattttaaagctgttcttcaaacgtaatttgtcactggactctgacacacctggaaattatatgatatgatacatacagaaatgttgtgggttttttccataaaactttaataaaagtattatacag

SEQ ID NO: 43063 - DNA, 500 bp, Homo Sapiens
  misc_feature (311)..(311): n is a, c, g, or t
  misc_feature (313)..(313): n is a, c, g, or t
ctgcccccagaaaaaggccgggtgacaccggggggctcccagcccgtgcaccctggaagggcaggtctggcggctccatccgtggctgcaggggtctcatgtggtcctcctcgctatgttggaaatgtgcaaccactgcttcttgggaggagtggtgggtgcagtccccccgctgtctttgagttgtggtggacgctggcctgggatgagagggcccagaagaccttcgtatcccctctcagtcgcccggggctgtcccgtgcatgggttggctgtggggaccccaggtgggcctggcaggactccagatnanaacaagagggacaaggtatggggtgggagccacaattgaggataccccgagactaccaggagagccccgggctggaggctgagctgcatccctgctccccacatggaggacccaacaggaggccgtggctctgatgctgagcgaagctataggctcttgttggataaaagcttttttaacagaaaaa

SEQ ID NO: 43064 - DNA, 581 bp, Homo Sapiens
  misc_feature (335)..(335): n is a, c, g, or t
ctgcactactatgaccctgctggggcagaagatcccctgggagcaattcacttgagaggctgtgtggtgacttcagtggagagcaactcaaatggcaggaagagtgaggaagagaacctttttgagatcatcacagcagatgaagtgcactatttcttgcaagcagccacccccaaggagcgcacagagtggatcaaagccatccagatggcctcccgaactgggaagtaaagagactcctgcattcctcctcccctcctgagggaagcccatggacaagctcagtccaggacctgtccacttctgtgacaaatcaacgggaaacagcccagggngtgggaagttttcatttgcaggggggtctgaatgtaactcaccatgtggtgtgcaaggttcccctgcattgtattgctcactgcagcccctctgcccctatccatgacccccaagcagatataacaagctgtgcagcctcagtaggctgcttgccctctccaggcctcagggcctcttctggaaaatgaagagattcaactagtagattcctgaggtccccctagcttaaaaaaaaaaaaatctgc

SEQ ID NO: 43065 - DNA, 717 bp, Homo Sapiens
gatgcaataaataaaaacagtacatcaggaaccattaaggagacagatgacattgatgatattttgctttaatgggagtttagatgttcgttcatatgtgagacttttaagtgattaacaaggctagttcagtgttctaagtagaactgctaagatctggaagtaccacctggactcacagaggagctgctttagtgcagcattgcacaggagttcatttcagttcagtctacatttaaagtagcatgtgtcatttcatcaacaagtatttcttttttggcttcaactacatgtcaggtgttaatatgaaaaatctgccacagcctacccttgagaagcagatgtaattccttgagtgaggctagtaagtctctgaaaaactgaataattttatgacttactaggcaatttaataatcgtttgcaaaaaccattgtgtcttgaggtaaatgaggagcgggggtgggagatagcaaggaaacacctgaaaggtcaattggtcttattggctccattatacataggtccgctctgaatactaaagtttgtagctcctgacatttatgttttcttgtttatatgtcggaattgatcaacaaggtttgccactgcttgtattaccagggactggttacaaccattatttctcttcattgcttggcttatctcatattaaagtgagttggagttctccaaagaaaaaaacaagaaacaaaaa

SEQ ID NO: 43066 - DNA, 580 bp, Homo Sapiens
gatgctatggcttgctcgtgtcttatgatccaatccttttctacatcagcccttgttttgttttatggctagtcttatctggcctggttatttccttgcggggaggagagggtttgctaatctgctcccagcccaacctattaccaccccacctcgctgggacctactgctcgggaggcagcagacagggagccaccagcagtggcttcctggccctgtgctgggggtggggggaagctgggggcacatgtggcccttgccttctgagcagctcccagtgccagggctttgagactttcccacatgataaaagaaaagggaggtacagaagttccaattccctttttattttgctggttggtatctgtaaatgtttaataaatatctgagcatgtatctatcaacgccaagaatttcaaagtctccttcaacaatatgaggcttttaggatgtttatattccttcatccctcttgtttcccaggttttgcagggaaaaaaagtctggaattatagatacagcttattattaaatttgttcttgcaaaaaaaaaaaaaaaaagggccacatgtccttcacc

SEQ ID NO: 43067 - DNA, 889 bp, Homo Sapiens
  misc_feature (640)..(640): n is a, c, g, or t
tgaaaatgtttgataaggttaaagtgaatgtaaaccttctatatacctgctgaacaagaagttctatggaaagtgaagtgcctacagaaatttcttggattctgtatcatctggattaggaaatgaatttgtttaatatttttgtttttaaacatgattgaaatcactgcttataaatgtgtgattttttttaaatgaccaaaactgttctgaagaatgtacccaggtgcctttttgctaatttgatactataatagaatgagacataaaatgaattaatggaaacatatccacactgtactgtgatataggtactctgatttaaaactttggacatcctgtgatctgttttaaagttggggggtgggaaatttagctgactagggacaaacatgtaaacctattttcctatgaaaaaaattttaaatgtcccacttgaataacgtaattcttcatagtttttttaatctatggataaatggaaacctaattatttgtaatgaattatttagacagttctaagccctgtcttctgggagttatcaattttaaagagaacttttgtgcaattcaaatgaagtttttataagtaattgaaaatgacaacacaataacactttctgtataaaagtatatattntatgtgatttattcctactaaatgaaagtgcactactgcctcatgtaaagactcttgcacgcagagcctttaagtgactaaggaacaacatagatagtgagcatagtccccaccttcacccctcacaatttatttgaatacttcaattgtgcctctcaatttttttgtatgctaaaaaatcagtatctagatggttttttaaatgtattctctggaaaatggttttatgtaaaataaatgttattccat

SEQ ID NO: 43068 - DNA, 633 bp, Homo Sapiens
  misc_feature (625)..(625): n is a, c, g, or t
acagacacggccctggtggtgggcgttgcaaagttttcactgagcacacagcaatggtatcacctagagaagttcacgcaactttgttgaatgtagttgacttttccaaatttataaaggaaggaagaaggcaaatgttaatttgccaacaacgaatatcctttttctaaatcagatcattccttttttgttagtggcagtttatcctgtaatttcaaatgacgttaagaggtgggattatttgggggttttttttgtttgtttacagatgatctcatttgctgaatgattgatttaagagtaaaattagccactgcgtggctttgtgtatagtaaccggttttgttgcacttgtctgtggctgaaacacttacctgcagtggaaagccgagcaaggaggaggtaaacattggagatgtttgtgaaaatattactcttgctgtgaggttttagtttgttttgaatgagaaaagactaagtaacttaatccatctcaatgtagtgttttaataaaaaaggaacctaatatttgaaactgggtctcagacatgtctacaaatatgggtactatttttatgcccgtgtattttcacatttaataaaacatatttatggtcatatccanaaaaaatc

SEQ ID NO: 43069 - DNA, 714 bp, Homo Sapiens
  misc_feature (488)..(492): n is a, c, g, or t
  misc_feature (494)..(500): n is a, c, g, or t
  misc_feature (502)..(502): n is a, c, g, or t
  misc_feature (511)..(512): n is a, c, g, or t
gggttagaacctgttctcttgtatctgaatctgattgcaattactattgtactgatagactccagccattgcaagtctcagatatcttagctgtgtagtgattcttgaaattctttttaagaaaaattgagtagaaagaaataaaccctttgtaaatgaggcttggcttttgtgaaagatcatccgcaggctatgttaaaaggattttagctcactaaaagtgtaataatggaaatgtggaaaatatcgtaggtaaaggaaactacctcatgctctgaaggttttgtagaagcacaattaaacatctaaaatggctttgttacaccagagccatctggtgtgaagaactctatatttgtatgttgagagggcatggaataattgtattttgctggcaatagacacattctttattatttgcagattcctcatcaaatctgtaattatgcacagttttctgttatcaataaaacaaaagaatcccaaannnnnannnnnnnanaaaaaaaannaacatgtccggccgccctcggccctcgaagaaactttctaggaaccttcgttttgggcgcgcgggccccagttaaggtaggtgaacatggggccatagctggtttccctagggagaaccctgggccatgaactaaggggcttggaattcttcccccaataaaaaaaacggcccggggcgggcaacccgaagcgggttctgaa

SEQ ID NO: 43070 - DNA, 638 bp, Homo Sapiens
gccatggcattctgccactgcatccttcagacagttatatcctccttttaaaccattgttgttgagtgtaagatgtccttcatgttttcttataaagtcagtgtttagaaatgttaccctttctaagttatatacagatcaaatgcttttttctttcacgtacatccatcatttgcaactgctgttcgtacactttaaacaggactgctcaaatgatcctatttgtattttctgatgctatcagactctaatgtttttttccctaaaatattattgccatcatgctttaggaattttatatttttacacaatcatattttagtatggtgtctgtttatgtaactctgacttgctggaaaagttgaaactccaaataatctgaaactagaaaagaaatagcacataattactaccttccccttggcggctctcctccccaacccccaccccacaattttatgacttccatttggcaattgttgaattataactgcgactgaaacaaacaggttcatagcagatgaattttctgagaacacatatatctacatgttgtataattggatttttttttccatgctaaaggtgaaacaataaaaaacattctttttcgcgggacaacacacaacacacacagg

SEQ ID NO: 43071 - DNA, 719 bp, Homo Sapiens
ccgccgcgtatacctttttttttttttttttttttacttaagggtactaagcaaggtccactctagtgtagctgaagagaatgcatatttggctacactatttctgtttactgtattttgcttcctactttatgtctaaatgctattgtttgtttaaaatcctaataatgtctcatttccaatatgttattttcagataactaaggttttgctactaatgtcagccatttactctcccactaattgggattattttttaaaagaggtctttctccccgaaatacaagttttagaaaatcttagaagaggggtgggtgcatgtcttaatgctgggaagcggcaactttggggttgaacttacttgaatggattaaaaattgcattgtgttacagagctagaaaattttatgtatgaaaaacgataatagccttacactgagtacaaataatactttaagagcatgtgaagatgtgatcatttgtgatgttacttgtaaaaaaaagtatatatacatatcttttgaagtgttaaaaggaaactagtactttatattctttatcatatcactttttgtaagtgttgaatatattcctgtttatttttctatgttctgttttgtagccttaagaagtgtttcacacatatctgaatgtataaaatacgagtaaatgccctacatggtgtgatgctgcattatatataaaactgtgtgcatata

SEQ ID NO: 43072 - DNA, 602 bp, Homo Sapiens
ttttttttttttttctttcagtattggcttgagtgacctgttctcctgagtgctctagtgtctccagttgtgggggggaaagatgatggaggggaacagaaactggacttgatgtttgcggtttgagaggcaagaaaataaaataactttctacctctaaattgaggcttaggagtaaaaagcattttgtcctaaatttatcatttaaaatagcatcagtaacttttgagctcatgtcaatcaagcattggcagtcagagattttatagggaagactaagtaaatccagtttccaagaacctaaactgattgaggctccaagagtcagaccaacaaaagttttattctgtgttgtttactggtaagaatattattatcttgatactacctctcaagggtattgttacaaaatgccacttatggttaaagagatagatacaaagagttctatttgacagaagcttgaaactctggcatctatctgcccaacgatgggggctttcgttctgtaatttaatcctttgtagatacattatttgtgtgtaattttatacgtgttcatatttttctcattttgcattgtgtaaagtgtacaaatctca

SEQ ID NO: 43073 - DNA, 871 bp, Homo Sapiens
tcaaaacgagcaaaatttgttggacctggtggctataacttaaaaaaacttcaggctgaaacaggtgtaactattagtcaggtggatgaagaaacgttttctgtatttgcaccaacacccagtgctatgcatgaggcaagagacctcattactgaaatctgcaaggatgatcaggagcagcaattagaatttggagcagtatataccgccacaataactgaaatcagagatactggtgtaatggtaaaattatatccaaatatgactgcggtactgcttcataacacacaacttgatcaacgaaagattaaacatcctactgccctaggattagaagttggccaagaaattcaggtgaaatactttggacgtgacccagccgatggaagaatgaggctttctcgaaaagtgcttcagtcgccagctacaaccgtggtcagaactttgaatgacagaagtagtattgtaatgggagaacctatttcacagtcatcatctaattctcagtgattttttttttttaaagagaattctagaattctattttgtctagggtgatgtgctgtagagcaacattttagtagtatcttccattgtgtagatttctatataatataaatacattttaattatttgtactaaaatgctcatttacatgtgccatttttttaattcgagtaacccatatttgtttaattgtatttacattataaatcaagaaatatttattattaaaagtaagtcatttatacatctttagaaaaaattacataggttttgttttttaccattcctggaaatatattgaaaaaactttaagataggaaatatgggccataatggttaattattaaccaggattccttctttc

SEQ ID NO: 43074 - DNA, 872 bp, Homo Sapiens
gagaatgtcaggccactttggggacttggcaaacgaagcttgcactgagtggtggtgtgtttggcaatattactgtgccaaaaatcaccttgtctaattttatggatatgtatggcaaacttattacccttcttgcaagctgcacattaaggtacttgtaagtgtttatgcttttgtgtgtaactgtttgccttttctaactgcttttcttgttactgaaaatataattctactagttttatcacattaagaggctctccatgcacaaaatgcattgatgtagccgtaaagtaacagcatttgtacattttctatctcctgatggcagtggtgcctttgtcaccttttggaaggtttgcattttgtttctgctttcaagcgcaaatagtagcttgctttcagcttcacaaaaatctcctcaaatgtaaaagatacaaaatggcgtgttatcatccaggcttagttggaatatttgcatttttatttttatcaaaacaaatataattggtggggactggccagtaataatgtgtggcgtctttaagccaagagtaatttttaaattaaaaatgaaaattttaagaggtagcccattaaacaagctactgagttggagaattaggggatgactgtggtggtttgtcgctaaggaggcaacagtagggtccaggcggcggggcacgtagagcagttagcatgatccatggttattccttactcatgaacagtgtcggcgcacctcattatctgtgcatttggtttttcctgggcagtccctgtcagccagtttaatcccccagcctcttagggaaataaaataccggaattttttttttcctttccctttttttttttttttttttaaaaggaaa

SEQ ID NO: 43075 - DNA, 419 bp, Homo Sapiens
  misc_feature (416)..(416): n is a, c, g, or t
gctaggcctttcctgccgagtgctctgatgcatagtggaaatcgcttatatgtccttgggttgctggttggattaatctttaataacaatatatagaattgtagactgatgttttagcatttttccaacacacacaacgtaaaaataaaagcagtcgaccgcacttatggtaatcagttttgtataacttaaaataattaaataaatgaataaatccaaaacaaacatgcagtacttttgttgtatgggattggtgggctgatttacatgtatggttactaaaaagtaccagcatgttaactttattacaatttgtattactttctctgtagttcctaatggattcaattacggactctggatatttgcacttatgtacttgatactgaatgcataaataaatgttactaaatgtnaaa

SEQ ID NO: 43076 - DNA, 568 bp, Homo Sapiens
taagagggctgtaacagttgctgctagtattagggttccacatcattctaatgtatagtttcaagtcttaatagacaatctgaattccactacatttcttttggctccaacattccttttagcttgaccagtctaatttaaaatgtgtttgttggaggtcattaacgttacttgtacaatgctgtcactgtgtgacatccatatgaattttggtatatatcaatcaatcaatcaatcacattgcattcaatcaatcagctgtgattgattgattatgcttagaaatactatagtaactagatgcagtgtgaattttttccattaacaaacaaacaagtcagtggcttaaatgtgattatggtcctgcaaggtgattcttgctaaaatatctaaacttttgttttgttttaactgaatcattttttaacttaaaaagctggaaaatatcaaatgctgttttttttttttcatggtcaacagtggtgtgtcattttatgtatgttcctaatgcttatggaactcctccaaaataaagttactcaaagagagcaaaaaaaaaaaaaaaaaa

SEQ ID NO: 43077 - DNA, 1047 bp, Homo Sapiens
  misc_feature (577)..(583): n is a, c, g, or t
  misc_feature (585)..(696): n is a, c, g, or t
ctacaagaggatgtcaagaaagcagagttgcatctgtctacagaaagggccaaagttgataatcgtcgtcagaacatggactttctaaaagcaaagtcagaggaattcagatttggaatcaaggctgcagaggagcaactttcagccagaggcatggatgcttctctgtctcatcagtccttagtagcactatcagagaaactggcaagattaaagcaacagactatacctttgaagaaaaaattggagtcctatttagacttaatgccgaatccgtctcttgctcaagtgaaaattgaagaagcaaagcgagaactagatagcattgaagctgaacttacaagaagagtagacatgatggaactgtgacaaaagccaaataaacatccttttccctaacaaagtaaattgaataggactttacagagttctttttcctcttggcatttcctaataacaaaactttctgtgttcttagattacagaatatcataattgatagaatatggtttcttactgtgtgttgcatttttgtgcccaaatacatagttttcatattaaaaagccttttctcttnnnnnnnannnnnnnnnnnnnnnnnnnnnnnnnnnnnnnnnnnnnnnnnnnnnnnnnnnnnnnnnnnnnnnnnnnnnnnnnnnnnnnnnnnnnnnnnnnnnnnnnnnnnnnnnnnnnnnnaaaagggggggcccctctaaagattccccgcggggggcccaaattttaccgggcccccctttttttgtaaaaaaagggggccccctatagggggcccgatatataaaccgaggcccgggcgcggcctttttaaaccccccgggggtggggaaaaaccgcgctccttgggggaattttttggaaaaggacccttccctcgggggggggggaacatttgggcaacccccccccacagaaattttaagacctccaagggaaataaaaaaaatttttttaggggggaaaagggggggaaaaaaaaaacccccatatatccctgccggcgttaaaaagaaattttttcttactcca

SEQ ID NO: 43078 - DNA, 699 bp, Homo Sapiens
atttggccctttaggccaagaattcggcacgaggaggcggaccagcctgcctctgtgatgactgcagcagacctccttgggtgtaccaatgcccctcatctcccactttcacacctaaccctgactccttcaccaagaagacgggagtcggcagccaggagttcccgtggcacctctctctcttcgtggctccctgcttcccccttccctctttccgaggaagggtcaacctattctctctcaaagccaacccctaggccaattgcctggatctcctcccctctcccttctttaaacgagcttgcctccctcctgccaagtttgagggcaaggctaagaaatgtcagccacggaaacaactctattatctggtgactttgggtaatgtgaatcagtgcctgaggacctttgctgtgtccttggtacagaaccatccacttgacctaactacctcccctggccgggctctcgctcttctcttctttgttaagccaacaactatcaccctctcctactcttcttctccctgccccctggagggcactgtgtttggttgtgcaaatgtatttactatgcgtgtttccagcaggtggcattaaagtgccttttttctaataaaaaccagtttattaatgccagtttcccgatggttggaaaggaaccattttgataaggggccaccctttaaaaaaatttttg

SEQ ID NO: 43079 - DNA, 799 bp, Homo Sapiens
gaggagttacaggccttaaaggtaaagctggagatgaaagaggaaagagtccgattcctagaacagcaaaccttatgtaacaatcaagtaaatgatttaacaacagcccttaaggaaatggagcagctattagaaatgtaagaagaagcaagtggccagatggctccctcttgggcataaaatctcagaggaagctacttaggacatcatcttggccatgatcttctgggactcaccatctccagaatgaaaacaatttctacagtagacttaaggacagtttatgctgaaatggcaattcctcatttaagcaagttttcccaaccttcaggttggtcagccctcctgagcctcacaggtggataattgaggcctacaagagaggggagcctaggagcttggattgaccttctagtcaaccacctgacttcagcacaccattacaatcgggagactaaaccaacaaccagaggatctaaaatgtcacattcagattttcaggaagaaaatcttcattacagtggagcacaaatgttccatacaagacatcattgaggagccatgctgtccccttctaacctgaaacacattctttcccatcctggttgggcttctgtacctccttattaatttatgaacctgaagttgcttgaagtgtttgggcttaataaatggggtgaaagtataggtagcagtaacacctacatgaaacaatacaccttggatcttttaatctaaattacttttctttttaaagtctacttttaaaataaatacttctgtaatattaagagaaaaa

SEQ ID NO: 43080 - DNA, 1053 bp, Homo Sapiens
  misc_feature (15)..(15): n is a, c, g, or t
tgtgagcgtaggcgnccctgagggggtgtgttgcaggggtttccaagcccagcaccagcacccttgcccttttccatcaggggttcagcctagggtccccgctggtgggcggctcccgagtcttggagaagagcacgagaacctagaccgcccccgaagtgcggagaccccctgggcaggctgaaagatragcggcggcgtctgtttctgcggcttctggttctcacttgtcgaacagctttgctgagccatcaaggtctaatggaagcatggttcggcattcttcatctccatatgtagtatatccttcggataagcctttccttaatagtgatctacgacgctccccaagtaagcmtacacttgcmtatccagaaagcaacagcagagccatattttctgctcttaagaatcttcaagataagattcgacgcttggaacttgagaggattcaggcagaagaaagtgtgaaaaccttgtctagagaaacaattgaatataagaaagtactggatgaacagatacaagaaagggagaattcaaagaatgaggaatcaaagcacaatcaagaactgacatctcagttgttagctgcagaaaataaatgcaatctattagaaaaacaattggaatacatgcgaaatatgataaagcatgccgaaatggagaggacatctgtcttagagaaacaagtttccctagaaagagaacgacaacatgatcaaacacatgttcagagccaacttgaaaaattggatcttcttgaacaggagtataacaaacttaccacaatgcaggcccttgcagaaaaaaaaatgcaagagttggaagcaaaactccatgaagaagaacaggaaaggaaacgcatgcaagctaaggcagctgagttgcaractggtctagaaaaatatagacttatctttgaagataaggmactccgtgtgtcccaatgcaagawgawtwaaaaaagaagtmaaaccmcagaaagaaagtctaggactattttggkgacaacacattatagatwtgcttgggkwatgcattgkagcggga

SEQ ID NO: 43081 - DNA, 729 bp, Homo Sapiens
gcgtccgaaaataccaagcccagctggagaaacagaagttagagaagcagaagaaggaattaaaagctaccaaaaagactcttgatgaagaaggaaacagcagcagccgttctggaatcacagggaccacaaataagaaagattttatgaaactgagacctggagaaaaaaggagaaaaaatcttcagttattgaaggacatgcaaagcatacagaattcattacaaagcagtagtttgtgttgggattactgactcataaccaggtcagaaattttattcagataatctgtacctcatcaatcagatgatgacaatttacttcccaggtctcatactcacttatgttggaattaattaatagcaggtgttaaaggacccaggcttcattacacaggcttttcatgtatgcaggatgactcaatgttaaagcatttaaatggaaaccaggggagttttaaagcccgagaaaccacacataatcttttgttgagatgagtttgctgtactgacgctgcactttgtaaacagattaccagttttttacttgtgggtgtgattttttaaaatagttctttatatataattaaaattaggtttaaattttcaaaatatgagactatgctataggcagtgcttgcttgaaaagtctcatttttaaatctccctggcatgaggtgcccacttccccctttccaagcaaccattaaacatactttgtttctactat

SEQ ID NO: 43082 - DNA, 559 bp, Homo Sapiens
cattatgtgcatcaatatttttctcagctactattacctgaaacttgtttaacatgtattagacctagaattttcattttctttctcacatagttgcttcctggtatctgatttagaaataacatttaaatgccaagtatctgggggattgaaggaagggtctatatgagcaggtgaattagcagtactgtttttgtttagtggatattgttagtgactttttgtgtgtgttttgctttgggacctttttattttggtgttgcaaaaagtaacatattttcatcattgcttcatacgacatggagttaggacagggaaaaatcattcaacactccttatgcattaaatgatcaaataaaccagtgtaggatattaagactatcaattggtgggattaggcttgacattttatttttataaatatatattttttctgaatgtgtctgagtccaagagtgggcaaaaaataattttctactttggactaatctatagaggtttttgaaagtctgcattactaacttgttgaattcatgatattctgcctatggcacaaatt

SEQ ID NO: 43083 - DNA, 723 bp, Homo Sapiens
  misc_feature (698)..(698): n is a, c, g, or t
tcaggccctgtccctggagaaataattgctgcgcagaagtcacaggccatactgggcagttctggtacaaacctgcccttattaataataacaataataataataactccatttgcatagaactgtcactcattcctgccagtctgctgtccctaccctggttttttgctggccccaaccactggccttgttgagtatcgatgggccctgagctcttctgtttgcttttggagctcttcagatgctgtcccccctgagaataccctaactctggggaaagagcagccaaaatcccaatacagtaaaactccacacaatcttgttagcaacagtgacccagaaaattttgagaagtccaatttcaccagaagaggcccagggctccctgtggtcacattttctacccagccattcttggcattgcaacctccatttctagctccagttgaattttctccacccagaccccaaaaataaatggatccatgatgataattaagagaagagaaaaaaagatattatttttgttaggacaaaccattgtaggattttagcaatgtgtatctgtgtgtccctcacaccttttcctattctacttttttttcctttttttaaaaatattatgtactatatttttagtctcaaacacactatatattatatatatttaatttttttatatatataaatataaatgntttaaaaagtaaaaaaaaaaaaaaa

SEQ ID NO: 43084 - DNA, 603 bp, Homo Sapiens
  misc_feature (510)..(510): n is a, c, g, or t
tggcgccagggctcccggctctaggcgggcgatgttgttgtcctgcaggaacagtgtctgcaggccggggaaagaggaggcgcttaccccgttgcgggggtcttcctctccctgggggcaccccgtcctcccgcagctccacacggtgcccacctgcgtccctggcgggattcccagcgggacgacgcgcaaccgcagggcgccacactccaccgtggcgctgtagcagcggcaggctgctgggcagccggcggcgcggagcggcagtagtagcagcagcagcggcagcagtgcgggggccctcagggccatctcccgaggcccggttcctcaccggcccttccgcggttcagccgcagacgcgtgccctcctgaaacacaggttggcaggccagtctcggcagtcgagagccacccaatagatggaatggaggcctgcacctgcgtctaacttttgacgctataaataggttcaagaaactaataaaacgttctggttttctcctttgngaaaaaaaaaattgataaaaattcacttttaatttttgtataaatcatgcttatttttttaactcccttgaggggggggcccggccccaattt

SEQ ID NO: 43085 - DNA, 460 bp, Homo Sapiens
ttccgcctctgggcctcaggctgcctgtccataaaatggggacatggccagctgacggacaactgagtctccggcccacctaccaccgccagccaggatcccccaaagtgtgcagagggctcagcagagaacagtatgggaccccctcaccaggcctggaacacctccagccacaaagaagccaaaggtcagtccctctgctccccagcaaacggtgcctcccaggcattctcagtgccagggcttcatccctgtgaaggcacagggcctgctagtgggcacaggggtggctagttggggcctggggcagaggagggctgcaccaggcgtcctggggaatgtgctcagtgaagacgacactgggctttgcacagcctggtgtcgctgtacagaaactgtcaagggaataaagtgttctttgtttaaaaaaaaaaaaaaaaaaaaaaaaaaaaaaaaaggg

SEQ ID NO: 43086 - DNA, 818 bp, Homo Sapiens
tgctgggccactggggactttatttatttctagttctttcctccccctgcaacttccgctgaggggtctcggatgacaccctggcctgaactgaggagatgaccagggatgctgggctgggccctctttccctgcgagacgcacacagctgagcacttagcaggcaccgccacgtcccagcatccctggagcaggagccccgccacagccttcggacagacatataggatattcccaagccgaccttccctccgccttctcccacatgaggccatctcaggagatggagggcttggcccagcgccaagtaaacagggtacctcaagccccatttcctcacactaagagggcagactgtgaacttgactgggtgagacccaaagcggtccctgtccctctagtgccttctttagaccctcgggccccatcctcatccctgactggccaaacccttgctttcctgggcctttgcaagatgcttggttgtgttgaggtttttaaatatatattttgtactttgtggagagaatgtgtgtgtgtggcagggggccccgccagggctggggacagagggtgtcaaacattcgtgagctggggactcagggaccggtgctgcaggagtgtcctgcccatgccccagtcggccccatctctcatccttttggataagtttctattctgtcagtgttaaagattttgttttgttggacatttttttcgaatcttaatttattattttttttatatttattgttagaaaatgacttatttctgctctggaataaagttgcagatgattcaaaaaaaaaaaaaaaaaa

SEQ ID NO: 43087 - DNA, 709 bp, Homo Sapiens
ggggtggcttatccacaaacagtttagttgtagaataaaacttatgagtgacatctggaaagtaaccatgctaagatggcaagcacactggaaacaattaggccacttggctttcttttgctgtattgttttataagcctactttacctcccagtcttggaaacaagttttagttttttattggtttggagactagagccaatagtataatgttctcaaaggaaacagacttgagttgttggattagaggaactaacccaacttatatgattttttttttgtttttgtcgtgtagttatggcactgtcttatttggaacatttgcaactagggataatacaacatttttaactctcatttgacaacctactactaatcacagaccacaagggtaatgaccaaatttatgtggtttttgcactccatagttgtcttagcccaatctttctatactcttacgattacttgggttaacgcttctgtgaggaccttctggctcttgagataccctaaatatttaagatatttagatatcttgaagatagtataggatatagagattgtaccaaataggaatataaggagtatgttaaaatgaccagatacctgtttgatagtttactgacctagcagatgtgtggaaaaagaatcagatcttgattcttcctggggtttatactgggttggtaaaacagaatggataccagaa

SEQ ID NO: 43088 - DNA, 494 bp, Homo Sapiens
tgtatatatcaggtaaaatattttccaaagagccatgtgtcatgtaatactgaaccactttgatattgagacattaatttgtacccttgttattatctactagtaataatgtaatactgtagaaatattgctctaattcttttcaaaattgttgcatcccccttagaatgtttctatttccataaggatttaggtatgctattatcccttcttataccctaagatgaagctgtttttgtgctctttgttcatcattggccctcattccaagcactttacgctgtctgtaatgggatctatttttgcactggaatatctgagaattgcaaaactagacaaaaggtttcacaacagatttctaagttaaatcattttcattaaaaggaaaaaagaaaaaaaattttgtatgtcaataactttatatgaagtattaaaatgcatatttctatgttgtaatataatgagtcacaaaataaagctgtgacagttcaaaa

SEQ ID NO: 43089 - DNA, 592 bp, Homo Sapiens
attcggcacgaggtggctcccatagttctcatcctgctgggcctgctgctcttcaaaatgtaccccattgatgaggagaggcggcggcagaataagaaggccctgcaggcactgagggacgaggccagcagctctggctgctcagaaacagactccacagagctggctagcatcctctagggcccgccacgttgcccgaagccaccatgcagaaggccacagaagggatcaggacctgtctgccggcttgctgagcagctggactgcaggtgctaggaagggaactgaagactcaaggaggtggcccaggacacttgctgtgctcactgtggggccggctgctctgtggcctcctgcctcccctctgcctgcctgtggggccaagccctggggctgccactgtgaatatgccaaggactgatcgggcctagcccggaacactaatgtagaaaccttttttttacagagcctaattaataacttaatgactgtgtacatagcaatgtgtgtgtatgtatatgtctgtgagctattaatgttattaattttcataaaagctggaaagcaaaaaaaaaaaaaaaaaaaaacactt

SEQ ID NO: 43090 - DNA, 633 bp, Homo Sapiens
gcatgaaattgtctagcagagcaggggcagggtgataaattgttgataaattccactggacttgagcttggcagctgaactattggagggtgggagagcccagccattaccatggagacaagaagggttttccaccctggaatcaagatgtcagactggctggctgcagtgacgtgcacctgtactcaggaggctgaggggaggatcactggagcccaggagtttgaggctgcagcgagctatgatcgcgccactacactccagcctgagcaacagagtgagaccctgtctcttaaagaaaaaaaaagtcagactgctgggactggccaggtttctgcccacattggacccacatgaggacatgatggagcgcacctgccccctggtggacagtcctgggagaacctcaggcttccttggcatcacagggcagagccgggaagcgatgaatttggagactctgtggggccttggttcccttgtgtgtgtgtgttgatcccaagacaatgaaagtttgcactgtatgctggacggcattcctgcttatcaataaacctgtttgttttaaaaaaaaaaaaaaaaaaacactagcgtgcggccgcaagcttattccctttagtgagggttaatttt

SEQ ID NO: 43091 - DNA, 872 bp, Homo Sapiens
tatgaagtcgacggcgcgccgtgaaagatcactgcagtggaaactgttctggaagaggctgcaacatagcccatgcttagggactggatggtttttgcaagagctttttttttttttaaactaccatctcccaacttttaaagccagatacttgacaaggattttagatcttaatgggttcgatggtagggaatacggaaaggatacactgctaatattgtgtctaacaataaagcaaacaactcgatgctgtaagaagacaagctgtttgagctttcaaacacacatgcacacagcacaattcagaaatacccaggaggattcctgcaggcttaacagttggcatcgtactgaaatgaaacgtgtattaacaagaaaatgtcaaacttttggggaaacaaattttctgttacttcccacccaactaaaagggaagataaaaccatcatcaccagaacaaaacagattttctccaaacaagtacaatgatagtgccgggttggcagttaactctttcaccctactaaattcaagagctcatctccaccctgtcctgtatattttctacatttctattaagaggctacttggtagtgtcagcgggcatcttttacaccttctagtagctcaagctagtaaaaccttgtacttctctattgcgccgccattaaagcagcatagtgcaaaaaaaaaaaaaaaatggcttatcgcggcgctcgctacttaggaccgtatattagtccttagtgagggtattatatgaaaagagagagatatcacattctgtccctattcttttgcgcattgctcctgttgctccaaacctggaataaatcgaaatctggccatgtaccatgtcaacgaactgattc

SEQ ID NO: 43092 - DNA, 542 bp, Homo Sapiens
ttcacgtgattcatccttcctcattgtggcaaggagtttctttctctttttcttcctcctttgggatcattgtgtatgaaaagaaaaactttaaatgacaaacccagactccaggtgccttgcaaaggttgaaggccagccaggattgctgctgctgctgctactcctgccaacacccctttcattggcatgacggaatgaaaggatgcatgtctccacttcctgaccctccgcccacttccttctccctccaccacccccagtcgtcagctccttccctcatttatttttgttaagttgtgtgaattatttttaacccatttatcctgtttgtgcatagggtttttaagaagaaacagcacagtgcaacgagcaaatctttttggggtgtgtgggaagcaagggagggaggacatggagaaaagttctttaaacaaatagcaaactattgaacatgtgtaaaatcctgtatcatttatgaaatatgtataaaaagcaatgtaccttctggaacaataaatacttattcaatttttaaaaaa

SEQ ID NO: 43093 - DNA, 830 bp, Homo Sapiens
cgggatgtgggctgaggggcagcggcttaggctccggcgtctgcaggggtcgccgagctaacccgtggctaggcgagtggggcggggcggccggcaccatgtcgaggcaggcgaaccgtggcaccgagagcaagaaaatgagctctgagctcttcaccctgacctatggtgccctggtcacccagctatgtaaggactatgaaaatgatgaagatgtgaataaacagctggacaaaatgggctttaacattggagtccggctgattgaagatttcttggctcggtcaaatgttgggaggtgccatgactttcgggaaactgcggatgtcattgccaaggtggcgttcaagatgtacttgggcatcactccaagcattactaattggagcccagctggtgatgaattctccctcattttggaaaataaccccttggtggactttgtggaacttcctgataaccactcatcccttatttattccaatctcttgtgtggggtgttgcggggagctttggagatggtccagatggctgtggaggccaagtttgtccaggacaccctgaaaggagacggtgtgacagaaatccggatgagattcatcaggcggattgaggacaatcttccagctggagaggaataaccatccctacaactcgaggatagccatcaggagcactgttggaatcagcaggcctctgtgctccctctgccctccagaactcagtgactcttgaacatggatgttatatattcttataacctgtttccattctccattcaaataaagagcagactgcgatatagtccatttaccccatgtgtgcacatt

SEQ ID NO: 43094 - DNA, 615 bp, Homo Sapiens
ggggaccaaactcaccatcacccaggctgtcacaaccaccaccacctggaggcccagcagcacaaccaccatagccggcctcagggtcacagaaagcaaagggcactcagaatcatggcacctaagtctggacactgccatcagggttgcattggctgtcgctgtgctcaaaactgtcattttgggactgctgtgcctcctcctcctgtggtggaggagaaggaaaggtagcagggcgccaagcagtgacttctgaccaacagagtgtggggagaagggatgtgtattagccccggaggacgtgatgtgagacccgcttgtgagtcctccacactcgttccccattggcaagatacatggagagcaccctgaggacctttaaaaggcaaagccgcaaggcagaaggaggctgggtccctgaatcaccgactggaggagagttacctacaagagccttcatccaggagcatccacactgcaatgatataggaatgaggtctgaactccactgaattaaaccactggcatttgggggctgtttattatagcagtgcaaagagttcctttatcctccccaaggatggaaaaatacaatttattttgcttaccataaaa

SEQ ID NO: 43095 - DNA, 500 bp, Homo Sapiens
ttctccattcaaataaagagcagactgcgatatagtccatttaccccatgtgtgcacattcaggagcgacagtctctgcccccattcccttgagaggggctggatgtaatcacctttggttggactagaaagagctcaaaccattttacattcctgtttgaatttttccaaagcaaaactcactttgaccccattaagaggcaagcctggcacatctatccctgggcctttagaaagccatttgcctcaaatggctatagggttgtggggtggagggaggaagggctgggagggagtggggaggaattgctagctgtagtgtgacacattgtagtgtttgccaggaaaggagccagtcatgccggaaacactgacttctgggaagccacccaggtctcattcctccctgctgttggaggcaacatctcctctttttacagagggtacatccttttttcttacaaattcttcaataaagacacattcttgagtgaaatccc

SEQ ID NO: 43096 - DNA, 720 bp, Homo Sapiens
cgcgtccgggagcctgtcctgcctgtggccatgaccctgcctctcccaggcaggggcccgcgatgtggaactgctgccactgaggggggatccagttttgtcaatgcagttgtctctgttttacaagttggagtcactcttatgctgtacccagtttctaaactggagactgtgtgtgccctctgggctctgagtacccctgctttgggcttgggcctaggctgcattgaaaagagctgaaggttgtggcctttgcgctcctggcccagcctttgttccccactggagcagaaggggagatggacgacacggtcggggcatctggcctggccagtgccctgatcccagagagcccgaggaggtgtctcaggctgcctgagtcgtgacctgctaggccagagcccactccatctggtagaagggaaagcccatatgctaccaccagctgtgtccaaaaccgccagctctgttcttcctcagccagcctcgcccatccccttgaggtctcagcccctttcccttgtagctcctcccctggagggggaatggcagcaggggttggggaaacagcatctccaagcagcttagagttggccatatttacctcagcctgggcgctggtcctttcttccggcccctcccctccaaaatgtgcctattgctagagctcctccctctcaacacccagttttccttggggagttgtcattaaaggaaaaa

SEQ ID NO: 43097 - DNA, 948 bp, Homo Sapiens
caactgtgtcatcaaaatttaagtaatgtgcattgaaaataaggttgatcatgggaatatgcagaatttccaatgtatttttaaatacaaataaaattgtaatttagaatttttaatcttaggtttcttgattaatttataagagatcaattattgtcagtcttttttgtatgttttttaaaaaacatagtccagagcatgggcagaattgacacctctcttttaagtgaaatttggattgctcacaaagcactaggaaatgtcatggggttcaaatatatatcctacacaactgggcaatacatttttgtttgatttttaggtctgtgtatacattaacagttcatgtaattaatacctgatcatttgggataatgaaagtgaagttagttgtagatgaagtaaagttataaaagagattaaaaatgcggtaactttttaagataataatcatacagaaggtatgaagttcattttcggtagtcttccaacctctcaggtgcctaataatttatgtttgaggataacaggtaacaaagatagtcgagataggagaacgtgtctattagtctttgcatctaaaaggcagtgagttacgttcctgccttccactgtgtttctgacatagcaatgtttgtttgatattggaccctggattcttatcttatgtaatatatcaagctgtctattttccaggttttaaccttcggagaccttctttgctaagccgttcaggataaagagggtgcaaacacaaacaccaaaaaaaacaacagcaaacaaagaaacacaacaacgaaaggagaaacaccatgcagacaaacgacccatcaggtgaacaaaacatcacaaacccaacacacagaagcaaagagaccgaatgaacgcgcgagaccaaccaactaacgacaaagacaacgcggagttactcacagcagtaccagcgca

SEQ ID NO: 43098 - DNA, 879 bp, Homo Sapiens
  misc_feature (750)..(750): n is a, c, g, or t
  misc_feature (754)..(758): n is a, c, g, or t
  misc_feature (761)..(761): n is a, c, g, or t
  misc_feature (769)..(769): n is a, c, g, or t
  misc_feature (787)..(787): n is a, c, g, or t
  misc_feature (790)..(790): n is a, c, g, or t
  misc_feature (804)..(804): n is a, c, g, or t
aaggacatgatccgctggggagaggagaaacgccaggctgacccaggcttcttttgcaggaagattgtggagggcatctcccagcccatctggctggtgagtgacacacggagagtgtctgacatccagtggtttcgggaggcctatggggccgtgacgcagacggtccgcgttgtagcgttggagcagagccgacagcagcggggctgggtgttcacgccaggggtggacgatgctgagtcagaatgtggcctggacaacttcggggactttgactgggtcatcgagaaccatggagttgaacagcgcctggaggagcagttggagaacctgatagaatttatccgctccagactttagtcactaggttctaggagtgagctggggcctgctgaggtgggggtggggctgactctgcaaaatgggggtgtcccccgatcctggccgaggtgaggaacagacagggggggtctagattctgagggggttggtggatattgggcaaggcaggaaacctctggagacctcattttctccatggggaagacagccatgctcttcaggaggagactccaagggcaaaggagggtgtcttggctgtgcttgaaggcgaaaccctgccatatccccagtgccagtcccctcagcctgtggtggccttgcatcctgactggatgttctcagccccttgttctgggcaagaacccagagctccccagtgtggatactaataaacctcttggagcaccncccnnnnnacnaccccccnccaccccaaacacccccnacnccacacaccaaccnaaccaaaccggggcggcccccctctagagatatcccctcccagggggccccaagcttaacgcggaacccagcctt

SEQ ID NO: 43099 - DNA, 760 bp, Homo Sapiens
  misc_feature (618)..(618): n is a, c, g, or t
  misc_feature (635)..(635): n is a, c, g, or t
tgagcacaggagagagaggaaagaaaagaacagtcgaaatgagcaactcaccttaccctctgaccctgattagacaggatcaattgtaaagtgagggcttctccatgacaccatagttctgcccaatactgcatttgggataagaaattctacacttggatgtctcgcttcacaataaaacacagcttaaaaataaaataactgaaagaaatagaattcagcaaatagttattttttgcacttgaactgaaacgtactgtactgtaaattatgactcattttaagtgacctttaaaagcagatgtatttattatgcttgtgtaattatagaaataaagaaatgggtgacaggcttaacctcacctatgaatgtacagtatgtggatttgtgaaactgactgtaggaagtcaaaaacttgtactgtatcttgtgtttacagttctgatttattcctttgaaaagcctgctgttttggaaatgcacagttgacatgttgaaataaaaatgaataccatttttaaatgtttcttaaatgataaagatgtgaccaaacaaaaggcctatactctaatgaatgagaccaaattcaacatgcctttgttatggaacattactgngacagcagaatcgatantgcacgcatttccaggcttgggagctgacaccttcataggtttgtggactttgtgactttttctttctgtccccaaagtgccattatgctacctaaaaatattaagggatttcacataaaaaaaa

SEQ ID NO: 43100 - DNA, 547 bp, Homo Sapiens
ggcgccgtgtgcctggattcgccgggtgcactagccctgaagaggggtgtccatgacatggcctgagctgggcctccaccgactgcctgctcacccctgggctgagggaagggagaggagaggaacaagggcctccgaaaccccaaccctgagggagactggattggtcttggggcccaggacccagacgcaggacagagtggactctgcctgtgatggggtggccttcctgctgcccccctccaccagtgccttttgcagagagatattttgtgtacacagaagccattccgagtctgggacctgcccctgtgcggatcctgaccccagccaacagctgagctgccgggcctcctcgaggcccctaagccacccccagaggtcccatctgaagctggagtaccctggggtcagcagcaagagaaagaagaggagattttctgtttgtttttcccctcagccctgccaccgtggggagtctggtttttctcttcatcctgtctctctcctccttactcttggataaataaacagcctgtgagcacac

SEQ ID NO: 43101 - DNA, 610 bp, Homo Sapiens
tagagacgtacggctcctgttctctagaaagtcaatggaggttgatagcggtgctgcatatgaactcaaatcttacactgaatcaccaacaaaccctcagttttcaccaagatgttgataaggagtgatgatttaaagtatttactcagtacccaagtttgcaagtaaaaattagcatagaatggagtgtaccaaattaacaatcaggagagtggattctctcctgttatcctggaccagtttttatgaaaggattcctgaaatgaaatccatatattccatgtagactggaaaaactcatgtcctaatcctttttgtactgttgaaaccacttcattggacatgttgcaatagcaaaacccccagttagattagtgtttacacattttctcagttatttaatatttaatgttttccttaatactcaagtgatgtttgtctctagtgttctaatgtagcacaaatcctatgtaaaatcatactatgtatttttgacattaatgttgaaatcaaatatatgcacaagtctttaattttgtgtaatgtgttaagtgctgttcatttaagttattgaaaatgagaataaaatgttgagcttctttaaaagtaa

SEQ ID NO: 43102 - DNA, 565 bp, Homo Sapiens
cttaaaaaccatataaaatataattccaaagtctctgctgtcaagatagattcgagagaaagcacgtggccatgtatgctttaaccttaaactgcatacacatgtagtgatacctaggctgcatttagatcaccgtgtgctcaggccaggtgtgaatcctgaggtccatggaggtgcagagatgagattactcctattcacgttgaagtgatttgctttgttaacaaaaaattgcagctattgtctagctttcatttttttactgagaactttaaattagtcccctattagaatagggttgctactcatctttttttaaaaaccgaatttcatcatttatctaaagagaaaatatgcagaataactggtcttgttaagagtgcaatattatatttttatgtaaaaataaaaattaatttggggggattatttattcagcatgaaacctaatatgtatatgtttgaaatacttcataatgtgcatgttgtagcaaacatttctgtaaattatcacaagctctgttacctttatatacactgcctcttcaatttggaaataaatttc

SEQ ID NO: 43103 - DNA, 652 bp, Homo Sapiens
ggggatgagggagaaaaatccgttttatccatcagagtcagtgctataaaattgcctattaaggtaaaagaaaaatgtggagactattttactatacagagagcattaattcagatggcttagaaaagtgataccagcccaagaacagggatctaggtgagcccattgtaagtatcattgaaaacaaaacatgcccgtcaacatgtcacagaaaacgaacgaaggacaacaagaagtggatgagaatattttgttgaccttcatgggtttacagcctctgtctctaaacaaagtatggaaacaagtagagcttttattttgcttttgtttttgttttgtttttttttttgttttcccccactaaatagaaatgagggtccttagtctgtttctgacaatctgttaatttcttaggacagctgtctttggtttgctttccagcaggcgtagtatatttagtcggagagcacatctgtatgcgacaacttgattacatctttttttctagctattttgcattttttcttttaccatgtttcagtttctgcatgtagatttaaataaaaaacaaaacttgtaaagttgtaacatttcacatggaaatgctgcccaatcttcaccagcttcagaaatctgacctttgccgatgctg

SEQ ID NO: 43104 - DNA, 507 bp, Homo Sapiens
gtgttctccactctctgagccaggtgacccttctaaatgtagttccctggagttggggccattacagctagaaatatcgaatgcatccaccacagaggtggcaattctgcaagtagatgatgacagtggcgaccctctgaatttggttaaagctccagtgtcaaggtcccctccaagggagcaggtaattgaagacaatatggtccctcagggaatgcctgaacaggaaactacagttggtgccatccaggaccacacagaatccagtgttcacaactaagaataaatacctagagctacttgtgagtgaatcattggcttctagaaatcagatgcccagatgatccaagactagtttgttatctcatctggaacctacaccaagagatgcagtcagcatcttaaagtaaatgttcatggaagctaaaaaatttacctcctttccttttccctttccccttaaaacaccagacaaatcgataacaacttatatatatatatatatat

SEQ ID NO: 43105 - DNA, 659 bp, Homo Sapiens
gtggattgttggccatgtctccccaactccacaatatctctatcatgggaaacacctggggtttttgcgctacataggagaaagatctggaaactatttgggttttgttttcaacttttcatttggatgtttggcgttgcacacacacatccaccggtggaagagacgcccggtgaaaacacctgtctgctttctaagccagtgaggttgaggtgagaggtttgccagagtttgtctacctctgggtatccctttgtctgggataaaaaaaatcaaaccagaaggcgggatggaatggatgcaccgcaaataatgcattttctgagttttcttgttaaaaaaaaatttttttaagtaagaaaaaaaaaggtaataacatggccaatttgttacataaaatgactttctgtgtataaattattcctaaaaaatcctgtttatataaaaaatcagtagatgaaaaaaatttcaaaatgtttttgtatattctgttgtaagaatttattcctgttattgcgatatactctggattctttacataatggaaaaaagaaactgtctattttgaatggctgaagctaaggcaacgttagtttctcttactctgcttttttctagtaaagtactacatggtttaagttaaataaaataattctgta

SEQ ID NO: 43106 - DNA, 659 bp, Homo Sapiens
atagtgtgctttgattgtattttggctttgactctgccatttctgaaatgtgggggaggatggaggcagctgacctctccagttgctgtgttgtattcctacccaatttcctgggcagttgatgcatctctgggaaaaacaccagaaagcttgctgaaatggaaaacttggaagaattgttcatctcttaggcttccatttggatgggcctgccttaacattgtttgaaatgcagcgtgagtagctcttttgtttactgtttacaccccttattggcatgtcaactcctgtacttcccttactctgttgcctttcttgagatgcattgtcctgctaacccacaaacctgtttggaaataaacatggaagaatatctggcaggcttacttttagaagacgacaaatcggtaaggcttattcatggttcattgccaggagcagatatgcttttgagatcacttttatttttgaaatggcctttgttcattgtattgtgatccaataacactttgtattaaattgtttagcagccatttgtgttgtgaaggggtagaagatctctgaaacttgtcttgagattgaactcattccctgttccacaaacccatatgtatcctttcctctacctcctccttttccaattaatttcaaccatagta

SEQ ID NO: 43107 - DNA, 884 bp, Homo Sapiens
  misc_feature (814)..(814): n is a, c, g, or t
  misc_feature (825)..(825): n is a, c, g, or t
ttacaaaaaagccaaggagcgggagaaatcatctttggacaaaagaaagcaagaccccgagtggaagccaaaaacagctaaagcagcaaattcaaagtcaaaagagagtgatgaacctcaccattctaagaatgaaaggccagcacggccaccaccacctatcatgacagatggtgaagatgcggattacactcattttacaaaccagcagagttccacacggcatttctcaaaatcagagtcctctcataaaggttttcattacaaacattaaaaacctaggaatctgccttgaaaatggactcactatagcaaatattactgggtgatacagaatgaattctacacttactttttttctcctgtgtttgcattcctgggatttatcctcaagtgcatttctgaccataagtaattttaattcatttcaaatgttttggttattcatgatcacttgggcagtataagaaaatgtagcttctgaatattggccacctctatgctgcatatacttcttgggatatagtatctaagacctttgtaaactgccattttgttaggtatggagtttggtatctagggagtaggccttatttagcaattcaaattttatggagatgaatgatcaaagtgaaacaatgtttggatgcaacgcagaataaaagaatataagaaatagctttttgttgcattaatgtatgatattttgaaggacagagcctttgctttttgtattctttaagaaaagcacaaccataaagtattttaaaaaaaagaaacacttggagcaattgaaatatgttattctgactanatggactgtanaggtttttgcattttctcaagccctcctgggggagattgggcctaaatagcatttcttt

SEQ ID NO: 43108 - DNA, 680 bp, Homo Sapiens
  misc_feature (650)..(650): n is a, c, g, or t
ccacgcgtccgatgctgttaattgcttcagtgagtgcttttctaatctgcagaccatttacatttcctgtttgcagcatgctgtgtgcaaacactcagtaatttggagtattcaattatttgttagggctcttcctatttccaaatgtgctgaattgtctattgatgggattttcagatcttttcatgagaactggaaatgtagctgggtggcacctacctaggttgctacgtagtgagtagactttctcttgggtatagtaagcctcagacagctttcacttttatctactttacttgtggaaataaaacagtcattttgttctgaaagaataagatagctttctgtagagaaggaattcctacctctaaaagctgccttgagaactcagaactggcagttttctgaggtgatttttaaatttcagtattagggagagtccagcatttgctgacacagattctacataactaatgtatgatagcaaatgcaaaactattataatgtggtgtatcttgcgcatacacaggttagaacaagtagactctggcagcagatctccagagacccaagtttaggttctcatagtgtatttgaagtagttatactcctggcttaagtagtttagtgcctgggaggatccattactngaaagcatttaacttaaaaaaaaaaaaaag

SEQ ID NO: 43109 - DNA, 789 bp, Homo Sapiens
  misc_feature (757)..(759): n is a, c, g, or t
  misc_feature (763)..(763): n is a, c, g, or t
  misc_feature (771)..(771): n is a, c, g, or t
gaccggtccggattcccgggatcagagtcggtgggagacgggtgaggtacaggctcagtctgcggccaagactccgtcctgcaaggatattgtggctggagacatgagcaagaaaagcctctgggagcagaagggaggctccaagacctcatcaacaattaagagcaccccatctgggaagaggtataagtttgtggccaccgggcatgggaagtatgagaaggtgcttgtggaagggggcccggctccctaggcgtcccatctcgcttcctgggtctgcaggtccagccggctggcaccctccatgtacccaggggagattccagccagacacccgccccccggccctggctaagaagttgcttcctgttgccagcatgacctaccctcgcctctttgatgccatccgctgccacctccttttgctcctggaccctttagcctctctgcccttccactctctgaccaccgcccccgccctccccacccagctccgcttcttgttacttgggggaggaaagaaactcctgatcattggccaaagggacttacccctggagaggccaagtgccttctaggaagttaggaggttgaggcacagcctgtgcagagagggtgggtcacccccccagatccaaggggaaactgcaggtcaagggctgataacggccatgcaggatgcttgatgctgcgtcccccgctgcttgccgccccccaccccgccattttgtataataaagctccctgtgtattctcnnncccnccgcgganagtccaaataataaaaag

SEQ ID NO: 43110 - DNA, 710 bp, Homo Sapiens
tatagaacttttaatatgtcaaaagctatattgtctaaatttcagtacttaagcaaatactgagtagtgttttaaattcagaaatagagcttctattatgaacacatgagaatgatttttttctcttaatcattattaaggaaatattttaatttcatggtcatataatggtgataagtaatacctgattgtttccttttctgttctagtaactcagaggagatacgtgttttatttgtgatagcaaattcctaaatgaacattaggcaagtggtatcattatcaggccagctgcagcctcttgccttgacctgcattcctagaatttctttgttgctgtaattcttgattaagtgaccttgactttcattttgtaattttgctaatcatcagcaaattcacttgcatgacgttactgccaaatatgaaggcagttgaattattatgagtgattgtggcagaggtttgtgccatggtgaaaactttgatgtttgtctgtgttcattggatccatctttttaaatgacattaccatgagtctgttgtcaaacctaaatatctttgtttgaatttaaaatgggactctatattgttgtagttcaggtcttcattgactaagagattgagagaaatctgacataagaaaatattgttttcactgcaggaataaagaggaagtaacagtgaaaaaaaaaaaaaaaaaaaaaacg

SEQ ID NO: 43111 - DNA, 584 bp, Homo Sapiens
ttacatgtatttaaagtagcatcccatcccaacttcctttaattattgcttgtcttaaaataatgaacactacagatagaaaatatgatatattgctgttatcaatcatttctagattataaactgactaaacttacatcagggaaaaattggtatttatgcaaaaaaaaaatgtttttgtccttgtgagtccatctaacatcataattaatcatgtggctgtgaaattcacagtaatatggttcccgatgaacaagtttacccagcctgctttgctttactgcatgaatgaaactgatggttcaatttcagaagtaatgattaacagttatgtggtcacatgatgtgcatagagatagctacagtgtaataatttacactattttgtgctccaaacaaaacaaaaatctgtgtaactgtaaaacattgaatgaaactattttacctgaactagattttatctgaaagtaggtagaatttttgctatgctgtaatttgttgtatattctggtatttgaggtgagatggctgctcttttattaatgagacatgaattgtgtctcaacagaaactaaatgaacatt

SEQ ID NO: 43112 - DNA, 689 bp, Homo Sapiens
gtccggagagtgacagcaggtagtgaaacctcaagcaatttaaaacatggtattgttcctggaagactggttatgttggctagggtcagcaagagagggcatcaaggctgtagtctagcagtgatttaatctgcaagtcaaaccagacgggtattttgtattattcatatgtcacatcctaccaacagacagtaagtcaggcaaggctcctggtgctccttgtcactcacgtaattttcacatcaggaaaactctgggctgggtgcagtggctcacacctgtaatcctagcactttgggaaaccaaggtgggtggattgcctagctcagtgacaccagcctgggccacatggcaaaaccccgtctgtaccaaaaatgcaaaaaattagctgggtgtggtgttgacgtttgcggtcccagctactctggaggctgaggtgggaggattgcttgagtctgggaggcagaagttgcagtaagccgagatcatgccactgcacaagctaggtgacagaatgagactctgtctcaaaaataattaaaaagcctctgccccaaactcgttaaaagattttataaccacaactgctgtttctgtgtagatgcatctgcatgcccaggagcagtaaatgcaataaaatcatttggttatactttgaacacaaaataaacgggtgaggcttttacttt

SEQ ID NO: 43113 - DNA, 604 bp, Homo Sapiens
tacgccaagctctaatacgactcactatagggaaagctggtacgcctgcaggtaccggtccggaattcccgggtcgacccacgcgtccgtggatttcgcaatttaagatttgtagtgactacatctgtgaaggggcctttgaatttgaggtctatgggcgggtcgaggaccaggatctgctcgtgcttcgccgtggccccggaggcagacgccattggagagacagcgcagagcagggggcggcttgctcgctgggggcgggggacgatggcgagaggggagggggagcgagttcgcatctctccttttcctggttagactctgttcaaccacattcttatgttggcagatctgcttccagattgatttttagagcaccatcactttcacattcctgattctgattttgttttgttttgtttgggttttctgaaacttaaaatgctgccccgaaaatactatatttttgagtttgtgttctgaaagcctccgtgctgctggatctttggggggaaatacaggatccttcagcactgaggtgtttaagatttgcaactagcaatgcaattttttctaaatatggggatatttaccttttattaag

SEQ ID NO: 43114 - DNA, 715 bp, Homo Sapiens
  misc_feature (688)..(692): n is a, c, g, or t
  misc_feature (694)..(694): n is a, c, g, or t
  misc_feature (698)..(699): n is a, c, g, or t
  misc_feature (701)..(706): n is a, c, g, or t
  misc_feature (708)..(708): n is a, c, g, or t
  misc_feature (710)..(710): n is a, c, g, or t
agggataaacttccttttgctaaatgcattctttctgcttttagaaatgtagacataaacactccccggagcccactcaccttttttctttttcttttttttttttttaactttattccttgagggaagcattgtttttggagagattttctttctgtacttcgttttacttttctttttttttaacttttactctctcgaagaagaggaccttcccacatccacgaggtgggttttgagcaagggaaggtagcctggatgagctgagtggagccaggctggcccagagctgagatgggagtgcggtacaatctggagcccacagctgtcggtcagaacctcctgtgagacagatggaaccttcacaagggcgcctttggttctctgaacatctcctttctcttcttgcttcaattgcttacccactgcctgcccagactttctatccagcctcactgagctgcccactactggaagggaactgggcctcggtggccggggccgcgagctgtgaccacagcaccctcaagcatacggcgctgttcctgccactgtcctgaagatgtgaatgggtggtacgatttcaacactggttaatttcacactccatctccccgctttgtaaatacccatcgggaagagactttttttccatggggaagagcaataaactctggatgtttgtgannnnncncccnncnnnnnncncntaaag

SEQ ID NO: 43115 - DNA, 900 bp, Homo Sapiens
gagaatttgctcatcgtgctttaaatgattaactgttttaccttatttagtatttcatagactttgcatgatatggtacactcctaattatgcattctttggtttccaaatcttaatctaagatactttgttaactgactggtagcctaagaaagagacttttcttcctgtttttctctctccccattttttggggtaagttttgcaaagatcagtgctgcttctcatgactctaaagtaaagctcttttggatagcacagcctaactttacagctagacagaatggccattaagaatatttccaaaatccaagtttatcaaaattattttgtgggaaatcatcaatctattttattaatgttatgtgtttaattttggacttattttgggaaaaactgttcaaattgggtccttttaagcttattttaagcagcctagaaggaagaagctacttagctaatgaaagctgagacactttaataaaagcaggatcttaagagcattgtttttccttaaaaactttatactctcagataatctgcaacaacaaaaattaagaaatccctgacttttgtagaattcccactgtcaaattctcactgacttatgagtgtgagagaagttatcttttgtttgaattctgatagaacagtttaactcctttctaaggatataaaaaattcattgggaaagtgtgtatatttcaaagactctcaattatctggactgaaggcactgttctcactatggccagatgaatgggagtattctgtacatgaatcatgctgtattttaaatcaggacatcacttaagtattaatgttgtgtgtacagatttttgttttgggatttttttttgccctaataaatgttataaattttaaaaaaaaaaaaaaaag

SEQ ID NO: 43116 - DNA, 647 bp, Homo Sapiens
gtcttcctacatttgagacgagaccctttaacataggctgccttagtaacaaaataaaacagatgtgtcataatattaactgtcctaaagaacatgtgtcttgcaaatgccatggaactgaatatttatttccttgtgagtattatgaccgttaccaaaggactcaaccagatttagggctcttcttaattgatcatgttcagaaagggactcatttggtcccactttgtaacatgggaagagtagaagagaaaattaaatgtggaaatcataaatgcttttctaacagggttatgctattctgtaacactaaatgtctgtcttttctcttaaaagattaagttttattaattttgtcatacatttctctatttgaatatatcttaaccattttatgttccaaattcgttttttgtccaagacattctatcagaattttacttgcctctataatctgaaaaatgggttctagaatgtcccacttgctgtctcttagaggctgagcttcatttctatgagcaaagagctcatttagcaatgtagttatttcagtatttatttctattatggaatccctggggttcagaatgtaactttgtacatgagatatatattaatatgtatatgaacatgaaaaaaaaaaaaaa

SEQ ID NO: 43117 - DNA, 660 bp, Homo Sapiens
ccgaaatcccggctccaggcctcggggactgcggactgtggggaggctggccggagagagagggaaggacggggcctggcccccgggactccctgtgccttgcttggagctgacgccgacggtttattgcagggaactgacaagatcacattttgagaagaagttggaaagaatcccaagtggatgaactgaatatctggatgaggacaagatctgtggggagagactgtaagatagaatgagtccatttaagtcccaggacggtggaaactagctagtagattgcagccatgttgtggaagctgctgctgagatcccagtcctgcaggctgtgttctttcagaaagatgcgatcacctccaaaatacagacctttcttagcatgcttcacctatacaactgataaacagtcgagcaaagaaaatacaagaacagtggaaaagctctataaatgttcagttgacattaggaaaattcgtagattaaaaggatgggtacttttagaggatgaaacctatgttgaagaaattgcgaatattttacaagaactaggtgccgatgagactgctgtagccagtattttggaacgctgcccggaagcaattgtctgtagtccaaccgctgttaacacccagagaaaactctggcagttggtctgca

SEQ ID NO: 43118 - DNA, 699 bp, Homo Sapiens
  misc_feature (634)..(634): n is a, c, g, or t
taagcttgcaactgaactccctgatgctgaacttaggaggactttatggtctttagtagctttcccaaaactcaaacggcaagttttgttgtatgaacctcaagtcaactcacccaaagactttacagaaggtaccctcttctcagtgaaccaggagttcagtttaataaaaaatgcaaaggttcagaaaaggggtaaaatcaacttgattggacgtttgcagctcactacagaaaggatgagagaagaagagaatgaaggaatagttcaactacgaatactaagaacccaggaagctatcatacaaataatgaaaatgagaaagaaaattagtaatgctcagctgcagactgaattagtagaaattttgaaaaacatgttcttgccacaaaagaaaatgataaaagagcaaatagagtggctaatagagcacaaatacatcagaagagatgaatctgatatcaacactttcatatatatggcataattttgaatatcatggacaatatttagaacccaaattttggagtgcttgggcagaaagttgtaaagtttgtgctggagaaaggtttatttggactttgattacataaatattaaaatctctgccttaccttacaaaaacaactatatnttgccaatcacattagttagcatgatggcattcccttcatgttgcacactctttgacagcatgct

SEQ ID NO: 43119 - DNA, 810 bp, Homo Sapiens
  misc_feature (664)..(664): n is a, c, g, or t
  misc_feature (668)..(673): n is a, c, g, or t
gggtttaaagcttttcaaaggagcagaccaccttgaagattccccctagggttgatatgtgtctaattcattttataaaaattattcttgtcttcattttaaagctttggctatatagtcagaaatgtcctaaataacaaactattttgtatttaatttagggaagactaaagggaagaaaaatgaaaactcagtctttatgtaagctccaaggatattagggcttaaagggcttttctagttttatgagaatttgtactactgatttttatatattcctgtttttgagatgaacagatctctggggaaattgttgagttacaatggcatttcactgtgatccctctcaagctcagatcagttctataacccaatgacaacctgtctctttggtttactgtcctgtgaaatgtcagctcaagtttcccagaagtcgtgtgtttatgatgagtcagagtgcttttcctcggtgggacagttgctggccctcttaattttggtgtatgtgcttccaagtatctaaacctccagtctgatctgtatatgctatcctaactggtaattgcattattgattatgctgattatcttgcttgaaaggtcatacttttccatttgataaaaataaaagttttttttccgctggaaaaaaaaaaaataccccncccnnnnnntacatggtgggccggccttgggcccttgaagaagcttttctaaaaccctttcgttttgggcgcggggggcccccgttagggaaaatggaaaacggggtccatacctggtttccccaagggagaatcccggggcatga

SEQ ID NO: 43120 - DNA, 659 bp, Homo Sapiens
  misc_feature (640)..(640): n is a, c, g, or t
cagactttggaaaaggataattggaataaagggaggtgcttgaagattttccaaactactttatgtcatttagcttctattttctgaagggctttctttggtgccatgtactcagatcagtcagttgactgaaagatgatcatgttttcttcgtaaagatttaagcaattggcaactacaaagacattattttcttactgttctatatcatgtactgttgctgacattacaaaaagggtctggaagggaaaccgtgtcactgttttatcttttttctttaaaatacaaaagtatcccaactaatcatttattatggtcagcttgttttacatgtcccctatcatgagaaatgctatcaacatctgtgatttctaagagtcttaccaaattgttactttaattcttgtgtcctgctgagtggtttttcttttaaaataccatttttatcaccctgtggcactgggtgtgttactgcgattacactgatgattctgagctgtgcttcttcaagtagctcagttcttgcgttttatattaggtaacagttttgtgatgcttttgtgcattctttgtcatctcttctgagttttcgaatctgtcataaataaactttttcactatgcacctggtaaaaaaaaanaaaaaaaaaaaaaaaggac

SEQ ID NO: 43121 - DNA, 651 bp, Homo Sapiens
cctttatggttctctttcattggaagaggagaataaggaaagaaatggcaggtagcgcgggagggggaaaggaatagaaatggcatgtctttgatgctgtggcttgtgtggggacaatgggaagagcacagcaggcacaacatatctgtgttagtgccacgtggtatctgttaagtatggccagagcctcacatataagtgaagagagttaagacaattcttgctctttgaacaataatagtctatagaatttctattggcaaaccatcccagacaacctgacctatcaaacaaaagcaaataatccctgtctcagaactgctggtctaaaagctagaaggggcatgataatggaaattgctagaaaagagagaatgctctactctctttcctgtgcctacctacccccatcctaaaccctgtaaaacagaatttcaaaatagatgtcaaatatgaagtaattcagacttccaaagaaggaaagagttctgcccagggcagtatgagcaaatccacagggatgttaagatttggtccaactcaaaggtttatgggcagtgagcctagagtctcttgagagtaaacccttgcatttgggacaaggagaatatgtgaagttcaggagtgctcacactagagcaagatccagaa

SEQ ID NO: 43122 - DNA, 606 bp, Homo Sapiens
aaagtataatgatgttctagggcataatgaggaaaatttttaaaaaatagattataatgatacatattggtatcattaagacaacagatttgagcaaatacaattaaggtgtcttattttttgcatcaagtaattattgctgtggtctttctactccacaaaataattttttctttttgcagttgaaaattaactgcattattaactaattaataaaataaatcaagtggtataagggattagtttaccctcaagccgatgactccatggctactgatattagttagtttaggatttttaaaaagcatatcagacccccagtttcaggaattgagtataaatattgcttcttgtcaccctgggacagtaatgccttatagtggcactagtcaccttaagtagattacacatggttaaggtgaataaagctgcatgggaatttgctttcgtgatatatttcatttgcaaacttctacataatcaagttttatgtttaaaaccatcggttctatatatctagctttaggaagttgcccttacaggtgggaccttttgtattaatctgttttctccccagtcatcttatttggcaaaaaaaaaaaaaaa

SEQ ID NO: 43123 - DNA, 619 bp, Homo Sapiens
taaagattcaacactggtgtacatatgtccgctgggtgagttgacctgtggcctcgcacagtgattctgggccctttatgcttgctgtctctcagaattgttttcttaccttttaatgtaatgacgagtgtgcttcagtttgtttagcaaaaccactctcttgaatcacgttaacttttgagattaaaaaaaaaaacgccatagcacagctgtctttatgcaagcaagagcacatctactccagcatgatctgtcatctaaagacttgaaaacaaaaaacagttacttatagtcaatgggtaagcagagtctgaatttatactaatcaagacaaacctttgaaaggttacactaagtacagaacttttaaaccttgctttgtatgagttgtactttttgaacataagctgcacttttattttctaatgcagaggatgaataagttaaatacatgctttgaggatagaagcagatgttctgtttggcaccacgttataatctgcttattttacaatatacacgtttccctaagaaatcatggcagagatgtgagggcagaatatacacaacagatgctgaaggagaaggagggtagtgttttgcaaaagaaaaagaaaag

SEQ ID NO: 43124 - DNA, 590 bp, Homo Sapiens
ctgtaactcatgcctgaatgaagcttatctgacacataagcttcataaggcacacaacagcctttttacccttaggaacagctttttgcccttagcactatgcttgggggccattttaaacagtgaaatcaaaaaaagaacagaaatgcaaaaaccatggcattagcgtaaaaaggacacgtttatagtatgaaagctggaacatggccttgttcaacctcagctcagaatatgtgtacagcaagttttttgctgtaccacaaaattttaggttaggcaaattcacaaatacggaatccatgaataacgaggatcaactgtacttaactatattttaaagctgtgacatttatctacctggtttatggaatagaatttattgctgaatcatgctccagtatttgagtgatgttttaaatatcctatgtctgaaaataattcctcctaattgtgtggtaatttgcttttactgtttccacagtatttcaggtctttgctcattcactcagtaatactgagcacttaccatgtaccagaattttactaggcacaaccatgaataaaaatacaattctcttgcaaaaaaaaaa

SEQ ID NO: 43125 - DNA, 594 bp, Homo Sapiens
gcacgagatagtttcaggagtaaatctaaatgtggcttttgtcaagcacttagatggatataaatgcagcaacttgttttaaaaaaatgcacaatttacttcccaaaaaagttgttacttgccttttcaagttgttgacaaacacacatttgatattctcttatatgttatagtaatgtaacgtataaactcaagcctttttattctttgtgattaaatcctgttttaaaatgtcacaaaacaggaaccagcattctaattagatttactatatcaagatatggttcaaataggactactagagttcattgaacactaaaactatgaaacaattactttttatattaaaaagaccatggatttaacttatgaaaatccaaatgcaggatagtaatttttgtttacttttttaaccaaactgaatttttgaaagactattgcaggtgtttaaaaagaaagaaaagttgttttatctaatactgtaagtagttgtcatattctggaaaatttaatagttttagagttaagatatctcctctctttggttagggaagaagaaagcccttcaccattgtggaatgatgccctggcttt

SEQ ID NO: 43126 - DNA, 872 bp, Homo Sapiens
  misc_feature (638)..(638): n is a, c, g, or t
  misc_feature (805)..(805): n is a, c, g, or t
aaattgataaaggctatttgtctcgtaaacctggtctgcagaaagtcaaacttacaaaaactgttgtgacaaatgttatgtacatatattgatatgtaactgcattagtggccattttgaatcacagtggtgatcgtgtgaatatatttaacactgtgttaaattaatttacgttgctattttattttaatcataaacaactaccatgtttcttaatgttttgtgtaaatttaaggtaattatactatccttttaaacttcaagaaaacaaagttgttagcgtatttacatgaaggcgcattatgttgtcgtgtgtttcagtttcacattaaactgaaccttttactaattgtgagctaaagagatatatatatatatgtgtgtgtatatatatatatctacatgtctttctgtagcctctgcatactactggctgtcatcacaccagcgtacagtagctaaatttttggtgcaattatagcaaatgataatgttcccttttgaacttttacattttggcatgacatttcagagtattgtgggaccatgagacaaaattaagtacgatcacattctttatttctcattttaaagaaatgatgttggtttaccttttcctagttgaagatagtaattangtttctaagctgtatactgtgtttattggtggcagtgacaccaaagatagaggcaatggatagaaatttttaaactggaaagaaaacctgaattacactacatttttcgaagtctcttgtaattatttgggatatcaaccaaattttgattcgtctgtctaatcccnttcctagtattttaaatatgtcttttaacacattggaatcccttttattcctcccattaaaatggaa

SEQ ID NO: 43127 - DNA, 621 bp, Homo Sapiens
gtgaaaccaaaatgatcactgcctacttgtgattcaaatcttcagagttttcctagttcttctagaaatacatgtcaggtttgtttgttcatcctttctgtcagcatggatcaagcccctaaaatgtggtaagtgttgtcagagcagggcaatatctctactctcaagtatgaggggaatagaaacaaagcagcagttttagccagggttcaatgatagagtggaggtaaattaagagcctccaggctgtgattcaccatttgagacattatacataatttgtttttgttataagccatttgaatttttaaaaaatttcatacatgcaatggaatatagatatgtatatacacatataatatatatgctaaagtataaagagtaataataatgacaataaacaaacccctgtgtgcctaccacccaccttattgcctttcctttgaggtaccgtgtgcggtttcctgaacctatctctatccctgtctgatagagggaacccctgtactgaactttgtgttgaccatagccttcttgtctttcatcactttatctccatgtatgtatccttaaagaataataaatggaattaaactgaaaaaaaaaaaaaaaaaaaaggac

SEQ ID NO: 43128 - DNA, 500 bp, Homo Sapiens
ttctcggtatttaactgtctcgctgtcttatccgagtccctaatgaaacgacttgtgtgacaatctgtctgtgccttacgaaagtgtctgtgcactttttatcctttttaaaagcaacttttaaaagtggatggggaggggggctagcatacgtggtagggttctagaaatctgtggtcatcgctgaaatcctttttgcatcatgttttttgatgttggagtgatgaagtgtacatcccccaccccacacaccactacctgtgtacagaccttttaaaacatgtcttctttttttgattcaatactgtgacctctccgatacagtctaatccttggggatctgtaatcaaggttttaaaacctgggaagtgggttgggaagggtttgcactggtcttgagtgttgtgcttttctgtgttgtgtgttttgatttttgtctttttatctgttttatattgacataattttcctgtttaaaaaaaatacaactttggcttgtt

SEQ ID NO: 43129 - DNA, 672 bp, Homo Sapiens
  misc_feature (602)..(602): n is a, c, g, or t
  misc_feature (606)..(606): n is a, c, g, or t
gaagacggtcgtatgctgctcatagcagtgctggaggccattgggggccaggcctcccgcagcctcatggactgctttgccgatatcctgttcgccctgaacaagcactgcttcagcctcctgagcatgtggatcaaggaggccctgcagccacctggtttcccctctgcccgcctcagccctgaacagaaggataccttcagccagcagatccttcgcgagcgagtgaacaagaggcgggtgaaggagatggtgaaggagttcacactgctgtgccggggtctccatggcacagattacacagctgactactgaggggtgcccccatcccatccaccccttctcttcatccttccctattcccaaagagtaaacctggaccctcactgctgtctctgcctcctttctgctgtcaccaccacctaactgaaagcctgggtccagaaggcctgggggaaggatgggaggatgcttggacccaggccttgggagggaatggtgggaacatcctctagctcccaggttggaagagatactactgtagccaagccacctaggctggagcccttcagaatactgtcattgtccttggggcggggggngggntgcagtagtgtcatcaacccccccatccccattaaattaatcccaacatgcaaaaaaaaaaaaaaa

SEQ ID NO: 43130 - DNA, 869 bp, Homo Sapiens
  misc_feature (675)..(678): n is a, c, g, or t
  misc_feature (680)..(682): n is a, c, g, or t
  misc_feature (684)..(686): n is a, c, g, or t
  misc_feature (688)..(755): n is a, c, g, or t
  misc_feature (757)..(773): n is a, c, g, or t
  misc_feature (775)..(780): n is a, c, g, or t
  misc_feature (782)..(790): n is a, c, g, or t
  misc_feature (792)..(803): n is a, c, g, or t
  misc_feature (805)..(812): n is a, c, g, or t
  misc_feature (814)..(817): n is a, c, g, or t
  misc_feature (824)..(824): n is a, c, g, or t
caggctttgaagacaagtgagagccttggaccagccccgaggttccttttggctctctgatgctctgtgcctgttgaatgtccatgctacaagaagttatgagccttgttctaagtacagatgaaccttgtatttgtgtaatctcccaagggagagctatggtttacattcaattttttggtctttctgctatgaaacgtgtttattttgcctctgtcaatgtgtttgcaaccttaagtaaggaaagggaaaaaaaaaatagccctctgaactctgatcttttgccgcttctgtagattttgattgtgaagttgggagtgaggacattcaaaagcccatggtgaatgcatatgcctttagaatattgtgcctgttttaaaatgtttgagcttttaaaatacgttgttaaaacatgaatccatttttgtaattgtataaatactcataactaattttgaatgctactgattgtgtaactgaatttttgtatccaaaaatacattcttgagtactacttttcctaccttgaaaatctatttcatttactaaatattgttttctttatgctaacttaactttaaaaggaatgttgccaagctgtctctcctcccccatcacaattgttagttttttttgctttctttcttcaataaatgatagcattatgatcttttnnnnannnannnannnnnnnnnnnnnnnnnnnnnnnnnnnnnnnnnnnnnnnnnnnnnnnnnnnnnnnnnnnnnnnnnnnntnnnnnnnnnnnnnnnnntnnnnnnannnnnnnnncnnnnnnnnnnnnannnnnnnntnnnnggggggnggggcccccaggaaaaccccccccggggggggccttattatcgcg

SEQ ID NO: 43131 - DNA, 609 bp, Homo Sapiens
ggaagggtccatctcagagaatttacgagcagggatgaaggcctccctgtctaaaatccctccttcatcccccgctggtggcagaatctgttaccagaggacaaagcctttggctcttctaatcagagcgcaagctgggagcacaggcactgcaggagagaatgcccagtgaccagtcactgaccctgtgcagaacctcctggaagcgagctttgctgggagagggggtagctagcctgagagggaaccctctaagggacctcaaaggtgattgtgccaggctctgcgcctgccccacaccctcccttaccctcctccagaccattcaggacacagggaaatcagggttacaaatcttcttgatccacttctctcaggatcccctctcttcctacccttcctcaccacttccctcagtcccaactccttttccctatttccttctcctcctgtctttaaagcctgcctcttccaggaagacccccctattgctgctggggctccccatttgcttactttgcatttgtacccactctccacccctgctcccctgagctgaaataaaaatacaataaacttaaaaaaaaaaaacaaaaacacaaaaaaggg

SEQ ID NO: 43132 - DNA, 716 bp, Homo Sapiens
cgcgtccggatttctcttaagagtgtgatttctcatagggctagtaagggagattgtatacctgttgtccacagtcttcaggcagctccccaggtctctgaaccccagagtgtcatcattggagagagcagtgactgcgagagatggtggaggccgctaagcatggtagaggctagaggaagtctatccacaggcagttgtgttcccagcaattcctcccatcctgcatggttcacaccaagagaaccttcagatcctaccagcaaccgtagcaccttccacccaggggactcccagaagccagtaaagagaccaggagccacctcaatcagcagtgtttgcatgggaggtgtttctgcctgtccctgcctgatgtccctggtggagcaggtacctccgggcgggcaagcctctgatttgcacacctgaaaatcgcggaattgagtttcgatagattgatttttaaaacttttttggagtagggggtataggggaatcatttaatttaaatcattaagattcccctgctcaaacccagattcctgtgtacagatgctatttagagggaatcagaaaaatgccaagccttttctctttgaatgtgctatttttataactgaacttgtacatatgtataaagagagacacatcttccttttactaactggataaaaaaatcttaaataaaatggagtgagataattttaaaaaaaaaa

SEQ ID NO: 43133 - DNA, 536 bp, Homo Sapiens
agtaaaataaggctccttcatgtggcgtattgggccatagcctataattggttagaacctcctattttaattggaattctggatctttcggactgaggccttctcaaactttactctaagtctccaagaatacagaaaatgcttttccgcggcacgaatcagactcatctacacagcagtatgaatgatgttttagaatgattccctcttgctattggaatgtggtccagacgtcaaccaggaacatgtaacttggagagggacgaagaaagggtctgataaacacagaggttttaaacagtccctaccattggcctgcatcatgacaaagttacaaattcaaggagatataaaatctagatcaattaattcttaataggctttatcgtttattgcttaatccctctctcccccttcttttttgtctcaagattatattataataatgttctctgggtaggtgttgaaaatgagcctgtaatcctcagctgacacataatttgaatggtgcagaaaaaaaaaaaaaaaaaaaggac

SEQ ID NO: 43134 - DNA, 621 bp, Homo Sapiens
atatgaaatgataaagatgtcaaatatctcagaggctatagctgggaacccgactgtgaaagtatgtgatatctgaacacatactagaaagctctgcatgtgtgttgtccttcagcataattcggaagggaaaacagtcgatcaagggatgtattggaacatgtcggagtagaaattgttcctgatgtgccagaacttcgaccctttctctgagagagatgatcgtgcctataaatagtaggaccaatgttgtgattaacatcatcaggcttggaatgaattctctctaaaaataaaatgatgtatgatttgttgttggcatcccctttattaattcattaaatttctggatttgggttgtgacccagggtgcattaacttaaaagattcactaaagcagcacatagcactgggaactctggctccgaaaaactttgttatatatatcaaggatgttctggctttacattttatttattagctgtaaatacatgtgtggatgtgtaaatggagcttgtacatattggaaaggtcattgtggctatctgcatttataaatgtgtggtgctaactgtatgtgtctttatcagtgatggtctcacagagccaactcactcttat

SEQ ID NO: 43135 - DNA, 745 bp, Homo Sapiens
ctggccgagagagcctccaccttcgcagctgcggagatctgagctctagctcttccctgcggcgtctcctgtctggccgcaggctggagcgtggtacccgcccccacagcctcagcctcaacgggggcagccgggagactgggctctgacctaggcttcttgtcacactgaacacatccagccacaggcaccagctggttgggaccagcagcccccagcatcctcttgcactggctggcacaaaaagaaacctgctgtataccccccaaagtgtccctttccctcctacctctggggtctcttgctgcttgcctctgctgctctggactgggagagcttctgtcctgtgctgcatgggtatttagactgtgggggagatgccccttcttatagcactggaggaggaaaacaaattcttgtccccctcagaatgagagtggctctttctgatttgcaagggcactatggtcagggcaaaggcatggcccaggtgtttaagtacagggtgacgtgtgcctatgcaatggggtggtaaggcaggcacgaagagtccaaaaaatctaggtggcctctcagctctgccacctctagctgcatgaccttggggcaagctatgtaaccccaattgcctgctccattaaagactgtgaaggtagaatgtttgtaaagctcttaacagtatgtaagccttcaataaattttcagctttcccctttggtttccttgatccaaaaaaaaaaaaaag

SEQ ID NO: 43136 - DNA, 675 bp, Homo Sapiens
ggcggctcctgggggctccagggcaggcgagactgggaaaggcccagccctggagctccagccgaccccaccgtgcccctggcatcctggccctggccgccacctccctggcaccgtctgcctgcagggattctgtgtttttggcttttttaatgtcttaaaatcttttactcaggtaattttaatttcagagagaaaaactgaagtaaatgtcaaaaaacaccagccttaaatccaaagggagagaattcgtgttcttgggtctgtcccgagtgggctcgcgtgcagccaaacatcagctctgggtccaggcgtggcctcagctgggagcctgtgtcctgagcccccggagcgaaggggtgcctggggcatcttggccctctctgggcagacaatgtgtgcacctatgtggaaggccaaggacatgggctgtggccaggcctgtcccgctcaggccccctgcccggcggccgtctgtgtgcggggcctccctcctggctgtccaggacacagcccgtgcagccccagcctggacccaggccatctctggttgtgtctgtgccgactcggtgttgaatcaaatcaggtgtgcgtcaggagccggctgtgtccttcctgccacactcggggattcattccttagaaactgaaataaattctaattttggaaactcc

SEQ ID NO: 43137 - DNA, 676 bp, Homo Sapiens
gacccacgcgtccgcccacgcgtccgggccattctgtatgtttttgtaaaacagaatatttaatccttatttattaatctcttgctggagtggtgtaatgtatctaacttttagcaaaggagggttgcagagcagcttaaattttttttataatgtataagaattttgtttatcttttaagagtagtaaagtactttgagtgtttgggggttcaacacacacatgcaattttgcttaacaaaagtattttataatacagtttcatacagaattaccttaaaagggagtcttatgttttcaactacagatagttgtaagggatcatacagaagatattgatgatagttgaaatattcttagaaggggtgtgtatgtctagctgtgtctaccatgtgtatgtattcttgacaagcagtataaaatacctgtgatttttctttacattagggataatgcataaggaattaatcttcatatatattatcatccctaatgtagcagggggaagtatttaattgcccatgatatgtattttacttatactatgccagagaggaaactataaagtaattacacatgtaatcttgggtttttcacatatgtaggtattcattttgagtaggttgaagaagaaaaaaaatatttaaatgaattgaattcctgatgggatagtatc

SEQ ID NO: 43138 - DNA, 1049 bp, Homo Sapiens
  misc_feature (886)..(886): n is a, c, g, or t
aaccaccttgcttttctcttttctctttttcttttttttatttttgttttattaatttggggaaaggggtgttagcattagtgccatgatatctactggattttaagcagggagactttatttttaaaggtaggttgaaatttgggagatttctcggcaggaagggctgaaatccaggcccctgtctcaacttggagagaggtgacagacggcagatcttccaaatcaaattcctttccagttcttcccctggctgcctttttgggggtccctgccttagccccacacaaggctttctgaactgccaagaggggatctggcttctcaactgctcggcctcttgggccaggctgtgcccagccagccctgggagaactgggtagcaggtggctgacttctttaagcacctttctaaataccagcagaagaggctcccgcctctgttagcatgatcagtactattgtgacattaaaacaacaacaataagatcttcctatctggagggtacagaggtgaatggctttggttttcatttctcttcttcactgccttttctcggtgtggtatttgacaagattttagctcaaagcctcaccatgaattgattttttttgtttgtgtgtgtgtttgttttgggacaattttagatacctgagtgcactttttcagttagtcctaacttttaaaagaaggaaaaaccaagagacatatctggtgtacgtgttgcagtatgaactctggttgcaatccctccccctcccacactgccccccattttgagtacgcccgcacaagtcaaacgcctaggaagtttgaataaacaccatttttttctaaagccccctatgcgtaaaatcctgaaacccctccgagggcattctatgntcggggggggcgggacaaaaagaaggtaattgtgaaaatggcgcaccattggggtcaatataccttgtgtttttcctgtgaacccccaaagcgctttttcttttgggtaacaacaaaagggggggggtaaaaaaaaattctttggcccccgggggttctctta

SEQ ID NO: 43139 - DNA, 735 bp, Homo Sapiens
  misc_feature (662)..(662): n is a, c, g, or t
agtacatcgtacacgtgctaggaaaaaacagcttcagtgtctttgtttaatgtgttgaaactcatctttttaaatcttgaaaaaccaattgtttacttgaaacttgaaagtagcatatttttctgttttttggttgtttgttcatttgtattagcacaatttaatgtaattcctggtttggaggcagcaagacctatgagcaagaactatttacttgaccctcgtttttttctcttgttcttgtgtggtctgaaatctaaaactagactttattatgatagatttcctataagccaatttctaataacaaatagatttattatttaatctgtaccttctatcttctcataattcgtggtcttacagccttccaaaataactccagttgggcacccatgagctaggatcaaactttctttatatactttatatattttacattatttctgatttttaaagcaaatgattgccattatgattacactcaacctaaatagttatgaacagtttcagaacaatgaaaaattacaatactatgtgatagtattgtaactatttttctattttagtcatatgtcgcttatatcctaccagaacttttaaatctataatattcgatatatttctacaaactgctttattgtagaagccatatttatgtntattttataaatgttttctagtgtcaactgtactgtggagaacacgaaatgttgcatctgttaaaaaacaaaa

SEQ ID NO: 43140 - DNA, 875 bp, Homo Sapiens
  misc_feature (707)..(707): n is a, c, g, or t
  misc_feature (769)..(771): n is a, c, g, or t
  misc_feature (781)..(781): n is a, c, g, or t
  misc_feature (787)..(787): n is a, c, g, or t
  misc_feature (792)..(792): n is a, c, g, or t
  misc_feature (812)..(813): n is a, c, g, or t
  misc_feature (859)..(859): n is a, c, g, or t
  misc_feature (873)..(873): n is a, c, g, or t
cctgctgccgcccgcgccatggctggcaaagcacacaggctgagcgctgaggagagggaccagctgctgccaaacctgagggctgtggggtggaatgagctggaaggccgtgatgccatcttcaagcagtttcatttcaaagacttcaacagggcctttgggttcatgacaagagtggccctgcaggctgagaaactggaccaccatcctgaatggtttaacgtgtacaacaaggtccacatcacgctgagcacccatgagtgtgccggcctttcagaacgggacataaacctggccagcttcatcgaacaagtagcagtgtccatgacatagaccctgcccttcctctttgaattcttccgggggaaggggtgactgaactgggagtccagggagggagctgaggagcccttaccctcccaccactcccctcccaagacccagccgccgccgttgagggctgagtccttgctgtgggatgtgccagtgtccccaccaacaccaggaatttagaccttttccctgcaccactctcttcatcctgggggctctgttacactaatttgaataaactctcccctttctttgcaacttcccagcaacaataatgattttcttgccaggccgtctcttgctccctaattcatttcccaggaagctgtgatacagggtgaaataaagtcttgtcttagaaaccaggaccctanaccccacactatgtaatagaaacacatgtgtttttatgtctcaaataaaactattatatccnnnaaaacacccncccccnccccnaccccccccccccccccccnnacaaccaaccccaaaacaccccaacccccaacccccccccccacanaaacccaaccccanaa

SEQ ID NO: 43141 - DNA, 748 bp, Homo Sapiens
caacgacctgaaggcggtctctgtggagagtctgctggcgttctcagggctctccgcagacatgctcaatcaggcgattgggcccctcacctcttcaagaggccccctggaccttcacgagcaaaaggatataccaggaggggtcctcaagattcgagatggcagcaaggaacccaggtcgagatgggacattgtgcggctcatcccacctcagacgtacctgcaagctgagggtgaagacggccagaacttggagaagagacggaatcttctgaactgcctcatcgtccgaatcctcaaggcccatggagatgaggggctgcacattgaccagcttgtctgtctggtgctggaggcttggcagaagggcccgtgtcctcccagggtttggtcagcagcctgggtaaggggtctgcatgcagcagcactgacgtcctctcctgcatcctacacctcctgggcaagggcacgctgagacgccatgacgaccggcccaggtgctgtcctatgcagtccctgtgactgtcatggagcctcacactgagtccctgaacccaggctcctcaggccccaacccaccctcacttccataccctacagattcgctcccggggtgtgccctatgcctcctgcactggcacccagagcttctctaccttccggtagccctagacttggggtcaggggaaggtagagctggagcttttacagaaataaacccaagagtttgattataaacaaaaaaaaa

SEQ ID NO: 43142 - DNA, 578 bp, Homo Sapiens
ccacgcgtccggtctacttttgtttttttaaagacaaaccaatgtgttgtagacctatatgtaacctattccttagtctcatattataggtatgttataagaatggatattttacttggctttagaatgttttacaagaaaactaattcttaactgatcaagtccttgctactaaaatgcttgtgtttttcatcatgacgtcgtgtgcttctaaattaatcattttcgttgtagaaaaatggagtgaatttatattagtcttggaaactaataatagcattgtaaatttatgagatgattttaacagaaaaaatatagaagaatatagttattttaattgtaatattactaactgtagggtgagaaaaaggggggggggtcccattgtggtgaactatgttatagcttgttactcatagtttctttttgatcattttttcggtctccgaggtgaaatgacttattaattaaaatttgtaaactcacatatgcatattgtatatgtgtagaaatgtaatcacactttgtcttggaattacattaaactgtttgaaatcactgtaaaaaaaaaaaaaaag

SEQ ID NO: 43143 - DNA, 847 bp, Homo Sapiens
cacggcactcgcctgcacacccacctgattggcaacatacacactcacttggtgcactaccgcgtagacctggatgtggcaggcaccaagaacagcttccagacactgcagatgaagctagaaaacatcaccaacccctggagcccgagacaccgcgtggtccagccaactctggagcagacgcagtactcctgggagcgccaggcggccttccgcttcaaaaggaagctgcccaagtacctgctctttaccagcccccaggagaacccctggggccacaagcgcastaccgcctgcagatccactccatggccgaccaggtgctgcccccaggctggcaggaggagcaggccatcacctgggcaaggtaccccctggcagtgaccaagtaccgggagtcagagctgtgcagcagcagcatctaccaccagaacgacccctgggacccgcccgtggtctttgagcagtttcttcacaacaacgagaacattgaaaatgaggacctggtggcctgggtgacggtgggcttcctgcacatcccccactcagaggacattcccaacacagccacacctgggaactccgtgggcttcctgctccggccattcaacttcttcccagaggacccctccctggcatccagagacactgtgatcgtgtggcctcgggacaacggccccaactacgtccagcgctggatccctgaggacagggactgctcgatgcctcccccttttagctacaatgggacctatagacctgtgtgaccagcccccagttcctcccccagttcctcccaggaagcccaggagcctcactggggcagacaataaaccctcagagcctc

SEQ ID NO: 43144 - DNA, 999 bp, Homo Sapiens
ggccctgtcacagcctgtgggtaggggatgcggcgggatcctcattgccatggtactcaaaggtagaagagcctggagtttgttgcttctctttgctattctttcatatcctcttgggcctggtgattaattagcaattctcattcctctcagccaaaggcctgcactgggctttatttgtctttttttattttttaagcactgcctgccagagatgggcctggggcctgatgaggaccttagcgctgctcgttctccttttctgttcatgcacacattcctccatggggtggggaaggcaggcatggggtgtggccctcggagaagttaggagtcccccagctcaagatacagtggcaaagacctagtggtcccctacccccacttctctcagttcctggcatgaggagagaagaccctgctctggtggagctgacaacctttgaggctgggaggagagcagcctctgggcatcgttcccagtgtccctcacactaaaacggcgtagatggcaaccccccaaccccaccccgctgctcaactcttgtgtttgttgttctggtttgccccatttatctgttgctgttttgtgttgtcttcccctgctccgcattttgtaaaatggcccctgggggagtgtttttgctggatcttgtccctctcgctctctcactccactactttttgggaacaaagtgatggcagaatgcggtggtggtgggggtccttgtgtactgtggggatttaataaaacggattttaacgaatccccaggaagaaggagacaacaggacacaaaaaaaaaccccggagaggactcatagtggcgggggggggcaagaaacgagagggtaagtagaacggtggcccacggggccacaagcggtgttccggtggaccccaagttctggtggtaacacagggggtgaaaaccgcgcgggacacccaataaggggaagccgcaaataaaattcgagaagcgcagggctaacccggata

SEQ ID NO: 43145 - DNA, 571 bp, Homo Sapiens
atgtccagcctctttaacatcttctttcctatgccctctctgtggatccctactgctggtttctgccttctccatgctgagaacaaaatcacctattcactgcttatgcagtcggaagctccagaagaacaaagagcccaattaccagaaccacattaagtctccattgttttgccttgggatttgagaagagaattagagaggtgaggatctggtatttcctggactaaattccccttggggaagacgaagggatgctgcagttccaaaagagaaggactcttccagagtcatctacctgagtcccaaagctccctgtcctgaaagccacagacaatatggtcccaaatgactgactgcaccttctgtgcctcagccgttcttgacatcaagaatcttctgttccacatccacacagccaatacaattagtcaaaccactgttattaacagatgtagcaacatgagaaacgcttatgttacaggttacatgagagcaatcatgtaagtctatatgacttcagaaatgttaaaatagactaacctctaacaacaaattaaaagtgattgtt

SEQ ID NO: 43146 - DNA, 595 bp, Homo Sapiens
gcctctcaagcgcttcagcatggaaggcatctccaacattctgcagagtggcatccgccagacctttggctcctcaggaactgacaaacagtatctgaacacagtcattccttacgagaagaaagcctctcctccctcagtggaagacctgcagatgctgacaaacattctctttgccatgaaggaggataatgagaaggtgcctactttgctaacggactacattttaaaagtgctctgccctacctaaccttgccctttggagcagcctcgctgcaggaggtcactgagcaagagtcattccatcacagggactgcatgagaccatgtaacctccgacatgtatttaaacgtgtatagcttaacctggattaaacacgagcaagcgcgcggggtcctttgccgttggcttctagtgctagtaatcattggatgcatgatggggcagggccggtgatggtgcctcccccttgctggtgtcaggagaggggaaggcagccgctttcaccgctcattatgtagtctggctacagccctcaaaaacagcttatactcttaagactaattttgaaataaaaccttcatttaattaaaa

SEQ ID NO: 43147 - DNA, 624 bp, Homo Sapiens
  misc_feature (517)..(517): n is a, c, g, or t
gcagctctcgttctgagacatgagccttgggatgtggcagcatcagtgggacaagatggacactgggccaccctcccaggcaccagacacagggcacggtggagagacttctcccccgtggccgccttggctcccccgttttgcccgaggctgctcttctgtcagacttcctctttgtaccacagtggctctggggccaggcctgcctgcccactggccatcgccaccttccccagctgcctcctaccagcagtttctctgaagatctgtcaacaggttaagtcaatctggggcttccactgcctgcattccagtccccagagcttggtggtcccgaaacgggaagtacatattggggcatggtggcctccgtgagcaaatggtgtcttgggcaatctgaggccaggacagatgttgccccacccactggagatggtgctgagggaggtgggtggggccttctgggaaggtgagtggagaggggcacctgccccccgccctccccatcccctactcncactgctcagcgcgggccattgcaagggtgccacacaatgtcttgtccaccctgggacacttctgagtatgaagcgggatgctattaaaaactacatggggaaacag

SEQ ID NO: 43148 - DNA, 633 bp, Homo Sapiens
gcactgcagcagcttcgggcagccgccctaattagtcgtggactggaatgggtagccagcggccaggataccaaagccttacaggacttcctcctcactgtgcagatgtgcccaggtaatcgagacacttactttcacctgcttcagactctgaagaggctagatcggagggatgaggccactgcactctggtggaggctggaggcccaaactaaggggtcacatgaagatgctctgtggtctctccccctgtacctagaaagctatttgagctggatccgtccctctgatcgtgacgccttccttgaagaatttcggacatctctgccaaagtcttgtgacctgtagctgccacgttttgaagagcttgagctgggtccccagtgggctgtctctctgtggggagggctttctgcttcaccatcattaggaatgtgaccattcctatataattcctggactggtgagattggtggtaggcctgtgaaatttgcctagttactaccattctcgtttggaggaaacaatctctgccacaccaagtcattgactttgtcgaggcaccttttttcctgtttctccttttctgttgtcgagtaaaatttcataatctaaccacacaaacaaaaaaca

SEQ ID NO: 43149 - DNA, 627 bp, Homo Sapiens
taatgtagccatttggggttatctctagtaaggcagatacccacgttggtaaatttttaggatattgtgttgcactagaaaactaagtggttcatatttctaatgaggaagattaatgaaagaacatgttatattctgcgtggtatattttaaagtttaagaaggcatgttaaacattatttcctctatggtagttaaaatacagaattagatttttaacaggtgtcatttgactaaacgtttcggtagaatgcttcatacttgagtgatgctggataaggtattgtatttcaacaatggactatgccttggtttttcactaatcaaaatcaaaattactctttaacatgataaatgaatttaccagtttagtatgctgtggtattttaataagttttcaaagataatgggaaaacatgagactggtcatattgatgaatattgtaacatgtgaattgtgatccatttctgatatgtcttgaactactgtgtctagtgggcaaatgtcattgttacctctgtgtgttaagaaaatacaaatattttctaaaggtcaaaaaacacaaaaccacaccaaaaacccaccgacacaccacaaaacaaaagcaccgcacaaagaaccaaaca

SEQ ID NO: 43150 - DNA, 563 bp, Homo Sapiens
ttttgaagagtggaggagctaggggctccagaaagaatcttacacatgtgttgaagacattgatgtcatagggagcggggagctgcattcccttctgggctgttactgctaaatctcagtatgaacagaccaggcggaaagcttggtggccaagcagtctgtgtgcttccccgctgatggagaacgttgcgttgttcacaatagggcctcatgggtgtagccgcatggcagacccatggctggcgcagctgcctgttgccgtctgtcttcagtaactgctgctctgttaactgttctattctgatactatgcgtgttgttttttacaacaggtatgtttttgtttcagaaatatgtattgcttttctcatattttttgcaaattgtattgtcaacatgggtcatttaaagtcctgtatgaaccataacctgctgtggtacctttgtacatgtttgattctgtattctttattccagtgtggcatatgtgcccctctgtatcttttgagaagtgcggaataggttgcttctaccacctgttcttaatgtaacagtaaaagtttt

SEQ ID NO: 43151 - DNA, 934 bp, Homo Sapiens
  misc_feature (590)..(590): n is a, c, g, or t
gtggatatataattgatttatgttgaatatatggacttagcaactaaaaataccacagatggttaacctggactggggcaaagcaagataatagtgatgatcgtatgttgctgtctccatccgtctttaatgggtcagggctttgatttccaagggtcttcaggtgatgagtaggggtacccacaagtcagaaggtctgcgttctcctagtttgtttgctgccatttgaactcatgtagggaatgaaagaaagctgcaattatccgccaactgcatttaaaacaaaacaaaacagaaaaatcaaaataacattgactcttccaaccactgacatgttgtttaataatctaagcggcagtcctggaggctaccagacttactgagttctacctgagaaacagccaagcaaagtgtgagagaagggttaagactggcttacaatgagatgcttcaaatgaaaagggaattatgagtaaaattgaactttgatgggggattcagttctggaaaagaatttggtattttccagtctgctaggaccaattaccttgaaatattttaaaatctcagtaaaataggttattgctganaaaaaacaaaaaaaagataaaaaaagacaaaagagaaacatcaagaaaaaaagagggggggggcccccgccaacaaaaaaataccccctcgagagggagggccccaattttgacgactctgacaaccgcactggtttgtgtcaacaacaagtggggtgccccccaaagagaagagaagcgatctattatacagcattggaagcgtccggcgcgagtatttaacaaaaacgctcgtcctgtatgtgcggaaacaagatgcctacgctcgggacaacctctggtgagagagcagccccctcacagttggggggcggtgacactacgtggtgccacatatcctgcaa

SEQ ID NO: 43152 - DNA, 950 bp, Homo Sapiens
gaggactttgttcctgacgaccgcctggaccgcagcttcctggaagacacaacccccgccagggacgagaagaaggtgggggccaaggctgcccagcaggacagcgacagtgatggggaggccctgggcggcaacccgatggtggcagggttccaggacgatgtggacctcgaagaccagccacgtgggagtcccccgctgcctgcaggccccgtccccagtcaagacatcactctttcgagtgaggaggaagcagaagtggcagctcccacaaaaggccctgccccagctccccagcagtgctcagagccagagaccaagtggtcctccataccagcttcgaagccacggagggggacagctcccacgaggaccgcagcacccccctggccaggcggtgtctctgttcgcacaggtccggagaagcgcagcagcaccaggccccctgctgagatggagccggggaagggtgagcaggcctcctcgtcggagagtgaccccgagggacccattgctgcacaaatgctgtccttcgtcatggatgaccccgactttgagagcgagggatcagacacacagcgcagggcggatgactttcccgtgcgagatgacccctccgatgtgactgacgaggatgagggccctgccgagccgcccccaccccccaagctccctctccccgccttcagactgaagaatgactcggacctcttcgggcttggggctggaggaggcccgacccaaggagagcagtgtgggaaggtaaaggagggcaaaaccccctcctagggggaagaagaaggaacaggaaaaacgggccaacagggaataaggaacaaagctggcccacgaagaagaaccaaacctccaacaatacccaaggggcacaaggggggggaggcgccaaggggaggaaaccggcggccaacgggggcgaggaacccatgcgt

SEQ ID NO: 43153 - DNA, 546 bp, Homo Sapiens
aggaaaggaagatgattgaagaatcactgaagattaaaataaaaaaggaattagaaatggaaaatgaattagaaatgagtaatcaagaaataaaagacaaatctgctcacagtgaaaatcctttagagaaatacatgaaaatcatccagcaggagcaagaccaggagtcggcagataagagctcaaaaaagatggtccaagaaggctccctagtggacacgctgcaatctagtgacaaagtcgaaagtttaacaggcttttctcatgaagaactagacgactcttggtaaccatgtttgctgcccagcttctaacttacataccgtgagaagttacgtaacatttactcctttgtaaatgtttccctatcatcagacaaaactcagtaaaaatgtgtgtaatccaatgtgggtttttttttccataattaattttgataccatagtgtgtgaaccaagaataatctagtcacgtgaaacctcttctccagtcatagtatttctcattcattataataaaagtaactggcttttaacctccttaaaa

SEQ ID NO: 43154 - DNA, 754 bp, Homo Sapiens
gggttcccccggcggaaaaattttccccccccggggggatctggaggacagcacctgtgaacttcggcaacctcaagcgctatgcatgcacctctcatacccaggcctgagcccaggctgctatgacacctacaatgcggacatcgactgccagtggatcgacataaccgacgtgcagcctgggaactacatcctcaaggtgcacgtgaacccaaagtatattgttttggagtctgacttcaccaacaacgtggtgagatgcaacattcactacacaggtcgctacgtttctgcaacaaactgcaaaattgtccaatcctgatctccgggagggacagatggccaatctctccccttccaaagcaggccctgctccccgggcagcctcccgccgaggggcccagcccccaacccacaggcacggaggggcatccctccctgccggcctcagggagcgaacgtggatgaaaaccacagggattccggacgccagaccccattttatacttcacttttctctacagtgttgttctgtgttgtggtttttattttttatactttggccataccacagagctagattgcccaggtctgggctgaataaaacaaggtttttctacaaaaaaaaaaacaacaaaaaaaaaaaaacaaaaaaacaaaacaacaaaacaaaaaaaacaaaaaaaaaaacaagggggaacaccccaccaacaacacaccccacaccagccgcacccacaacacaaagacccca

SEQ ID NO: 43155 - DNA, 578 bp, Homo Sapiens
actgcctctccaaccctgtgggctgtaagcaagctcaggctagtctccccactgggggctgtgcccctccctgggacggttccgtgggcagccccatcactgtgttcaatagtgtgagaatgtagctaaagcccctgctgctgctgctgcacatgccacagcaggcggtgggggctgcgtggggacaatccatcgtggagtgttctctcagcttaggtctggacaggagacttggcgggagatgctccaggatgtgggtgattctgtacctggggaggctatctctgacctcccgacaggggacactcccaggccagcccaggggtcaggggcagaggtgcacacctcagcatgagccaagactggggtcagggagcaggtgtggtttgagccaggacctggggcgggggtggggccggggcctttctgcctcatttgctttcaatgaaagcctcaaagcagccaaaaccaggctttcccccttcctcgagtttgaatatccagaatcttttgtacttcttgttggttaaattgtttatttttgtaaaaaataaaataaaattagttaataaaatgat

SEQ ID NO: 43156 - DNA, 643 bp, Homo Sapiens
  misc_feature (618)..(640): n is a, c, g, or t
aatcatttctaacaagcatcttcttaaccaactttatgcacagtgtatgtttgtaagtgcttctgcacgaatgtttatacatgactgtttccatagtacttatgtttttaaaaatattcagtcatttcctactataatcctcatgtatccatgtaactgactcaaaaatacttcagccatagaaagctaaaactgagcaaatctcattcttcttttccatcccctttgcatgtggctggcatttagtaatgattaataatatggccagctgaataacagaggtttgagacacaattctttctcaaaggagtcagctaagctgggtctacttatggacaaacatctaaatgtgtggaagtatctgatatttgacaatggtaaatttccacttagctagctagcattgtcagacttcaatctcctcatggctctggccgtcctgttttaagcatgataattgttggccacatctcacatagttctcattgagtgagttcataaataaacagggttttttttttttttaaagagcagccaagcacaaagtgtgactttgttgacattttatgtgactttgtcatatgttcctaacccccaataaaagcaatgttgcatcannnnnnnnnnnnnnnnnnnnnnnaaa

SEQ ID NO: 43157 - DNA, 673 bp, Homo Sapiens
gttgcccaggtttttctgtctgaaatacctagtgacccaaagctcttcagacatcataataaactgcgactctgctttaaagattttactaaaaggtgtgaagatgccttaagaaaaaataagagcttaattgggccggatcaaaaggagtatcaaagggaactggagagaaactatcatcgccttaaagaggccctacagccactgatcaacagaaagatccctcagttatacaaggcagtattgcctgtcacctgccacagagattccttcagtcgaatgagccttcgcaaaatggatctctaaactgaatgcacttgttttattcatctgcaaagagccatgtattcaacatcgagtgtgaaaagatctattggaaaacaacatggaatggaattctggaaattattattcattgaagaatgcagtggccaagaaaatatcaaatgtagattgttaacgcttgagaatcatggctatggtttctaatgttctggtaacaagctgttatcttttaagacattttaatgactcaaaggtacactatacatttaccattatttataccatagctaaggttaaaaatttattcactttaagttcgtattttttaatttatattaccatttatagattcattttggaaccattttacatgtagtaatgcttattt

SEQ ID NO: 43158 - DNA, 744 bp, Homo Sapiens
cgaatggttccaatccctatacattgaagctttgcttttctacatcatcccatttataagaagagaagagcatgttagaatttatgttcacctttattacaatttcaaagctacacttcattaaaaaaaaatctaaaatggttgatctcatgttgccttgcttactttaagatcctgttctgtaataaacatattttgccttgagtaaatttgttgtaagcttaaatattgaattgttttcattttaagatagaatatcataatgtagactatctacagcttcattgtagattatacagatatatgatttctaaccttattactggaatttttcttccacagtaaaaatatatttgcattcttaatgctaattatctgcaagtattttttcattgtgtaagagattaatgcaggtgaaagtattgcattttaatatagaattcctattatatgtttagatgtttaagtatgttgcagttactcatattaaacataacttgtatatttattattttaatgaagtttgagaataacgttacatatgttgaattttaagtactacagatttaactgattttatatttctgaaaggctaacagacatggatacacgtgtacagtatgcattcaaacttatttaaatcggtgtaatgcttttaagtcactgtccatttgtattgacatgcctctgtttctagtccagtttggagattttataaagttatacaattgaccaacacacaac

SEQ ID NO: 43159 - DNA, 472 bp, Homo Sapiens
cgactgtatgcctacacggagtcggagctgcagattgccctcattgccctcttctctgagatgctctatcggttccccaacatggtggtggcgcaggtgacccgggagagtgtgcagcaggcaatcgccagtggcatcacagcccagcagataatccatttcctaaggacaagagcccacccagtgatgctcaaacagacacctgtgctgccccccaccatcaccgaccagatccggctctgggagctggaaagggacagactccggttcactgagggtgtcctgtataaccagttcctgtcgcaagtggactttgagctgctgctggcccacgcgcgggagctgggcgtgctcgtgttcgagaactcggccaagcggctcatggtggtgaccccggccgggcacagcgacgtcaagcgcttttggaagcggcagaaacatagctcctgagagcgcgggacttggacacggg

SEQ ID NO: 43160 - DNA, 1016 bp, Homo Sapiens
tctccttaaatccttttcctggtgtgcttattatcccttttgcagtgagtacagtttattaagttgtcagccctttaatattggggaaacttaatgagtataaatagcagggagcacattgtaacagcacagtgttttgtttttttcacccggttgctgtatgagaatggctttcaatcctttgtttctatgcctacagacagaaagcaagawgtctaatattagacatacaagttgctgcctgttataacggtgaattatacctttgtgcatgcctaggatgtttgttgttttaattagctgcaatatatacggcctgtgtacacagaatttaatcacttcggcaggttgaacaactccatgtagataagagcaagtgtaggcaaaggtttagaaaatggacataaagtcaaagaatgatggcaggtaggatgaaggagagatacttaggaaatcctaaaagaggcggcaagaaggtacctccctgtgtaactcaccttcccccatgacagtgagtaagagacactcacaggctatgagggtacacccctagctgaatgttctgtgttgtttccttagacctgtggtgtccgctgcaacagctactagccacgtgtagctaattacattaaaatgaaataaaattaaaagctcagtttctcagttgcgctaatcacatttcaagtgctcagcagccacccgtgtctactactacacagtgcagacacagaacatatcatcactgcagatagttctactggacaatgttacgctagaataaacaccaaggcagtcagttaaggcagctatggtttggaaaggcatacggacagagtctgcttagaagagatacaagttgttaataaaattgatcctgttgatagtagtttgtttttgtggkgggkgctgtgaagagtaaacattactcagtggaaagctaagttcagaagggactttgtttttyctcccttgccytaagtccttggtatttataatmaagsyggaachtctatttc

SEQ ID NO: 43161 - DNA, 500 bp, Homo Sapiens
acttgctccacatccgctgtctgctgctgcctctttcctcctcactcaggctgttgtagtcagcagagcctagaatgacatcccgggagtggattctaaatgtgattttcctaggctactgcaggagccccttctcttctcagaaaggtctgtttttgttcccgattgtaatgcaaaatccttgctcaataaataaaaaagaatatagaattcttttttttttaaagaaggaatcactttcctatcatctaaaccaagttccttcacactggagtattttgtcacttctcccctccgtggagtattttgtcacttctcccctccgtataggattttttgttgttgtaagagttgtagtcatattgtaaatatttttgtacctttctccttttaacgtgttattgacaaacctccccaaaagaatatgcaattgtttgattcatttctctgttatcagacaccaataaattctttttgttgggccttcttctctcttcttt

SEQ ID NO: 43162 - DNA, 861 bp, Homo Sapiens
  misc_feature (20)..(20): n is a, c, g, or t
  misc_feature (33)..(33): n is a, c, g, or t
  misc_feature (702)..(702): n is a, c, g, or t
ggctcaggtttcagtacggnaaagctgccttgnaaacagctgagtcaccgcggcgcgcacaggccccgaacgctcaggagtgtggttgttaggagagcacacaggtgttcatacagtggcatttgggacacaatcgttggaacctgaagaatctgaagttttttttaccaccatctttttctactctgtaaggaagtagatctttatggggaaaagagaatttggggtgttctgcaagccagtcaaagtggcacagcaaatcatataaatcgaattaaatggacaacaccgttagatgtgtatgtaaaaattttctgtttcatatttttcctttcactttcggtttaaaacatgctatatgtactgtatgtcctgtagcccagtgcggctccacagcatggaatctgatgtatgatatgatagaatgtggcactaaatgcagtttcagattttattttttttaatcatatgaactaaaattgtcaattgtgaggtgtgcttttctcatcatgttggttatattgcacaattggttatatttatgacctgatattcaaagactctggcattgatagccagtgtgttttcttatttaactccgtttactacattctacatggtgtttacgtgatccacacttgaaatactagatcagtagacattcactaatataccaaaataaaatgaaaaattgagtttttncgtgaactttatactgtccagctctgttgatttaaagcttttcatccaggtcagttcaggaagtatatctggagtacctgctctgtttttggctgtgagactagcactaaggattctggtacctttaccaaaactactgggctactaatacttctttca

SEQ ID NO: 43163 - DNA, 832 bp, Homo Sapiens
atctattgattttcaagtttggaagtatactcgtgtgctttgctgtttttttatgcttcctggaatttggggactcatgagagacttgaggttagagttctgcaagtgagaagacactacatggttgcagctgccacatgaagaacccaagctcctgtcaaagttgtgaatgcgactttggatgagattaagaaggcccagtggttggtcttgaagagtggcagtgtgtggatttgaggacctctgcagaccatcagatcaaaggagggagagctgttttgggtgttttgttttttttgtttttatagcattttgctttttcttggaatgtaattttcctatggcatgttaactggtgcacatcgtgtaacctgtctggtgagcaacctacaattgggatgagttctaggtacatgtgtttgctgactttggggtaaacaactttgttataatacagtctctgccacagatgcatgtgacctcttcaggggcccagagtggctgaggaaggaaagcttcaagctggccatgggggtcccaaacagtcattccaggcttagatgatgactagcctaggtcatcagagcccagactccacagagactaaaatcagagctctgtcttgttatgataaatttcatttgcttggaaaaagaaatgctgaaagccagtgtttagaatctttgtgcagatgaccaaagcaattgacttggccaagaaaaggtaaggtaaataaacatttttcaaaatgaaaaaaaaaaaaaaaaaaaaaactcgagggcatctatggtcggggtgcgcgagaaaagagggtaatggaaatgggcaccat

SEQ ID NO: 43164 - DNA, 966 bp, Homo Sapiens
cggagctggagtccggctgggccgcagccgctgggagaccggcggttgccgtggggaccggtcgggcccctccctcctccggtcccccgccccaggtccttccccaccgagacgcgccggcggaccgcgggcgagtgcagccggtgacccggcgagaggcggcgccgctctcaagatgtcgcagaggccatgtccgaaacctacgattttttgtttaagttcttggttattggaaatgcaggaactggcaaatcttgcttacttcatcagtttattgaaaaaaaattcaaagatgactcaaatcatacaataggagtggaatttggttcaaagataataaatgttggtggtaaatatgtaaagttacaaatatgggatacagcaggacaagaacgattcaggtccgtgacgagaagttattaccgaggcgcggccggggctctcctcgtctatgatatcaccagccgagaaacctacaatgcgcttactaattggttaacagatgcccgaatgctagcgagccagaacattgtgatcatcctttgtggaaacaagaaggacctggatgcagatcgtgaagttaccttcttagaagcctccagatttgctcaagaaaatgagctgatgtttttggaaacaagtgcgctcacaggggagaatgtagaagaggcttttgtacagtgtgcaagaaaaatacttaacaaaatcgaatcaggtgagctggacccagaaagaatgggctcaggtattcagtacggagatgctgccttgagacagctgaggtcaccgcggcgcgcacaggccccgaacgctcaggagtgtggttgttaggagagcacacaggtgttcatacagtggcatttgggacacaatcgttggaactgaagaatctgaagtttttttacmacatcttttyyactctgtatggartagatyttatggggaaaragaatttgggkgtctgca

SEQ ID NO: 43165 - DNA, 650 bp, Homo Sapiens
  misc_feature (561)..(561): n is a, c, g, or t
  misc_feature (639)..(639): n is a, c, g, or t
cttgttactatccatctccaggctctgggccgtgtacacactaaacctcatgccctaaggacaggaggaaagaccctctgtttggagcattattagtagagtgaggatcccaccagttctgcctggcttcctccatccccagaggcactaaaagcagtattttaaggttggtgtcttactccctggaagcctgaaatgggtggaatagcggtaaggcttgagtaaaactaggggacagaggttcttatttgtcgattttattttataatttgaccacagcatctgaactccctctctccctggaataagtatttttcccacatttttggatatatgtatggtagacaatttttttttaagacacagagataaatgttttcctgctttggttacctttcctttcccctttaaaaggaattagctatagaactgctttgtaaagatgcttcttgatattttacttttgttccttttccctaatcattcccttttctccccactcctccagaaggcataacccttctctccacaccccctacccccacccccgtcctaggctcncatcctttccatcaagaccttcattagcttatgatatttgctgccgagatgttataacaaggactcgttcatgtatantagctatttct

SEQ ID NO: 43166 - DNA, 653 bp, Homo Sapiens
agtatttctgataaaaatgagggcctctgctcttgatttaattataaaatgtctacgtctttctccagtttctgagccctatgcacattggcttgtgggcttgttcttcctgccaaatgatcagagaggaacattccatttatttgtagtggatttcctctggagggcatgtacccacactaaataccaactgctcttcctcagctgtagtccccaacatcagacttggcacgtggtggacactaacacacaggcactcaatgaatgagtgaaggaaataaaagtcaccccgttggtgagaggtgctatccctgagtctcagtgcaggaccagtggatgaaaggcaaggtaaagaggcccaagataggctggcttcccccgttcaaggtatagtctgcctttaagggagttttagaaccaacatgcaagacattgaaagaaatcttgcaagagccattattgacttagatccaaaacagcctctctcatgtctaaaaaggcacagaattttgcagatctgaggaagagggatgcattacctttttgcttcttttcaattgcttagtgtttctaatcatacttaatccacactaatgtgcgcaattataataaatggtaagatatcacatgtgtcaaaaaaaaaaaaaaaaaaa

SEQ ID NO: 43167 - DNA, 636 bp, Homo Sapiens
ctgaattccacaggtactttgcagtcataccacacccatgtgtctgtcggtcctgactgtaccatttataaacagcttcactttcagcagttctcagccctcttaagctagggtcattgtcagtagggatactgcttcataagcaccagcagaacaccaaaggagaccatatgggtgaaagcaaccagcactgccctggcgcttcataggttcttagagtttttatcttttactttcagtctaacacagcactgcctgctttttgtttttgttgcttggtttgtttttttcttaccgtgttcaccaaacttgtgtccaaatagctttgggctgatgcaaaaatatctatgtggaagagaagagttgttctcatggagggccttcagatgagtgctatagactctctaggcaactccaagaggcttctcaagcagggtgggcagtgagagctgctatggaatcaatggacaaactgacagggactgctttgaaagacagtactcagttgagtatatatattctctcttaagggctaaaagtttataatcatcccttaaacactctgtgatgggatcttcaggatcatcttttgaagtacactatattttacaatgtgacaaaaaaaaaaaaaaaaaa

SEQ ID NO: 43168 - DNA, 789 bp, Homo Sapiens
ggctcacagcttggctgagctctgtctctgcaggttagaagtctgctaaagatcaaatgtgaaagtacttggagaaactgaggcctcttatgtgtaatgtgtaagttaagtgagccatatattttcttgcctcttccggacattcatgcttgtgtcccaagcattcccttggtgaattgtcacgtgagtggggccagtaagagtgaagtctgctccttgaatccaagccccatcgggggcttctctaacaaatctgtagtaagtatacggactccagggagagaggctgggcttctttctctcatttgttccttgtggaacaaatgggcaaaagaagtgtgaaaatgtgggtgtttatgtctgtgtatatgtattttttacctcatgcatggcttctcctccaacttcctcctgcacttaaaaaagggccaggttccaaattagacttgtaaatatggtgttagtgtttgacactactcctggatagttccaaacatcttccttgtggcaggtttcctggctgagcccgagcttccctccctgtttatttgtgttccatgatccgtatgtgtttccataaaaaacttttctcaactaaaactctcctcttccccctcttcatattcccttctcggccccccctggccccttgagaaaacttttctaaaaccattcctttttggccccccgggcccccgttgggttaattgaaacctggggccaataccttgtttccctctaggaaaatccctgggctccttgcactaaggggctctggaattccccccc

SEQ ID NO: 43169 - DNA, 1053 bp, Homo Sapiens
gcgaagagtttatgatgctttaaatgtgctaatggcaatgaacataatttcaaaggaaaaaaaagaaatcaagtggattggcctgcctaccaattctgctcaggaatgtcagaatctggagawagagaagcagaggcggatagaacggataaagcagaagcgggcccagctgcaagaacttctcctacagcaaatcgctttcaaaaacctggtacagagaaatcgacaaaatgagcagcaaaaccagggcccgccggctctgaactctaccattcagctgccattcataatcatcaatacaagcagaaaaacagtcatagattgcagcatctccagtgacaagtttgagtatcttttcaattttgacaacacctttgagatccatgatgacatagaagtactaaagcggatgggaatgtcgtttggcctggagtcaggcaaatgctctctggaggatctgaaacttgcgaaatccctggtgccaaaggctttagaaggttatatcacagatatctccacaggaccttcttggttaaatcagggactacttctgaactctacccaatcagtttcaaatttagacctgaccactggtgccaccttaccccagtcaagtgtaaaccaagggttatgcttggatgcagaagtggccttagcaactgggcagttcctggccccaaacagtcaccagtccagcagtgcggcctctcactgctccgagtcccgaggcgagaccccctgttcgttcaatgatgaagatgaggaagatgatgaggaggattcctcctccccagaataaagacaagagaaagcctacgtttcaatatgtgatgctcatgtgtgtttgtagtgtgagctcttgttttttgaaatgattgcttcagtctttgcctttgtttgcactgtgtgttcagtgaaaactagagaaacacaataagcaaatcacatgaaggctgagatgattgagatgaaagtaacatagtgtgaatgabagtctggccacagagcagtagatgaaatacavagaaasmtgctttctgaggggwagkgggg

SEQ ID NO: 43170 - DNA, 633 bp, Homo Sapiens
tccctctgggttggaaagaaacataatggttaacaaatatcacagcatccagggattgcccagctatagtgtgggtgccctactgaactctgattagggaacctgtataagggtattgagtgtgaggttgaggtgggacatttgctgagcaaggagaaccgatgtgaatggcaggcagataacatgcacacatgaagctggctgggtgtaaggcagtagcggggagcagcatgctgtctaacagctgttagctccagctggttgttgccatgtgggaatggattttctcatttcttcagagaagctggaaacctagatatttatgtgaaacctcccagtgtattgccaactaaatcaaatttttaaagatgcttaggcacctaagcaaataatacttagaggttgaatttggtctacaggctagcagtttgcagtctatgtttaatgaatggtatagaagtttggggaaaggtgccatcttgaaaattctggatcagtggttggcattttcgctgcgtgtagtatgtatcctttctaggcttggagatggctttggttggtccgtgaatgtagttatgagagtgctgccattaaaaaatcaaaaatctcaaaaaaaaaaaaaaaaaaaaaaaa

SEQ ID NO: 43171 - DNA, 756 bp, Homo Sapiens
  misc_feature (599)..(600): n is a, c, g, or t
  misc_feature (671)..(671): n is a, c, g, or t
  misc_feature (674)..(674): n is a, c, g, or t
  misc_feature (677)..(680): n is a, c, g, or t
  misc_feature (684)..(684): n is a, c, g, or t
  misc_feature (688)..(693): n is a, c, g, or t
gggggagagaatcaaccgtaaaaatgtcttcattaattagacccagttattccacttttgttaatgtctctcaaattgtacaaagtataaaaaattatatgcacaaagatgttccaagtgacattacttttagtagcccaaattataaaccactttaaagtttggggtaaagattggcaaactttttctataaagggccagaaagtaactattttaggtttttaaacctactgtctctgtcataacttgtcaacactgctgtatgaagcacaaaagcagccatagacaatacataaacaatacgggcgtggctttgttccagtaaaactttgtttacaaatgtggtgccatagtttgtcatccctgggtctaggaaatagtcaataaacagatatatacaaatgatacataatgtacttattaaaaattagtaatgaatattattaaaaacatgaaaatattaccttaagtaaaaattgcaagacggaaaagtgtataagtgggtgtaatcatggctgaaataacagaccaagcatatgataaaaagataacaaagtaaatcaaattactaactggttatagtgggataggaggcagannatggatgactttgtcttttctcaatgtttttatttgtattttataataaaaatgttttaaaatcaaaaaanaanaannnnaaanaaannnnnnccctggtcggcccgcctcggcccctcgaaaaagcttttcttagaccaattcgttttgggcgcg

SEQ ID NO: 43172 - DNA, 750 bp, Homo Sapiens
ccgtcgaccccgcgtccgcctgtgctcctgaacgggctgtgcttggcccagaaccacccagcgtctcccctgctgctgtccacgtcagttcatgaggcaacgtcgcgtggtctcagacgtggagcagccagcggcagctcagagcagggcactgtgtccggcggagccaagtccactctgggggagctctggcggggaccacgggccactgctcacccactggccccgaggggggtgtagacgccaagactcacgcatgtgtgacatccggagtcctggagccgggtgtcccagtggcaccactaggtgcctgctgcctccacagtggggttcacacccagggctccttggtcccccacaacctgccccggccaggcctgcagacccagactccagccagacctgcctcacccaccaatgcagccggggctggcgacaccagccaggtgctggtcttgggccagttctcccacgacggctcaccctcccctccatctgcgttgatgctcagaatcgcctacctgtgcctgcgtgtaaaccacagcctcagaccagctatggggagaggacaacacggaggatatccagcttccccggtctggggtgaggagtgtggggagcttgggcatcctcctccagcctcctccagcccccaggcagtgccttacctgtggtgcccagaaaagtgcccctaggttggtgggtctacaggagcctcagccaggcagcccaccccaccctggggccctg

SEQ ID NO: 43173 - DNA, 899 bp, Homo Sapiens
cgagcagtcatggcggcsgccagagctactacgccggccgatggcgaggagcccgccccggaggctgaggctctggccgcagcccgggagcggagcagccgcttcttgagcggcctggagctggtgaagcatgggtgccgaggcgcgcgtgttccgtggccgcttccagggccgcgcggcggtgatcaagcaccgcttccccaagggctaccggcacccggcgctggaggcgcggcttggcagacggcggacggtgcaggaggcccgggcgctcctccgctgtcgccgcgctggaatatctgccccagttgtcttttttgtggactatgcttccaactgcttatatatggaagaaattgaaggctcagtgactgttcgagattatattcagtccactatggagactgaaaaaactccccagggtctctccaacttagccaagacaattgggcaggttttggctcgaatgcacgatgaagacctcattcatggtgatctcaccacctccaacatgctcctgaaaccccccctggaacagctgaacattgtgctcatagactttgggctgagtttcatttcagcacttccagaggataagggagtagacctctatgtcctggagaaggccttcctcagtacccatcccaacactgaaactgtgtttgaagcctttctgaagagctactccacctcctccaaaaaggccaggccagtgctaaaaaaattagatgaagtgcgcctgagaggaagaaagaggtccatggttgggtagaagaatgtgtatgacaaccacacacagtgaagctcttttttcaaagtaaatttgaagaaatgctacaagtatgagatgagatctaagtaaaggtgttaagatatttttaagtggtatgtgatcgtgt

SEQ ID NO: 43174 - DNA, 615 bp, Homo Sapiens
cgcctttctgtccttgataaaatagtaaagaaaaccaaacataccccggcctgatgggaaaaatgattcctttattctagcaacttactttctgttggtatgggaaatgttattaatttctattactaaagttcatatcacaaaatgatatttaataataaccttggggtaaatcatgaatttttttttctacgtgtgagtataaaagacaaaagttgaacagcatggaatctcattgccaaattattattgaatgtatagttcaggtattctttgagacacacagtatcattaatttccgaattgtatttcagtgttattttttgtttgtgaccactaagcttctgtcttaatacaaagctgttaccttctacagaatttaagtctgaagatgtaaagagagaacaggccttgtgtaacagaagatactcttttttatgctccttactgtgatcacagaaaaattaaaaatccaagtgctctctagatttgttgataaacattttatgcttgcatttaaacttgaaatgtatgagcagaatgagacaatcagttaaatcagaaatgagaagtattataatgtaaaggccttgttttgctgtagcaataaaatga

SEQ ID NO: 43175 - DNA, 559 bp, Homo Sapiens
  misc_feature (538)..(538): n is a, c, g, or t
gcggcttcgactgaggacagctgggtcccagcctcacctgacacagggctagaccccctcacagtgcgccgccatgtgcctgcagtgtgggtgctgctcagccgggaccccctggaccccaatgagtgtggttaccaacccccaggagcaccccctggcctgggttccatgcccagctccagctgtggccctcgttcccgaagaagggctcgagacacccgatcgtgaagacctgctgagccagcctgttctccgggcctgaatgtctggggtgcttgtgccttttctgagaagcgttgtgactgctcaacatccccatcaaggtttgagtccacaaaagtggacctccctatcatgcttccccttccctctagcatgtgggaagggactgctgtgaagaatgacagatgtggggcctctgccaagttctgcattgctaaataagggcttcctctgccttctacctacagtgcatttgaactgccttctgaaagaggtccagggagggatttaggaaataaagtttctacctatttanaaaaaaaaaaaaaaaataggt

SEQ ID NO: 43176 - DNA, 654 bp, Homo Sapiens
ctccctttttttttttaactaaaatctgcaatgaatctagatgcaattaattttattccttccaactaaaattacaatatttttaggttaaaattattgagatataaagcagccattgggaaattgggagaaatgataaacaaatggaaaaagaagatgtccctaacctacacccatcgattaccaaggtttcagtgtactagttttgaatctgttctgaatggagtttttataccctcaatttctggcctttggctattttagcatttcaaagtgacttctatgaagctttttttttaatgtgaaattttcagaatgttgtttttttcatgtagatactccaggaagagttaagcactgctttcagttttaatatccaccttgaggggtcgctgcttgagggctcttatcccaggggactttttaattcggatgttacttaatgtggcttctctaatgtagtttctttgattaccgactacacaattatggtaccatcacagtattagtggaaaagtaaccatgtgatttaattctccattcctccaatgtaactctttaaattattatgtatgtgtgtgtgtttaactttgttttcatcatctttaaaatttctattatggttcggttcttataaaactatgaatccttcct

SEQ ID NO: 43177 - DNA, 761 bp, Homo Sapiens
taaaactggagcccaaagaaattcccttagggcaagattatgttataatagaaaattgaatttcctgaggcagtggctgccaccccttttcagatgtttagtcctgcaaatagcatctttcttgtagtctgtgacatggatggggatgctagggcccttaggggcaaggggactaaactaaatcaagttgagtttttttccagcaggggttaggggaggtactcgctgttgatatttgacactagaaagtaatcttttttacaaaactgtttttctaggtgggtggaaagtgaaactgccacatccttgttggtttagtccaagagatcatttgcaacaacagtagatgtccgggttttgtttctgtctttttattatgaaaaactatgttaagggggaaaatgtggattatggtaaccagaggaatccctagccttgttttccttagaagacttgtttagtgttttatcagacgtctgttgtagttgtagacaggaaagcttgtgagaaaaacaccacatggagcctgtaaatgtttttgcacaacctgtaaagcattcttggaagtggccagtaaaaaggggttttaccatttaaaaaaaacaatgtaactgtgtcattgtttacatctgtaaactttttcctccccgtgttctcattacaccattctggcgaaaatgtaggcaaagtagcttccagttttagaataaataaccatttggatttgaacacaacacaaaaacaaaacaaaggggggggcg

SEQ ID NO: 43178 - DNA, 554 bp, Homo Sapiens
aaaaattaggttattactttttttataaccagatttttaaagcactaggttttaaatcagtgggtatcataaaagccatatataaaagatcctttcttatagtaagacttgtgcttgttagcaggtttttctgttagtttttcccccataacatttaattattactaaaattgtatttacaatagtggtgccaaatcaaatggtaatttaaataaaatctattctgtgtttatgtagggtggtataaaaaagaggtcttcatttagacatgtgatttctaaaattccagaaagcaaaattgataagatgttagaaatttggaccgttatttataatcagggtagcattaaaatggagaaaagaaagttttctgaaaaaatgcagtaaatataagccacatttctaaagtttatttttatgaaagcttcttttaagattttgaaatctattctgcattcccaagagtttatgtttattgtattttatatgatctacaacatataaaattgtgtatttttctttggttgtccctattaacaaaaaagtattttaat

SEQ ID NO: 43179 - DNA, 657 bp, Homo Sapiens
ctggtcccggggactgagtaaggtgtctggatcggagggaggttcgggtgggcatcgggcggctggaagagctcgactcgtcccgctgggaaagcgcgagtctgagtggaaccctggacgacttgcagagcggctggcgcagtcatggcggactactggaagtcacagccaaagaaattctgtgattactgcaagtgctggatagcagacaataggcctagtgttgaatttcatgaaagaggaaagaatcataaggaaaatgtggcaaaaaggatcagtgagattaaacagaaaagcctggataaggcaaaggaagaagaaaaggcatcaaaggagtttgctgcaatggaggcagctgccctgaaagcataccaagaggatttgaaaagacttggcttagagtcagaaattttggagccaagcataacaccagtaaccagcactatcccacctacctcgacatcaaatcaacagaaagaaaagaaagaaaagaagaaaagaaaaaaagatccttcaaagggcagatgggtagaaggcataacctctgagggttaccattactattatgatcttatctcaggagcatctcagtgggagaaacctgaaggatttcaaggagacttaaaaaagacagcagtgaagaccgtttgggtagaa

SEQ ID NO: 43180 - DNA, 1072 bp, Homo Sapiens
taaaattcacttggcaccctagatgaatccaaatcatcagattcgcatagtgattctgatggggaacaggaagcagaagaaggaggggtctctacagagacagaaaagccaaaaataaagtttaaggaaaaaaataaaaatagtgatggaggaagtgacccagaaacacagaaagaaaaaagtattcagaaacagaattcattaggttcaaatgaagaaaaatcgaaaactcttaagaaatcaaacccatatggagaatggcaagaaattaaacaagaggttgagtctcatgaggaggtagatttggaacttccaagcactgaaaatgagtatgtatcaacttcagaagctgatggtggcggagaacccaaagtggtatttaaagaaaaaacagtcacttctcttggagttatggcagatggagtggccccagtcttcaaaaagagaagaactgaaaatggaaaatctagaaatttaaggcaacgaggtgatgatcaatagttgcaggagagctttttgtacatgcttttaggacagaatggagacttatacacccaaagtttatctgtgtttgtttgtaagtattatgatgctaaaaatttagatttattctaaatgtatttgatgtgaattaaaataaatattttttcatgtgaaatttattttggttcctaaaatggaagcctaccacattgcattgtaatacagtgtattatgttcagtgtctaaaaactgctaattaagtcataatttaagatgctatgtatctgttatttaaaacatggagaaacagggcctttattccattcatattcataagagcatatttatcctgcattgaaaatgcattacttttgcacattgatattaactgttgtccaacaaataagtatcggagtacgtgagaaatattcccagcccagtggatgatttggctctgaagctgatggtgaaaaagctgatgtaaaaaatgtatgcatattggcttaccttactcaatttaaagtcaaagacaacagccaggaagcgcttcggtacttcagagggggcttaatattggaagaaaactgga

SEQ ID NO: 43181 - DNA, 812 bp, Homo Sapiens
  misc_feature (645)..(645): n is a, c, g, or t
ggtattccattcatattcataagagcatatttatcctgcattgaaaatgcattacttttgcacattgatattaactgttgtccaacaaataagtatcggagtacgtgagaatattcccagcccagtgatgatttggttctgaggctgatgtgagaaagctgatgtaaaaaatgtatgcatattggcttaccttactcaatttaaagtcaaaagccaacagccaggagcagctcaggtacttcagatgtgcttaatatggagtgaaaactggaccagaggtggaaagatgtatttgccccagttcacttcaaagcagcaaacgttgtttaagcattttagtttgaaccaggcattgtgttaggaatccagggataaagatgaatgaaatgtatttctgttcttcaggagttcacattctagcatatgccttttttcccccagtcatgcactctttttagcagtcttatatgtactagaaaagattttttaaagtttatttaaagctgtgtagatgaaggcttgatctaaaatagtataaggtctccagcttcagtaaaagtttttagtgtttacttaaattagtaatttctcactttctgtctggttaaaatgtcttaaaaagtagaattttcttctttaatccgnttagtagttacctccccttttactttttcaaattcccaaaattacatttctcataaattgtataggatttaacttataataggtaaaaatttgcctttttaaagatgactgtacctgtaaaaaaaaaactttattaaaaacttgatccaagattaagcctaaaaaaa

SEQ ID NO: 43182 - DNA, 654 bp, Homo Sapiens
ggctgctgcagaagctgaggccgctttgtccgagagctcggagcaagaaatggaggtggagcccgcccggaaaggggaagaggagcaaaaggagcaagaggagcaagaggaggagggcgcagggccagctgaggtcaaggaggagggttcccagctggagaacggagaggcccccgaggagaacgagaatgaggagtcagcgggcacagactcggggcaggagctcggctccgaggcccggggcctgcgctcaggcacctacggcgaccgcacggagtccaaggcctacggctccgtcatccacaagtgcgaggactgtgggaaggagttcacgcacacggggaacttcaagcggcacatccgcatccacacgggggagaagcccttctcgtgccgggagtgcagcaaggccttttccgacccggccgcgtgcaaggcccatgagaagacgcacagccctctgaagccctacggctgcgaggagtgcgggaagagctaccgcctcatcagcctgctgaacctgcacaagaagcggcactcgggcgaggcgcgctaccgctgcgaggactgcggcaagctcttcaccacctcgggcaacctcaagcgccaccagctggtgcacagcggcgagaaagccctaccagtgcgactact

SEQ ID NO: 43183 - DNA, 566 bp, Homo Sapiens
tgcaccagggcaaggcaggcatcaagatcctggagcccgaggagggcagtgaggtcagcgtggtcactgtggatgacatggtcacgctggctaccgaggcactggcagcgacagccgtcactcagctcacagtggtgccggtgggagctgcagtgacagccgatgagacggaagtcctgaaggccgagatcagcaaagctgtgaagcaagtgcaggaagaagaccccaacactcacatcctctacgcctgtgactcctgtggggacaagtttctggatgccaacagcctggctcagcatgtgcgaatccacacagcccaggcactggtcatgttccagacagacgcggacttctatcagcagtatgggccaggtggcacgtggcctgccgggcaggtgctgcaggctggggagctggtcttccgccctcgcgacggggctgagggccagcccgcactggcagagacctcccctacagctcctgaatgtcccccgcctgccgagtgagctggcggcccttctgactgtttatttaaggatggatggaccctggaaccgggaagggtg

SEQ ID NO: 43184 - DNA, 656 bp, Homo Sapiens
ttttaatctgtgtttctgcaagtgccatccttgtacagtgttaagagggtaacatgggttacctttgcaccagcttcagtgttaagctcaccctgttctttgaagcacccatgtcagtattagaagaataggcagcagttccttagtttacatatgtttgtgcaattattttctgtacttttttgttcattaattttgtcagtattacaccaaactgtttttgcaacaaaaaaattttttttgcattcatttaattttaggtcaaataacattttatttatgtggctcattttatatttcctaattttatttatttcatactgtagtgtacagtattatagttcttcaatatatagatatattttagtaaaaaaggaacatgacgttgatcatttgggcaaattttacgtaaagagaagagcatttattgtgttttggaacattaattgtgagatgggatttttcaattttattattttatttttgtttttttccaattactggaaattccaaatttgggaacttttgatacgatcttgtgaaaacactgtattttcgactgaaaattccactttcttcatcttgttttttagctaaaaagagggactgttaaatacaatgtatgataccatgacaaaaaaaaaaaaaaaaaaaag

SEQ ID NO: 43185 - DNA, 574 bp, Homo Sapiens
  misc_feature (480)..(480): n is a, c, g, or t
  misc_feature (513)..(513): n is a, c, g, or t
tgaaggacaccagctgcggaatttgcggctttggcagattgaaatcatggcaggtccagaaagtgatgcgcaataccagttcactggtattaaaaaatatttcaactcttatactctcacaggtagaatgaactgtgtactggccacatatggaagcattgcattgattgtcttatatttcaagttaaggtccaaaaaaactccagctgtgaaagcaacataaatggattttaaactgtctacggttcttaacctcatctgttaagttcccatgcctggagaagctaatgccaactcatcatgtgataattcaatttgtacaataaattatgaacctggaaaaaaaaaaaaaaaaaaaaaacaaacccgttttatgatttactcattatcgccttttgacagctgtgcttgaacacaagtagatgcctgaacttgaattaatccacacatcagtaatggattctatctctctttacattntggtctctatactacattattaatgggttctgngtactgtaaagaatttagctgatcctagggcatgaatggattctctcctgaatatttcact

SEQ ID NO: 43186 - DNA, 593 bp, Homo Sapiens
cgatattattttacctattagattctgatttgatatacaaaggactaagatattttcttcttgaagagacttttcgattagtcctcatatatttatctactaaaatagagtgtttaccatgaacagtgtgttgcttcagactattacaaagacaactggggcaggtactctaatataaaggacaggtggtgtttctaaataattggctgctatggttctgtaaaaaccagttaattctatttttcaaggtttttggcaaagcacatcaatgttagactagttgaagtggaattgtataattcaattcgataattgatctcatgggctttccctggaggaaaggttttttttgttgttttttttttaagaacttgaaacttgtaaactgagatgtctgtagcttttttgcccatctgtagtgtatgtgaagatttcaaaacctgagagcactttttctttgtttagaattatgagaaaggcactagatgactttaggatttgcatttttccctttattgcctcatttcttgtgacgccttgttggggagggaaatctgtttattttttcctacaaataaaaagctaagattcta

SEQ ID NO: 43187 - DNA, 614 bp, Homo Sapiens
ccacgcgtccgcggacgcgtgggcggacggtggcgacatgtctaagaatgtgagccagtcacagatggcaaaattgaaccaacaaatggccaaaatgatggatcctagggttcttcatcacatgggtggtatggcaggacttcagtcaatgatgaggcagtttcaacagggtgctgctggcaacatgaaaggcatgatgggattcaataatatgtaaagaaaatgccttaatataaactgactcagttgaatacctaatttgctgagacctcagcgtttcccttctttttgcgaattggggggaaagtgtatttttcttgcttatcatgcactctttccttttcttctcgcccgcttttcccctccttttctttttccttccttctttcctccctttaatataagggagaaatacatggtttttgtggaaatcattatatgtttgctttagattttcttctgttttcaccatcataacacttaagttaaatcatgatgtaaaattttagtacttaaaggtttttaattatctcgaaggccaagcattgcatttgtaaacagtcctggtcagtagttaaataatgtttcaattaaagtgctgtaaaataaaaaaa

SEQ ID NO: 43188 - DNA, 645 bp, Homo Sapiens
atcattaggacaagtaacaagctaaaaatgaagtctcttgaatctttccatccccaacttgcccacaaagctgtgggtggtttctggtacttaaagcactaatattatgttgctgctctgcgaacagcccagtagtcccatttccttccacaccaaaaagtgttaaatcaagtatgcaaatggagtccttacaactggagtttatgttgtcttgccctttttttagcacaaaaaaaattgtacttttttattgtcgaattgtttaaaagacttcattctttacttgttcttacgaaaaggatataagggagaagaatgcagtaattgctgtacgtgtatcatcattccagtttctaaaaacagccagccagcttttttccttttaagattctccagaaggctgcaaggccagaaccacaaatatcgggtgccttcctttggaaatatttgacctctcttctgtgaagagaatggtacttaacagactactactagtgctttgtcagtaccgaagtctgaatgcccagtccaatggcatacattatccttaaggtttttaatcccacctggaaaaattgtgatagaattctcacaaaataaacccagggcattacatgttgacaaactaaaaaaaaaaaaaaaaag

SEQ ID NO: 43189 - DNA, 567 bp, Homo Sapiens
cttagaccatacctctcaccccccaatgcctcgactcccccaaaatcacaaagaagaccctagacctataatttgtcttcaggtagtaaattcccaataggtctgctggagtgggcgctgagggctccctgctgctcagacctgagccctccaggcagcagggtcccacttaccccctccccaccctgttccccaaaggtgggaaagaggggattccccagcccaaggcagggttttcccagcaccctcctgtaagcagaagtctcagggtccagacccttccctgagcccccacccccaccccaattcctgcctaccaagcaagcagccccagcctagggtcagacagggtgagcctcatacagactgtgccttgatggccccagccttgggagaagaatttactgttaacctggaagactactgaatcattttacccttgcccagtggaataggacctaaacatcccccttccggggaaagtgggtcatctgaattgggggtagcaattgatactgttttgtaaactacatttcctacaaaatatgaatttatactttgaaaaaa

SEQ ID NO: 43190 - DNA, 1150 bp, Homo Sapiens
atggagtcatcaagttagtgtgactctggatccagatacagctcatcacgaactaattctctctgaggatcggagacaagtgactcgtggatacacccaggagaatcaggacacatcttccaggagatttactgccttcccctgtgtcttgggttgtgaaggcttcacctcaggaagacgttactttgaagtggatgttggcgaaggaaccggatgggatttaggagtttgtatggaaaatgtgcagaggggcactggcatgaagcaagagcctcagtctggattctggaccctcaggctgtgcaaaaagaaaggctatgtagcacttacttctcccccaacttcccttcatctgcatgagcagcccctgcttgtgggaatttttctggactatgaggccggagttgtatccttttataacgggaatactggctgccacatctttactttcccgaaggcttccttctctgatactctccggccctatttccaggtttatcaatattctcctttgtttctgcctcccccaggtgactaaggaaaagagcagaagctccttggtttaaccagcacagagaaaataatataaatcccataagggcagacgtttggtctgttttcttcgctgtcatttccttagtagttagactagtgctgagattttagtggatatataattgatttatgttgaatatatggacttagcaactaaaaataccacagatggttaacctggactggggcaaagcaagataatagtgatgatcgtatgttgctgtctccatccgtcttttaatgggtcaagggcttttgatttccaagggtcttccagtggatgaagtaagggtacccacaagtctagaaggtctgcgcttctcctaaattgtttggtgccatttggaactcctggaagggaattaagaaaacctgtcaattttccgcccacttggcttttaaaccaaacccaaccggaaaaaattccaaataaccttggacttctttccacccctgaacaagggtggtttaaataatcaaaacggggagatccttggggggttccagaaatttattggaggtcttccccggaaaacacgcctcaccaaatggtggacaaaaaaagggtaaaaatcggtgttcttacgacgagggc

SEQ ID NO: 43191 - DNA, 566 bp, Homo Sapiens
atttggagtaaatttgttccacgtcaagttctggccttctgatgcaaatgcaaaggaacttagtctgttatgaacccaggttgatgacagaccagtccttgtggaataagattccctttaaaaactctttagccagtcgtgacatcaaccctagacctgtctgccttggcatttgctgtcaacatctgctgggctatgtaggcaggttaatcctccacttctcatgtggttgaaccagtgtgttttttggtaaaatggtgattgtagataagattagttccctgatcccctgccccctgtcccctgcctcttttcccaattcccttccttatgctggacttttaaagcttaaaaaaaatccgattgaatataaatgcctaatttcattctttgtgaaatggttgcttcctcctgattccctaattgtgctgtgttcgtgtcttgcactggaattcaacattcccttctccttttgtactgtgttgtgcttgctgtctctcccggacacccttaaagactgtctttttagcaaaaaatttcagtaaagtgttttctgtaatcttttt

SEQ ID NO: 43192 - DNA, 582 bp, Homo Sapiens
cttgtggtgggtggtaagttctcacgagatttatttatctgagcaacattgggactgagggaacatctgaaagctaccatcttgaaaatttttgaggaagtgtttctgaaatatttaaaaatacttaattcagtcattttgaacaaaagaaattgatacaataagtttttttttttaaggatgattgtctaattttgtaatatgttgttttttaaaaacctgtctgatggtgttttatacatttctaactttttacctgagttatctctttagtcttttggaaaataccctacacaatactaacctttaaaactatcaaatttttgttataagataaatgttatctttgtactagatagcaaccctttataaggttgtaaggtataataaactgcttatttttttacatacttcatatcaagcattttgcagtccaattatatagttgaggatggtgtattttgatatgtatgaagttaatattttcaagtaagcaatcagtctactaccatcagattataagcttttttgtaataataggtacataaaatgtgtatgaaaaatctacaataaacatgttta

SEQ ID NO: 43193 - DNA, 664 bp, Homo Sapiens
  misc_feature (14)..(14): n is a, c, g, or t
aaattaatgatgcnacaacttggtgtggtctttgaacagctctctgcagtatttttttttttttcctgttaccataaattgtatttaagtgcttgctttccacttaagttgtactaatagaaccggtaactcccagccctccctgtttgacactccttagcttagattgatgtagttgtttttgttatccctataatgtgacttttatttttaagtcattgtgtactgcatttgtttgtcactagttgggcacgtgccaataatattctctccattccttatctgccatctctgttttgcctgatttctcttcaactgaataatggctttttgcatggaaaaaatagtttttactattagacgtgtaaagggaagagagagctaatgtattggactttgtgagcctacaaggaatattttggatccctccaataaataagggctatgtactatatgtactatatagagttatcatgtggtggaagatacttgcaagtcatagatttatgggcaggaggatttgttactgcctatatctaggctgaatgtaaaatcccttatgttgtatcaatgggggtaaaaactatttttatttgcctatgatatacttgggtttctaataaagtgccctaggctctagtgagaaaaaaaaaaaaaaaggggg

SEQ ID NO: 43194 - DNA, 920 bp, Homo Sapiens
gaacgacctttctttctttatttctcagcctgcccttggggagatgagggagccctgtctgcgtttttggatgtgagtagaagagttagtttgttttgttttattattcctggccatactcaggggtccaggaagaatttgtaccatttaatgggttgggagtcttggccaaggaagaatcacacccttggaatagaaatttccacctccccaacctttctctcagacagcttatccttttcaaccaactttttggccagggaggaatgtcccttttgttcttccccctgagaagccattcctttgtctgccaacctccctggggtcctgcctgtttcctcccaatggagggtttttttggggggtggtccccgtctggggggcccctccagccagtactccaggtctccctgtctctcccccgctgccattttgatagtataatctatttttaaatggggcttttcaataggggagagggagtcatctcttcctatatttggtggggtgggtgggaaggaagggatttgggggggaatcttcctgccgcctcccccactccaagtgtttatwtttgataccaaacatgaattttcagttccctccctcccagccccccaatttcctgcgggcgggtacaaaggaccctttcaatgtccctggagttgggagggaggaatgggggacataaagcctgtcctgtctctattctaggcaagagagagtgggttcaaaagactcctgggctcacctgttagcgctggcccagcccaggccttgggacctgggggttggtgatttgggggacagtgctacactcgtctccactgtttgttttacttccccaaaatggaccttttttttttctaaagagtccagagaatggggaatgttcctgtaaatatatattttcaaagtga

SEQ ID NO: 43195 - DNA, 535 bp, Homo Sapiens
tctgtgctcgacacctcaaactctttggctacgagccaaccatctattaccccaaaaggcctaacaagcccctcttcactgcattggtgacccagtgtcagaaaatggacatccctttccttggggaaatgcccgcagagcccatgacgattgatgaactgtatgagctggtggtggatgccatctttggcttcagcttcaagggcgatgttcgggaaccgttccacagcatcctgagtgtcctgaagggactcactgtgcccattgccagcatcgacattccctcaggatgggacgtggagaagggaaatgctggagggatccagccagacttgctcatctccctcacagcccccaaaaaatctgcaacccagtttaccggtcgctaccattacctggggggtcgttttgtgccacctgctctggaaaagaagtaccagctgaacctgccaccctaccctgacactgagtgtgtctatcgtctgcagtgagggaaggtgggtgggtattctccccaataaagacttagagcccc

SEQ ID NO: 43196 - DNA, 567 bp, Homo Sapiens
agttcttccattccctactcttccttccgagggagtcaggatgggacagacacccattttccaaaaggctccttgcctccttccctggcccacctgaagccaagtcccaggtgtcctggctgctctcctgggcggggtgggatttttgcataagcactttgctgccctccagtggctgcttgaggaaacgcagggcctggtttgggagagtcaccgagggcccatgtggctggaggttgggggcaggatctggcccgagctctcctcagacctccccagacctgtcttctcatcagccaccgctgttttcttttgccgaacgatggttgcatctctcggacacagtgtaccccctcccaagccctccctgagccgttctcctgagtccctgagggcagacacagctccagggacccaggccagctgccacacccccgacactcctgctgtccactggccttagctcctgcaagttccccagtgtccgcacctgttcccttccctgacctcaccttcctggggtctgtgactgactggagataaaaataaaagcaattgtgacacctg

SEQ ID NO: 43197 - DNA, 720 bp, Homo Sapiens
caaatttgcagaatttaatctacaagttgtattatgctttgaaaactccatccctcctaagaatcttaaaaaacttgaaatgctcgccaaatgtccccatgggatttttgaccaaaagtaaggtgataactgaagaaatttttagttctttgatcacttcagtgacaatacccattaatgaatcttctccatgatttggggttttttttcgttgttgttttttacacttcttaacctgttgatctatttgaggtctttgtgtttatcaaacttattcttaagtttaaaaaagaaattaaaagggtggtttttttaagattttaaagtttgctaacatattaaaaatcttcaaatgcttattaaatagagcagttcttgccacccagtcttgtattctgtctttagctagccaaattgtccttgaatttgggttttccacaacctcaaagggttatttgaaatcttttgtgtattttaaaatatttttggaagagctgctaattttattttaaaaaacaaagttgtgaaaacatgcctcctttttaaaaaataacccctccatccaggatatggaatccagcaccacagtgcacaggtcagggctcggagggagcctctgtgcagatgtgctttctttacagtggctgtaaaaagtttgtatttattatgtataaaactgttgaataatacaccaaaatggacttacacaaaccaaaccac

SEQ ID NO: 43198 - DNA, 598 bp, Homo Sapiens
ggtggtctggtttctggtctcaatggtaccaaagggatagtcaccacctcaatcaaactgagatccaaaacagcagctgctttcctacaaggaaagacatcaagaactactgagtctgaagggtgacataatcaaccacaagaaaatgttacggtttagcctggcacagtggtgcatgcctgcagtcccaactactggagaggctgaggtgggaggactgcttgggcccaggagttcaaggtcagcctcggcaatataatgagactctgtctctaaaatcaaaaattagagaaatataaaaattataaaattaaaaaagaaaatgtcatgatagctcaggtttcagagaggatgctgcactactctgggaaaaaagtgaagtgacagctcagccctgacagcaggacctagaagggctgagatgaagaggctgacctgtagagctcagcctggacccacaggaggggtagttgagttcacagagggatactgccatttaagctggttgtgaatggggtggtatgaagaccgactgcactagtattctctccaggttacaaataccatgaccaaactgtgtaatgtgatactaatatgc

SEQ ID NO: 43199 - DNA, 573 bp, Homo Sapiens
ggagtgcctatttctaagcactgggtgtaagaagaaaagacacttgcaaaggaagagctaagattaacataatttctttggtttttctattgcttgttattattatgtaaaaactgggtggcagttcacaaggaagattgttgtaacagaagagtgacaaccaatagttttttgatcattaaatcaaattttgtaaacagtggcaggagcgtggacttaaaacaaggcttgcttatttggttttgtcaaagttttacgaaaatatatgatatatatttatactaaaactatataatccttagatttaggaaagcaatcagttaatgtctttagcacactaaagcagtattaaacacaggtacaagttggaaattgtagaaaactgaaagaaaacaagacaaaatgtctatggtagggaataaaagagtttaagatattatgtaaaattatgtgtattttcttctcttttacataaattgtttgtgaaaagtgtgctcaacttttttacaagagtgatattaacttggatttatttttcaatataatttggagaccctttgttatccaaataaa

SEQ ID NO: 43200 - DNA, 557 bp, Homo Sapiens
  misc_feature (544)..(544): n is a, c, g, or t
  misc_feature (554)..(554): n is a, c, g, or t
  misc_feature (557)..(557): n is a, c, g, or t
tgtaaacacgcattctttctgaggctccggcgctgatgcgaatacagctcacagagaaacgcatgtgctattggagaacaggtctttgtggagatctaaaggcagtgattgatttcacagggagctctaatctctgtgattacatggtccttcaaactcccaaccaaagtgagaaaagcggcatgcagtgaaatgagcagtgagcagccctttagcaaaatcgccctccagtccttcctggagatgccttcagccagcatcccagactccacagttatttatgaacgatgtcgtgattctccctccacctgacagtttgtaagagtgaaagagcatctaacctgatgctcttggagagagataacctgtctgtcataacttaaaggatgagaaaatgtggtgtagctattaaagattcatgcagtcccaaaaggcactgtcctgggatgatgagagattataaggtgatttcataaaaggaatccaaccctgtgcccggccattgatgtgttgtcattgaatccaggaggatttctagggcacngaagctttgntgn

SEQ ID NO: 43201 - DNA, 606 bp, Homo Sapiens
agtttgttaaatagctttgcattttagtcctctattatgctatgaaaattattacgaagtttatattgttccctttttaagcctgccttactcttgtcttttgtcattgtctatggtttaatgaagaacacaccaaactaacatttttgtttattttgaggaacaaaaaaacttttctcttttaagggaagttactacacattgagttagtaactactctttcagtcaaggttccttaatcagtccagtctacatcaggactatgacttggggggcggggctaatcctttttgctgttctgagctactattgtcaactgctgttgtacatactgttatgtgtaatggcgtaaatatatttattatgtttgtaaaattcattgcagatcaaggttgctcttctgtgatatatgggatattatgttttaaagaccatcttggaatacaattagagaacttagtattttgatgtactaagacctattttaagtttaatattctactttgcaaaaactttaattaaagatgttatttaaaaaaaaatgttgcttgctttgcttactagtatatggcattgttatagataattgaataaaatacaatttag

SEQ ID NO: 43202 - DNA, 757 bp, Homo Sapiens
  misc_feature (621)..(621): n is a, c, g, or t
  misc_feature (671)..(671): n is a, c, g, or t
  misc_feature (700)..(700): n is a, c, g, or t
cttaacgccattctaactgcctgtgactcattttcacttacagtgtttattgtaacgccaaaccaacaaatcacaggtgcttgcttctctccataaatctccccagtctaactttttgtcattcaacatgactcgtttatccaacctgaaatcgcatatagccccaagtatggtgttttgtacacaggtatttaataagtgacttccagttttggctctgctatgaataaaaagagatttcagttctcttcactttgaaatctaacaactcagagaacattgaagaaattggaatttagttgggatgaaatacttgtggtttaaaatatttctgttcatattttctaatttgttgccggaggtcttgggttttctatttgagtgcttgcaaactcaatgtgatttctgtcagcatatcttaggtttgtttgttatgaaacttatgcagtgtgaggttctatctgaaaatgttatttagctatcttctgggactatttaatgaaagtggggtcatgaatccttaaaattcttgtgcagctttgagaaacatttctgttatttgggtatcagtttgtaagtgtggtaaagccaagatggaaacgagcactttgctttcttggntgttgttactggtctaacctcctgcttgaactagtctgctgtcctgtcanatgcatctttttatttacatgtcccttanattaaagctgatcatgaaagtaaaaaaaaaaaaaaaaaaaaaaaaaatcgctaatcg

SEQ ID NO: 43203 - DNA, 677 bp, Homo Sapiens
gcgtccgcccctatgccgtggccctacccgaggtggccccagcccagccactcaccgaggcactgagggctctctgccacgtggggctctttgacttcgccttttgtgccttgtttgactgcgaccgccctgtggcgcagaagtcttgtgacctccttctcttcctgagggacaagattgcttcctacagcagcctgcgggaggccaggggcagccccaacactgcctccgcagaggccaccctgccgaggtggcgggcgggtgagcaggcccagcccccaggggaccaggagcctgaggctgtgctggccatgctcaggtccctagacctggagggcctgcggagcacgctggccgagagcagcgaccacgtggaaaagagtccccagtccctcctgcaggacatgctggccacgggaggcttcctgcagggggacgaggccgactgctactgagcagaaccagagtctgccactggggctcaggaccaagggaggcagcaccatgtccttctgtgggacactgccagccccagggctccagcccagcccggtggatcctctggggaagccaggaccaggagagaagcaaggtcaagaaatcccacagtttgatgtattaaagaaatgacttatttctactcaaaataaatggcattgaagtctttaaaaaaaaaa

SEQ ID NO: 43204 - DNA, 800 bp, Homo Sapiens
  misc_feature (5)..(5): n is a, c, g, or t
cttgngaatcttggaagtaaccagtaccttttctctgtcatagtggatcctaaagaaatgccctgcttctgtttgcgccatgatgttgatgccctactctggcaaccacactccagcaaacaagatgatatgtgggagcacatcgcaactttcaatgctttaggctatgtccaagcatcaaagagagacaaaaaattttttgcctgtgctccaaattactcgtatgcagcccattgtgagtgccttcgtcgagtattcatctatcgtcagcctgctcccatgtccactgtactttacaacagaaaggaaggcaggcaagtaggacaggttgctaagcagcaagtagcaagcctagaaaccaatgatcctattttaggatttcaggcaacaaatgagagattatttgttcttactaccaaaaacctctttttaataaaagtaaatacagagaattaattattctaacatattggcctctttgtactggaaaagtattcagtggtacctggaggtctggacagttatactgtaacctcttaagttttaatgtgctaaatatatcttgtatgattttttattttttaataacattggaaatatattcaagagattatgattctgtaaagctgtggaatgaagctgcagatttagagaacattggcttctgagaaaaaaaagagtgaagatagtactagcaagtatacttattttttaaaacaggctagaatctcatgttttatatgaaagatgtacaattcagtgtttaaaaataaaaatatttattgggtaaaaaaaaaaaa

SEQ ID NO: 43205 - DNA, 989 bp, Homo Sapiens
  misc_feature (454)..(454): n is a, c, g, or t
  misc_feature (514)..(514): n is a, c, g, or t
  misc_feature (532)..(532): n is a, c, g, or t
  misc_feature (536)..(536): n is a, c, g, or t
  misc_feature (573)..(573): n is a, c, g, or t
tctgctcttcagtaatgacatgaaatctttgttcatctccactttgtgctaacccattcatagttggcagttaaacacatactccaaaagactgctactatctactattttaagaatgtaattgattgttcggtatttcctatcgacgtttatttacctctttagcacttatactttagcataaaaaatgttgagttatcaccacctttcaattccatggacctgatttttccagaaagatgttttcctctttcagatttttgtacaaggctaaaatgtctttcccatccataaccaagtactcctatgggtacataaacccaaagtccccacttcttttaaagggatatgatcaagttataacatgtaccctgcttcccccaaccctgccttcttcactaaataagcatgtagctcagtggtttccaaatttggctgcacattcataccaatnaccaggggatttttttaaaatcctgatgcccaacttgcactccacattaattaacatgtntaggagtgggagcctganaganaccactattaaaaaaaaaaaaaaaatccccaaaatgnttycaatagacaacaaagttgaggaaccactggcacatcccaagctaagatacaaggttaaatggcctttttaagtatgttatactggatctttaaataaagcaaggcttttgttacactttgtcatgttattaaaagcagacctttgggctgtttaaccgtgtaamaaaaatgccacgtgaaaaataaaaatttttattgtatagcaattctctataaatagtagataatctaagtycttattttctgatggctcttgttccactattaacattgtttttaatttttaaaatcctatmagcagcctcctaattagcagttttaggratttgccttatgttttccatctcatctcctgaacctgttattctgagaactcataaataaaattcagccaagattaatcaatcaatcaa

SEQ ID NO: 43206 - DNA, 707 bp, Homo Sapiens
  misc_feature (559)..(559): n is a, c, g, or t
ggcagcgttctgcatgatggaggcgctgccgggccccgggtctgtgggggccgtgctctcagggcgtgtgcgggacgccacctgtgcacacctgctcagagcacggctcctcgcaggggtgaaggggcagaccaacgaaaccagatgagaccaacgacaccatgcgagacacgcttgcagacactgttgttttggaaatgtgcttccctccatctgaaatctcatccctccacccgcccactcgggcagctgtgccgtgggcagggcatgcgctcccctggctgagcaccccagagattctcctgcaccttcctcatgccgcacgctgctcatccgtctccatgtgtgtttagatccatgccattcactgactcactaacacctgcaaaatctttaaggaaaaaagctgaagggtacgaccatgcacatatgtgacctggaaaatgcaaatttagatcttttatgatttaattattattgtttcccatagaagttccctccctttgaaattaatatataatgtataaattctgcactgagccatggcggagctgggcangccctaggttagagtggagacggaggcccaggcgcaggggtcacacctcatctggtttccttcccatctcacagcttagcttgtgcttctcaacaccaagtctttaagagcaataaaaactacaccatgaaaaaacagacacaaaacc

SEQ ID NO: 43207 - DNA, 844 bp, Homo Sapiens
  misc_feature (293)..(293): n is a, c, g, or t
caaatcctctcccaattttattcccttattcatttcaagagctccaatggggtctccagctgaaagcccctccgggaggcaggtggaaggcaggcaccacggcaggttttccgcgatgatgtcacctagcagggcttcaggggttcccactaggatgcagagatgacctctcgctgcctcacaagcagtgacacctcgggtcctttccgttgctatggtgaaaattcctggatggaatggatcacatgagggtttcttgttgcttttggagggtgtgggggatattttgtttnggtttttctgcaggttccatgaaaacagcccttttccaagcccattgtttctgtcatggtttccatctgtcctgagcaagtcattcctttgttatttagcatttcgaacatctcggccattcaaagcccccatgttctctgcactgtttggccagcataacctctagcatcgattcaaagcagagttttaacctgacggcatggaatgtataaatgagggtgggtccttctgcagatactctaatcactacattgctttttctataaaactacccataagcctttaacctttaaagaaaaatgaaaaaggttagtgttcgggggccgggggaggactgaccgcttcataagccagtacgtctgagctgagctatgctttcaataaacccttgtggatatctaccacacaccagacaacaacaaagcccagcaacgcaaacgcgaaaacaccaaagaacaaaaacagaacacaaagcgaggggggggccaacaaagaacccacgcgggggccacaaaaagcgcccaccagagcgtgcaacaggggcccccaa

SEQ ID NO: 43208 - DNA, 614 bp, Homo Sapiens
ttctggaaccaatagtgccctgtgttctcaagtctctaaaatgctaagatctgagcaaagtcaagcagcttacactaggcttttttacagctgtgcttgagaacatttccgagtggaccagggccttgaggagcctgtttttcagcaaattcaacagatgtgtgcagtgattccctccgttttgtatttgacaccttcatttaaaatgctaagatgcaatatcattcacttcaaagtggggaaaatgcagaattgtgtttcctttttatctgtgtgattccttaagaaacatgtttttaaaatatgtgttctaaatggttttttattctgtattactgctttggccatgtggctctcatgactttcattgtaccagattctcagctccctgaaacatggggacgagaagctctggaattacagcaagatttttgttccatgagcgcaatactgtatcattaacatttttaatggtatggattttatagcatctgtgtatgtttgcaaatattaagttattacatgttttaaaatgagcgtttttcatcttaaattttatatgtttgcaaatatatttttttaataaaatttcaaaaccaaaaaaaaaaaaaaag

SEQ ID NO: 43209 - DNA, 582 bp, Homo Sapiens
  misc_feature (367)..(367): n is a, c, g, or t
  misc_feature (471)..(471): n is a, c, g, or t
  misc_feature (564)..(564): n is a, c, g, or t
  misc_feature (568)..(568): n is a, c, g, or t
agacccctcagcagcaagtggagctgtttgacttggagaataacccagagtacgtgtccagcggagggggctttggaccggttgctgatgacggctatggtgtgtcgtacatccttgtgggagagaacctcatcaatttccacatttcttccaagttctcttgccctgagacggattctcatcgctttggaaggcacctgaaagaagcaatgactgacatcatcactttgtttggtctcagttctaattccaaaaagtaattccactggagctgctgggaaggaaaacgagctcttctgatgcaaaccaaatgaaaaataggcattaatcctgaccttagctcgggatgaaacactgctcttaaaanaactcagttttccttccagaaatgtggggtggttttttttcctagaacagtatctctcccctgtgaagcataaccccactacttccagacttgccctcccttgngggacatctgataaagtctcccctgatgtctccgcatcggcttggatttattaagggatgcaaatcttgttgagttaatgaaggaattagtangggntgtggcttcacaca

SEQ ID NO: 43210 - DNA, 660 bp, Homo Sapiens
ttttttttttgcattttagtaaaaaaaaaaaaaaataaatttaaataaaagggggtggtgatgacatgtgaatgggtgcgggtatgtgtgcgtgtgtgtttgtataaggctcttttgagatgaactggtgcttgtttaatttccagctcaaatcggagcaggaatatggacaaactgctgctactgaaccctgcactgagccgaggtatttccatttggttaactaaacgctagctaccaggaaatgacgcagaagtcacgttcttcttcccactgccatcttgcctttgcattctcagttctacgtgccctttgaactttaatggtaaaacatttcacactttggatggtttgcttgtctctagtttttagaaagctcttatcactccttcctaagaaaaaagaagggcaggtaaatttttttaaccaaaaaaaaaatcacacatttcataaaaccctgatgaattttggatatgtgagagggcataaacattcctaaatatggacctgtgaatttagtaaattacccccatgaatatactccttcagtgcagggatttttgtgttttttttttttttaatttttttgcaacagccttgctcatattccaggtgtagctagcaaacccctgtttttgaagcaagagccttatttgattc

SEQ ID NO: 43211 - DNA, 662 bp, Homo Sapiens
  misc_feature (652)..(652): n is a, c, g, or t
tttgtgccccaaataatatattaatccaagtctaccaaggtaactaagtaatggatgttttctctcttttattacaagcaagaaagttcattgcagtgtaaaaatgattaccgaactccagacctattgctataactgattggaaataatgattctgatttttagtctgggtaaacacatacttcggtgtgaatttgataagggaaagactgttggtagcccaaggaaaaacaggatgtatttatacagtgaatgttcactctgcagaggaacttccctccagttacatcttcctcatacattagccacctccacacttgacatagatgccaacatgtttcaaaaccaatcttgaaggagcctaaagagttgatggtcctctaggtgaaagacaagaattactgtattgcatttgcttatagggaggtgtgtttttgctaacttgaagggatatactgtatttcaaataagtgtgtgacttaatattttgggatttttttttcctcctttaaaaactggacctgaacacaagctttgagttgatgtttgtaataatctcaggacctgaaagatggtagcatttagtgtgtcttaaaaattatgtacctgtaccagccatggatttttggtaaatatacctgtctcccttttngtatttctaa

SEQ ID NO: 43212 - DNA, 600 bp, Homo Sapiens
ctttttttttgatttatttgtgtttaaatgctgctgtcagacgattgttcttagacctcctaaatgccccatattaaaagaactcattcataggaaggtgtttcattttggtgtgcaaccctgtcattacgtcaacgcaacgtctaactggacttcccaagataaatggtaccagcgtcctcttaaaagatgccttaatccattccttgaggacagaccttagttgaaatgatagcagaatgtgcttctctctggcagctggccttctgcttctgagttgcacattaatcagattagcctgtattctcttcagtgaattttgataatggcttccagactctttggcgttggagacgcctgttaggatcttcaagtcccatcatagaaaattgaaacacagagttgttctgctgatagttttggggatacgtccatctttttaagggattgctttcatctaattctggcaggacctcaccaaaagatccagcctcatacctacatcagacaaaatatcgccgttgttccttctgtactaaagtattgtgttttgctttggaaaacccactcactttgcaatagccgtgcaagcctcgtgcc

SEQ ID NO: 43213 - DNA, 516 bp, Homo Sapiens
tactcttcttatgtactgaaaactttttttaaaaaaggtgatgatgaagtgcattctgtagcagcagcgcactatgctttaaaccacacaaaaggctgtgtccaggtgcagcctccttcacccttcctgcccacggtgaggattgaataaccaggacttggggatattgtttgttgtcagggttattctgtgtggtaaggaatatttgtttcacatttatacattttctttttccactcacgtaagtttctatcttgagagcatagtccaaagtgcaaaacttggtgtttacaaggaaaattgtcttccagaactccactgtcatcactttcaccaaagtggaagtttgcatgaatatgctcagaatctaatattcaatgttctgttacattgtaagtgaagtccagctacaaaatagatttaatatattgaatttatttgtacatatgcagagtacggtatttctgtatggaatctgctttattcctatttttcccaactctgatgagtagaata

SEQ ID NO: 43214 - DNA, 616 bp, Homo Sapiens
ccgtggaggaactttttaagctgctgaaggaaggacacagaatggataagccagccaactgcaccaacgaactgtacatgatgatgagggactgttggcatgcagtgccctcccagagaccaacgttcaagcagttggtagaagacttggatcgaattctcactctcacaaccaatgaggaatacttggacctcagccaacctctcgaacagtattcacctagttaccctgacacaagaagttcttgttcttcaggagatgattctgttttttctccagaccccatgccttacgaaccatgccttcctcagtatccacacataaacggcagtgttaaaacatgaatgactgtgtctgcctgtccccaaacaggacagcactgggaacctagctacactgagcagggagaccatgcctcccagagcttgttgtctccacttgtatatatggatcagaggagtaaataattggaaaagtaatcagcatatgtgtaaagatttatacagttgaaaacttgtaatcttccccaggaggagaagaaggtttctggagcagtggactgccacaagccaccatgtaacccctctcacctgccgtgcgtactggctgtggacca

SEQ ID NO: 43215 - DNA, 661 bp, Homo Sapiens
  misc_feature (1)..(1): n is a, c, g, or t
ngccctttaataatggagcatcaaaaacatcacctgtaaccccaagcaaatatagaagactgtattttttactatgatatccattttccagaattgtgattacaatatgcaaagagtcataaatatgccatttacaataaggaggaggcaaggcaaatgcatagatgtacaaatatatgtacaacagattttgctttttatttatttataatgtaattttatagaataattctgggatttgagaggatctaaaactatttttctgtataaatattatttgccaaaagtttgtttatattcagaagtctgactatgatgaataaatcttaaatgctttgtttaattaaaaaacaaaaatcaccaatatccaagacatgaagatatcagttcaacaaatactgtagttaagagactaactctccacttgtatgggaactacatttcactcttggttttcaggatataacagcacttcaccgaaatattctttcagccataccactggtaacatttctactaaatctttctgtaacacttaaagaattccctcattcattaccttacagtgtaaacaggagtctaatttgtatcaatactatgttttggttgtaatattcagttcactcacccaatgtacaaccaatgaaataaaagaagcatt

SEQ ID NO: 43216 - DNA, 495 bp, Homo Sapiens
gcacgaggtgtcccaggaaattgtgcggctcagcaaggagtgcgtggggcctcctgacccagacctagagccaggagaaaccagctaaagacctgcaggctgcacccacctcctccccttcctaccccctaggatgctattcccttgggctgtggtggaaaaatgagggctggagccaaaatcaaatagcttgggagactggacattaaaggggctagaggcctgatggttagtgttaatgatcctgtcttagggcagaggccaccagggagtggggatcctgagggaaggggcagggatttctccttcttcttggtcctggctcccaagggcttctgtcttcatctctgcatgagctctccttcccagagaccaactcttttttattttattttattttattttttaatttatgtctggagcctggctactctgcatttgggattggggatgctgggtgggtgtgtggtccatgttcagcgttctagcaacacg

SEQ ID NO: 43217 - DNA, 841 bp, Homo Sapiens
gatttcacttaccagcacattctctacaatggtgacttagacaaaagtataagattcatagactttatatttgtatgacatacaactaggacaaacatagatatgacatttgctgcctcagtgtagcaattggaaatatttataagttatatgaaagcctgttttgggctgaaagaatgatttagaaaactagtgataccaaataagtatattcagttcaataattattttcaatgatgaatcacttagtgtgaaagacttgccttgtgtattctttatgtaattacaaatcactgtcaattttatgggaagctcatagtattttaatattttattaacatggaactcttgtttttttaatctttagaacttaaattctacaataattttaaatattttctgtatataattatgacattgtcacacagaaattacacattttatgtgccagaagccttaaacatctttctgtgaaaatgctgatatattgtgacagttatttcacatttgatatgtagagaggaataggggttagtttatgtttatattgaaaaactttaaagactatttggaagttccagaaattctggttttaattcaagtaaaatgataaaatagtcattatatagttcagatgctaatattctaagtaataatatatatttacattgaagctaaaactgttagcaaaacaatgcccatttgtcggcttacagctcttccggagtctagagcctgttggtgttctgtccctactttaagaattaattgctcacttattctgaaagcttgttcaacaagatgatcttacattggttttcactaaaaacagacacacaat

SEQ ID NO: 43218 - DNA, 526 bp, Homo Sapiens
  misc_feature (496)..(496): n is a, c, g, or t
  misc_feature (507)..(507): n is a, c, g, or t
  misc_feature (515)..(515): n is a, c, g, or t
tgacacctgcactgtgccattcctgattattccattcaggatctgtatcagcgggatggggcatggtcccagcacaaactcttctgggttaaaaaaaaaaagccaggtgattcctttgtgtgttatgtcgtaagtggagtgacttcatcatatatggaagaagatttctatattcagctttttctgcaggttggagtcagcatagagttggaaaatcagctttggctttctttcctgtctcatttcctctagtgttctcctttttattgtcatcagctctcaacaactctgccacttttgtgtcccaaggtaataagatgtaggaaacaaaacattgtaaagtggagcaagaaaagttatcaattaaccacatcagagtcaaatgtcttgggtgacactaaaggaggatatgggcaggtgataccagaagtgctttaatcttgtgaatgttgatacagtagcagcctctcagacattcagccaggttggaatttcncatgaggtttntcacccanttttgaaccca

SEQ ID NO: 43219 - DNA, 765 bp, Homo Sapiens
tggccttcagtgtccacctgtggaacccaggacacagcacctgactgcacacagtggctgaaatccagcatttttacataggagatgcacttagcctctaagcctcgttttactcatctgtgaaacagagataagtaaccctctctcatgaactctttgatgaggatttgtaaacgaaaacagactcgaactattgtgtaccaccacatagcacatgcacgtctgtcccagactttgacaacctgcacaagacaagcagcctaaagcaggagagacctccctagggttttgtgtgtgtgcacactaccctcactccccaactggccattaccctagttctgcccttgtttgtggagttacagcctcaaggttgtagcatgtgtgctggcaatcagggccgcagtgtgttctgcgcctgcccagagctgactcctgatttaaccgctggcgtaaccgcgggttgcacgcatgcgtgctgaaaagcctttcaccctcacgtggtttcttttttaaccagtcatcaagcgaggctcgcgcgcaggccccgcgttggaaaatggcggggaagctgaaacctctgaatgtggaggcgccagaagctgctgaggaggctgaaggtagtgagggcaagtgggctgcactcctttctctccaaccagggcagaaaggagggaggattcgtcccattacaataatgaaataatgatattctaatttttttaaataaaatgttaagccttttgttattgaaaaaaaaaaaaaaaa

SEQ ID NO: 43220 - DNA, 659 bp, Homo Sapiens
tgacatcctagaacaaagaagctgttttaacttaatccccctgatcagcaggatatctgtgtgttcagtgacatcatacattctgtatctagaagtctaaaatttctgcctttctcctaaagaatgtgttcttgcattttggttgaaataacctacacagtgttaaaaatcagatacctcctttagtgaccagttcaaattttaatagcgataggtagcccctgagaaatttatcactataactccacaggaaatatgacttggaagtgctctgtgtactaaacaaaataaagcccctctttgcatttaaaaccaaagtcaaaacaaaactcttgtaatgcaattaattaactttatgtcttcccatgactcaagttttgttaaatatgcccaaaaactttgattggcagtttcttcggttaattattcctatagaatgtattttaagaaatctatacaaattggatatatgcttggtaattctccagtttctaggaggtacctatttctaccgtttcaagtgatgaagtgaaaataatttacattcgatagtgttactgataacaaacctacttaagagatatgttgctttttacttaagggatagtgttgatagataaattagaatgtatagataggtttgtgaaagtctaaataat

SEQ ID NO: 43221 - DNA, 583 bp, Homo Sapiens
cgcgtccgggtggggacaaacaacgcaggatataattgccaaaaccaggcttgaggttggtgactcttgaaagattttctttcttcaggcctagatcagaaaattaagtgcagcaatatcatgaattctcagaagccctttcagggagccagtgagtcatacagtatccacagttgagtcacttaaagatgtcagtatacgaaacattattcacaatccttgggcaatctcatttttttttccttctcccctcctcccctgccccccatacatttctatccttgagttagttttggaggggcaggaagtacttaacatctcagaagctagattgggaaacatgctcagctataagaactgagctttaaattttgagtttaaaaatgtacatcaggagcagctggggagggtctttttttaaaaaaatctttcaaatttggttttctgtgcatatggccgttttgtaaatactttggggtttttcatttttttgaaagtagatgaaatctgttgtgggatttttttcccgaaacattacaaaataacctgtttatttacatgcaaataaacttctttgataaaa

SEQ ID NO: 43222 - DNA, 651 bp, Homo Sapiens
gtttttggaaggcgcatttgagccttgtgagctaaaatggaatggatttaatatttcctatctggcatttccatcttgcccctggtacacaagtcactggcctggaactcagccttgattcactgtccgtcttcacggattagctgtgctgttatgttgtctgtgctgcagattggcccatgtgggaagtcgggggggacctgatttcctgcttggaagacttgggggactgccgagcatatcaaagtgtttatagtcaccaagtgaactgcagcacaaccatctcctctccagcaagccctgaagtcagtagtgcctgcaggtgaaaccaaccagccctgtgttagaggaggaaaagcggagatgacatggaagtctccaagcctgtgccatccacctgccaaggaaaagcacaaggtgctatctacttttctctctaggatttagattatcatttatgtgctgttgcacagtgaaacctcacctgtgtgggcgtgaaagctgattggcattgtttttgattcagctttttggatggctaattgttttcactgtgctgtgggaatgcctctgtattttttcccctctttggccatctttttctgaaaataaagtgatggatcctctagccaaaaaaaaaaaaaaaaaaag

SEQ ID NO: 43223 - DNA, 972 bp, Homo Sapiens
ccaaaacagttgcaacaaattagttctgaacctggaacagagaattcagtgcttctgttactcaggaaggaggtgttcagaatgccccgtgcagagcagccagtcattactcttgtttgttctcacctgggtgcgcaccctcatgatgcagtggctgtagcaccttcatgccaggtgctgagagaatgggaaattcttcctccccattgacctgagtcccagagacttagggacacagacttcaggtgaggctgcggacctcagaagcagtggataatagattggggcattaaaagcttttgaggcagggggctcatgttttgactgcagggagttatgctgagcaaagagatgtgtttttcaaaaccagggttcaaaaccagtgtccacgctggagtaagtggagcatgcttctctgtgttctctgaatgatcttgcactcctcttaagcaaaggagtaccatgaccatagtcagtgggatcccacaaatgttcttaaatgggtaaggctttaagtagccagagagtatccagcctaccattggcttctccacatcctaaaacctgagacagccttggtatatgctttataaatgtttcttttcttgttgtttaagtaattaaagtgtttaaratgtcttcattagatgtgacgattgtttaatgagtttgcctctgacgtgtggctccatgggagataggcaaagtaattaagaagttaccagaaattggtcggctggggraatgcaaaagttagcatttcagtagtgaatttctcctggaacaaatgagcaattttcctctttctcttaagtagtatacccttttctcacttagtaatrtaaatggtatataaagacatgtgtataagtgagtgcatacatatgaggkatgamtatagggttgttkgwgggatttyytttcctaacatacagaagatcaaakwgttcactccmcccgccwccctaaaag

SEQ ID NO: 43224 - DNA, 608 bp, Homo Sapiens
  misc_feature (560)..(562): n is a, c, g, or t
  misc_feature (571)..(572): n is a, c, g, or t
  misc_feature (574)..(578): n is a, c, g, or t
cattattttgatgctttaaacgttctcatgtgtaatatatgtttttgtatcaaaaacactcatatatttcaagaaaaagaaattatgttaaatagccctgttttaagaaaaatatttatgaagcatctcaacttgaagatcaagtcaaagttataactcaggatctgaggtctcaagctaggagagactgagaattttaatcagtttgggcatatagtttggactgaatcgcatctgtagtacttagccaaagacaatttggaggagaatatcagccttctggaagtagctacttcctgaacaatgtaaagtgtcgcagatattcaataaaatggcaacctgttataatttgtgaaatttattgaaatggtgtaagatgaaaacaattgcatatcaaacccaatttatgttttctaaatatagtgtatgtattctgccatgtaagtaattgaacagtcttaaaataaccaaatggtagagggctgttccatgatgggacagctttggatttgttttcataaaatctctacattcaataaaaattggaattatgtgcctgnnnaaaaaaaanncnnnnnaaaacgaaaaaaacaaaaaaaaaaaaaaaa

SEQ ID NO: 43225 - DNA, 920 bp, Homo Sapiens
ggctggagcgcacactttggtccgcgcgccagagacgctgggagtccgcactggcatcaccttctgagtttctgatgctgatttgtcgttgcgaagtttctcgtttcttcctctgacctccgaggtccccgctgcaccacggggttgctctgttctcctgtccggcccagactcttctgtgtggcgccgccgaagccaccgttagcgcgagctgctccgttcgccctgcccacggcctgcgtggctggggccgagtcccaggggccgcacggagggcacagtctcctgtcaggctcggagaggtcaggagaccgaccccaccactaactttggagaaaatgtgggtttgctttttaaaggaatcctatatctagtcctatatatcaaacctctaactgacgtttcttttcgaggaagtggcttggtgggtgcagcccccgccggttccgttgacgctggcaccttctgttgattttttaagccacatgctatgatgaataaactgatttattttctaccattactgaacattaggacaaacacaaaataaaaaacaaaacacagacaacggtgctgattctggtgtggtttctactcaccacgtgaaataaactatcaactgtataaagagaacaaagtgattttagaataaaatgcagggaaaaacttttttaaagatgttagtcttgtagcgtgaataaatttgccatcaccttttgtgtggtggcctggcaaggcctatactttttttttggcatataccttttttaagactgtaattagtggcagtaaccgggggggtgtttttttggggcaaatcgtcttaaaaaattcctaaaggcggcccaggtgtaattctctttcccgttaaaatctttctttgaccggttcttagaagcggtacctttctggcctctgac

SEQ ID NO: 43226 - DNA, 644 bp, Homo Sapiens
gtctcctctgtgctgctgatccgaatgagtatgcctttagaataccgcaccataatcactgaagtccttggagaactgcagttcaacttctatcaccgttggtttgatgtgatcttcctggtcagcgctctctctagcatactcttcctctatttggctcacaaacaggcaccagagaagcaaatggcaccttgaacttaagcctactacagactgttagaggccagtggtttcaaaatttagatataacgaggggggacaacaatggaaccagggcctgacattttataaacaaacaaaatgctatggtagcatttttcaccttcatagcatactccttccccgtcaggtgatactatgaccatgagtagcatcagccagaacatgagagggagaactaactcaagacaatactcagcagagagcatcccgtgtggatatgaggctggtgtagaggcggagaggagccaagaaactaaaggtgaaaaatacactggaactctggggcaagacatgtctatggtagctgagccaaacacgtaggatttccgttttaaggttcacatggaaaaggttatagctttgccttgagattgactcattaccaatcagagaccaaaaacacaacacaaacacaaaaacaa

SEQ ID NO: 43227 - DNA, 577 bp, Homo Sapiens
ttcttctctttctttaatgtttttggccatcaagtagcagtcgtcagtgggagtttataataccaagaatgtgctgcgtatcttgtctcaataagttttaagtaacatttaaaaatattaaagcatgttatttgacctaattttttagcatttgagttgttccattaaatggagcatcttgtaaatttcaagtattttatacttgcaattgttaagagttaacaggtagttggatttgtcgcagacaatgagttaaggaatcctttcacgtttttcccaactttaaaattaaggattctcaggtccctgtgtagagcagtgaaaataagatgtgcgtatgtgtgtgtatgcctggagaattggtgtttcacttcagtgagaggattggctgtgagcttcagaccaggaaatgtgtcatcttgccaggcacctggctgagtgtgctggagtgaggatcttgaacagaaacttccttttctgttattattcactacgaagctaaaatggccaaatatataccgtgaaaattggtttcatttaacaaaagatcagatccctccttcagctgtacacattt

SEQ ID NO: 43228 - DNA, 770 bp, Homo Sapiens
  misc_feature (753)..(754): n is a, c, g, or t
tttttttttttttttctatctgcccagttttattaaaaaaactatatattattttctaaagaaacaatcatatttttatacaaaattatgttttcaggtaacgaaatagatgtagggtacagtggaacataagcagtgttacccctggctgggagtcagtattatacaacaaatggtgagctggaacatgccctgtctgtgctgtccctcctgtgctgggtcgcggatgtgtaggcaacattgccttatcacgctaggttcacctgacactttaaaaggaaaaaaagttccatagagttctgtggtcacaaaattgttttgcttttatcaaatactttaatagaaccaaagttgcagatattggaatgtatggaagtatctcagtctctgcataagaggattaaagtatgaaaggatcatttaatgactgttttacttataagtcattaagtaatccaccatttcttatggatgatgcttaagcctggtgaggtttgtactctaaggagcccagatcataatgcagtgcatttccttagcccttagagtttcttgcaaacatttaaaaaaagacatatttaagaaagaaagataaagaaaaaacatatttaattactgtaaacaggtactgctttatgtttattttctctctacttcaaccaaaatcagatctttgaggttttgctgacattgttggtggttttgcacatgttctttctaattggatttatgaatagttctatgggttttcannagatgatcatgctaag

SEQ ID NO: 43229 - DNA, 621 bp, Homo Sapiens
aaaacggcagccagcgccccgccgccccccagcgaggaggctgtgtccagcagctctgaggatgactctgggactgatcgggaagaagagggctctgtgtctcagcgctccactcccgtgaagatgactgatgcaggagacagtgccaaagtgaccgagaatgtggtccaacccatgaaggagctatatggaattaacctctcagatggcctctcagaagaagatttctccatttattcaagatttgttcagctggggcagagtcaacataaacaagacaagaatagccagcagccctgttctaggtgctcagatggagttataaaactaacacccatctcagctttctcgcaagataacatctatgaagttcagcccccaagagtagacagaaaatctacagagatcttccaagcccacatccaggccagccaaggtatcatgcagcccctaggaaaagaggactcctccatgtaccgagagtacatcaggaaccgctacctgtgaaaagagcgcaggtccacctggtggacacgtctgattagcttagaacctgtcttgtctcatcttcaaaaggtaacttattaaaagtcctttgcgtctgaagcctttctccttttc

SEQ ID NO: 43230 - DNA, 663 bp, Homo Sapiens
caggactggcggccgcatgcccgcagtaggttctagggggcggtgctggccgcagtggactggcctgcaggtgagcactgccctgggctctggctggttccgtctgctctgctgccagcaggggagaggggccatctgatgcttcccctgggaatctaaactgggaatggccgaggaggaaggggctccgtgcacttgcaggccacgtcaggagagccagcggtgcctgtcggggagggttccaaggtgctccgtgaagagcatgggcaagttgtctgacacttggtggattcttgggtccctgtgggaccttgtgcatgcatggtcctctctgagccttggtttcttcagcagtgagatgctcagaataactgctgtctcccatgatggtgtggtacagcgagctgttgtctggctatggcatggctgtgccgggggtgtttgctgagggcttcctgtgccagagcccagccagagagcaggtgcaggtgtcatcctgagttcaggctctgcacggcatggagtgggaaccccacagctgctgctacaggacctgggattgcctgggactcccaccttcctatcaattctcatggtagttcaaactgcagactctcagacttgctcatttacaagaaaagacaccgatgaacacacaacaaa

SEQ ID NO: 43231 - DNA, 583 bp, Homo Sapiens
  misc_feature (532)..(532): n is a, c, g, or t
gaagaatgaaattctgtctgactttgagaccatgaaacttgctgttatgcaagcatatgacccagagatcaacaaactcaacaccatcttgcaggagcaacggatggcctttaacattgctgaggctttcaaagatgtgtcagaacccattgtatttctgcaacagatgcaggagtttagagagaaaatcaaagtaatcaaggaaactcctttacctccctctaatttgcctgcaagccctttaatgaagaactttgataccagtcagtgggaagacataaaactagtcgatgtggataaactttctttgcctcaagacactggcacattcattagcaagattccctggagcttttataagttatttttgctaatccttctgcttggccttgtcattgtctttggtcctaccatgttcctagaatggtcattatttgatgacctggcaacttggaaaggctgtctttcaaacttcagttcctatctgactaaaacagccgatttcatagaacaatcagttttttactggganacaggtgacagatgggtttttcattttcaatgaaagattcaagaattttac

SEQ ID NO: 43232 - DNA, 420 bp, Homo Sapiens
aataggacttagccaattatttttagcttatttctccattttactgacaagagaatgccatttaccgaacatttaataagcaaaataatttcttacacacttacttctcttaacttttgaaaggaatcccttattttttcacccaatttggtatattaacagcacatactcaaggttcactacaaaacaaacagttcctggtaatgatttaaatgtagttatagaaataaataatatgtatggagtcattacttctgaccttgaaatagcctgctggtgactggcattaacatacataactaactattcaattatttccattattaatgttgctgctgctacctttgggcctaaaaccaagtcacctgttgtgtatcaattaccttctttgataaaaggaaataaataaataatgttatc

SEQ ID NO: 43233 - DNA, 631 bp, Homo Sapiens
agacttcagctactgatctcatcacttattagacaaattgctgctgaccttacgcctgtatattaagcctccgcaggatgccggacaatggtgaagaaactccagatatcaaggaattgggaaatcctggccaaaccaccccaagatgattacactgaaatgtagtattagtactgctgccagatctctttttaacatcatgtgcgtctcttgggatccagcaaaagtgttaagccacaatgcccttgtgccttttaatataccacagtgccagttaaactaatatttttgtttgttgcttttgggagttattttcattagtgatttcagcaaatctcatgataaaggacaaggtcaagaactccagagcactgagcagagaggctggtgatgaaaaggtgaaggcctgcgcactgaactgtaaggcagtgggcagtacagggtaactggaggcggggccagggcctcagcgctatggaagagtgtccactgaggctgcacatggcccaggagtggcaccatgttgcagggacaaccatccccatttggcttctccttaaaacacaattgcagctgcattctgcatcgctgaaaactgcaatataatattaaatctcgtgccgaattcctg

SEQ ID NO: 43234 - DNA, 905 bp, Homo Sapiens
gcaggaggagctggggggaatatcaacgcccgggatgccttctggtggaccccactgatgtgtgctgctcgagcgggccagggggcagctgtgagctatctcctgggccgtggggctgcctgggtgggggtctgtgagctgagtggcagggatgcggctcagctcgctgaagaagctggcttccctgaggtagcccgcatggtcagggagagccatggagagacaaggagcccggaaaaccggtctcctactccctccctccagtactgcgagaactgtgacacccacttccaagattccaaccaccgcacatccactgctcacctgctgtcactgtcgcagggtcctcagcctcccaaccttccacttggggtgcccatctccagcccgggcttcaaactgctgctgagggggggctgggagccaggaatggggctgggaccccggggtgagggccgtgccaatcccatccccactgtcctcaagagggaccaggaaggactaggctacagatcagcaccccagccccgagtgacacatttcccagcttgggatacccgagctgtggctgggagggagagaccccctcgggtggccacactgagctggagggaggagagaaggagggaggagaaagacagggcttgggagcgggatctaaggacttacatgaacctcgagttctgactttggtaaagtctgaccctagtctgctgctgaagtctgaacttgggcctctgacctgggccctttgacttccccttcctgggatctgctcagatgcagatcctgaaggttttggtcataggctctgtcttcctgaaagaacggctgagagtcaaaaattaatcaaccatttgtggtttaaaaaaaacccgcgcaccttttcctccccctttttttcc

SEQ ID NO: 43235 - DNA, 657 bp, Homo Sapiens
atagtcgctcctcttggaagaggaagagaagttgaagggcctggagaaagcacacattgtttgtttccctgctcctgctcacctctctcacttgtcttggttttacaaaaggctgtgtggatggtgccagccagggagggggtgggagtcctggggaggcaggaggcagaagaccctgactgtttctcccttgggaacctcaccataggccagatagcgcctcttcaaactgaaagaaatcttaactccacaaagaaagcatcctaaatccccagttcctcctcctcccaaccccagggataccttgtagacagtgccaaaaaacagctccaacccccagcagctgggaagagagccagaagctgcccttcctcctcatcctggcccctccccagcccccgccaatactgtgaacccccttcccactcagcctggtttcctggtgagggtcctgcagtcatgggccctgggggacccccagggcaaggcccatgggagggaagggaccaagggcatccttgggccaactgtccacctctcttgtccactattctctcctttccacttctgtcttcaaaaggctccttcctaggatggatcgggtgctaggacaactgcagtccaatccaccagctctccctgcccctgtgtcttatt

SEQ ID NO: 43236 - DNA, 582 bp, Homo Sapiens
cgaagcacgccatgggaagtgtttacacttggggacaagtgctaagtattgtggagcccatagccccttgagatagatggctactttgcctttcttcttgaactgtcttgcagaatgtggatttggggtaagtggtcttgaaggattcatttagtcaccctcaaattaagatttttacttcatctttcttgggcctgcacctccaagataacaaagaagaagcaatggtcgtgccaaagaggtccacaaccaggtgtgcactgttcactgcagcccatttgctgtatgaactgtggttgttgtgtgcccaatgacaaggctactaagaaattcatcatttgaaacgtagaggccgcagcagtcagcgatgtttctgaaatgagcatccttgacgcctgtgtacttcccaggctggatgtgaagctacattaccatgtgagttgtgccattcacagcacagtggtgaggaattgagctcatgaagcaggcaaggaccgaacacctccaccccaacgtagacctgcaggtgctgccccatgacctccaccaaagcccatataaggagcggagttgttaaggact

SEQ ID NO: 43237 - DNA, 644 bp, Homo Sapiens
  misc_feature (15)..(15): n is a, c, g, or t
ttttattcccagggnctccactgctaggattcttctcactagttctaacaaaatctgtgatgttaaatgactgatgctctcaattgtgatccagagttttaaataaatgaaatcaaggtggattttgggaatatatcctgaagttaacatcttgatgtccttcttgttgtaagatgatatttggcaatttaaaatctatgtgctacccacctgggcttgtctcaatccgtggactttttggtgtggcagtttcacctgaattccacacatcagatttgtttggaaatattgtactgtacagggactatgcattatgcagaaagatatagttttctttgaactgctgtaaccttaaattggaaactgattcttgtgagcctactttccttaatcccgccgcccccctcccccacttaatgtaaatgtcttgatgagagataatggatgagtattttgtatgatgaaatcaaacgatttaggaatttgtctccctccgttacacagttgatgcctgaaagaatgttgggggggaggactcaacaccctaattgtattttttaagtttcttttgtgaaagattttttaatgcatttttactgtaaaaatacatggaaatgtatgcattccacaaaaaaaaaaaaaaa

SEQ ID NO: 43238 - DNA, 719 bp, Homo Sapiens
ttttttttttttttttttgattgatagactgttaaaatttaatgtttggaataacatttggaagtagtagactttgcattaaaaaatggcttttctttaggaaagtataatcaattattttaatgaccatagcattcatggactcaaatgctgctgccacacacaactcaagtgctggaatatttttctacagtctctctgttctacggattatcttgtaaaccagtgttcaactagttttataactgaaaagctgcacatttttcacagtacaagccgtagtttttacctgtagtttggacttctctgttagaatgtaactgcattaccagcccttttaaaggcatctatctatcaaaggaaaatttgggtgttagattttcttgggaccgtttctgtaacctttgcccttcacaatatagaaaatattggttttgccattacattttaatgccaggtttaaaacctgttgaaagctgcagctttatacagctttcttctccctgtgaaatcactttgtttatgtgatggcatttaaaaaatagcatgttctttttaaactgaattttatatctaatcaatgtcttcagtcttgaagaagatttgcattgttgtgtttgtatatagagtattgcagtgcatgaattagctttatgcattttattaaatgctgtttcaatgtggcattattgttgtggcttaatactactacctaaatg

SEQ ID NO: 43239 - DNA, 852 bp, Homo Sapiens
  misc_feature (181)..(181): n is a, c, g, or t
gggatgcacaaagaggggcacagggccaccaagtgggtcttggatctgccctccaggtgtgggcccatcgctggatggatctgtcagaacacggctttgggctggccctgctcaacgactgcaagtatggcgcgtcagtgcgaggcagcatcctcagcctctcgctgtaagtggggtaccnccaggcctgggagctggcatggagaaatgggtcttcccgaccacaactccaacagcttcagcgtggcccctacgcgccctcctcaccccagcttgcgggcgcctaaagccccggacgctactgctgacacggggcgccacgagttcacctatgcactgatgccgcacaagggctctttccaggatgctggcgttatccaagctgcctacagcctaaacttccccctgttggctctgccagcccccagcccagcgcccgccacctcctggagtgcgttttccgtgtcttcacccgcggtcgtattggagaccgtcaagcaggcggagagcagcccccagcgccgctcgctggtcctgaggctgtatgaggcccacggcagccacgtggactgctggctgcacttgtcgctgccggttcaggaggccatcctctgcgatctcttggagcgaccagaccctgctggccacttgacccttcgggacaaccgcctgaagctcaccttttctcccttccaagtgctgtccctgttgctcgtgcttcagcctccgccacactgagtccctggggctggggttttgtttgtagaaggctctggggactcctaatttctgcttccccagcctaaagcagggatcagtcttttcttgtggaataaatccttggatcgggaa

SEQ ID NO: 43240 - DNA, 725 bp, Homo Sapiens
gaaaaagatgtaactaaacttttaaagtagctcctttggagaggagattatgatgtgaaagattatgcctatgtgtcttgcagatgcaagatattttaccaatcagcatgtgttacctgtacaattaaaaaaatatttcaaaatgcaatgcatattaaatataatacacacagaaaaactggcatttattttcgttttatttttttgagatggagtttcgttcttgttgcagtgagctgagatcatgccactgcacgcaagcctgggcaacagagcaagactctgtctcaaaagaaagacaaaagaaaagaacaccaagaacaggcaagttgactgctgaaaggggaatctgtgtacgcctgggagctgtggggcagccacattccagcacatggatctgagaaacagaacgctgatctgcagaaagagatgagaaccaaagagaggccacctgcgtcctgggtccattttcatcctccctgaagcccagctgcccagggtggggagaaacaccctgtgtccatgggatagagtcctttccgcttgcagttgtgcccaaagaatcttaaatacaaatgagatatccttaggtagttgatcatttatgtaatatgtgtcttcactggggaatactgacttcctaaaatctcaagatggaagatataccacatgtaacataatttagagcaattacattgtttcaggatttccaaaacaaaaaacaa

SEQ ID NO: 43241 - DNA, 653 bp, Homo Sapiens
gatgcttaagcctggtgaggttgtactctaaggagcccagatcataatgcagtgcatttccttagcccttagagtttcttgcaaacatttaaaaaaagacatatttaagaaagaaagataaagaaaaaacatatgtaattactgtaaacaggtactgctttatgtttatttctctctacttcaaccaaaatcagatctttgaggtttgctgacatgtggtggtttgcacatgttctttctaattggatttatgaatagttctatgggttttcaaagatgaatcatgctaagaacacttctgctttttgatccactgtttgcagcagaattatatatatgtataggaaaaatccactttgaataatccatgttttgtatttggaaattgtttttaaaaataacaaaggaaaggaaatatataaagctgttatttattctgcatttcttacatatctatcgcttgtcagtatacccgtttgggtatatattgcctctgcacatctacatttgtatatgcaacagtgagctttatatctacataaactgtaaataatcctttctgtgaaaggatcatcatatcaagatgataccaaaagtatgtaaaacagaaacctgcattatttggtcaattatttcttatagatatttcatgg

SEQ ID NO: 43242 - DNA, 610 bp, Homo Sapiens
  misc_feature (498)..(498): n is a, c, g, or t
agcggatcgactgaagtcggagaacctcgaggtgtccagttccttcaactacagtgtgctgcagcatcttggccagtttccaccccttatgcctaacaagcagatcgcggagtcggccaatagcagtagccccccagaagctctgcggggggcaagcccgccatgtcctatgccagcgctctgcgggcccctccaaagcccaggccccctcctgagcaggccaagaagagtagcgaccctctgtctctcttccaggaactgagcctagggagctcatctggcagcaatggcttttactcatattttaaataatcacttttttttccctcaagggagaatgttttaatttctgtttgtatcagtagaattaaggtagttggacttcatctatagatgcacagttccctttgttttaatattacatatgttctcacttaattgctttgctgctagacttgcaactaatttttttaacagtatattccattattttgcatntttgatgtgtcaaaactttgacagcttttatgtagaataaaaaaatttttaaatttgtgtattgttacatatgtatgcatcaagctagcagccaagaggttaattgtgcaac

SEQ ID NO: 43243 - DNA, 661 bp, Homo Sapiens
tctcatgggaaagccctggcaccacaccggctgtgccccttgaagcccaccaaagcggccctcacttgtggtcagtatatcagttatgacgcccattgcccagcttcagtccatccatgttagatggacagaaattatggccagttgaaaataccagctttggttggacaactgtggacacacaaggtgaagaggactccgaagtcctttgccagggctgacaacctcgtaagcccttgcttagaaatacagtattagtctaattgagtaattagtgcaatttcctgcttacttttcattctcatgactgaactgtgattaggaagttgtgattatagattctggttttggccggaattttgaatcagcattaattgaattgctaaatgactgacattcattccatttaattgggggaacaaaaggcctcaggtaaggatgaggaactctgaaatcagatggaaaagagcggtgttaatttttatggtctgtgatcgtagctgtgataagggactgaggaataaattgtgctctttgtcatggcaaccagcttctgaaaagcccactgaaaattgcctgtcctgctggtaactgctacggggtaagatttgccttaacagtactattttctcgccaccaaaaaaaaaaaaaaaaaaaaaag

SEQ ID NO: 43244 - DNA, 731 bp, Homo Sapiens
ggctctggctttgtattttctttacagcatagatagaaaaatgcacatttttccacactcagctttcccctagcatggacaagattttcagccatttttgccacatatacatttttaaggaaaaaatatttttctctgtaagaaagttctggttatgctgttttaaaggtgacttgtcaggagttgagacttccctgctggattctattttgaaagtaaatggtcttccctccttgttccgattctgcgttcccatcgtcagacaactttggagtattagaaaccactgtatatatgtggaaagccagatcagccagacctgttagaattggtgtgcactcacctgagagatctggcaggttggatatatttatgtgtatttctccacagtgcttgctttgccctgttggtaaggattttaaataaccatgctcaaaagagctgttctaatctgcgttttgcatgttaagtgttaatatcaaacattctttacgtgctcgaggtattgcttttaacattctactttgccagtttcttcattagattaattgacatgtattatttaaatgaccagtgatgctttgtgcaattatgaatgttgaagattaagtacatagttactaatttgtcgtttgctattaatatgctgaaaactgccaacttctctcttcttttcggtcgagatgatttggggggagccacagggagacgggtgtgattttttgctgcat

SEQ ID NO: 43245 - DNA, 926 bp, Homo Sapiens
tattcaccgtacttatccaaaaatctcttttaaaaagtaaatttgtgcaacaacgtttatttgaaagataatgtcttctcaaaatcagaaactgcagtggtaattaaattaatagaaaagagaacaaactgcaggtttagaaaaatggttttcatattcaccattcttccacctcattgaattgcatgctgtagttctagcttttctgctataatatgtaaatatgactgtagccttttaagcttcagtctcagcagagaatttcctaaatgcgtttgacctaatgaaactgatcatggcttcccacttaggtttttcttcttatagctttatagaactatataataatatggacttgctgtgtaatggaattaaagtgcttttgcacaataagttctgcaaaaccctctcattcatgaaaaggtgctccttgctagacagaaacttgctgatttacagtattgttatttttgtctaaagttctgtaaatacatgctttaatgttatctttgagaaatctatgtacataatatagtctacaacatagagactgtataattctgtgttatatatgtgcctagtgctctgttggcactcaataaattttaagtaaccaaattgataatcatatagcgaaggcatatttttttcttcccaagctcaagtcagggatggggactatatatttaatgagaatccataaacccaacccacacctgaagaactcgccctcattaactttatagaccatgtcacggcagggtttttttaaccatggaaatggaagattaaaaaggatttttttaaatgggaaaaaaaaaaaaaaaaaggggggccgcctccaaaagtattccctccgaggggccccacagcttatcgcgtgacccaagccttttttggataaaaagggggcccctaataggggg

SEQ ID NO: 43246 - DNA, 591 bp, Homo Sapiens
attaaaaaggcaaacaatgaatgttattaggacaagaatatagcagtcaggaggccatgactacatcacagccaggcggcattccctgccacagtggcggcttgaatcatcaagaaatggataaatggggctttagtaaatcaggcttgcaggctcaaagctgcaatctgcccactctcaggtactgagactttgtgggcctcagacaccaggaagaaagttgggatacagtcatttgagttaaaaagggaatgacccctcagaaacccacattagcagtgttactcttggaactgcctttacttttaacgctctctgttctgaaaaagaggtgtttggttacgtgtgagccaacatcacgttttgttagctgtgatttacctttgtccgtttaaaagacttcacggagccattctgtatacaaggtgtgctctttccaatgtagaaggggttatggaaaagggtgcgatcctttgctgtaaactggagagaccagtcccaaacagaggggaattttaagcccttctcatcacccaattggatgtttttgcttatagcaaattcctgcaaaataaataaataaatatttgc

SEQ ID NO: 43247 - DNA, 839 bp, Homo Sapiens
  misc_feature (679)..(679): n is a, c, g, or t
  misc_feature (719)..(719): n is a, c, g, or t
  misc_feature (737)..(737): n is a, c, g, or t
catcttgtctatgtgctgaatctcaatgagcggctgcgatgaactggagattattttcgaataccagtatttcgactccagggggatgttcatttctatagtattttcagccccactgctggtgaatgccatgatcattgtggttatgtgggtatggaagactttgaatgtgatgactgacctgaagaatgcacaagagagaagaaaggaaaagaaaaggagaaggaaagaagactgaggggcagcagctgcttggagtttgcgtccttcccgtccacccagtgcagctcccagtgctgcagtgtgcgtggcgtgggcatccttccagctgactcatggtttgaaaaaccgttgttttatttaaatatccacagtggtagggcacacactgaagttggcttttcagccagcactgaatgtatccatcaggacatgcgtcttcaggtgcctgatctttgtagtcaggctgtgggaacggtctctgcagagcttcataactgggaatttgatttgaagaagtccatgtcatatgtgtaactagtactaattataaatataaaatacacaatataaaatatgaaactcaataataaacagtgccacctgtacatgggcaccatgccctcctcctcgtgctgtgttttctagtgcatgccacagttcgcagtagagggtgttntcaccttccaagacatggggcaaagtttggagacacctgnttgtcactggagggaggngttgctcctggcttctcctgtggagcccgggtgatgcataaatcctgtgtgcctgggtcaggcgatcacaaacatgacttgactgaaatgtcactgtgctgg

SEQ ID NO: 43248 - DNA, 831 bp, Homo Sapiens
tccagggcagtgtctttgggaaggttgtgagccttttcagcgacagcggttttcttttattacccacttgcaggataagcactgttcaaaggatgccctacttgcaggattaaaacaagatgaaccaggacaagcaggaagtcagaagtcttctaccaagcagccaactgtagggggcacaagctcaactcctagagcacaaaaggccattgtgaatcatcccagtgctgcacttatggctctgaggagaggatcaagaaaccttgtctttcgagattttacagatgaaaaagagggaccaataactaaacacatccgactaacagctgccttaatattaaaaaatattggtaaatattcagaatgtggtcgcagattgttaaagagacatgaaaataacttatcagtgctagccattagtaacatggaagcttcctccacccttgccaaatgcctttatgaacttaattttacagttcagagtaaggaacaagaaaaagactcagaaatgctgcagtgaaaaataattccacttacacagtgggggactcaaagtcagccacatttcacatactgttactgaagaaagcaccaagtcttaatggaacaaagaccatagaatgaattattttatctcctcccatgatgctgagaggaagcttcgtattctgatctctgagtgaatccctttgttctctggttaaaaaaatctaaaaagaaaaagggaaaaaaaaaaagaactggctgtggggattgtcaaccagccttatcttgcagggagggtttcaaatctggataaatccctggatggaaaactgggaatggatcaga

SEQ ID NO: 43249 - DNA, 584 bp, Homo Sapiens
gagacccttcgcccccttttcctgcacctagtggcctttcttgggaagtagagatgtggcggctttcccaccctgcccacagcaggccctcctgcccagctgctcttgtcagccctctggcctctggatgaggttgagttctccacaacagctcccaagcatcatgggcctcgcagccgggcctgtgccacggctagtgttgtgtgatttaaaatggactcagcaggaagcatattgtctggggattgttgggacaggttttggtgactctgtgcccttgctctctaacttctgagcccacctcccagggtaggcacctgggggcatgcaggtgcccacctcccagggtaggcacctgggggcatgcaggtacccacctctttctcttgggtgaggctctggcaaggagatctctctgctcaagcacagcagaatcatggcccctctccatgaattggaacttggtacaggttaagtatccctaatcctgaaatctgaaacacttgtggttccaagcattttggataaggcaaattcaactttcagtctcttttctgggggaaaaaaataataaacctatccta

SEQ ID NO: 43250 - DNA, 905 bp, Homo Sapiens
taaacccatgagattcattcagttaaaaatccagatggcaaatgaccagcagattcaaatctatggtggtttgacctttagagagttgctttacgtggcctgtttcaacacagacccacccagagccctcctgccctccttccgcgggggctttctcatggctgtccttcagggtcttcctgaaatgcagtggtgcttacgctccaccaagaaagcaggaaacctgtggtatgaagccagacctccccggcgggcctcagggaacagaatgatcagacctttgaatgattctaatttttaagcaaaatattattttatgaaaggtttacattgtcaaagtgatgaatatggaatatccaatcctgtgctgctatcctgccaaaatcattttaatggagtcagtttgcagtatgctccacgtggtaagatcctccaagctgctttagaagtaacaatgaagaacgtggacgtttttaatataaagcctgttttgtcttttgttgttgttcaaacgggattcacagagtatttgaaaaatgtatatatattaagaggtcacgggggctaattgctggctggctgccttttgctgtggggttttgttacctggttttaataacagtaaatgtgcccagcctcttggccccagaactgtacagtattgtggctgcacttgctctaagagtagttgatgttgcattttccttattgttaaaaacatgttagaagcaatgaatgtatataaaagcctcaactagtcatttttttctcctcttcttttttttcattatatctaattattttgcagttgggcaacagaagaacatccctatttttgtattgaaagagggattcacatctgcatcttaactgctctttatgaaatgaaaaacaggtcctctgta

SEQ ID NO: 43251 - DNA, 677 bp, Homo Sapiens
  misc_feature (544)..(544): n is a, c, g, or t
  misc_feature (561)..(561): n is a, c, g, or t
  misc_feature (642)..(642): n is a, c, g, or t
  misc_feature (650)..(650): n is a, c, g, or t
  misc_feature (652)..(652): n is a, c, g, or t
ggggagcatgaatggtactgtaccggttcatctggactgccccagaaaaataacttcaagcaaacatcctatcaacaacaaggttgttctgcataccaagctgagcacagaagatgggaacactggtggaggatggaaaggctcgctcaatcaagaaaattctgagactattaataaataagactgtagtgtagatactgagtaaatccatgcacctaaaccttttggaaaatctgccgtgggccctccagatagctcatttcattaagtttttccctccaaggtagaatttgcaagagtgacagtggattgcatttcttttggggaagctttcttttggtggttttgtttattataccttcttaagttttcaaccaaggtttgcttttgttttgagttactggggttatttttgttttaaataaaaataagtgtacaataagtgtttttgtattgaaagcttttgttatcaagattttcatacttttaccttccatggctcttttttaagattgatacttttaagaggtggctgatattctgncacactgtacacataanaaatacggtaaggatactttacatggttaaggtaaagtaagtctccagttggccacccatagctataatggcactttgttngtgttgtngnaaaagtcacattgcattaacttccc

SEQ ID NO: 43252 - DNA, 701 bp, Homo Sapiens
gaagatctgatggaagtctgtgtagagcttactgtctgggaccattacaaattaaccaaccaatttttggaggtcttcgtattggctttggaacaggtaaaagttatgggactgaagtggactggatggactctacttcagaggaagttgctctctgggagaagatggtaaactcccccaatacttggattgaagcaacactgcctctcataatgcttttgattgccaagatttccaaatgagcccaaattccactggctcctccactgaaaactactaaaccggtggaatctgatcttgaaaatctgagtaggtggacaaatatcctcactttctatctattgcacctaaggaatactacacagcatgtaaaagtcaatctgcatgtgcttctttgattacaaggcccaagggatttaaatataacaaaatgtgtaatttgtgactctaatattaaataagatatttgaacaagctaggaaaattgaatttctgctgctgcttcaaagaaaaagctgccccagagcattaaacatggtgtattgttaagaagcaaaatgttcttgtttgccatcatgtgtttcacaccacaattctgtgccacagttaagagggtctggtacccttgcaggacctttgtaggttgtgggagtcgtagaaagatactcgtggagcagggaatggagacagacatcagtgtg

SEQ ID NO: 43253 - DNA, 570 bp, Homo Sapiens
tttcaattccccttgctaccgtccttatttaaattatttccattctaagagatttttgttatttttttaaatgtaatctgagcacttttttgtattctaaaagatagatgatatcagataaatatgttgtacatttgattaaaattatttagataaatattactatgttgacttttaaatagctttatcctatttttcattcattttgcaaatatttgttgtgtgtagtttcttaacgtgtcagaatctattatgtaaaagaacctttccagatttctgaacagtatatgctttgattttataggctttatattatttcagtatgaataaagataaggaatatgaaacagttaactaaaatgtatctgtcgttgctaacttgaaaaatgaagtagaaacagttggaaaatgtttgaattagaagttattcaagtgcacactcttttctaaaagaaagccaatgactataaggcaaaagaagtttgactgcatgtggtattttttgctcttgtatatgctttttgaacaagctatttgataaagcctgaatggaaaaaataaagctgtttc

SEQ ID NO: 43254 - DNA, 953 bp, Homo Sapiens
atctatttctcaaaaaaaaaaatcttcttttacagaaatgttgagtaaggtgacattttgagcgctaataagcaaaagagcatgcagtgctgttgaataaccctcacttggagaaccaagagaatcctgtcgtttaatgctatattttaatttcacaagttgttcatttaactggtagaatgtcagtccaatctccaatgagaacatgagcaaatagacctttccaggttgaaagtgaaacatactgggtttctgtaagtttttcctcatggcttcatctctatctttactttctcttgaatatgctacacaaagttctttattactacatactaaagtttgcattccagggatattgactgtacatatttatgtatatgtaccatgttgttacatgtaaacaaacttcaatttgaagtgcagctattatgtggtatccatgtgtatcgaccatgtgccatatatcaattatggtcactagaaagtctctttatgatactttttattgtactgtttttcatttcacttgcaaaattttgcagaattcctcctttctacccataaattacatatatttttcttctttagtcatggagaactccccccctcatctcttccctattatctttccctgtgtactggtattattaaaaagacattccatacgcaagtctttctcgacaatcagaatgtccttatgtgtaatactgagcactttacttcttataaaacttgattagtagcgaaaaacaaaaaacaaggggggggtcaaatttcctcgggcccactagcctcccgttttgccaggcccaaggagtctttaacaagcgccccttaaggtcgacggaaggcttgtctcggaccctcggctcatggacaccacaataagcggaaaaagtttgacacctggcttggttaaacgaaaacggaagaacaagacaacacaccaataa

SEQ ID NO: 43255 - DNA, 682 bp, Homo Sapiens
ggtttgttttttgagtcttttttttttaagtgaaatttattgaggaaaaatatgtgaaggaccttcactctaagatgttatatttttcttaaaaagtaactcctagtaggggtaccactgaatctgtacagagccgtaaaaactgaagttctgcctctgatgtattttgtgagttgtttctttgaattttcattttacagttacttttccttgcatacaaacaagcatataaaatggcaacaaactgcacatgatttcacaaatattaaaaagtcttttaaaaagtattgccaaacattaatgttgatttctagttatttattctgggaatgtatagtatttgaaaacagaaattggtaccttgcacacatcatctgtaagctgtttggttttaaaatactgtagataattaaccaaggtagaatgaccttgtaatgtaactgctcttgggcaatattctctgtacatattagcgacaacagattgggattttatgttgacattgtgtttggttatagtgcaatatatttggtatgcaagcagtttcaataaagtttgatcttcctctgctaaattgatgttgatgcaatccttacaaatgatggcttttaaaattttaagctaggaaaagaaatctatagaaagtgttctgtttacaaaaatgtaactgttaccattggaa

SEQ ID NO: 43256 - DNA, 891 bp, Homo Sapiens
  misc_feature (739)..(739): n is a, c, g, or t
  misc_feature (753)..(753): n is a, c, g, or t
  misc_feature (848)..(848): n is a, c, g, or t
taccctctactgatcagagcatctaaacctgtgtgatctaaggtttatcagcctctgcaaggagctttgtcccatcgtgcttccattcccaggagggggagcttggagcgagtcagtcctggggcttgctgacatgggtggcccattggaaaggagaaccaggtcagatgatgtaacagccccaaggagcagcaggcatgggtccctccatccttgggcttcccgggcccctgtgacaggggaaagggctctcttacaccgcactcagggagaccacttctcaggatggggtcagatggagagacctctagggagaaagacatccccattgtgtgagtggcatttccttaagctggcaggaacagggagcagccctgtgtcgggggctggaatagttctggccagaccccgttccccttcctctatgaaggaataagttggaccaagggaagtcggggacgtaaaaaatgaagcaaaacaatgccagggtgtctcccgctttactcttcaggaatggtgtcccaagttggaggctttgtgtcagctgcaaatcctaccagttatgtccaagaatggctttccctcgggcaggtggcagcggccatctcccactgggaatatggcgtagtatctccggtccattccttggatgctaaggactgcgggaatgagggagtcagataaagaacaaacctcgaaacgaacagttaaaattgaaatgctatgtgcctgaccccantggtaggcacatangtaggcactcaactcatatgtttaattgaattgaaaatatccccttaggaaaaaaaaaaaaaccccccaaaaacccccaagaagccccagccagntttacctccagggtaagatttccaccaatatgccaaaagtggg

SEQ ID NO: 43257 - DNA, 669 bp, Homo Sapiens
ggaaaaatggaaaaattatccaccagtcgattcaaactgaatttcactctttataggaaggcagggcaaacttgtaggagtacgaaacattttcaataaatctacaaagggaagccttactacaattccaaaaatcatcatggttggaaatttgggaggagattatttgtgaacttgttacccttttggtaatggtggactaattgctgtatagttatttttgttttattattactgttacattaatttaacatgcatttatagaagaatacattcaaagcactgatgtaggagatacacggtacttggagcagtcagccaaaaatcacagatactgctttcacttaaatggaaacaattctccgataatgctttgctttttttcttatgtcactcttgtgtactatctatttttctcctctctgggaccaagtttctttttataaagcaataatatctctgttttcatttcagaacattgtgctgtctgtcagcatatgtatatcagctacaaaatatattcaactttgacttcttttgacaaaggactttaggaacaaagaggaacaaagacattatttgagaattaattatatattcttaatatgactgtgaccttgactgataataaagatgtactaagaattgcaagctaaaaaaataataaaa

SEQ ID NO: 43258 - DNA, 574 bp, Homo Sapiens
acattttgcatgatgaatgacctgacttttagccaccaggtactctttaaacagttttccttatcagaggccctcctgtgctggtgacccagcatctgagttaggttccagcatgtaaagagctgggagggcggagaattcttagcatacattcagacgttttttctgcacaataataagtccatctgtcacttgcattccactttttgttacatagaaagagtctgaccctttaatccaaaaggtctttttacattgtgaatgctgtgggaaggcaatttctctgcacacaagaggctacgttttggaagtgatgtatgttatttgatgactgaaaatgaactgtaaatgctcctagagtatattcctctgctgaacaaaattaaacttcaaaaaaatctaacagtaacacacccctgcttgggaccctagctatatgcattttatgtgaccttgccatgcttcagtgaacatactaattctatgtctagcacatgttgatttcctatgtattctgggtattctattaaaggaaactttgaactatgaaaaaaaaaaaaaaaaaaggtggacg

SEQ ID NO: 43259 - DNA, 467 bp, Homo Sapiens
ttcccaggccagcccttcccaccccatgaattcttcaactataatccagtggaggacttctcgatgccaccccacttaggatgtggccctggagtgaactttgtgcctggccctctgccacctccaatccctggccctaatccccatggtcagcactggggcccagtggtccaccgggggatgccacgctatgttcctaacagcccctaccatgtgcggagaatgggggggccctgcaggcagcggctcagacactcagagagactgatccacacatacaaactggacagacggcctcctgcccattcggggacatggcctgggtagactggatcttgggctgggactggatgtgccaatggcccttcagggcctgcctggcacctcaggtactgggctagggtgtctgctatgcctggtattgttcttgtccattgctgtcaccaataaaggcatggaagaacaga

SEQ ID NO: 43260 - DNA, 670 bp, Homo Sapiens
  misc_feature (41)..(41): n is a, c, g, or t
  misc_feature (44)..(44): n is a, c, g, or t
tcaaggtacttgctcattgtggcatctgggctactcaccanagnaatcattggcaacatctttcgagtgtgtaaaactttccaaatggcagaatacctgaaactggagtttatcaaggaaattggatacactcacatgaaaatagcggaaggagtgaactctcttttgcagatggcaggcctcctggcaaggctgtgtcagaagacaatggccccggtggccagttagagcagagacttcactgactgacttacaggtgccctattctgaggtacaggagccgcggctttctgatgggggaaaatgccgccttaggctggagccaacatgactgtcctttaaactccagtggctggccaggcacggtggctcacgcctgtaatcccaacactttgggaggccgaggcaggtggatcacctgaggtcagaagttcaagaccagcctggccgacatggggaaaccctgtctttactaaaaatataaaaattagctgggtgtggtggcgggcacctgtaatcccagctactcgggaggctgtggcaggagaatcgcttgaacccaggaggtggaggttgcagtgagccaagatcacaccattgcactccagcctgggcgacagagtctccatctggggaaaaaaattaaataaataaactcccgtgacttgca

SEQ ID NO: 43261 - DNA, 669 bp, Homo Sapiens
cccacgcgtccggaacaacttacagattgtggattctaaaagactggacattgctacgcatctttttgaagcctacagtgcactttcctgttgtttcatttcagaggatttaatggttaatcactttttacctggtctcagatgtttacggactgacatggaacatctctctccagagcatgaggttattttaagttccatgataaaagaatgtgaacaaaaagttgaaaacaagaccgtccaagagcctcaaggctcaatgtcaattgctgcaagcttagtgagtgaagatacaaagaccaagtttttgaacaaaatgggccagttgacaacatcaggtgccatgttggccaatgtatttcagagaaagaagtagaagcaggaaagaagcccccagtaaacactaagatggacctcaagccgactggttccttgtacttgaagtacttgccttttttgtttcctcagttttatgttcttgcattataattttatcctaacctccaaagatatttgcactgcttttaattactgctgtatatttgttgattttggagttacaactgtggtgatagaaaattgagttgatggtctgtaccaagtcccttgtctatgttcttgtctttcagaataatttttatataaatatatatatagtgaagaaaaaaa

SEQ ID NO: 43262 - DNA, 700 bp, Homo Sapiens
ggggctggctacccgtcttaggcagcaacagcagagctccagggagcttattcaatatttactgagacttcgaagacccagcagatgtttaatgaagtcactattttggctcaaaccctccacttctccccctcccctcaaaaagccaacaggtaaacacataaatgaaagaaacccacagaaggggatgggaaataaagaaaattctctcaagacttctccaggcccatgtcactggtcagcgtggtttttatgtgtattaggattgggggatgtgaagaaataagtatccagtactttataaccaaagcaattaaatgatattgggtagggaatgttggccagttttgtttagttttgcatcacattgtcaccagactcactagcccaagtaatcgggcgcccgaagagggagacagagatgtgcagagttgaccagtgtgcggatgataactactgacgaaagagtcatcgactcagttagtggttggatgtagtcacattagtttgcctctccccatctttgtctccctggcaaggagaatatgcgggacatgatgctaagagtcctgggtaaatgtggtgagaatgcacgcgtgcatatgctacacatatgtgcttctcagttgcagaaaatgaactgctttgggagattatcagtagaaagagtgttatcatattggtgctgagtgctatgtgt

SEQ ID NO: 43263 - DNA, 517 bp, Homo Sapiens
ttttttttttttttttctcattgattaatggacatgatgctgagattcaatcactacatgaaacacctggctgtgaaaacaaaacaacccagagggctgtgttccaagcagcgctggggaagctacgtaacagtcggatgccagttttggaagattcaccatgcgttctgaccctctgttcgtctctttcctctcctctttcttcaagaaggaaattgatcctagtgatttcagcccatgcattaaacaggaaacaataataaatttgtagaattcatatttttctaaagggaacttaaaaactgctgctacatgttatgtacaaaactggtttatgccacatgaacagagaatcacaagtttggttttggtactttttgttcctctttgtattcagttgtatagaacttccaaattcagaatgagaagaaagctgttctgtatcaaaccatttaagcaataaatgttatattttaaaagctgcaaaaaaaaaaaaaaaaaaaaaaaacctcgtgcc

SEQ ID NO: 43264 - DNA, 525 bp, Homo Sapiens
actgacctggtagttgagaagaaaagtcaagaaggggcgaggaggggcttggtgagtgtaaagggcatgatgagggtagagtggctagagggctagggagggagagatctaggtttatcgattagggatgagggagagaccatggagtgcaggtgggggcgggtggctcaggagcttgacaagcccactgtggagtggggagcaggagaggaaggggtactggttagtctcctaggggctgagtggagtattgttgccctgcctatatcccctaaaggtggagggtagagcggagggttagcagtcacctgagtaagtcactggggttcagagctgagaggtactccatggtggaccggagagttccttccctggaacttctgggctgggtggttctctcctgtgctggggctttagtggtgttttctgttacaaacctgggatctcagcccaggacaaggtgggaatgagtcaagcctggactctggcccccctgcctggccagtaagaagggcaaagtccaag

SEQ ID NO: 43265 - DNA, 767 bp, Homo Sapiens
cgcgtccgggggaaggcaggaggcagaaagacgggtgttttatttggtctaataccctgaaaagaagtgatgacttgttgcttttcaaaacaggaatgcatttttccccttgtctttgttgtaagagacaaaagaggaaacaaaagtgtctccctgtggaaaggcataactgtgacgaaagcaacttttataggcaaagcagcgcaaatctgaggtttcccgttggttgttaatttggttgagataaacattcctttttaaggaaaagtgaagagcagtgtgctgtcacacaccgttaagccagaggttctgacttcgctaaaggaaatgtaagaggttttgttgtctgttttaaataaatttaattcggaacacatgatccaacagactatgttaaaatattcagggaaatctctcccttcatttactttttcttgctataagcctatatttaggtttcttttctatttttttctcccatttggatcctttgaggtaaaaaaacataatgtcttcagcctcataataaaggaaagttaattaaaaaaaaagcaaagagccattttgtcctgttttcttggttccatcaatctgtttattaaacatcatccatatgctgaccctgtctctgtgtggttgggttgggaggcgatcaccagataccatagtgaacgaagaggaaggtttgaaccatgggccccatctttaaagaaagtcattaaaagaaggtaaacttcaaagtgattctggagttctttgaaatgtgc

SEQ ID NO: 43266 - DNA, 645 bp, Homo Sapiens
cccacgcgtccgagacagtagcatatgttcatgtcaagcacctctcatcacagtcgagttccaaggaaaaattccagcgttttctgcattgggtgctgtgtcatctgaaatcggcacattccatggaggaaggagtcctgctttgttgcatgtatcctagggtttaatgttggtaaatgagtcactctagcatttgtagaaggctccctgagactcctgcagcagtcgaccaagcccaaggacataattgaatctggagagtcctggggccttgttttgaaaaagacttgaaatacacataggaagaaaggcataaaaataaatgttcacttgtctctgctgtgagtatgtgttccaacttttcagtgatggctttgagaattctcaaacttgactggctctaagtgtatctggtggcttttgtatcgtaacctgaaactggcttagtactttttcctaaaagctcaggatttgagaatgaggaccccttcgccaggaaaacatgtatacactcaaaattttgcttgcagttctagggtgtttagacccttctcagatacctgtgcatcttatgggttttgtttttctctttgagacagtctccccctgttgcccaggctggagcgcagtggcatgatctcggct

SEQ ID NO: 43267 - DNA, 701 bp, Homo Sapiens
  misc_feature (583)..(583): n is a, c, g, or t
  misc_feature (653)..(653): n is a, c, g, or t
ttttttttttttttttttaaaaaacatgtcttcagcctcataataaaggaaagttaattaaaaaaaaaaagcaaagagccattttgtcctgttttcttggttccatcaatctgtttattaaacatcatccatatgctgaccctgtctctgtgtggttgggttgggaggcgatcagcagataccatagtgaacgaagaggaaggtttgaaccatgggccccatctttaaagaaagtcattaaaagaaggtaaacttcaaagtgattctggagttctttgaaatgtgctggaagacttaaatttattaatcttaaatcatgtactttttttctgtaatagaactcggattcttttgcatgatggggtaaagcttagcagagaatcatgggagctaacctttatcccacctttgacactaccctccaatcttgcaacactatcctgtttctcagaacagtttttaaatgccaatcatagagggtactgtaaagtgtacaagttactttatatatgtaatgttcacttgagtggaactgctttttacattaaagttaaaatcgatcttgtgtttcttcaaccttcanaactatctcatctgtcagatttttaaaactccaacacaggttttggcatcttttgtgctgtatcttttangtgcatgtgaaatttgtaaaatagagataagtacagtatgtatatttt

SEQ ID NO: 43268 - DNA, 693 bp, Homo Sapiens
  misc_feature (689)..(689): n is a, c, g, or t
ttttttttttttttttttgtattgtgtattatataacccaaacgtcacttagtagagacatatggcccccttggcagagaggacaggggtgggcttttgttcaaagggtctgccctttccctgcctgagttgctacttctgcacaacccctttatgaaccagttttggaaacaatattctcacattagatactaaatggtttatactgagcttttacttttgtatagcttgataggggcagggggcaatgggatgtagtttttacccaggttctatccaaatctatgtgggcatgagttgggttataactggatcctactatcattgtggctttggttcaaaaggaaacactacatttgctcacagatgattcttctgaatgctcccgaactactgactttgaagaggtagcctcctgcctgccattaagcaggaatgtcatgttccagttcattacaaaagaaaacaataaaacaatgtgaatttttataataaaatgtgaactgatgtagcaaattacgcaaatgtgaagcctcttctgataacacttgttaggcctcttactgatgtcagtttcagtttgtaaaatatgtttcatgctttcagttcagcattgtgactcagtaattacagaaaatggcacaaatgtgcatgaccaatgtatgtctatgaacactgcattgtttcangtgg

SEQ ID NO: 43269 - DNA, 968 bp, Homo Sapiens
tggatgaaacccacccaggctatggcaaggaggtcgacctctgggcctgtggggtgatcttgttcacactcctggctggctcgccacccttctggcaccggcggcagatcctgatgttacgcatgatcatggagggccagtaccagttcagttcccccgagtgggatgaccgttccagcactgtcaaagacctgatctccaggctgctgcaggtggatcctgaggcacgcctgacagctgagcaggccctacagcaccccttctttgagcgttgtgaaggcagccaaccctggaacctcaccccccgccagcggttccgggtggcagtgtggacagtgctggctgctggacgagtggccctaagcacccatcgtgtacggccactgaccaagaatgcactgttgagggacccttatgcgctgcggtcagtgcggcacctcatcgacaactgtgccttccggctctacgggcactgggtaaagaaaggggagcagcagaaccgggcggctctctttcagcaccggccccctgggccttttcccatcatgggccctgaagaggagggagactctgctgctataactgaggatgaggccgtgcttgtgctgggctaggacctcaaccccagggattcccaggaagcagaactctccagaagaagggttttgatcattccagctcctctgggctctggcctcaggcccactaatgatcctgctacccttcttgaagaccagccccggtacctcttctccccactgggccaggaactcttgagaatcagagcttgggggtgggaaaggggaccccatttcttgaaccgcccacagccatgggccccgggaccaggttgcttgccattgcccactggacattatgtaaaattaaaaattctggcctcacccggccccagcggggaagagtaccctatccctcaacgccctgtcacaacagcctcacaccctcta

SEQ ID NO: 43270 - DNA, 606 bp, Homo Sapiens
ttatgaagctgatatgagaccatctcagaagaaccaagcaggttccttgaccttttgcttgcttttctgaacattgtgaatattacacatgtctttctaaattattctagggtatgcaaatgtcaatggtatgaaacaccactgtactggaagaattaatatattactttagtatgtacctgagctaattgtattttaagctttaggggtgcatagaaaccaccataatttgtatgacattttgaagtgaattaaatatttttgaacatgcttcttcgacagccagtgttatatttttcagatcaacacaaagcacaatgattactcgaaattcagtattttcaaatttacatatttaaagtcatgcaagctgtaacttccctgtcaaaattactggctgccaaatttatacctgtttcttcagctgtaccttttgatatttaaagtttttaaatttctgtaaagtagattttgtagaatgtaatgtgttcactgcctttgtgaagcggtatataattgtataatttctgtgtgtaaactgaatgcttgggctttcaatacagtattcatataaagcaataaatattaatgttttgaaaaaaaaaa

SEQ ID NO: 43271 - DNA, 687 bp, Homo Sapiens
cctgcatcggatcctaggagatttccttgtagctgtcaatgagtatcaggaggcaatggaccagtatagtatagcactaaggtaggcactagcctcccttgggggaaggccactgaggagggtagaggaggcagtgagctgtgtcacaggagttatggaaacacacacacactttgtgtccatggttgaaagcagaataataatagtaatggtagaagagttatttgtgaattcatgacttctaaaaattttttcttaaaatatattaacaacattagagaactgtttcactcataaccatcccacaccactataacatctgtgttcatttgtatagctcatcttctgtccttgcccacacacacatatttttatagggctgtacctagtatatattttatattcttctttttcaaatcaaagtattgtaagtactttcccatgtttctatctactgtagtcattaagaacttgaggtctgaagttttgaatactaccttcaccacctgtgatcttgggcaagttactaacacatttccttgtctatatctagctaccttattagatattaaatgatcgaatgagggttaaatgattatttcatgtaaagctcttagccctgtgcctggtacatagtaaatgctaaataaatagtggtattcttactgtttaaaaaaaaaaaaaaag

SEQ ID NO: 43272 - DNA, 644 bp, Homo Sapiens
ccacgcctccgcataggtatttggcatgagtaaatgtagttccttttgccaaaaaaactctcaaaagttacaactggagttcttcgcgataaaaggttggggaaatcagccatggctttagccttgttcccaagtacacatcttcttatccacaaggatgaaactctgtagggctcaccctgagggctcatgtgtggcattgagagggtagcagtgaccagaacaccacaaggcccacaagatgttttgaatgagggaacatttaatgtcatttgttaggagatagaaaccaaataataaaggacaaggaccacgctcattccgtggagaagaggtgaactccctctgctgactatttggaatggactgaatgaggaggtctctccagccagaaggagtattgaggtcatcaggcctcagaaaacaatgtacacataatctcgggctgtgaacaagagaaaggagggggggaaacatgaaagtcaatcttaacaatttttgcaatacctcttatttgcagaccattggatttatgttattgcactctcggtgtgatttatcgtatgtatctgataggttttatgaattgttttgagttgtaaactcctataccctttattaaaatggacctaattaagtgaaaa

SEQ ID NO: 43273 - DNA, 482 bp, Homo Sapiens
  misc_feature (355)..(355): n is a, c, g, or t
  misc_feature (425)..(425): n is a, c, g, or t
ggtaacggtgcgggccccaagaaggccccaagccgagccaggaactcagggactcagagtgatggcgaggagaagcagcccggcctggtgatggagcgcgctctgctcagtgatgagagagcggcaactggcgttcacatcgagcggccgtggggtgcagcctcagcaatggcggagcagagtgagtggctgagcgtccaggctgcgcgatgagcacacactactactgatggcctttcgggggtccctgccccagccggagaggccggtgcacagggccccgccaggggctgggggcatcccggcttccacaatgcagctgctctgggcctcgggagaggagagaccccagtcncctgggctgcccttcccgggcctcgtctgtctgggtcctttggtcaatgttgcacagtttttattgctcncatccctttttgtagtgggctgggttttaagttataaatgttaactgcctctgggtg

SEQ ID NO: 43274 - DNA, 839 bp, Homo Sapiens
gatgtttgaattatccggtcgggttttattgtttaaaatcatttctgcatcagctgctgaaacaacaaataggaattgtttttatggaggctttgcatagattccctgagcaggattttaatctttttctaactggactggttcaaatgttgttctcttctttaaagggatggcaagatgtgggcagtgatgtcactagggcagggacaggataagagggattagggagagaagatagcagggcatggctgggaacccaagtccaagcataccaacacgagcaggctactgtcagctcccctcggagaagagctgttcacagccagactggcacagttttctgagaaagactattcaaacagtctcaggaaatcaaatatgcaaagcactgacttctaagtaaaaccacagcagttgaaaagactccaaagaaatgtaagggaaactgccagcaacgcaggcccccaggtgccagttatggctataggtgctacaaaaacacagcaagggtgatgggaaagcattgtaaatgtgcttttaaaaaaaaatactgatgttcctagtgaaagaggcagcttgaaactgagatgtgaacacatcagcttgccctgttaaaagatgaaaatatttgtatcacaaatcttaacttgaaggagtccttgcatcaatttttcttatttcatttctttgagtgtcttaattaaaagaatattttaacttccttggactcattttaaaaaatggaacataaaatacaatgttatgtattattattcccattctacatactatggaatttctcccagtcatttaataaatgtgccttcattttttcagaa

SEQ ID NO: 43275 - DNA, 580 bp, Homo Sapiens
acctgtgaaccactaggatgtgatctgcccttgtgggcaggtccagcatagttaggagttaggctttagcataaatttctagctgcatctgagtctcctgggatgggtgctctttggctggttttggctgcggatggtgagatcagagcagctcttcctgctgctggcccctgcaatcagttgttgggatgccagtgcagatcactaagtagtaagattttaatcaaacacgaccaggtccgaaatgcaggtcatgagtgtgaaattctcaaatttacataaaaagtagaagtatagacagtttaacatttggtattaaaggagaggaaattgtagcagcttttcacgtttcccagtccccattagagggcttgagaccttgtacctgaacaacccattttgcactcagtgctttctgatgccttaggagaattgttttgtttcacaaaagctgggaaggaagaagtccattctgcagctgttagatctgcctctcaggaaaaagtactaacttgttctttttgttcctggctttcatcagtttgtgagatttctctattttttttaaatataattttat

SEQ ID NO: 43276 - DNA, 617 bp, Homo Sapiens
gggctaccagtacgggaaggcggtgtttggaggctggagccgtggcaacgtcattgagaaaatgctcacagaccggcggtctacagaccttaatgagagccgccgtgcagacgtgcttgccttcccaagctctggcttcactgacttggcagagattgtgtcccggattgagccccccacgagctatgtctctgatggctgtgctgacggagaggagtcagattgtctgacagagtatgaggaggacgccggacccgactgctcgagggatgaaggggggtcccccgagggcgcaagccccagcactgcctccgagatggaggaggagaagtcgattctccggcaacgacgctgtctgccccaggagccgcccggctcagccacagatgcctgaggacctcgacaggggtcaccccctccctcccacccctggactgggctgggggtggccccgtgggggtagctcactccccctcctgctgctatgcctgtgacccccgcggcccacacactggactgacctgccctgagcggggatgcagtgttgcactgatgacttgaccagcccctcccccaataaactcgcctcttggaaaaaaaaaaaaaaaaaaaatggc

SEQ ID NO: 43277 - DNA, 785 bp, Homo Sapiens
  misc_feature (731)..(731): n is a, c, g, or t
  misc_feature (760)..(760): n is a, c, g, or t
tttgttatagctcagtttgacttctcaaacttttcagggttggggcagctgcacttttaggtggcctataggaaatattgcatatggagattacagtgtttttctgacctggttcaagaccagaacatgggtcatagggtttttattcagcaaaatgaaaacgtatcttcagagcttaacatattactggatgtgatacagattttgctttctgtgaaattgaaaattcacaaaaattcacagcttaaatttcccatcagtgactggaggaatttttttcaggtgcttcctatattaccatccctcgtgcatattaactctttagaattttaggttaagtgatgtctatagaagtagcctggaaaaccatgagttttggagttcagtgaccccctgctttcctctgcccctcccttcccaaggcattgaagctgaatgtgccaactggcagttagaagcgaaagatggcattgggagaaattttagagagctttcaaactctttattctcatgttccacatggtctaattttaacataaataatatgccttcacactggattgtaaaaggcatgtgatttttgagattttattttgtgatgtattgtcttctgcagtattaaagggaaagaggtattaatgtgcattaccctatcttgtttttgaagccagggtagttgtatgattttgttaccagcagtgctaacctgaatgtgacctggttaccttggnaatgcaggaacttatatgaatgtactatnaaataaaatgcgactgattcccgga

SEQ ID NO: 43278 - DNA, 580 bp, Homo Sapiens
cctcctgacccatttggatctctggaacagctcatcgccgcatcaagagaagatctggccttatgcccaggcctgggccctcagaaagcccggaggctgtttgatgtcctgcacgagcccttcttgaaagtaccctgatgaccccagctgccaaggaaacccccagtgtaataataaatcgtcctcccaggccaggctcctgctggctgcgctggtgcagtctctggggagggattctgggggtgtcaccttctggtggcccaggtgggcaccttcagctttctttagttcctcagtttcccgggggcagactacacaggctgctgctgctgctgcttccgcttcttgtcccggcctgtgggagcctcctccccagactctgaattcagtggcggccctggcatctcctcttggggcactgtctctggcatccggctttcctgactctgcttcttcctcttcttggtggatcccggagttgccctggcttcaggctgtccctcccctggcagttcaggctctagtggctgaattggctcagtcactgggtgacctctctctttcttcttcttcttcttct

SEQ ID NO: 43279 - DNA, 360 bp, Homo Sapiens
atgggatggtcctgctggtttaggccgtgattctggctacctgtagagacctacactcctagagccagtctcagggtctgggatttccctgcaggagctcagccaccactgtgccatggtgacacaggccaaggcagacattggccctcccttctcccagcccccagaggcctggccttgggttcgtcagcatgggccgaggacgttgcctgtagaatcctcctctgcctgggagtggctctgtgtggaccagtccctcactggcccattctttttttgacgcagccaatctgtgaccacgattcctcccacagatgcctactgcttggattctgagtggccagagatctgatgcatgct

SEQ ID NO: 43280 - DNA, 663 bp, Homo Sapiens
cctcgtcaccacagggactccttgggtcctggcagtgcatgtgccagcaggcaggacaaactctgtgtacctgtgcccaggtgaatgggcgcagggtcctcttgccctgtcctgcggggggccccacgagttcctggcattcagcactgcttagcattctcggaaggtttcttcaactgcttgcttttcccaggcttgcctttagtgtcatgtaagacatttttaagttatatttattttgttgggttttaaaattgcacagaacactaagaccgaaaggctggactcttgtttctccttgaaagctttgcctttgttttgaacttcctttcccacttggtagaaagagcccagaagcagccctggccctgtaagatggactctttcatccttcagttgtatttagctttgagtttctctgcatctgtccaccccatgtgtatataacccagcccctggctctggggtggtcacctcgtcagtgccttttgttctggaggagaggacccccccgcctgccgagaggctctcttcctgttctgcacccctctccccatgggaccttggagaaaactgaactgttacaaacccctgcacagtgcctgtcaaacagatgcaaaccttcctgaataaagccttggagacccaaaaaaaaaaaaaaag

SEQ ID NO: 43281 - DNA, 857 bp, Homo Sapiens
  misc_feature (730)..(730): n is a, c, g, or t
  misc_feature (807)..(807): n is a, c, g, or t
  misc_feature (835)..(835): n is a, c, g, or t
cagccttgccaactgctgctgtggcctccagcttggctggttttgcaggccgccagcaggaaggcgaaggtggtagtacagcaagaggcactggcggggcagcaggcctgcaggagctgtttttccattgctaggcctgacccctctctacctgtgagcgttcagggggtccctgagatagtttagatgccccccccatcttagacctcagctcccacagtgccttttaagggggacctcacctcctgtgcacagcccacccactttcctctgcttccctggcacagcccaggcatagacgagctggcgttggacccagttcttcccccttttcagccccacagctgctgccacaggggccaactagggccaggtggaaggggagctgagaagccaacccctagcccaggggtgctgtgggaactgggatccaatttgtagcttcctgcctggcttcagagagcccagcaaccttctaggcctgctttccagacttctgagatagcctgggatgagcaatcctgttacagtacatctggaccttccctacctgggctctggggaggctgtgggcctggagagggaaaaggaggggagggggtgtctgcaccacctgggaagatagcacaaggcctaatgaggtcaccctgactccccaccccagcatttcattcataccagataatagctgcattactgccaactgaccttataaccctctgcaccttcnaaaagattcatggtttttaattgctgcttttaataacatttggttaagttataattaatggtgtctgatttatgatnttaaaccctccctttggacaatcacttngtcttcccctatagtggaatta

SEQ ID NO: 43282 - DNA, 497 bp, Homo Sapiens
  misc_feature (62)..(62): n is a, c, g, or t
cacttggcagcctctatgcactatataataactgggagcacatgaaaggctccttgctccancagtcactctgaagattttgccaactcatgaatggaggacacttcagtagtcatctagatccttttataagacagtttggagttattctctctcttctacctacaattagtttgaaaaattggagattttgatttgctgtgatgaaaatcctggatggctgaccaagactggcacttgttccagccattagtgagttgaagccaaagccctttggtgactcactgagtaccatggttctgttctcctctggagatcttgcacgtatctgttttcctcccccatgaactagaaaaccacttactcccagaattcaggtcgtgcttgttagtactatatcaccaagtccattcatttaatgatccaaaactgtaatgttgcactgtattccaaataaagggtaaaaacagaaccaaagttataactccaacacaaaa

SEQ ID NO: 43283 - DNA, 567 bp, Homo Sapiens
ttctagaggatccctaaaggcgagccgggtagcacttatgtgttacctgaaggcaggaaaggtcacggctctatggacagtggggcaggtgggacctcaacgtcggtcacaccaaagcagtctctgtgtgatggacagtggcactcggtggcagtcaccataaaacaacacatcctgcacctggaactggacacagacagtagctacacagctggacagatccccttcccacctgccagcactcaagagccactacaccttggaggtgctccagccaatttgacgacactgaggatccctgtgtggaaatcattcttgggctgtctgaggaatattcatgtcaatcacatccctgtccctgtcactgaagccttggaagtccaggggcctgtcagtctgaatggttgtcctgaccagtaacccaagcctatttcacagcaaggaaattcaccttcaaaagcactgattacccaatgcacctccctccccagctcgagatcattcttcaattaggacacaaaccagacaggtttaatagcgaatctaatttcgaattctgaccatgga

SEQ ID NO: 43284 - DNA, 467 bp, Homo Sapiens
ctctgaactactggccctcgcacctgactgtcccttcgaccccacacgcatttatagctccagcctgtgcctctggggcatcgccctagtgctctgcgtggcggagaacgtgtttgctgtacgctgtgctcagctcacccaccagctgctggagctgaggccctggtgggggaaaagcagccaccacatgatgcgggagaacccagagctggtggagggccgtgacctgctgagctgcaccagctctgagcctctgaccctctgagagatgatgtcctgcccaggcccgatggccactaggaccctgcaagcaactctgctctgtgaccaggccaggattcctggagctggcctgagagggctcaatggaccctcggggacccaagtggggctttcaaccctctcccccaccacccagcccactgcactgaaatgagactttattctgaaattattaaaaagaacag

SEQ ID NO: 43285 - DNA, 580 bp, Homo Sapiens
acgaggcgggcactgtgaagctggcagggcgggtggcttgtgccatgagcagccatgagttgctcctcactgagctcatgtttgacaatgcactgagcaccctgcggcctgaggagattgctgccttgctctctggcctggtctgccagagccctggggacgctggggatcagctcccaaacaccctcaagcagggaatagaacgtgtccgggctgtggccaagcggattggtgaggtccaggtggcttgtggcctgaaccagacggtggaggaatttgtgggggagctgaattttgggctggttgaggttgtatatgagtgggcccggggcatgcccttctccgagttggcagggctctcagggacccctgagggcctggtggtccgctgcattcagcgcctggctgagatgtgtcgctcactgcggggggcagcccgcctggtaggagagcctgtgctgggtgccaagatggagacagcggctaccttgctacggcgggacatcgtatttgcggccagcctctacacccagtgaatgccccatgtaaaaacatgatgataaaacagcaaagcacaaaa

SEQ ID NO: 43286 - DNA, 966 bp, Homo Sapiens
gggatgaatttcagctggagttgtagcctctttaaacacctgagaagccatgagaggacagatcccataaataccttaagtgtagaggggtctctgttgtagaatagctcttaattttagagaaaccttcctggagggaaaccatactcctataatgagcaaagtaacaacttcaagcatttttccagcgttaccatcaaactcacaaataggttgaaatcctttagttataactcagcctttaggaacaccggagaacccacaataatagaaatcttttcgtgttccccattgagaaatgctttagttagcatcttcatgcttggaaatctagacaagaagagaatccatggatggacatggtcgaggaattcggaaagcctgcagttgacattcagtcttcacttgaaactcaaaactgacactaggaacagcttcatgagttcagtagaagtaagctttatttgtagcttctgccttgtttgacggcgtatctattcagggaagcgcacagtaaaagaattccttagcatgatgtctgttttggtacctcagcaatgaaccttttctagaaattattattccaaccactagaataccctagtcactattcccactttgagcattaacccctttgaaaagaaatggacttaaagtatctctgttttggcaaaattcaggttcaggggctggatggtatgtgtttctgctgccttattcaatccaccacttctctgtgaaacactctaccttgtttttggtttgattctactgatgtbagggtttagccggtagaaggagtagttcagtttgtcaattcaggagaaactgtactggtcagtcacatcttacggcgaagggagarggaccttaggggrgcagaraaracaagsaaaattgttgdctkttttwtytttttwwccmcarrawtadggsgscaaaamcmmaaaaagagdkgggccaagg

SEQ ID NO: 43287 - DNA, 582 bp, Homo Sapiens
ctatttttcaagccacaataaggaaaataaactactcatggtctaaatactagagataaagtagattcatggcttggtaaggaaattttaagcattccttcaaagattgacgtgctaaaataagcattgatgttttgagtttttttacacctaggatttttagcttgggtgtgtaggtgaaggccaagactctctgcaggaaaaagcttattttcaaactcagaaaataaaatgtcaatcataaaaatctacttcaactttagcaaaaagaaaaaaaaatcaacaaaaagtatactctgtatgctgggattccgaggttccaacacactgttacaaatctgtggggggtttctttcttctgataattctagagcctgttaccatagaaaggcatttcttcaatggctggttgtagttagttcatgtttttcaatcaaatttgcaaatgtatttgttgctgtatagtgattgttttgcaaaataaaattgcttgtcacctaaaaaaaaaaaaaaaaaaaaaaaaaaaaaaaaaaaaaaaaaaaaaaaaaatataaaaaaaaattaacaaatgaaagtgataag

SEQ ID NO: 43288 - DNA, 615 bp, Homo Sapiens
gcctcatcaggatgaaatgtggttcacttcccctgtgttcaacactacaaagctactcctgccagaagagggcagagttctttcttgggtttgaactggcttttttgggttgaaccagatcatcccacatccttagcactacttaaccttcttttcctgaagattacatatcagtgtcctgcgtttttatctaatattagagctgaggttcctaggaaaattttgaagtggggaagattatggagaaaatgaaatggaaatttggggagggtggtttgtcagtataaggccctgtggggtaatcatattttagttattacttgttaaaagggtaacagaacctctgtttctttaccaagtcgctggttggccatttctccaattgatgaactaccattggttttagctctttctcatttgggattcccctcaattgcttacatgattctggtacttagagtctaatagagttgctgtgaatatgtagtgctgtacataatgggcagtttgtaaatgtgagataaccttgaatatgttgtggttgtatacagagccattagtattgttatttgggcactatttttaattcaacattaattacaatcaattaatttg

SEQ ID NO: 43289 - DNA, 505 bp, Homo Sapiens
ctagtctcatgaagaattctggcgtgcagccagggtagctgaagtttgggtctgggactggagattggccattaggcctcctgagattccagctcccttccaccaagcccagtcttgctacgtggcacagggcaaacctgactccctttgggcctcagtttcccctccccttcatgaaatgaaaagaatactactttttcttgttggtctagcattgctggacacaaagtgtagtcattattgttgtattgggtgatgtgtgcaaaactgcagaagctcactgcctataagaggaaataagagagaaagtggaggagagggacaaaaggagtaattatttggtatagatccacccatcccaacctttctctcctcagtccctgctcctcatgtttctggtttggtgagtcctttgtgccaccacccataatgctttgcattgctgcatcctgggaagggggtatatggtctcacaagttgttgtcattgtttttttgcatgcttt

SEQ ID NO: 43290 - DNA, 580 bp, Homo Sapiens
gcacgagcttaaatgaacaatgaagcaggtaaaattacccttgaaaaaaatcccttggaccacccataaatgacagtgactttttcaatatggactcatcatagccagttttccttttgaagttggaactgatcacccttttgtcatctgtaccagatcagtagttggcttgtgttacattttgtgtgtgtgtgtgcgtgttttaaaccagtgcatataaattgtatgttaaatgtaagtaactttaagttgacttatctcttcacagtaatcaagcctcacgtaattcatgctttttaaattcagccagccccccctctctgaaattttattatgtaaataatttgtgttccctgatcactcgtttaagttcttagttgtatgtcatctcttctctagcaggaattggcaaacttttttgtaaaggggtagaaagtgaagattttaggctttgcaggccatatagcctctgctgcaaatgctcagccctgctgttgtaatgtaaaagctgccacagacactacatgaacacgaatgagtgtggctggtgttccaataaaactttatttacacaaacggg

SEQ ID NO: 43291 - DNA, 792 bp, Homo Sapiens
cgcgtccgctcacagtatatacaacaggcagcggattgtctattgtttgttgttctaacttctgctgtcgagaagtttaaacagaaagcaggagtaatgtgccgattctgaagttgccacaaaaaataagacactggtgaatgagagtataattgtttttcttctatttaatgtaaaaatctgtgatatattatatttaaagtgttgcatttaagatgagtattttaccagagtgtttccattcatatccgcggtatggaggatttgaggaacagtaaccaggatgtgaatgattttgttacatcagtgttcactgtagccacctaagtaggacattatatgatttcagaatcaatatgtggaacttctttaagcattcagtgtgcccactaaatgccagccacacctccacttgcctcttattgtcttatttttatatatttttctaaatatatgtatatatacagtacatagaaaatagaacttttattttgtgacctaaggacgatggtgaaaagatcacgttttcaaaacaatctggtgatcagaatgttcatataccagctggtttctgaagaggtcagaatgatctttctccatactgacttttaacaatgttgatcattgaggctaaattaatatatatgaaatattcctttttgatgacaccacaaaattgttgaacagtttaagaatttcaaccttaatcttgggatccctttacctcatatgggaagaacttgagggacattagtatacttttttttaagatggagtcttgctctgtcaccc

SEQ ID NO: 43292 - DNA, 618 bp, Homo Sapiens
cacgtgatgtatcgcccaacacagcagttcttttcactctgcttgtaactttcaggccttacccacatgtgttcctatagagttgcatgtagctaaaattatagtgtgctgcctaactttgtgctaataacgaaggacacacattatcattgcctcacagtggatggcacctgaccccatttttccaaggattctattttccagtgaatttttgtcaccgagttaatttcccaagtctgatagcatgaatgcttatttgtgctgtgaaaagcagagcagcctgactcagctttccattttcataggataatatgtgccaaaaaaggtttattttcttggtaaaatcaggattgtagaattgtgctatttttaatttttaaaatttttggttagagcttatagacattacttttatgattattttacgtgctaaataagttaaagggtatgttttgaactatagcactaattaatgtgtgtgatcctagtatgttgatagctttgattttgtgagtggtttactagtcatttattatgattcccatgaactctgatatgattcattgtggttttaactcaggttgaataaaagcatccatttcttttatagggagggtt

SEQ ID NO: 43293 - DNA, 639 bp, Homo Sapiens
cacgcgtccgcggacgcgtgggcattcccaaggctggggccctggctctgcccccaaacctcacgagtgagcccattcctgctgggggctgtactttcagtggtattttcccaacattaacctctccactttaacctcttctaaaatacccaaccaaaagatcactgtttctctcaacactatttaatctgaaaaatgtttcagtacaaaccactgtttgaactatctgggttattggtgtttgttcctgatgaaaggaaaaaaattctctccaggaggaagcctttttccttcttgcccttcctgattgatcttctgagagctcgaatgctgctggacacgtacccctttctattattactttgtagtagaaagaaagttaatgaaactgagaactgattggagggtgtttgatcatttagtttttaacaggctgaggcaacatggatcagtgtgtgtccccctcaggaatgtatccacagtggccttccttgctggtgggcagtgtatcctgatggcagggtacaagtaccattaatgaagggtctgcaacataaagccttaaaaagacacacactaagaaaactgtaaaaccttgaacattgttatttatattttttaaaatggaaaagatcacta

SEQ ID NO: 43294 - DNA, 625 bp, Homo Sapiens
atagtgtacactttcctgatacaaagcacttcattgcaatgccaacagactgatccatatgtacataatctagattttgttttcatagttttgcacttttatagcctatttttgaagattaacacatttgcaagatgattgactcaatctttgcctaatccaatgagtgttacagagagcttgctgtgactagaaccataaatcttaaagggggtatgtgataatagagggctggaatttaaacctgtatttaaaaaaaagaatcaccaaatctatttgaaaacaagtcgatttgtattatgctggaattttttgggctttcagatttctctttttaaccacatttctgaatgtataaaaataccaattattttcctacagccctttgtacttcaaaatatgtttttgtgtccatcagtattaactattggtatactactggttttatatttttttttctttgagacaacagtacatataatagaggtacaattcgttggatttttgtttatgtatttatttcattccagtttgatttattttaattgttgatacttaagttgtcgaacagtagacattacttgttttatttatgatatatttcagcttaaagttatgttattat

SEQ ID NO: 43295 - DNA, 744 bp, Homo Sapiens
aattattggcctcatgagagctgaagtaagtcagctttttggtgaactttagtggacttctgtgagattgtagttgtactttgtatctctaaatctaaagatagttttttaaaactcccaaagaaaatctgctctcctttctgatctaaaaactcatctttggggtaaagagttaagtgtccaaaggttgtcacagttcatgaggtcagagggagctagcctggcacctggactctgcccatccacagctgacagattccaacagaagtgtatttaaattctccagtagacaatgctgggtaagggagggggtagggctgggttattaagatacaggctgctgtattttacattggttgtgggggaaggggagcctggagaaaacaaagtcactattcccttttttgaaacaggaaaaaaaattattttttgttcagtaaaaatggtagagaattccaatgtccctagccacaagggaccagttccactgagaagtgaacagtgggaactcaaaatttcagaaacattgggggaagggaaaattggctttctcttaattggcagatgttccagtggggcgggggggctctgtttttgttgggatgtgttatgttgtatgtacgcatatatggaccggagtctgctgagtttataaggttccaaaaatatggtaaaaatcttgggtttttgttaatttatctcaataaaagcccactgggaactccaaaaaaaaaaaaaaaaaag

SEQ ID NO: 43296 - DNA, 636 bp, Homo Sapiens
aagaagatgttcttaaagccccaggattaagatggatgccttaagcgatggcccaggggtgcttggtggaagtcagcagggcatctggagctcatcccaatggtgtctctatagttattaatactgtaacgtttacttgtaaagagattatcattttagaaacatgctgtttttgaaacagatgtgtgatggatgttgtacatcctttgcttcttggtattcattcagagtggatttttagcccctgatctacaaatgtacattgttacagggctgcttcctaaagattttttttacctcaggtttctcttaatatagttctccagtcactgaccttgaattgacttacataaactactgccaatgtttaaattgcccttatgtttatgtttattatgtcaagccaattcgtacatacaatttggaatcaagtgtcataagaatttattatataaatttatcaagaataaaaatgcctctccagccttaagtatttacatgctcccaggtcattgtcagtttatggtattatgttgttttatttaaagcattgaattgatagaaaaatttgctctgtaataaaaatctactttcacaaaaaaaaaaaaaaaaaatcttgattctgcggccgcaagc

SEQ ID NO: 43297 - DNA, 691 bp, Homo Sapiens
caatttctagttacagaaatttggtgatgcttatttttgccaattttatgtcaaaataagttaaaacttccctcctgttcacctcttgggtctctatcctgtgtaacctctggtgtagtatttgcccataggcaaccagagccacttcctctgaacccaacatctcctggggaccttcgcagcaagaggaaagcactgagacaatagcttgctaagcaggggcccagtggtgtctcagagaaaccatgggtgtcctcgccacttcccagggagggtgaggtgagctcgggaacataacgatgttttgacttacaataggcatgaaatcgcaactagaaaaattagggcagtttttaaaaatgtcatagttatctattgcatgaactggagtaattccacctggtggtgaaaggattgttatttcacacatgaaaaattcatccagttttactaaaatgtaattttttctgtcatttgaaagtactgacaactatttgtaactaatcttccttaagaactgtatttgagggtatcaaatcaagcttgtaatttaaaatctgtaccaacaaagtgtctcagagagtttatttgaaccattgggtgctgagaaaaaactgctttaaagtgaaactttgatttcagaagttgatctggccctacaagtagacagtcatctactttgggaagacta

SEQ ID NO: 43298 - DNA, 541 bp, Homo Sapiens
  misc_feature (165)..(165): n is a, c, g, or t
ttaagcaaagcactgtgctgtgctcagataataatagttgtaagtaaaagtttttagttttcagtgttcaggttatagaatataactgaccataaaaattacctgcaggtattttctttttatgaacttgtttttaaattaccaagtaattactggtgtcatttngttttatgacagacacacgtatctaacaaacaaacaaacagtgaccttctccatgggtcaaggacttccttacaatttctcctgagttaacttttgtgaaaataatacctaaggttttctggcttattgaggaaatttcctaacaaacaaacaaacaaacaaacagaagagaagatcattaaccactgtatactttgtgtatataataggtcagtgtaaagaaatatgatttgaggtggtgcatgcaagtaactagggtttattctatataatgaatatttatagatctgtaacatttgtttcaaaatgctgtttcatttttataaagtaccagtgtttagctgctttttatacattaaattagcaatttgaaaaa

SEQ ID NO: 43299 - DNA, 716 bp, Homo Sapiens
ctgtagaatagatgaattctagaactcttgaccctgcaatgagaaactgtgacagatctgtgtcaattaacttgattagccagaaattaatcacaggcctagagaccaaagaaaaagctcccctgagtctcaggcaacagttttgtcacggatgcaaagcttcctgaaatcatgaatgctggactcagtttggcaaacgcttacacctattatgttctgagattctgagaaccagaatgcaaacttaagtaagatacagttcccactgtaggtgttttaatcctggtcttatatagaataaaccagtactttgctgagtgaaatcaccatatagaattcagtattaacagatcatgcattcagatgcttgaatgtgcattcttgttgtgggcttgatttagatcctattgcggggtcattacgcgaaaattcaatcataccttccatagacaaatgtctgatttttgtttaaatctgtccgttaggtggcctttccttatctgaggtgtagtggtctaacatttaggaagccttgctttgactttatcgggcagcattaaaaaaaaaacaacaaagaaaaaccaaacatgaattatagtttttaacaagtgatctttatctcctgtcttctgttaggatcatttgaaagaaaaagggagaacttactttctagtttgttactggctgcacagtacctccctttgtgtttctgctta

SEQ ID NO: 43300 - DNA, 552 bp, Homo Sapiens
ggcgccgtgtgctggattcgcacatcgcctgcggcccaggtagggcggcctctctccctcgcaagggggcccagctggagctggaggagatgctggtccccaggaagatgtccgtcagccccctggagagctggctcacggcccgctgcttcctgcccagactggataccgggaccgcagggactgtggctccaccgcaatcctaccagtgtccgcccagccagataggggaaggggccgagcagggggatgaaggcgtcgcggatgcgcctcaaattcagtgcaaaaacgtgctgaagatccgccggcggaagatgaaccaccacaagtaccggaagctggtgaagaagacgcggttcctgcggaggaaggtccaggagggacgcctgagacgcaagcagatcaagttcgagaaagacctgaggcgcatctggctgaaggcggggctaaaggaagcccccgaaggctggcagacccccaagatctacctgcggggcaaatgagtctggcgccgcccttcccgcccgttgctgctgtgatccgtagtaataa

SEQ ID NO: 43301 - DNA, 877 bp, Homo Sapiens
  misc_feature (586)..(586): n is a, c, g, or t
  misc_feature (791)..(791): n is a, c, g, or t
tctctctgtgcactttgctgttggtgtgacaaggcatttaaagatgtttctggcattttctttttatttgtaaggtggtggtaactatggttattggctagaaatcctgagttttcaactgtatatatctatagtttgtaaaaagaacaaaacaaccgagacaaacccttgatgctccttgctcggcgttgaggctgtggggaagatgccttttgggagaggctgtagctcagggcgtgcactgtgaggctggacctgttgactctgcagggggcatccatttagcttcaggttgtcttgtttctgtatatagtgacatagcattctgctgccatcttagctgtggacaaaggggggtcagctggcatgagaatatttttttttttaagtgcggtagtttttaaactgtttgtttttaaacaaactatagaactcttcattgtcagcaaagcaaagagtcactgcatcaatgaaagttcaagaacctcctgtacttaaacacgattcgcaacgttctgttattttttttgtatgtttagaatgctgaaatgtttttgaagttaaataaacagtattacatttttanaactcttctctattataacagtcaatttctgactcacagcagtgaacaaacccccactccattgtatttggagactggcctccctataaatgtggtagcttcttttattactcagtggccagctcacttagggctgagatgaaggagaaggctacttggagctactgtgtgattttgtttgtgtctgagtggcatccagatgaantctgggagagttaggagaacgacataggcaaggttcagcagccctccaaggtataggaaagggggttgattaggactgaaggctat

SEQ ID NO: 43302 - DNA, 491 bp, Homo Sapiens
attcctagtcgtgacttcatttctaaaacagagcctgaccaaccttccatgtatctccatcctcccctgctccagccagggaggactgagggagtgccccgagacccacgcacatgttggggcttctgggccaagagtactttttatataactaatttctaaatccaaaagctcaaggaatagacagtgttctgtgacatggattggtttgaaggagttacccaccatcccagcacgataatgtcatctcccaagttggatggcagcacgatctggccctagggagcttcctgttcccagaagtcattgtcctgggctatccagatgtccctagtaaatcttgcttccttctgcaatgttagtaatgccttaagctgacagttgctattttgcagaacagttttcctctttgcttagctagtaacttgcctctgagcctgggctgatctgagaaacaggtgtgacaagagcatgaaccagaggtgcacctg

SEQ ID NO: 43303 - DNA, 694 bp, Homo Sapiens
ttttttttttttttttttgagtcctctgagaatttattactacggatcacagcagcaacgggcgggaagggcggcgccagactcatttgccccgcaggtagatcttgggggtctgccagccttcgggggcttcctttagccccgccttcagccagatgcgcctcaggtctttctcgaacttgatctgcttgcgtctcaggcgtccctcctggaccttcctccgcaggaaccgcgtcttcttcaccagcttccggtacttgtggtggttcatcttccgccggcggatcttcagcacgtttttgcactgaatttgaggcgcatccgcgacgccttcatccccctgctcggccccttcccctatctggctgggcggacactggtaggattgcggtggagccacagtccctgcggtcccggtatccagtctgggcaggaagcagcgggccgtgagccagctctccagggggctgacggacatcttcctggggaccagcatctcctccagctccagctgggcccccttgcgagggagagaggccgccctacctgggccggccggcgatgtgctgtaaaggggcccgcagacccggctgcccagcactccagagacgggccaaggcgggcggccgcctgcccaaggaacggccctcaacagctgggaagtcaggcgccccaggagcatggtctgtgggcg

SEQ ID NO: 43304 - DNA, 595 bp, Homo Sapiens
ttccttaaaataggaattcctcgacatcactcctggccacactttccttgcctgtgttgttgctatgtgtatttgaaagtaatatctgcattccttttaagatgttctgtaagtcatatttgtcagttatacagagtagtcttccttttccccacgttcagtgtaatctcactgaacagtaataatagcaatagctaacaacatctgcacagcaccttacagtttgcaaagaacgttcacacattctcatttgagttttgcatagtgaacctgttacgagatgtctcttgacgtcgatgctaaaagtgttagaatctttacatcactagagtcattgaatatgctgtagtattgaatagtgccctgactagggggaggatttggatgtgctgcatttcaagccgtgtataatcatcaaaatggggggcttgagttctttagctacttgaatccgatttacttctgttaagtgatgcttttctaaccgttttctggatggatcttgtattcactatattgtagcttgtaattcgtataatgtaccatctgatgtcattaaacaaaagtgtttgtagtgctaaaaaaaaaaaaaaaa

SEQ ID NO: 43305 - DNA, 641 bp, Homo Sapiens
gcgtccgatacagtattgctacaaaccgaatgatcactcaaacttctattacaccctatattgcatctcctgtatctgcctaccaggtgcaaagtccttcgtggatgcaacctcaaccatatattctacagcaccctggtgccgtgttaactccctcaatggagcacaccatgtcactacagcccgcatcaatgatcagccctctggcccagcagatgagtcatctgtcactaggcagcaccggaacatacatgcctgcaacgtcagctatgcaaggagcctacttgccacagtatgcacatatgcagacgacagcggttcctgttgaggaggcaagtggtcaacagcaggtggctgtcgagacgtctaatgaccattctccatatacctttcaacctaataagtaactgtgagatgtacagaaaggtgttcttacatgaagaagggtgtgaaggctgaacaatcatggatttttctgatcaattgtgctttaggaaattattgacagttttgcacaggttcttgaaaacgttatttataatgaaatcaactaaaactatttttgctataagttctataaggtgcataaaacccttaaattcatctagtagctgttcccccgaacaggtttattttagtaa

SEQ ID NO: 43306 - DNA, 885 bp, Homo Sapiens
ggaacatggggaccaacaaagcatttccagttgtaagaatatgtcagaagagtgctcggttagcccacggtgccaaaactccaaacaagttccccggtggaatgacgtggccattggagggctgcaggtcgtcctctctgtatgtgccccgcgcatttccttggcctcatctgagatctggtgtcagagttctctgctcctgttggcaaatcgcaccttatctgaacatttgttccagccaccttttgcacatggattccgtaccttgcactagcaatgtctaccttcagtaacgtcgttctttttcaccctgtattctcaatgatcccttcctccccatatgccacccttcccccaaagctgatagggcagaggtgcactttatgaaactggcacttgactgaacagaaggaaacagctgtacctctaagctcctttcacagaaatcgtcatctgccttggaatgcaaatagttcttatttgccaaagaacagtgaattgggcccaaagatcaaacacagcatttcatgtaatcagaattctaaacgcacaactcgggagctgtgcacggcttctcaagtgattcagttgcagaaccaagagcaaaactcgcctgtttttgtcctcaatggcacccatgagctttccaatagtatagttttctttctttccttgtcctggttgaaggtaacgtgttcctagaaaagaaaatgctgcataggaaaactgagatgccttttattccaacgtgtttgatccctgtcactcattattctgtactttttattgtacattctattcctgtaattattgtgccctttaagtgttgtaaatcgttttggaatttgtgcctgctagttatgccawtaacaggctctacaagtg

SEQ ID NO: 43307 - DNA, 360 bp, Homo Sapiens
caggaactgagtgaggcccctggtcctgggtctcaggatgggtcctgggggcctcgtgttcatcaagacacccctctgcccagctcaccacatcttcatcaccagcaaacgccaggacttggctcccccatcctcagaactcacaagccattgctccccagctggggaacctcaacctcccccctgcctcggttggtgacagagggggtgggacaggggcggggggttccccctgtacataccctgccataccaaccccaggtattaattctcgctggttttgtttttattttaatttttttgttttgatttttttaataagaattttcattttaagcacaaaaaaaaaaaaaaaaaaag

SEQ ID NO: 43308 - DNA, 593 bp, Homo Sapiens
ggctccagaaagtcagcagtgtgcctgggcacccaccccatcctctacctgccacacctcagagggttcctacagctgcacacaagcagttgagagttgatgaccaggcccatagggctcccacagctggttcccaggccagtgagtgctgtgagaatacagtagcacaagtccttgttctctgaagagtgggaaggagaggagtgagtgaagtagcctgtcccctgcaggtcctctgcgatggcattgtctcggttcccgcagtgctgcagtgtggaagggagtgccccatcctcattacagatgacacactggagtgtggaggggtcgatgacttgtgcagggtcatatggtacctaaggggcagatctcagacttaaacacaattgatgtctaacccctagacagtctttttagtgccctctgctctcagtcttgttgccctagtatcaagcaatcttagacaaacatcctgaattcttacaaacttacctctaaactctgaggataaagttgccagtccttttaatggtcagcctaatcattctgtcagcctaatcgggtaattgctttttttaataaatacacataag

SEQ ID NO: 43309 - DNA, 614 bp, Homo Sapiens
ccacactggatcatgtaaaagtataatataaggaaaaagggaaagtaaatatttagaatgtagtttgttatattcccagcatttcaatatttattagttacttgtaaattactgtggctgtgtagtttataaatgtctgtgcactatattaattagaagaccatagaacatgccagcaggttggctaatgctatgggggtttttaccacagttgccattgtggaagaaattatttggtacattaataaaaaaagttggtaaaacatgattttatacctcagtgtataagatgtgcaagacaaatatgcttatttccttttctagaatataagtgatattatttgcttatgacactaacactattaatgacaggagtcaatcagcctttacagctatcaaaatataatgagatcccaatgatgattcttttttacttggaatgttaattagttggggactttgatgggctggcaaacattttatcattgtcagaatttaatttagatttcaaaaatagcttacaggattttaaacatggtgtggtattctaaagccttttttttaaaaaaagagatcttttggagagaaacaaatgaggattccattgggggggg

SEQ ID NO: 43310 - DNA, 348 bp, Homo Sapiens
  misc_feature (264)..(264): n is a, c, g, or t
caccgcgccgcggaagggggctccgagggggcgcagcctcaaaccctgcctttcctttacttttacttttttttttttttcctttggaagagagaagaacagagtgttcgattctgccctatttatgtttctactcgggaacaaacgttggttgtgtgtgtgtgtgttttcttgtgttggttttttaaagaaatgggaagaagaaaaaaaaattctccgcccctttcctcgatctcgctccccccttcggttctttcgaccggncccccctcccttttttgttctgttttgttttgttttgctacgagtccacattcctgtttgtaatccttggttcgcccggttttc

SEQ ID NO: 43311 - DNA, 805 bp, Homo Sapiens
gttttgctgttgaatggggtttaaaatcagaattaacatttgccaccccccgtggaagtttgaagtttttaaaaatagaaatgtacatttttcaagctgtttttctttatgtttttgaaggaccatttttaattagctctttgatacaaagtaactcagaacgtcaaaacctatacccactaaagggaaggctgccgggaaggcaaatggaacaggaatggagcctgtctcaggaaggccagctgcaggtcctccagaaaatcaaagaagggaagaaactctgagtttgaggtacaggggcttcggggtgcagacgtccctccagggcccatggtcagtattgcacctgtgttatgaacccccagatgctgtgcagggcaggggcgggggctgctgttttattggggaggggagcatcctaaaaatggggtccaggcagacccctccagacctcacactgccgaggaggcctttcccaaagggcgtcctcccgggatgcagacggcaggtgtgtgggaagcgccgtttaaatacacagcacgacgtatccttgtaccgacttctcccggttcttgtttgaaaatactgtagttcaggctcttgatctagatggcagataggaactttcttgtcacaaaaatactggaggaaaatgttgtaaaaatagacttttggacacacagctgttggggctgcactgagctgcaatttttaacatggatttataacttaatgtttctgtttataaaatactaatgatttgcaatgtattttactggccaattaaaacagatgttttattctt

SEQ ID NO: 43312 - DNA, 443 bp, Homo Sapiens
agagaaggtgtcctcagagcctccccctctctccttggccggcccacaccctggaatgggagacgcatcgaatcacatgggacagatgtaaaagggtccaagttgccacattgcttcattaaaacaagagaccacttccttaacagctgtattatcttaaacccacataaacacttctccttaacccccatttttgtaatataagacaagtctgagtagttatgaatcgcagacgcaagaggtttcagcattcccaattatcaaaaaacagaaaaacaaaaaaaagaaagaaaaaagtgcaacttgagggacgactttctttaacatatcattcagaatgtgcaaagcagtatgtacaggctgagacacagcccagagactgaacggcaatctttccacactgtggaacaatgcatttgtgcctaaacttcttttggaaaaca

SEQ ID NO: 43313 - DNA, 663 bp, Homo Sapiens
  misc_feature (516)..(516): n is a, c, g, or t
  misc_feature (632)..(654): n is a, c, g, or t
  misc_feature (657)..(657): n is a, c, g, or t
ttgcttcagcccctagttaacctcaggacttggtttgcatataaaaggtagacagctgatatgttttcatgaataaatattgtcagccagaaaaggttggtgtcaggtaatgcatatttttttaagctttgttttatatttatttttcatttagtttttattgggaatggttttcaaagaactctcagttctgcctaggtgtttttgggggagccctgttttccatagtgtaattccatttaagaggttgtctaaaagtctttttaattaatagaaagattttaatatccaagagtagtcaaattaaggatataaactttccacaccttcctgtcgtgacagataaaagcacagaaaggacaacccttgaaatcatgtaacgttggtcatttcaatattttgtacctgttttaaattctgttagtgtatttacttcattgtaaatatttttgagggtacctttgtattttgcttttgaccttggttctgtgatttggatgtcaacaacttccctanaaagcaccagtgtgttaggttctaatgtcatgacccaatttgtgttattcatctttaatcctgttttcagtctctatgtgtacagcagtatttttaataaagaattaccgagattnnnnnnnnnnnnnnnnnnnnnnnaanaaaaag

SEQ ID NO: 43314 - DNA, 600 bp, Homo Sapiens
gcacgagccagtcagaatagaacagcataattacctggagttagggggagtatttctgcactattacttgtcagggagagaagaaacttagaattgtccctcaaaggagtgtcaagaagtatgaataaatgtcctttcaccagctcacaggccagaaatggaggacccaagtcaactaggtgaaactactagcagacccagctttcccataataacctaatctgcaaattgttctattaaagtctcattgttttcaggatgcaatgaaagtggatttcaaaaggctttggaaaaataagtggaacatgactgatcttgaaaaaaaaagcaaaagcttaaatatttgatacaagtttacttagctacaacatactttacattgttgcctttagttatctcacaggcactgacattttatatttagaaaatacttttaatctttctaatctttttttgtaaatattagtgtccattctgtatgactcgctaacctactttgcaaggctttgggcaacattttagctcattaacttcaagatgatgtgtcatctgtataggtcaaagaatgggacttctgaactgaggaatttgctgttgaca

SEQ ID NO: 43315 - DNA, 1058 bp, Homo Sapiens
  misc_feature (632)..(632): n is a, c, g, or t
  misc_feature (805)..(805): n is a, c, g, or t
ccacgcgtccgagcaattgtcctcacagagaccacatgtaatatactgaaatatgttcatttttaatggctttgttaacatcaaagaaatgctgcctaaatttgatttcagatgaggaaggagaaagtaaagtgtgcatagtaaggctgtaggtgaagagttgtgagataaatagttcactcagttgtacaaagcacaactagaactttttgttgggaggcttacatacatcttgaatattcttaatgtaataatgttgactattaagttggctacacagtcactgtatgtactaggaactggtttccttgacattctagaatcaatggctaggagaggcattaatctttgaggggctgaacatatcatgaagctgagtcagtatggaaaattttcaaataaacagggtgctgaagttccatctgtctcatctgcttatgataagttcttattgattagtgaatgtagcttaagcctttgtatgtgtcctcagggggcagaccgactttaagagggaccagataacgtttgaatggagggattatatttcaggtgttttagcttgaaatttattttttaaaaaagaaaaattttaaaaatatataaataaaatagaaccaagccggtgatgncagttgatattataaacaggcagttttagcacagaaagaaaatactgacctgtctgcattctggtacggtgggtgcaagtccccagctgggtatgacatgatacatttttaattattctcaccagccagttaaaggaaaattgaacggtcttttggaatttgtctttgaaaangggatcaagagtagggaattccccttttgacctaacattacttgcctatagaagtatgggcatttccaagcttttttgtctgaaggagcctctcaaagaaagggagaggtaaatcctgaggttagctttaaaaattgggtaagggagggaagaaaaatcctctgccaaaaagggaatgtaatggtttgttgggcccaagtgaaaaggaaccatccctttggggtttgggggaaggttttaattttctcttaag

SEQ ID NO: 43316 - DNA, 779 bp, Homo Sapiens
gaagggggccggcgtaccgggtccaggaattcccggggatctctaaccaagccttcctgggagggacccatgcgcccctgagccccattccattcatacagacacacacgtacgcacactgcatgtccaaggccctaaacattgcccgttgacataaactttccagggccccagcctgatggggctgccctcagtcctctagatcaagatgctgactattagggggcagtgattgccatctggggacctgtcaggctttgtcatttcccagtttgttggtggtgcctttagtggttccctaatttgggaacactgatggggccttggacagggctttctctcaggtaggagaaatgggcccatgatctcctcacagtcgcccccagtccttggccctgcttccctgtgtctcatgcactggcacatatggtcaccttggagggcagacctaggagcccctctgaccactgaatccgtctccacaccccttctgccaagggaagccccttcaggaaggaccccccaaagctgaggggctgaatgtagccttttcaacagagaaggctcccacttgagagcagcctctacctgaccccctggaccacagagagccactctgaccctcagccccctcgcttcttcagctaaaactccaaaggtttggtttcagatggggtttgttttgttctgtttggttttggttttgtttggggtgggtgggtcattgcggtcttagattatgtttctcttgctaccaaacagtcatgtattaactctct

SEQ ID NO: 43317 - DNA, 560 bp, Homo Sapiens
  misc_feature (465)..(465): n is a, c, g, or t
  misc_feature (548)..(548): n is a, c, g, or t
  misc_feature (551)..(551): n is a, c, g, or t
tgcatccctctaaaagtcctatatccatattcaccattggctaatttgaggccctgagtgggccttgaatgctaaaaagaagcagggtacggagggctacatgtagataccacaccaaggctggaggctgctctgtcgtaagacagaaagaaagacgctgggcccaattttgacttggccaggggacaccttggtgtgtttgttatctttatctgtgggtaggctagctgacccatctccttgagtcattccctttgggaaaccccactgccagtattgatctcctttttgccttgtactgaatgacacattacctccacactctcccggactaggtggtcaacagggccacagggttgctttctgtctttggtggggcaggggagttgacagggatgagggtccaaggaataagcatgaatgacaagaaaacaagggaaagagttaacctgtcacatagcaggntaactttttcagggtttgcagttagaggtattcgaccattcactggctgagccagatcacgggaacttgagagcttttactgngantcttcaatg

SEQ ID NO: 43318 - DNA, 665 bp, Homo Sapiens
atcctttagtgcacccagtgactgacattagcagcatctttaacacagccgtgtgttcaaatgtacagtggtccttttcagagttggacttctagactcacctgttctcactccctgttttaattcaacccagccatgcaatgccaaataatagaattgctccctaccagctgaacagggaggagtctgtgcagtttctgacacttgttgttgaacatggctaaatacaatgggtatcgctgagactaagttgtagaaattaacaaatgtgctgcttggttaaaatggctacactcatctgactcattctttattctattttagttggtttgtatcttgcctaaggtgcgtagtccaactcttggtattaccctcctaatagtcatactagtagtcatactccctggtgtagtgtattctctaaaagctttaaatgtctgcatgcagccagccatcaaatagtgaatggtctctctttggctggaattacaaaactcagagaaatgtgtcatcaggagaacatcataacccatgaaggataaaagccccaaatggtggtaactgataaagcactaatgctttaagatttggtcacactctcacctaggtgagcgcattgagccagtggtgctaaatgctacatactccaactgaaatgttaagga

SEQ ID NO: 43319 - DNA, 930 bp, Homo Sapiens
  misc_feature (703)..(703): n is a, c, g, or t
  misc_feature (778)..(778): n is a, c, g, or t
  misc_feature (780)..(780): n is a, c, g, or t
  misc_feature (782)..(783): n is a, c, g, or t
  misc_feature (786)..(789): n is a, c, g, or t
  misc_feature (792)..(792): n is a, c, g, or t
  misc_feature (796)..(796): n is a, c, g, or t
tagtgatgagatatcaaatcccttagtgtttccattttgggaaatgaggcactatttttttttttaaaagacaacttacccacctgagtcctgaaacagtttgtctctccagttttctggcctatactctagttagctctgatccaagtttacaggacaacagccttgctttaagccatgtcctgttgtgggcacgataatagcaactgagctgtcacagcctaccagcaggctggtaacacctccagggtctcttggctagagcagatttcttagcagctgactaggacttcagtcattgggaagcctatgaggcctttacatttttggtgtgagatggggaagaaacataaaatgccactttacaacttcaataatagcctgtaatttatatttactgtgtgaatttttagtcctatattttaataatttgtaaattgatctcttattccaagaatcctttgaacttgtagaacatctgggagtccacttccctgtcctcttcctgatccctgctttctggactgtttaaatcctctttgggatggatcagagagtctagagaggccactcataggtccagctgctggcctcctgactctccaaagccttcactggaattgggacatttgctccagccctagctgtgaacatgaccagagacattatttataattcagccatttaagatatacctgtactncaaaagtcctgtatatttttaaaaagttttatttttcaggtgaacaaaaatacatcctaagaactctgcctaaananannaannnnaanaaanaaaaactcggaggcattctaatgtcggggtgccgggagaaagaggttaatgaaaatgggcaccatgggtcataagctgtttttcctggaccccagctttttctttgtaaccaaaggggctaaaatccctgccca

SEQ ID NO: 43320 - DNA, 676 bp, Homo Sapiens
  misc_feature (637)..(637): n is a, c, g, or t
ggtccggaattctcgggattcaagaacctcacgtccttctgacctgggtaagatctgtatcctgtcggttgcctactctgctgtctgggtgacccccatgcgtggctgtgggggtggctggtgccagtatgacccacttggactcaccccctcttggggagggagttctgggcctggccaggtctgagatgaggccatgcccctggctgctcttatggagccgagatccagtcagggtgggggcgctggagccgtgggagcccggccagggcagggggctcgttgctgtggcaccccctctctgccagcaccaagagattatttaatgggctatttaattaaggggtaggaaggtgctgtgggctggtcccacacatccaggaaagaggccagtagagaattctgcccactttttataaaaacttacagcgatggccccaccaaggcctagacacggcactggcctcccaggagggcaggggcattgggaatgggtgggtgccctccagagaggggctgctacctcccagcaggcatgggaagagcactggtgtgggggttccaccgagaaggggacctcatctagaaaagaggttacaaacctaccattaaactatttttcctaaaacggaaaaanaaaaaaaaaaaaaaaaaaaaaaaaaaaaaaaaaaaaaag

SEQ ID NO: 43321 - DNA, 697 bp, Homo Sapiens
  misc_feature (371)..(371): n is a, c, g, or t
ttgctgcaatatctggctcgaaggttgccctatattagaataatactttagccaaatacacctgaggaggcagacactgtgtttataagcagacaataatgttctgaatccttcctgttcatgctgctttcttaattcatttctccatgtcatcaagaggttggataacttatttctaagctcaaggttaaaaatcatgtcaccttttttttttttcccccaacacagacctcaaaaaaattgcgattgaggaagtagcatgatcctaaatgtgttgctgaaatcaggcagcccgagcctctggtctctccagagagcccgtcttcacatttctctattcctcagcactcacccgaaactgaacagatggnggagtggtcttgattgtcaagataaaactggtgaagaaagctaaatgctgagaaactgagcatctattgtcgtgtttaagcttagctgggtcctttctagtttgtttttacagcttactaggtgaagtagtttgcactatttttgcaataaattcatggaaaacctaacagttacttgttttgtttcttactgtgtgtatataaactaatactaaaagtttggcatagtgttttttcacctccttacataacccctaacatgcacagaatgctgtaaatctgataaaatatgatgtgaatgatattttataaagttattttgtatg

SEQ ID NO: 43322 - DNA, 928 bp, Homo Sapiens
gcgtccgctgatgtatggtggcagcaagagaaagagctcattcttctcatcaccaccttactttgaggactagccaagaacagacacaatggttcatgcccaaaaggaacagaagttccaactattgcctgggatcttgcgaaaagcgaggttccctgatccctgggagcctcacgtattttagaagccaagagaagccacatggagactcaaattcgcatcttctctatccacatcatgaccaaaggaacccctccctggtgtctgatcagggctgtggcatcacgaaacattggatcatgacatgtcgggcgatgcttggaagagcccagcatgtatgtatgcacacattgtgtgtgtgggaaggacaaagccactctcacaagaaagggcaccaggactgctctccaaggaactggacctgtccagacagttacactccaaggtcattggagagaacttctgtatgggcaagcctgagagggagaggaaacaaaagctgtgtcctggcagaaggtctgggtttgcagatgggtgccctgaatggaactactttaactaatccatagggacttctggtatgctttcctctctttttaaaggaacttcgtgacactaaacattagcccaaaggacttcttagccttcaattgggagatacctttggtctgctcctgcaccaaagccatatgggtggaagtcagttggcctccctggttctgcagagggccagaagaatgagagagaggaagactgctggcagggaaatcgaggaggcgagactagaactgcaccagcttccctgatgtctgcagccatggctttgcagcgcagacagagcttctctgggatgctgggattcttgcctgtatgaatgcatcaagtattcatttattgcccgaataggcattgcattaagtcyctgtaa

SEQ ID NO: 43323 - DNA, 937 bp, Homo Sapiens
aaaagatgcgtaagtcctaacccccaacagaggtgttcacagtgtagacagggaaaaaatgtataaacaaatgtgtaaaaagagaaatcagctcatggcttaggatggaattagagacaggtgagggacactcaggagctcattttccagctgctcttcagagtggaagggctggctggatcgggtaggtaagaatagctggattttttagaaaagaaatggatacagtctaaagaattaactcacccggtactttattctaagaagggtctggcatccatatgaggaaaaatgctcagctccaggaaagatggggagtccaagtggattaatgatgtcatgcataattttaagagacaagggagaaaacacaatgtatagccagagaaggagaagctcccatccaaatcctactaggaagagagtgggctgcagatgaatctgtgactcatgtttccctgtttcaaagggatcctggggaaggaggggaacatgcttgcagtatctctccctgtctgtctgctcacataagcattccgtccatctgagctcatcgtgctactggtatgtgtatgtgcagttacacagttttctgtatcatagattctagtgtgtttatacaaggagacatctgtggtttccccaaccgttccaaaaggctatttcaaaggaaccagccaacgtatgagaaatgaatgtaacactgtggacattgacttcccgcataaggcagggtgaccccctgaactccagatgtctgcacagtatcttatgtgttgttttccgttgtgacgaatgtgattggaacatttggggagcaccagagggattctcagtgggaagcatacactttgctaatcatgtattatyctgatwaaacaacctaataatwttaaccttggmccaggrgagttctgggtkaggrgatggtggtcat

SEQ ID NO: 43324 - DNA, 751 bp, Homo Sapiens
cccacgcgtccgcggacgcgtggggactagttctagaatatatccagatccttgtaattatgatattgggttatgacaggattctattatttttagctatgaatggtgcttatttttccctatattaggaatgttaatatttggattatcagagtccatgttataaacagaatttacctatgcaagacaaattctaacgtgtgcaacattttcatgagaattaaaagttgtgtgttaaggggaaaaccctctgaatgtttttatgtgtaagtgcctaaagaaccgtagaaacagtacatcaaaagctcttataaaagaaaaactgattgaacattagccagaaacaaaatatgatttacattttttttttttggttgctgggactgaataccctaaaaactaagagatgtgagtggggaaaatgtctaattgataagaaagttgatttatattatatttacatgcatcttctaagattgcctttacagtagccaatcagaactttaaaaaaaaaaaagctaacaacatagatcctatgtgttgcccttaagactaaaatactttgcacacgtgattgaatggctcacttaagttgttgaatttccttatacatttaaagtgtacttccgttaagaattattccattttaaatgggtaactttcagcttccgaactattttcctaaacattccagttgtgtattataaaagatcaaaatatctctaggtggtagtacaattttcatttataa

SEQ ID NO: 43325 - DNA, 710 bp, Homo Sapiens
tatagatgtatttttatccaagtgccactccaatttgtgtatgtaataaaattatttatattaaaagtgggaaataattgtcaacattttttttgagtatagatttattaggggtggcaaagaagagtgctagttagcagttttccatgtaaagttgtccttgactgatttgtccacatgtcagttgtaactcccccattccctgcaaaaggaattatttctaacccagatgtatcacttgaaactttttagaagcaaaataatcagggaagttcctagaaaggtgtttggctttttggtttttgagggttggggtaaagaagacttcccccacaactgtcagcacaaaacagggtattgatttttaactctgatgtttctattggagttgaatactaaataaataactataatgagggaaatacatttctaataaaattccctacattctagaaacatccctgttttaatttttttatctaaatctttttgtgctttatgtgtaaagaaaaaaatgtactgagttacaatgcattttattaacactatgtacataatagctgctttgtgttcagaatggtagcagttgctttgtatattaaagtgatccttgtgaatttgtgaaatattgtcataaagtgctttttcttactgtaatctttgtggtatcaactgtcataatgctctttttacacaaacatttatgtgca

SEQ ID NO: 43326 - DNA, 608 bp, Homo Sapiens
  misc_feature (487)..(487): n is a, c, g, or t
  misc_feature (579)..(579): n is a, c, g, or t
gcacgagggtgggttttattatttcaagggtcacacagggttaagttcagtaagaaatgctgtagctgttgtcattcaatctagtgcctccttgaggccaggagttcaggaccagcctgggcaacatagcgagacccccattgctacaaaaaatttaaaaatgaaacaagtgtggtggcacatgcttgtagtcctagctacttgggaggctgaggcaggaggattgcttgagtctaggagtttgaggttacagtaagctgtgatcgtgacatggcctccagcctgggtgaccgagtgagactgtttctaaaaataaaaacaaaaaataaatttcttcttgaggtggggtggaggtggggagcaagaatttgacctggctctgatccctggtgtgttgtgtgggcctctttaacgtttgccactgagccttaacctcactgtacttcactgtacttcacacgcattggtgttaacattttaatcttanaagaccctgacccactgagggtttgttgtgagaattgctgaagccacgtagaagcaccttgaaatctgtaaaaccacaagaaagtactttantaaaggtatccttatttgaagtggataat

SEQ ID NO: 43327 - DNA, 686 bp, Homo Sapiens
tgctcagtgtcctggattaccagatttaattgaagaaaatcatgttgtaaataagacagacttgaaggtggattgtttatccagtgagagaatgagtttgcctcttcttgctggtggagtagcagatgatattaatactaacaaaaaagaaggaatttcagatgttgtggaaggaatggaactgaattcttcaattacatcacaggatgttttgatgagtagccctgaaaaaaatacagcttcacaaaatagcatcttagaagaaggggaaactaaaatttctcagtcagaactatttgataataaaagtctcactactgaatgccaccttcttgattcaccaggtctaaactgcagtaatccatttactcagctggagaggagacatcaagaacatgccagacacatttcttttggtggtaacctgattactttttcacctctacaaccaggagaatttcgaatttaaaaataaatccaaacattttccttcatattatcaatgcttatatattccttagactattgaaattttggagaaaatgtatttgtgttcacttctatagcatataatgttttaatattctgtgttcatcaaagtgtatttagatatactctttctcaagggaagtgggggatattttgggcattttccaccacagaaataaccatggtcctgtgccgaa

SEQ ID NO: 43328 - DNA, 746 bp, Homo Sapiens
  misc_feature (659)..(659): n is a, c, g, or t
  misc_feature (693)..(693): n is a, c, g, or t
  misc_feature (714)..(714): n is a, c, g, or t
tgattttgtatatgcgcccagctttaagaacacataaaactattacgtctggtaggaagattgttagtgcctcaagttacacctgtgcagcttgggtctgagttttgatagaacagtaaacatttaaagaagttaagagcagtttgagctgtatccgcggtttttactcgttaactgatttcagctaaatagtttgaattatagagtaagtataattacagcaaaggagttaatctcattttcaaagctgtttctcattttatttcttgaattaatgtagagcaaaacatgttaaaattcaggaccactggaatatggcaacttatgtttcagggttgtgtgtgggtagtatttgtggttgtattggtttgttttttgtttttggagaaacatctgctagtggaataaaatactttgttttgctctgaagagactgaaattgttcaggcttattatggctcatagattacagagaatgatgctagttacatgccaatgaactatttttactctttttatatgaaatgtaaaaatttgtaggggttctggtgatggtggtacctcttattaccttatgtaaaacacttgaacagcctcatcaatattgccgtcatctgtttaacactcccagtatattttctcaatgtctgtttacttanaattttgtggagtgacataattaataagcaatanagtctgaattatacacagcgnaaaaaaaaaaaaaaaaaaaaatcgctaatcgg

SEQ ID NO: 43329 - DNA, 800 bp, Homo Sapiens
  misc_feature (782)..(782): n is a, c, g, or t
gcggccgcggctgtaggctttttttactttcaaaattgcattatagtgaattactgtttacaaaatacacatactgtgaacagatataagtttctgtcttttataaggtttgtagaatgaatgtttttttaaagtgagtattatatgttaaatattttaagttttttataaatactagtaactgtttactaatttttgtttggtcaaatgcttgtaaatgtagctgaaagaagatagggagaaactgcggatcccaaactgttccctttttcatttcttgaaatgttaccactacagacatttttttaaggtgaataaacagttgtgatgtgctgtacttaaaatcatgtttaatcgtataaggaaacatttcaatacacttatacaggaagaaaactatagatgaagtacatgtgtgtgattcagtctgattcacagaattctgagagtaatatggaataaaacaactccacttagatgataactgaagcatttcctgccttgtgaaaatttggattttaaattgctgttagaatgggaaatttggacactttatatcattgtataatttcagaatttagtttctgtatcttttggaaaacatgattatagcaaaaacatagaaaataatctattactaaaacaccataaatgtaaaactagtatgcttggctgttaactctaaagatgttacttatgtctgtttttaaaacatgcatgtatttaacaattttatcatagtattgtcatggaaaaaataatatattttcttacatcttaanaaaaaaaaaaaaaaagct

SEQ ID NO: 43330 - DNA, 580 bp, Homo Sapiens
  misc_feature (553)..(557): n is a, c, g, or t
  misc_feature (559)..(569): n is a, c, g, or t
  misc_feature (572)..(574): n is a, c, g, or t
ggcactgtggaactgccaccttgggtctgtgtcacttgtaggtttctctgcctccaggttgcctcaacagcaggaggcacagcagtttcaccatctttgaggtgagggtggggtgccccagctaggaagcaagatcgctgtgctaggtctgaccaaaaccagagggcagtctagtcctgggggtaaagccctcagatcccagggtacactcttctccattccctccacccacttgcctgtcaccccagtcacctaagcaatcactgggcccagaggagaggagacagacacacactggctcctggacctaaagggtatgagctggagctaaggccagctagagcttccactgtcagccctcactgtcagtcccactgcacccccctgtgcctgctgggcactgggcactagctagatgctttaggttgcttcagctgatccttcaactctgtgaggtggataccaatattctattttgcagatagaatttggcccagagaggttaactaatatatccatgatcacacagctaataaaagtcagagctcaaaannnnnannnnnnnnnnnaannnaaaaag

SEQ ID NO: 43331 - DNA, 616 bp, Homo Sapiens
gcacgagttaagaaccggggagtactcagacattcaaactataccctccctttggaagaaagcatgctctactctatttctcgagacagtgacattttatttacccttcctaacctctccaaaaaagaaagtgttagttcactgcaaaccactagccagtatcttatcaggaatgtggaaaccactgtagatgaagatgttttacctggcaagttacctgaaactcctctcagagcagagccgccatcttcatataaggtaatgtgtcagtggatggaaaagtttagaaaagatctgtgtaggttctggagcaacgttttcccagtattctttcagtttttgaacatcatggtggttggaattacaggagcagctgtggtaataaccatcttaaaggtgtttttcccagtttctgaatacaaaggaattcttcagttggataaagtggacgtcatacctgtgacagctatcaacttatatccagatggtccagagaaaagagctgaaaaccttgaagataaaacatgtatttaaaacgccatctcatatcatggactccgaagtagcctgttgcctccaaatttgccacttgaatataattttctttaaatcgtta

SEQ ID NO: 43332 - DNA, 966 bp, Homo Sapiens
  misc_feature (861)..(861): n is a, c, g, or t
  misc_feature (905)..(905): n is a, c, g, or t
  misc_feature (955)..(955): n is a, c, g, or t
ggacgcgtccgcccacgcgtccgatagttttgttgtttgtttgcttgtttgttgcaggctgtaaggcatggctgcttgtttacaaagcatctcattcatattacctgtggagttgcatatccaaaccttagtgagttttgaagctttaagcaaattcttttaaaaaattcttgtatttctagcattactagatattaaaagttaagcaaatagattaatgacgtatacataggcatcatttcacaaggtcagtaatgctgcaggaaaagcaaaattgcaatctacgtatctatggtactaaggaagtcctgtttttcaaaaatggaagcccacttctcagatttttctgaagggcatacaatgaaaagtgaaggggaaacacacacacgcaaaaaaacaagtatttggcttgtcacaggaatctgattgcattaagtgaaaggattatttagaatatgttaatgcaaagctaaaataaaattttccttggcaattaaaaatgctgtgcgctaataccctgctttctatcgtgactcaattcaacaatgtggggaatgtttactacatttccaacttgatgtcaagcaatggggaatacaagttccagttctgcaaagattcgtcaactttcttagctcaagagagaggctgagaaatgcagagaagaataagacataaaatagctccgacctccatgatccgagagtgggaaaaggcccgattattacccataaggcacactctctaaggccttttaaggggcctacaaaaatgttttattttataatcagaagaaaaggaatgaaacattggggattgaaaatcatattggtattttgcaccacatagtcataaataggnatggttaatatggttttactttatatatttatatattaaaaatnattttatatgggttttgccttggggggcccatggaagctatgggggggcnccccgggggaa

SEQ ID NO: 43333 - DNA, 991 bp, Homo Sapiens
gggcactcactcctcctatcccaagtctgtttgactccctccccatcatcctcctcacctcttttcaggcagggtggggatagcagcaggaggagatttgggagcctggcaactcctgcaaggaccgcaggacagcccctctgtggggatgcgtggtgccccatctgccgcccttctgaagaatgcactgccttcactttttactgtgttagagtccatccagactgttctatccaaaaaagtttctttttcccccacaggcaatcaggaaatgattcctttcccgactgcttctgtctagtgcctgggaatcttgagtcaatccctcagtaagtcagtgactagggaaatccctctctgagactcccagttcatgttgcttagggaacctgatattttcgtgaaacctgcctacacatgggcagccaacagcagaacaaatggtggtgaccaaagtgaacaaagaagtatagtcgtgccagcttcgtagttgcccatgtggacaagtcagcaggatcaggacacgaggaagagtaaatgtgagacagtccaatgtgacttctgcgataaacagatttttaaaccccgacattttgcaacatttggtgaaacctgaactttcttcgttgcatatactggcactatctgtaccatcatacaactgtctcacattaaagctatttttctggggcactgatgagtaaggcgctatgttgagttcctcagatcaacaaaacccatttcctgtaggtcttacctttagtattaacgcactacactaattctttgtgaatgtcgcactcccggatacgatcatggcgcataataacttcccaacgtgctcttgtcaattggttgaccgcaactatcttcggggacgcaatttttgtaagccttggttaacgcttctccatcggaccggacaccgggcacagcggccacatacacgcaatacattacggcacatacggttcccctcaccacactttag

SEQ ID NO: 43334 - DNA, 598 bp, Homo Sapiens
  misc_feature (594)..(594): n is a, c, g, or t
  misc_feature (597)..(597): n is a, c, g, or t
tgagaaatttctgtgcttccaatccacaatgagatgcatgattttgttttcatcccatttcccccaagcccctgtaaatcagggaaaatgcgcaactgatcgcctaggagagggcctcgtagtggcacagctggagatagtttcaaagtctaaaccaccagcccatcctgaggaaagcctcctatggaatgtaaagtgcaatcatttcttcagatataagactttccccaacaatgtgattggattcctttatggcaaaatcgagagaagctgccatccacctgcttatgcatttatctcttttgtggacttgtctgaccaccttctatttgcccagagtttgctcaattccaagacagtgcccatgaatgggacacctgtaatgtaacccacacagcggtttgcagagaatgttagccatgacttgggctttctgaaagttggctataatttctctatccctacccacaaccctgggaagttggagcaagaggggcatactattgggctgggaggatttgacagcatttccccagttgccctttaagttcttctatttcaaacgttaattttgcttctctttctaaaaaaaanaang

SEQ ID NO: 43335 - DNA, 437 bp, Homo Sapiens
ggcacgaggtttaattgtaacacagatacaacagggtggccttgttgtgtataatacggtattatacctgcatgtgctctagcaaggataccaaggcaagcatacatgtagctggcttgagtttgtaccaaaacagtccttcaactttgcactgtgccttaagtaattactaacaaaaggtactaggattagctgcaatctctactttcgatgaggaaatcccagtaagctttctgattcaagtacaatgctgccattttttaaagggccacaactatagaattaccactgttggaatttggtacaaaatatgttttgtctattgaaaacatacacggtaaatggtgttgttaggtaggttctgtccagttcttagggacttttttcacattatagcatttgtaccctaaacatgatggtgagattattatatactg

SEQ ID NO: 43336 - DNA, 655 bp, Homo Sapiens
gaatagatgctgctcacagaaccaaatttcctgtgctgaattgtcactcatgggcttgagagtaggagactggagaccaaggtggctagaatccagttgggcctgatgtctccctgttgaaagggctccttgtggaatgaatagcacatggctcctgtggtggatctgatagtggcatagcaccaagtgatgcaggcctgccaggggccacagacacagaagatgctcccggggtcccccatgtactccagacacactgcaggccacctctcccagcaggttgccagtcatgggccccatcatcatgacttctgtccaaggtactgtgtgcagaaatgtgattgagattcaagtcagggcctctctgcccttttccctccagaaacaaaaccaagataatttatcctgaacacggtgaaaaaaggaagggagggaggagaaaaagtccgggtctcacctgggattctctgtctcctgcaacatgaaggatttagcctgggaggaggtggtgagaactctgggagagaaaaaagaaggaaagaatagttttacccatgctgaagttaatttaaaccttcacctagagaagcaaaaaaaaaaaacccacactttcccattttgtgcctcccttcctagagttttagccaaaggttta

SEQ ID NO: 43337 - DNA, 557 bp, Homo Sapiens
cggacgcgtgggcggacgcgtgggctgggagaaatgaaaaaatatatatcaaatatattcagcctggcttcaaattgtaagcatgcacaaattctgtctctggattatattatgaagcttttatgtgaaacatgtttctttgtaatgaaaaccacattggagatgtttagtaatcatattgttactggtaccaagactactagggaaatgcctttgtactttagggaagtacttttggcattttactgtacagacagaaaaaactgagatgtagcccctctcctggaagtgctaattttgaaaaactgctcatatgatgtacatgtactgattactgcctattttaataaacactcttgaaaaatgcatgttgccctgttgctgcctgccctattctcctcatctccccatcattggtacccacttgcttttaaaatccactttatcttgaataatgtaagacaaatatgttctgacataagtatttaattcatgttgccttgcataatggtcagaggcgcatgaatttgtgaaggtggaaataaactatttgtaaa

SEQ ID NO: 43338 - DNA, 691 bp, Homo Sapiens
gtgagtactacctgcggcctgtctcccagcaggagtttgacaagaacaccttggatctcaggcaacagaacggaactgcctcatcacggaagaccctctggaatcaagaactctacatccagcaggacaactcagagaggaagcggaaacaccttccagaccgacaggatgggcctgcagccaagagtgagaaagcagcccccagaagtcagcactggttgcacagggacctgcgtgtgcggtttgtggacaacatgtacaaaggaggccaatattacaacaccaagatgataattgaagatgtcctaagcccagatacctgtgtatgtcggacagatgaaggccgagtcctggaaggcctgagggaagacatgctggagaccctggttcccaaggcagagggtgaccgtgtgatggtggtgctgggcccacagactggaagggtgggacatttgctgagccgggacagagcacggagccgggctttggtgcaactgccaagagaaaatcaggtggtggagcttcactacgatgccatctgccagtacatgggccctagtgacacagatgatgactgacccatgggactcctcccatcccccaggctggtaccagttctgtaccatatgagaaagttgccttcagaaggtgggaagatcattgttccatcctctacttctggtgcagtcct

SEQ ID NO: 43339 - DNA, 909 bp, Homo Sapiens
  misc_feature (599)..(599): n is a, c, g, or t
gtcctggggcttcctgttggctgtgaccagttgaggggctgttcctgggtggggtggcaatgggaggacaggtcagagcgccctcatttgtggggctgcccctccgggtttctcatcctgtccttggtgcctttttctgcccaacaagtccagggaaggccgaggtctcagactcctgggtaggggtgggggtttgagttgaggaccaaagtgccatagcgacatccagaacacaagcccaccaggggtccagcccaggctacccactcccctagggtctcccaggctcagaaggggatgcacgccccctgtggtcaagcctctggtgggcgtcttgcccagttcctgatggttcaaggggaggggggatgttggccaggccccagggcacagccctgacacaggtgtggctactggaggggccttcatacctgcggccccaaagcccctgggcttggctgtttgaggcagaggtgatggactccgggggcctgacacttgggatttgggaggcttcctagagcgctcagcaggtgaaggcagcaggggccatggccgggagccaggcctagctttgaactgagtttcagggctgccanagaggggcagtgggttggggttgtttttactacaaaataaagtacttagttttataaagacaaaacgattgtagccaaatgacaccatatttaataaaaatttaatctggaagtgaaaaaaaaaaaaaaaaaactcgagggcatcttatggtcgggtgcgggagaaaagaagtaaatgaaaatgcccccttgggccttaacctggtttccctggaaccccactttttccttgtaaacaaaggggggtaaaaaatcttgccccgggtccttccccctaataaaggggaaggtcccggaaattataaatttt

SEQ ID NO: 43340 - DNA, 582 bp, Homo Sapiens
aaagcatttctaaagcaccgactggagaggaaggcaacagagacaaggagagaagccgagagacatgtctgcgtgctgccacgcatctgagcgattgctctgtgaagagttgtacactgaacattttcaggggaggctgtttacccaggcaatgtcctcaaacaagcctgtgccggggtgtcctggaatctgtgccaggactgtgtttttagcccttcacctctcagctttagcaggacatgaaccagttataacaagatggccctgcagctggttacaagaatgtgacatggcaggatctatggaaccaaatggaaggttttgaggtgatgtaggtctttcacagttagctttggggaatacagaatactcaaataaagtgctttgttattatttcagagggaatggcgattgaaatgttacaacagagatttcttggtggtagctatttgggtaaaggtatatggatatttttctgtacatgtgaaattatataaaaataaaagttatataaattacattgacaacttgaaaaaaaacaaaaaaaaaaaaaaaaaagggccacttgtcctcaacctgaag

SEQ ID NO: 43341 - DNA, 340 bp, Homo Sapiens
ggctggaccggtccggattcccgggaggcttcatacctgcggccccaaagcccctgggcttggctgtttgaggcagaggtgatggactccgggggcctgacacttgggatttgggaggcttcctagagcgctcagcaggtgaaggcagcaggggccatggccgggagccaggcctagctttgaactgagtttcaagggctgccaaagaggggcagtgggttggggttgtttttactacaaaataagttacttagttttataaagacaaaccgattgtagccaaatgacaccatatttaataaaatttagtctgaagtgaaaaaaaaaaaaaaaaaaaagg

SEQ ID NO: 43342 - DNA, 799 bp, Homo Sapiens
ctatgtctacagctggccagacaagtcggggagtgaccatggtcagtccttccacggcaggagggcctgcccagaagctccaggaaatggcgtggctgggagtcccagtgttgtccccgcagctgtggtatcagcagctcacatccagacaagtcctcaggctaaggtcttgttgcacatgacggggcaaatgacagtcaagccaggcccgcaatgctgtgaggacagttgcagcgcacaaccaggaacgccccacggcagcagtgacacccatccaggtacagaatgccgccggcctcagccctgcatctgtgggcctgtcccatcactcgctggcctccccacaactgcgcctctgatgccaggctcagccacgcacactgctgccatcagtatcagtcgagccagtgcccctctggcctgtgcagcaagttgtccactgacttccccaagcatcaccagtgcttctctggaggctgagcccagtggccggatagtgaccgttctccctggactccccacatctcctgacagtgcttcatcagcttgtgggaacagttcagcaaacaaaccagaccaaggatagcaacaaatgaaccaccagggttgcgagaacgttgctttctggcgcctccactaaacggaagccccggtgtctctccagcatcgccaccctagaagtgagctgggcagtgcagagttcatctccagggagcggtgggtccgaactgtcaccggagttgccatgcaggtcgggtccgcctgggacggacggccgggcagatgcattgcggagacg

SEQ ID NO: 43343 - DNA, 496 bp, Homo Sapiens
ggccggtgacggagactgcccaggtgtggtcaccatgttcctctccgcggtcttctttgccaagagcaagtcaaaaaacattctggtgagaatggtgagcgaagctgggacaggtttctgcttcaacaccaagagaaaccgactgcgggaaaaactgactcttttgcattatgatccagttgtgaaacaaagagtcctcttcgtggaaaagaaaaaaatacgctccctttaaacggtggattgaaaatgactttgatttataaagagaagactgagggcggggatactgattcagaaatcctgtagcgtgtaataaaagaagaggaaatggcatggaatcactgcctcctgtgatttgaaggccattgtgaaggaaaacaatgcagtgaaagaaagttcttcatattaggacagatatcattgcatcacatttatttatctttctgggtatttttatagcccttaataaaaaatattaaaatagccaaaaaaaaaa

SEQ ID NO: 43344 - DNA, 795 bp, Homo Sapiens
  misc_feature (795)..(795): n is a, c, g, or t
cacgaggtgtgggaggcctctcactatctcgtacgccaggtcttcaagagtctacaggagatgttctcggggacccgggccatccagcactggctgaccgagagtgcccgcctcatctcccacatgggctctgtggtggagtgggtcacacccctgggcgtccccgtcatccagccgtatcgcctggactccaaggtcaagcaaataggaggtggaattcagagcatcacctacacccacaacggagacatcagccgaaagcccaacacacgtaagcagaagaacggcttcccgcccaacttcatccactcgctggactcctcccacatgatgctcaccgccctgcactgctacaggaagggcctgaccttcgtctctgtgcacgactgttactggactcacgcagctgatgtctccgtcatgaaccaggtgtgccgggagcagtttgtccgcttgcacagcgagcccatcctgcaggacctgtccagattcctggtcaagcggttctgctctgagccccagaagatcttggaggccagccagctgaaggagacactgcaggcggtgcccaagccaggggccttcgacctggagcaggtgaagcgttccacctacttcttcgctgacccccgtgagcttgtcagtggaaataagctcttttgcaccaaaaaaaaaaaaatgccttatccgccctcctacttagacgtaatatagcccttgtgggtaatatatgaaaggaaatgatttcatttctgccccttccttttgcgcttctcctttgcccaaaccggaatn

SEQ ID NO: 43345 - DNA, 799 bp, Homo Sapiens
ggatctgctgacagtgctgtgggtggtgcctaccctgggcacggaccgtctcctccttgctttcctccttaccctctacctgggcctggctcacgggcttgatcagcaagacctccgctacctccgggcccagctacaaagaaaactccacctgctctctcggccccaggatggggaggcagagtgaggagctcactctggttacaagccctgttcttcctctcccactgaattctaaatccttaacatccaggccctggctgcttcatgccagaggcccaaatccatggactgaaggagatgccccttctactacttgagactttattctctgggtccagctccataccctaaattctgagtttcagccactgaactccaaggtccacttctcaccagcaaggaagagtggggtatggaagtcatctgtcccttcactgtttagagcatgacactctccccctcaacagcctcctgagaaggaaaggatctgccctgaccactcccctggcactgttacttgcctctgcgcctcaggggtccccttctgcaccgctggcttccactccaagaaggtggaccagggtctgcaagttcaacggtcatagctgtccctccaggccccaaccttgcctcaccactcccggccctagtctctgcacctccttaggccctgcctctgggctcagaccccaacctagtcaaggggattctcctgctcttaactcgatgacttggggctccctgctctcccgaggaagatgctctgcaggaaaataaaagtcagcctttttctaca

SEQ ID NO: 43346 - DNA, 944 bp, Homo Sapiens
gcagatcggcatcctgaagccgcacccggcctacgtgcagctgctggagaaggccgcggagcccacgctgaccttcgaggcggtggatgtacccatgctttgccccccgctgccctggacatcgccgcactctggtgctttcctgctcagccccaccaagctgatgcgcacggtggaaggcgccacgcagcaccaggagctgctggaaacctgcccgcccaccgcgctgcatggcgcactggacgccctcacccaactgggcaactgcgcctggcgcgtcaacgggcgcgtgctggacctggtgctgcagctcttccaggccaagggctgcccccagctaggcgtgccggccccgccctccgaggcgccccagccgcccgaggcccacctgccgcacagcgccgcgcccgcccgcaaggccgagctgcgccgtgagctggcgcactgccagaaggtggcccgggagatgcacagcctgcgggcggaggcgctgtaccgcctctcgctggcgcagcacctgcgggaccgcgtcttctggctgccgcacaacatggacttccgcggccgcacctaccccctgcccgccgcacttcaaccacctgggcagcgacgtggcgcgggccctgctggagttcgcccagggccgcccgctcggaccgcacgggctggattggctcaagacccacctgggccatcttacggggatcgaagaaaccggcagccccctgccgaacgcccctggaattttgcggacggcaaggcatggcaggaaatccccggactccccatggcccacgctttcgccggggcctaaagcggggggacggggtccttccatcaaaccccccccaataccctcgcccttgcttagaatgacagggggccgtaacgccctgcggcccgacccggaccccaccgccgttccccttggccgatgcgcgcca

SEQ ID NO: 43347 - DNA, 582 bp, Homo Sapiens
gcgcttctcccgcactaagggaaacatggctctagcgcggccggtgcggctcttttccctcgtgactcggttgctcctggcgccgcgacggggcctcacggtccgcagtcccgacgaacccctgccggtggtgcgcatcccagtggctctacagcggcagttggaacagcggcagagcaggcggcggaacctcccgaggccggtgctggttcgacccggaccgctgctggtttcggcgcggcggccggagttgaaccagccggcgcgcctcacactgggccgttgggagcgcgcgccgctagcctctcaaggctggaagagtcgacgcgcgcgtcgggaccacttctccatcgagcgcgcgcaacaggaggcgccagcggtgcgaaagctctcgtctaagggcagctttgctgacctgggcctggagccccgtgtgctgcacgcactacaggaggctgcgcctgaagtcgttcagcccacaaccgtgcagtctagcaccatcccctcactacttcgcggccgccatgtcgtttgcgccgcagaaaccggcagtggcaagactctcagctacctcctgccgct

SEQ ID NO: 43348 - DNA, 649 bp, Homo Sapiens
gcactgtgaactggctgggatatattctggatgaccacaaaatccaacacctaaggttgcaggggcaaatgccagccttgatgagggtaggaatcttccagtccttccagaagagctcccgagacatacttctctgcacagacatagcctctcggggcctggacagcactggtgtggagctggttgtcaattatgatttccccccaacgctgcaagattacatccacagagcagggagagtgggccgtgtggggagcgaggtgccaggcaccgtcatcagttttgtgacccatccctgggatgtgagcctggttcagaagattgagctggcggctcgccgaaggagaagtcttccaggactagcatcctcggtgaaagagcctttgccccaagcaacctgattttgacaaatctgattaaaatgtgatgctagaacagggatctttcccagtatcttgagtgggtgaccacacttgtcagtgggaggctctgggctgccctgtcggctccttgagggcgggatgaactgctttgtgacttggaaaggtacgctgctggccagcattggagaagaagctgctgagcatggctttctgtagtctttagcaagacacaagtggattttgactttgtatcatgtcatgatttc

SEQ ID NO: 43349 - DNA, 841 bp, Homo Sapiens
  misc_feature (837)..(841): n is a, c, g, or t
gaggctgctgagaccctggaggaatgtgccctgcggtcccggagacagggcactgaccctatcagccagacgaaggtggcagagctgcttggggagagtgatggtagaaggacctcccaggagggccctggagacagtgtgaaattcgagggaggtgaagatgcttctgtggctgtggagtggtccggggatggcagtgggaccctgcagaggagtggctctcttggcaagatccgggatgtgctccgcagaagcagtgaactcttggtgaggaagctccaggggactgagcctcggccctccagcagcaacatgaagcgagcagcctccttgaactatctgaaccaacctagtgcagcacccctccaggtctcccggggcctcagtgccagcaccatggacctctcttcaagcagctgacattcaacccggcccccaggtctgctgggtccccccacccccacagccctcacagcattccccattgctcctggctcttccccacccctaggtgggacagtgaaggggagcagtttaaccagaagattgctgctgcccttagggtctcagctccctcctcaggaatccctcttaggaaggaccctcaggacaccctctctgcaccctgtggtcctctagagtagctagctctgaggccccaaggtgggtacaaagcaggtatggccctcagagatgcagcctgctgctggcttttcagtcagaaggttgggggctggccagccaagctgccttgccctggccgctcttactccctccctctgctgtctcactccaggtccatgtatttcacttttctttaataaaagaatcaggtannnnn

SEQ ID NO: 43350 - DNA, 1140 bp, Homo Sapiens
acatcatgggggcattcagccactcagaaatgcagatgattaaccaatactgcaaagacactcggcagcaacatcagcagggagatgaatcacagaaaatgagaggggactatggcaagttaaaggccctcatcaatagtcggaaaagtagaaacaggaggaatcagttgccagagtcataatattttcttatgtgggtcttatgcttccattaacaaatgctctgtcttcaatgatcaaattttgagcaaagaaacttgtgctttaccaaggggaattactgaaaaaggtgattactcctgaagtgagttttacacgaactgaaatgagcatgcattttcttgtatgatagtgactagcactagacatgtcatggtcctcatggtgcatataaatatatttaacttaacccagattttatttatatctttattcaccttttcttcaaaatcgatatggtggctgcaaaactagaattgttgcatccctcaattgaatgagggccatatccctgtggtattcctttcctgctttggggctttagaattctaattgtcagtgattttgtatatgaaaacaagttccaaatccacagcttttacgtagtaaaagtcataaatgcatatgacagaatggctatcaaaagaaatagaaaaggaagacggcatttaaagttgtataaaaacacgagttattcataaagagaaaatgatgagtttttatggttcccatgaaatatgttggggtttttttaagattgtaaaaataatcagttactggtatctgtcactgacctttgtttccttattcaggaagataaaaatcagtaacctacccccatgaaaatatttggggggagttatatcagtgaaagcaggttgggcttaaaatcctttaagtaatccccttcccaaacaaaaagcccctttactttttttttggaaggcttattatcatttattttttaaaccctccaagaaattatttttcttggccccctacctccagctaattaaccgggttggggtccccctatattccccccaagatccgggggggggcaaaattaatacccacttttttacaaaggggaaaaaacttttgcaaaagtatttcaaaaccttcccaacaataaagcgg

SEQ ID NO: 43351 - DNA, 574 bp, Homo Sapiens
attatgataatatatgaggaggcctcgctatagcaaaaatagttaaaatgctgacataacaccaaacttcattttttaaaaaatctgttgttccaaatgtgtataattttaaagtaatttctaaagcagtttattataatggtttgcctgcttaaaaggtataattaaacttcttttctcttctacattgacacacagaaatgtgtcaatgtaaagccaaaaccatcttctgtgtttatggccaatctattctcaaagttaaaagtaaaattgtttcagagtcacagttccctttatttcacataagcccaaactgatagacagtaacggtgtttagttttatactatatttgtgctatttaattctttctattttcacaattattaaattgtgtacactttcattacttttaaaaatgtagaaattcttcatgaacataactctgctgaatgtaaaagaaaattttttttcaaaaatgctgttaatgtatactactggtggttgattggttttattttatgtagcttgacaattcagtgacttaatatctattccatttgtattgtacataaa

SEQ ID NO: 43352 - DNA, 695 bp, Homo Sapiens
  misc_feature (13)..(13): n is a, c, g, or t
tctcttaaatagngttcttttcctcttgggcctgtctgactggtgtaaatagaagctcagttgatcttgttttaattaacttattactctattaatataaccttggaattctattctaattatgttgttctggctgcttgtagtatcagttcgcccctcttgttagggagatatgtaacaatctgtcatttaattgagcagtctttttcacataacagtaatagcaaaaatcctacctactcagaatcatcttcttaggttgtctcctaaatctgaacaatacagttgttttataaaattacattttgtctcttgagatttaatcaattagaactctttagggagaaaataaataatagaagaaaatatatgcctcatatttcatatgtaattatctgttgatataatttttcaatgtattttgtatttgtgggagcataatgacctgtacattcaatatttttactggtaattcaatttttaaatatgtttttacaatgcttgaacacataaaccttagaaaactggaaaatacgtgtccacagaaagagttattagctactaccttatgtaaagatgcatagaaaatgaaattgttggaaacatgtgcacaaagtgttttatattatatacattgtatttatgaagaataaataaaatattaagattgttttcctgctaaaaaaaaaaaaaaa

SEQ ID NO: 43353 - DNA, 993 bp, Homo Sapiens
  misc_feature (930)..(930): n is a, c, g, or t
gcaggtggtgtgttgggggccccttcagacccaaagctttaggcatgattccaactggctgcatataggagtcagttagaattgtttctttctctccccgtttctctccccatcttggctgctgtcctgcctctgaccagtggccgccccccgcgttgttgaatgtccagaaattgctaagaacagtgccttttacaaatgcagtttatccctggttctgaggagcaagtgcagggtggaggtggcacctgcatcacctcctcctcttgcagtggaaactttgtgcaaagaatagatagttctgcctctttttttttttttttcctgtgtgtgtggcctttgcatcatttatcttgtggaaaagaagattcaggccctgagaggtctcagctcttggaggagggctaaggctttagcattgtgaagcgctgcacccccaccaaccttaccctcaccggggaaccctcactaccaggactggtggtggagtctcacctggggcctaaagtggaagtgggggtgggttaacctcacacaagcacagatcccagactttgccagaggcaaacagccttccaattgcccctccacccccagctgaagcccggtcacctggttaggacagatcaactgcatctacaagcacaagaagacagaaacctgtaagctctgaccccccccccacccccttgagagggtagccggaccaccctcctttagggaaacaccctggcaaggtccctgccccacccgaaattccctccaagggtgcataaaatctgacaggaagtccggcagtcctagactccgagattccattctttaaccccaacggcgcgttgggtgtctgagcaaccccaccctgaaaggggccttggccccggtgttttgcaccaccttgcacctgtgcgctctgcaacggtctctgcnggaaattgctaccccctccccttatgcgccctgggggaaacaatagcgaaaattctcctcggt

SEQ ID NO: 43354 - DNA, 636 bp, Homo Sapiens
  misc_feature (29)..(29): n is a, c, g, or t
ccgccaaccctctgtagagaaatcccagnattgggagtctggtttgaatctttgaagacagaaaggtgatatccggcctgctgttttaaagggaccacacttttgaatacctactggtgtttggcagaaatctgagactggcaccagacacaaattttagacatgggtatcttccctccagtaattcactgctcagagtaatttagaagacaaaaacagaaaaaattgtaatgattttttaagtgttagaatatgtttgttaacatactctgcaaaataaatttcaactaatgcaatagacttaaaatatagcctacggaatactgtgattgaagtttgaaggcttgctggttcttattttgcatgcaagtttagacagggtaaagaatgtataaatttatttgagatgagatacagtattgtaaaaatataacctcatctagaattgcttttaaaacaagcaaaagcctattttagtacaaatgtagggtgggttaggttgttttaaggtagcaaaatacttcaagattttctatctttttaatttttcatgaagacagaagaaatactttcaccccaaccaatgactgtaagatcttgagagtatgttcttactcatttctgtaattgcagtag

SEQ ID NO: 43355 - DNA, 672 bp, Homo Sapiens
gggatcacaaccactgcagtctcccagcaggtaggccttgccaagcctaaggctcccatccaatctagacagaggggcgctcagagcagacttgccgtagcccatgtctggtgagcacaacagggaatgaatgggcactccactcccccgtctctctggcccagccctgaactagatgagctgcatttcatggagcccattttaaaacctctttccttatgactttgttactcaagtccagagttctctgtgcacttctgctagataaggagtgtaagccctgccccccagcactggcagcacgctgggccctccccacacaggacaccgtgcagttccgggggaagctgactcaaatcaaccttgaaatctcatgaaaacaaaatgacttgtctttttatttgatagtgtaatatcattcattttataaattttttagggtttttctcgttgtaatattgtacagttttgcatggcctggtgtgatcattttttggttagaatataatgctgacaaatgtggatggaggggaagatactgtttagcctatcactccttattttattttgtttggttttatgccctcagtgtcttagggaactttataagagatcctctgtaccaaaacaatgatgtggattcttttgcacagaaatatttaaggtgggaag

SEQ ID NO: 43356 - DNA, 739 bp, Homo Sapiens
  misc_feature (656)..(656): n is a, c, g, or t
  misc_feature (681)..(681): n is a, c, g, or t
taatgggaaggtggcagacttaagaacgtggatatgaagtgcctagaaccaccacaacctggctgtgcgtctgtccctgtgggtgtatgtgcttgtgtgtgtgatgcatgtgagcgtctctggcacacacacttggacatacagttctgtgtgcgctcattcttattacaggagtgagcaaaggaagcatttaccccgatggttacctagaccacgattatttggattggggggaggggggatccgttttttttttttaattttttgttatttctaagcaaacctcttttgtacttttcttacttctaatatccatccctggactttttgtattccaaatgtttgtgatgctgagaagtgaagttcattttatgtgatcttcatgcgtcgtaatctacttttggtagataattaagattattaaaccctcatttaaatgtgacataaaatacagctttaagcacataaatacaaagcagcttccatcaggaacatggagcaggcagggactccattttacagaattactgagatttctcagttgtaaaacatgatgtcatcctgcatgcctcctggaattctccaatggggtcgccaaacaacaaatggagaaaaaaagttttacttccttgcattcttctacctttaaatagcanagtaccactaccaccaccacctctngcccccttccctcttttcttaaacttctggcatttcagagctcaacaggctacccctg

SEQ ID NO: 43357 - DNA, 760 bp, Homo Sapiens
caaggggagttggcgcaggtgaggactcagacgacgtccaccgtcccaaggctgtcactagtatttctctgaagtgcctgaaggtaggaatgggccggcgattgggaccagctgggccccaccacggccacgccaggcaaagcgccagcagccctgcactccacgctggccaagaaggccttccacgcagaatgacaagactgcaaaaatccgatgtgcttccttccctggcgcagtcgctcctcgagccgctgccccccacccaccctgcacccctcgccctccccccaccacagaatctaagacctttcagcttcgagccagggggcgggggatcccgagcaaaagccttccgtggacatcaggccccgtggcctcaagggctcccagggcaaacctaattccccccaaaacgtgaagtcggggaagctgcggctacacattccacaaagtgctggcacttacacccacaacccggaaggctgtggaccgattcctctagggtggtgacctcccattagcaaacggtgtcatggtttggaatgttcattatcgccaagaacctggttagaggcataaagaccttttttcaccgttacctaattttttcccctttcaagaattttttttttttttggtgtgttgtacagcagtataatttttcacttatttattccatcagtagatatggtttgtacaatgtacaattgtttcatttcagaaaataaaaatttcaaatcatgaaaaaaaaaaaaaaaag

SEQ ID NO: 43358 - DNA, 474 bp, Homo Sapiens
  misc_feature (193)..(193): n is a, c, g, or t
aaaactgggagagtcaaaagtgagcagaagctctccatttctacttctgtcacaaaccacattaaattgtaaataaggcccttctccacttgacttcaggcagcagattgtctagaagcctaaggacagcaatttctctgacaagacaaagtagatattttataccaggggttggcaaactactgcccacggnccgaatttggccagtctgtttttgtatggtgcaaactaaaaatgatttttacatttttaaagagttataaaagaaaaaaatatgtggtctgtgaaatctaaaatatttactacctggcctgttggaggaaaggtttgccaatctctgttttataccattaactatgagattaacaaaaacttttacctttgtgcagaaggttaaaaaaaaaaaaacatggttaaggaaaaggagacatgttacctcttcatacactcctataactgtggcattgcaaaaaa

SEQ ID NO: 43359 - DNA, 927 bp, Homo Sapiens
  misc_feature (777)..(777): n is a, c, g, or t
gtctaggagcgaggctgggtggcgaattccgacgaggctgatgcaactaacaagtactggggccagtgatcacaatccagggttggaaacaggagtgaagcccaccagcctgcctggctgatggacagcaggctctgccttctggaggcggcttatatcccaacagcctgaggcagggctctgtggcccaggccagcagtggctgcctcttttggttctgcatggtacattttgccaaccctgaggaccagttcttggggttccaggcctcggccttcctgctccacgtgctcaagcccccacatggggctgcgacaccatctggctcctcacagggaggtccagccatgttctctgggctcccagtgagccccctgccctccagctacccccagaatccatccttcattcctccaccaagctcctgtgtgagctgcagcacccacacgggggaagccctgcactccagcagcatcttccagccttggcacagaactgatggcaaaggaagggctgggttttcagcttctgggacccgaggaagaccccacctcactcctccttccccagtacatcagactggttaggaggcatcccagaaggggcagcctcatgcccaggtttcagccctaaaggtaatgattgtcttgactctgccttggcatttcgctcggaatcacggcagactttggagtgtttcttcaaggcaggcatctgcttatgagcaaggtcaaagatttttcaaaatattgtgcattaattcattaaagctactgntaaatatttgctgtttttagattggcgtccgtgctaattctgcaggtgtagcactggatattttatctcatttctgtgccaagaaagttcatctttatgtttttctaatacacaatcttgatcatgttttccaaataaagcttcagctcc

SEQ ID NO: 43360 - DNA, 598 bp, Homo Sapiens
  misc_feature (584)..(584): n is a, c, g, or t
tagtttgtagcggcaacatggcggccttcatgctgggctcgctgctgcggacgttcaagcagatggttccttcatcagcttcaggccaagttcgaagtcactatgtagactggagaatgtggcgcgatgtgaagagacgaaaaatggcctatgaatacgcagatgagaggctacgtattaattcactcaggaagaataccattttgccaaaaattcttcaggatgtggctgatgaagaaattgctgccctcccccgggatagctgtcctgttagaatcagaaatcggtgtgttatgacgtcccgtccgcgtggtgtgaagcggcgctggaggcttagtcgtatagtcttccgtcacttagctgaccatgggcaactttctgggatccagcgagcgacatggtaaatgagctccagaacctattgagcttgcagggaagccaagcttgcagttccagcaagcaaagattttttttaatagaccaaaccctaatctctacaggggcccagtacagttgtttggcctacctgatgctatctctaaactacttttttaacaaacatactgttcccatacatagtacanagagtagcataata

SEQ ID NO: 43361 - DNA, 562 bp, Homo Sapiens
catcactatattgtgaagctgtaaaaatatatatatatactttacaagagtttactaatggatttcaaaactggtctcaacgtttataatacatatctgtgtttggcagttgtcataacccaatcctacattcagccatcgggacaagtctgtcggggaggtagttcatggtttacaagcctttgctttttaactgtccaatttcctttaaagcacaactagctatttgtttacaaatgatatttttatgtatattttgtatagtgtatcatcatttttgccaaatatgtttttcattataaatgagtaaagagtacttaaggttgcattcatgtattacatgtttgttgttgtaaacctctccaatcagctggtagaaattctcctcattgtgttctatttggtcagtctctgtgtgattgtaggatgtgctccttggtagtactcccagctgtagatttaccagcttaaaagtttgttaggatctgtgcaataaagtgtttgcagtcttattttctctaagaaattccttatggacgtcataattgttgtatattgaaca

SEQ ID NO: 43362 - DNA, 873 bp, Homo Sapiens
tgaggataggaccttagcattgtagctatttaaagtttctaatgtgcacccaggttgggaatcaccaatgtgggtgtgaaaatgcctacaaagggttttagtgccttagaagtcctaagaagcccaatctgtatcaaagcagatccattttgcaaggatctttcttttagaactttctcagttctcttagtaagaactttagaagtaatcttgataataagcacagacagcctaacagcagaggcaacttaaataactcctgagcagttggcactagaacagaatacttggaatgacaccaaagttaaccaagtccagcatatgtccaaagagttaagtgtttcatttactgtagcattctgggtgagaaattggttgctgaaatcttaagacagtggtctcaaccttggctgcacattggaatcacctgtagggttttaaagcatccaaatggtaattaacaggcagcaaaacttcagaactagttctgcatctactgtgcaaagatcatgattaactgtcaagacactggtagaacagaacaagcaaaagattaagagttcaaaagtaaatgcaccaatttaacatgtagtgttattaccaaattacaaggcctagacagctgggcaacatggtgaaaaccccatctctacaaaaaatttttaaaaagttggcaggcatggtaatgcgcgcctgtggtccagctgcccggaggtgaggtgggaggaccttgagcctggagggtcagtgcaggaaacctgtctgccatgtatccgccggcccaaaacctttataaaaaacttcttaaaaaattaagttcacaaatggtatttgcacagtgacggtcgaaaaatccaccagattttcgcaacg

SEQ ID NO: 43363 - DNA, 801 bp, Homo Sapiens
ggggggtggattttggcatcgtagcatatcgattaaagaataatcaggacatcagatacattttaatacatagctggggccttatgttgtagatgaagcttgctgtttttagcaagttcctgggtttcacattcatttctgctgcatctagtagctccacacatttcataacctgatctctttatttgtatgcaaaaaatactgtcttaatacagagcagcatttttgtaacaaagagactcgctggagctatttggtgcttgaatgtgaccatcctttttacttttgctaagccttatttaaattttgtataccgtggaatatgtagaatttgtcaaatcattttagtgctgaaggtttttgatttcttgtttttgtttctgttgttgcagtttctttggtggcttgttttgtattgtaagatggcacttgctgatataaatactaaggcactaagagaaaatacagataagtatttataagttgcttgggaaccatagcagaattttttgtttggttttgtaagagaaaaaaaattaccaataaataactgatctagcacccaaactctcttgggggatgtcttagtatcttcacgctataaaattgttcatctaagcacagcatcatcttatggccttatggattgtaaaatctctagtgaggctataaactccactctgaaaacaaaggcataacttaacccgactgctcaagtggtccttccgttgtaaaatggatggggcttttgggaaaaagggaaaaaaaccacccaaaaaagggaaaaggaaaaaaaaaccc

SEQ ID NO: 43364 - DNA, 780 bp, Homo Sapiens
atgaaggaagaccattagttgatttgttggtggcattccccttttgggaaagcaatgtaaggttatgtctgtgtatgtcattcacacttaggcaagcatacacaggcacatggctttaagaacacactgatgccttgataattaaaaagaatacaagcattccatgtacacatgttaattagcagttagtgactgggccaacactttctcataaaaattggccttttacatgttgtctaattatcatttttccccaaattttgcgttgtaggactactgttcgaagatttttggaagaatactgagaacggcataaagtgaagatcgacatttaaaaaatgaggtgaaagaaagctatagtggcatagaaaaagtataaagctcagttagtttttttattattattattattaaaagttaattcaggactgatgtgacctaccagatttcagaacatgtgttaatagtatatatgccactgaaaacttaggtcctgtatcatacttttttctttaagactttttaagaaatattacttaaacatgtggcttgctcagtgtttaattgcaagttttcaatcttggactttgaaaacaggattaaacgttagtattcgtgtgaatcagactaagtgggatttcatttttacaactctgctctacttagcctttggatttagaagtaaaaataaagtatctctgactttctgttacaagttgattgtctctgtcattgaaaagtttagtattaatctttttttaataaagtattgactctgaa

SEQ ID NO: 43365 - DNA, 724 bp, Homo Sapiens
  misc_feature (624)..(624): n is a, c, g, or t
  misc_feature (630)..(630): n is a, c, g, or t
  misc_feature (681)..(681): n is a, c, g, or t
  misc_feature (693)..(693): n is a, c, g, or t
  misc_feature (717)..(717): n is a, c, g, or t
ctctgattaattagttactctgactctggtctgccgagatccatttccaacccagttgcgttgggagagggttgggaggcagcagagcatgggtgacagtgggagcacacgacttccttggagcctgggcctttgcgggtcccaggtggtcaggcagctggagcagaagtggaaatggcttaagatgctcatagcccagccccggctgtgtctactccaggccaagcctgggctgcagtccttgctatgttccccccagggccctggggggagggatcagggtgctgggggtttcctaggacaggggtcttcccccttgagacaccaagctctggctctagaagagctctctcctggagtggggagtctggaggggactgggtgggtgcaggtaaagccagattctctctggaagggaattttctatgaatggatgatttccaggctcagggtgggctgtgtgttagttctgagcaaatccctcaccaagacccttccctcccaagccctcaaagaaatgaggcaaagcccttccctgcaagaccccttgtggacgtttttgcatctacctgatttttagccccacccagggagactttataccccatgatcctgccccaccgntgctgntgtctgcagctgggtctagcatcacagggaagggggggatttatactcacnggaaagactacntgatcctaccggaaaccaacctgnttactgg

SEQ ID NO: 43366 - DNA, 790 bp, Homo Sapiens
  misc_feature (9)..(9): n is a, c, g, or t
  misc_feature (664)..(664): n is a, c, g, or t
ctcaaatcntcatacgccaacgtgtttggggatggtccctattccaccttcctgactagctctcccatccgctcccgatctcctcctgcctgaggccacttatcagggcctggagccctgatggaagccataggaactccagagttgccaagccatagctgagaagcctggtggttttcctctcccagtgaaaaaatgggttcagggtcttgtccttagctactagctctagaaaagtcccaaaagcagcagaaggtgaagcaggaagcacttggttttctccttcctgatatagtcacctgttggaagtgttaaaatttcctcgacaggccttaaatttactactacattagggtaccacattttaacttaccatgactttgctccttcctttcctgagaaaatatttccactggattttttccaccagtccccttacagccctcattgttttaggaatctctctcaggttttttctgacctaaaccagcaggaagtcgtcctgggctgtaagcaccatcacttgcttttttttttttctgatttcacaagtgtggtgttttcccaaggctcccttcccaagctcagtgcaaacctctcactcccaagtttctttgaggccacttgcccccaagcacttcacaatagaccctcgagggcttgngtccatttggccttttacaagtgtaatgccaatttcattgatttttggttcttttggcctgatttggatctctggaatgcatttattcttgaaatatttgggggattttacaaaaaaaaaaaaaaa

SEQ ID NO: 43367 - DNA, 627 bp, Homo Sapiens
  misc_feature (540)..(540): n is a, c, g, or t
  misc_feature (580)..(581): n is a, c, g, or t
  misc_feature (604)..(604): n is a, c, g, or t
caattttgctttgccatatgagttttttaaagtaacttgttcaatttactcacgtgttctaaacatctttccattacatgttctgtattttaatacattgcatattgacaactaggttctataatgtatgctttgaaatttacttttttatagtttacaggaattttattttttgtgcctatttctttttacacctatgtgaaccactatggaacaacttaaattttgtgccataaaaatatttttgtggtaaggtactatttttttagctctagggatatatcagcaaaaacacatcatgcaatttgagacacataattttgtgttgaatgagcacaacataatttgaagcattgcaaggagatagccagacagcagaattaaatggtcctgtctttttcatttttaatttattgtcatacatgggtttcatatttataacggcatcatgagctcattgcacttaatacctgcaatgtttgctactgtaccacaattgattttcaatactttattacgaaggatgaaactgtaatggtntattaacaatgcttctggaaatgaatgcattttaaagcannataatctttttgatagacctttntacaaattccttggcgtcgtttt

SEQ ID NO: 43368 - DNA, 835 bp, Homo Sapiens
  misc_feature (775)..(775): n is a, c, g, or t
  misc_feature (779)..(779): n is a, c, g, or t
tgactctatatcttgtacttaataaattataggctcattttgttctctgctagtttaaagtaattcgtttaataatagatgtgtttttagaggaaatgctgttacttggaattaattttccagttatacagtcttctataacttactaataatattctatatgtactttatgtaatttccctaaaaagaatgaactaccactacactatggtgttaaaccaaaatatagggaaaataaacactaactgctgcttatggataatgttgcaactacttgttatgcatataaatattttactttttcacatgtatagattgcatttcttaggtgttttaattttttaaatatatttatgttttaaaaatttagttttgttttctgttttataactatagtgagaatgatgttttgaagcaaaatttttggttataaaatagttttcaggattatatatatatatactggatcctatcgccttttagtagaatatgaaatattcttttagaaatccaatataaataggttataatagccatattctttattactttattgagatataatttacatgccataaagtttacccttaaaatatataattcagtggtttttagtgatatttacaaagtggtacaatcatcatcactttctaattccagaatattttcatcaccccaaaaagaaatcctaaatccattagcagttacttcccattcttcccttcctccagcccctgaaaacactaccatctacttttcatctgtatggatttgnctgntctggacatatcacataaatagactcaaacaatatatggctttttttttttttttt

SEQ ID NO: 43369 - DNA, 702 bp, Homo Sapiens
agaaaatgaagccaaatcaagtgaattaaattcctcacaattattttctttccctgaggtttgattggcacagcagcaaaagttgaggccaccccacttgtgtccactgtttttagaaaaaaatgaatggcttcctgccattgtggggctggactcttgggctttcttggtgggagcggagaaggggcctcccacccttgtccgagttgcctcccactggaggtcaggagtctacactgcagcctcaggcactgtggggagtgcatgcctggggcctctgggtggggaccatggacaggccctggtcactgtcctaacctttgtcaggacaaaggtagcaagaggatttcctggcgggtgggaaggaatggctggggcggccagttttgacacgccccagtgccctggagaacaaccagggtcatctgcacttgatgactgctccccgacccccagcccggacacctcattcccctcccactacagggatcaagtgacctgggaagaaccgagttcaacaccaggatgtgtttccttagatttcctttcctaggcgatttccagggagagccctgattggacaatcacatcacagatcacactgcagtttccatgttagcactgtgggatgggtttttaatcaataaaaactggggggttcttctcaccgactctccacttgcccaaactgccaaaagctgg

SEQ ID NO: 43370 - DNA, 690 bp, Homo Sapiens
ggccaggaccaggatgatctaacctttcccttcaccagaaacaaagctattgccagactgaaccctaaagtcaagcagtcacccactgcctttgctgggagcagaagcccatagcaacaagtgacctgcccctcagactcaagatcccagataccagagctggaggagtcatagggcattactggtaggcaggaaaactgagggtcgaacaaatggaagaatgcggtgatcatagaccaaagacacacagataattaaccccatgtgtccacccaggccaaagttcttcctgctaccccacagtggatgtccaggcagatggtccccacatgatggggaagcagagggcatagtgtggttttgtgggacttgttcatgttttgtagtgtgggctcaacagtgccaaaggaaacactagggaaaagttggtgaaacatgccagctagcaggaccagtaaaggcataatcaggcatttggcaaagcttgcttttctaattcaatgataggttctaataggaaatcttcgaagattttttaaaacaatgttatagtggcacttccccagtatggaataaataacatgcattcttttttcaatatactgtcatattcagatgtcattaaaataaatggatgagtcacagaggagctatcagatgctctcatgactaccataactcaaaaacaaa

SEQ ID NO: 43371 - DNA, 576 bp, Homo Sapiens
cggaatggtggatcgtacatttgcacccagagctactaaacgctcagtgaccccagagaccattaatttcccagagtgaaggggatgggggtagagctaattggaatttttattatccaggactcatcctaagaagaatgttggcctctcttcatccctggcttagccgtcaggtagaacgcttactcacctgacaccgacttcttagagaagcgagtcttttttgaatggaggagcgatggtaaccccactagggggcgcccatgatcggctcccagtgcacccccttaagggtaagcaggccgcatatctagagtctgatagtctgtgtgtacataaggtctagaagtctgtggaaacgccctgaaacttgtagtattatcttaactaccctcttatgttaaggtttacataataggatttttaaacaaatgtgtttaattttttaagatctcttgtattaaaattttcttttggaataagctgtggaaattttgttacaacctggttgagatcaacctctttacaatgacacaaattgtgacattttataaattagatacttcagtgaaaaaa

SEQ ID NO: 43372 - DNA, 616 bp, Homo Sapiens
caaacaccagagcagtactccaatattggagagtcgctgggggcacagggctttgaatcagggtagtatcctgccttccctcccctgaccccacatggtctcagggcccccttagggccccctaccccactgatagcttcctccttctctggcacaaggggagccccagggcttgggggagggcgtaaggtggggggaaatgccactgcttttagcaaaagcctccctcccagaattagccagcttgcctcctgcaccccacccccaccaaccaggggagccactaagctgactaacaactgtcccctcacccaccagctatttccccagggtagagtgggcaattctcaccttcaaagagtccccgcctgcccaggcctttggcacagaggctgagtggacagtcaggagagaggcgagaggcaaggcgaagcctgtgtccctgtttcagttgcactggggttggagcccagggtaggggtttccagcttccccaggctccggccttgtcagtctctttgcatgtgtggatttttctgtgtgtgtttctgtttgggtttttgttgttgggtttttttttttttttttaataaagaaaagaagatgtgtatatttt

SEQ ID NO: 43373 - DNA, 812 bp, Homo Sapiens
cgggattgaaagaaaattgttccttttttttgaaaattttatatactttataatgatagaagtccaaccagttttttaaaaaataaatttaaaatttaacagcaatcagctaacaggcaaattaagatttttacttctggctggtgacagtaaagctggaaaattaatttcagggttttttgaggcttttgacacagttattagttaaatcaaatgttcaaaaatacggagcagtgcctagtatctggagagcagcactaccatttattctttcatttatagttgggaaagtttttgacggtactaacaaagtggtcgcaggagattttggaacggctggtttaaatggcttcaggagacttcagttttttgtttagctacatgattgaatgcataataaatgctttgtgcttctgactatcaatacctaaagaaagtgcatcagtgaagagatgcaagactttcaactgactggcaaaaagcaagctttagcttgtcttataggatgcttagtttgccactacacttcagaccaatgggacagtcatagatggtgtgacagtgtttaaacgcaacaaaaggctacatttccatggggccagcactgtcatgagcctcactaagctattttgaagatttttaagcactgataaattaaaaaaaaaaaattagactccaccttaagtagtaaagtataacaggatttctgtatactgtgcaatcagttctttgaaaaaaaagtcaaaagatagagaatacaagaaaagtttttgggatataatttgaatgactgtgaaaacatatgacctttg

SEQ ID NO: 43374 - DNA, 587 bp, Homo Sapiens
aggaaggcctggaggcaggggcaaaggtgacgacagtgcccctatatccttaacccatactcctctgaggcaaacaggcatgggaaaatggaagggttgaggatggaccggagaattggaacttcagaataggtcaaaattccaaaaccatggacatttttttttgggagaattgagattgtagacattttttttttcttaaatatgatcaaggaaaatagcttccagaatgtggtggttctgggcaacaaatgagattgtggcgacgtggagattaaaatatatgtatttgagctggggaatttgaatattgtgagtttcagatgttggaaatttgggattttgcagttttgtcttttgaaaatgatcaagtcttgtcagttcgtgccctctttccccatgttccctgggaagacgggtggtggcagagtgagaaggccactggttctgtgccgcagcacgcaaaatttagaattctacagactagctctatacgtagtgaggacccagatttagagaaactgaccaatatttatctccgcatttgtgtgtgtgtccaactctgtaggccaataaaccaacaagcc

SEQ ID NO: 43375 - DNA, 570 bp, Homo Sapiens
aaaagagtttttctgaagatcaattagacattttgaaaatgatttaaagtgttttccttaatgttctctgaaaacaagtttcttttgtagttttaaccaaaaaagtgccctttttgtcactggattctcctagcattcatgatttttttttcatacaatgaattaaaattgctaaaatcatggactggctttctggttggatttcaggtaagatgtgtttaaggccagagcttttctcagtatttgatttttttccccaatatttgattttttaaaaatatacacataggtgctgcatttatatctgctggtttaaattctgtcatatttcacttctagccttttagtatggcaaatcatattttacttttacttaagcatttgtaatttggagtatctggtactagctaagaaataattctataattgagttttgtactcaccatatatggatcattcctcatgtataatgtgccccaaatgcagcttcattttccagataccttgacgcagaataaattttttcatcatttaggtgcaaaaaaaaaaaaaaaaaaaaaggccacatgt

SEQ ID NO: 43376 - DNA, 349 bp, Homo Sapiens
  misc_feature (338)..(341): n is a, c, g, or t
tgaggcctcggtggggccagtgcgacgctggcttaaggagctggaggggttcctaatacacatttaattcagtttctcttccctaagaggctgccggagttggggcctcctccagcagagaccctcggacccctgcagggcctggacttggggtgaacagggcttcagtcagcgcaagtattccatttgcatttggtaatttttcatgccacctatttatgaatatataaatctttataccaaatctattttttaaaacatggaaaagttgcctttatggaaacttggcagagccagagtgtacacattcctaaaccattaaacagatttctataacnnnnaaaaaaaa

SEQ ID NO: 43377 - DNA, 531 bp, Homo Sapiens
  misc_feature (522)..(522): n is a, c, g, or t
gcacgaggaggtcaggggccctggccaagccagatctggagctgctgctccctgctgcggagaccgcggaggcttcgcgttgaccaagttccttaaagaactggctgatggggcaggaggtccaggcctgggctctcgggccctcctagagggccattggagcttgcagctcagacccccactttgagttttatttatttaaatagtagttggatgcttggcacgtcgtcctgtaataggaaacccttgcctcatcagttttcctgatttacaagtgcaatattttagccaatgccttgggagaagctgccatgcaaaggtggacaccattctccagcttcaggggatatgctcgtcccgggcaccggtggcaggcagctggccttctggactaaggcagcctggggggacactgcagtctggctacacacagagatctggcaccccctgggtggagtgtccctcgggggctttgggaaagcatggaccctcagaccacacagtagccaagttctggagcanataaaaggc

SEQ ID NO: 43378 - DNA, 497 bp, Homo Sapiens
ttcatttcgaatatattagccaggagcatagttagatgttacccaggccatttatcatcctgttaatgatgattttcccgacccttgtgagatcagcgtgacaggtgtgtgtgtgtgtgtgtgtgtttctgtgggtgtgtggttttggttgggtgctgccaggtggcaaaggcatatgtaaatacatctgatctgcatctttatttcacagttaactaaaagtaaaaatgtctattctgattccatattgattttgtctaagatgtaaaaatttgagttcatctttggccaaaacctacctgaattaacatacaaaatatttgatttttaaaatttaattcatatctcaaaatcaattaagtattctcagatcctatatcttggttaatatgctcccagatactttaaacatggcaaccttttggcctaagagaatgtttgttcatggaaaaaagcttttgagatgagagggtgtcttactttcttgtggcaattga

SEQ ID NO: 43379 - DNA, 558 bp, Homo Sapiens
tcctgacctacctcaggtggaacggtgagcagggaacatgtcggagtccttcagagaatgtgatgtgaggttggatcaacagtgtgggttcctgtcctgtttccccttcctctttggggctgaggaggaggttaaaggccaaatgctgtttcccaacaccccaaagtctgcacacgtctcatgaatgcatcacatttctgtcatatggatattagccattccgaaatctgtgtaatcaacttcacattattcaagttacaaatcactgtgtccatagaaaaactgtgctggtatttgctggacaaagggttgggccccttttatttttacctgccacccagcatctcccccacctgccccttctgggtgacacagccggtaaacggaatcacgtatggttctttctgtgggtctgtggcacagcaggaagagcccggtgccgccagcaccttgtggaagaccacacatgggtggtcccacagcatgggaccaggctggactgagggatgcccagttgtaacaatgctgctgtcactgtctcattaaatatacatcctt

SEQ ID NO: 43380 - DNA, 711 bp, Homo Sapiens
atccacaatttacattcttggagctatcatctgtaccgtattgttgtgatctactgattggcattggcatagtagtaggggtcaagtgacagaatccgtgccagcagtctcctggttcagaagcaattcaagaccctgatgatagctctccagcaaccaacacatggtgacatggtgattgtgccaacttgttgctcagttataatgcagggccagtgattggtttaagtgaagaccatggttgagatcatttgtctttggtctaatagaatttgagtctagtagaatttgagtctccagggaaagagctacttgaccaaattaaactagtagcaggtagagcatgaatgacagcatattataccatcaagatgttcttagagcagtgtatggatggatcgattgtactgccatcagttgtgactgacgttgtattcaaggagaaagagaaacttgtttagaaagcactttgaaagttttttgagtacgggggtgccctgtatcaccccgttatggttgaactttctccttcaaaattaccagacttggcagcagtggcaaattattgggctaaaagacttaatcagacatattctgggttcaaggctcctaatataatacctggtgcaaacattatacttccactcattcagatggttgcatcctgccaggcatccagtgggactgggaatatggacacttgaacattaa

SEQ ID NO: 43381 - DNA, 512 bp, Homo Sapiens
gtaagtttaggctttcgcggaggggaggagacatggagcctgggaactccttgttctcccctctgctgcctctccccaccccttaaagcagttggtagaaggaatggtatttgtatggggggagggaggctggaatggagaatctggattctctcctcttccccattctccagagggagggaggtggtgaggaagaggaagggaggggcaggatgggccatggaggtgccccacccccacacctgacaatcacccacactcctggggctcttcctgggtcctggggcagggcgagtccaagtgtgaggctgttgattggttttcaatatttcttttcgtgctgtatggtgatgctttcttagtattctacacaataagaaaagacaaagtcctcgagattcttatgagtaggtttgaaaactctttcactatattagtgtaaagaggtttactattaaaagaaaaagaatacacgtttctgatacttaaaaaaaaaaaaaaaaacaaaaaag

SEQ ID NO: 43382 - DNA, 581 bp, Homo Sapiens
tcaaaaccgaatctggggaggaaactgacctcatttctcccccgcaggaggaagttaagtcttcagagcctactgaggatgtggagcccaaagaggctgaagatgatgatacaggacccgaggagggctcaccgcccaaagaagagaaagaaaagatgtccggttctgcctccagtgagaaccgtgaagggacactttcggattccacgggtagcgagaaggatgacctttatccgaacggttctggaaatggcagcgcggagagcagccacttctttgcatatctggtgactgcagccattcttgtggctgtcctctatatcgctcatcacaacaagcggaagatcattgcttttgtcctggaaggaaaaagatctaaagtcacccggcggccaaaggccagtgactaccaacgtttggaccagaagtcctaacagaatggtatattcctctggaaaaagatgaacgtcaccaatggattgtgctgctctcgtttcagctttgatttttttgtccttgagaaccttgtcctccctgctgatttgtttctaaatcaaaagaaatgaagaaaaaagtactgt

SEQ ID NO: 43383 - DNA, 587 bp, Homo Sapiens
tggactttatcttcttgcaaaaatttctacaaaaattgttttcttcatccttgtggtgcttattcatctgagccgtctccacagtcccaatgcctctgctttttgttttacttttgtagcataaggtttttgcttttgctttgccttaagagttccctagggagttaccagggcttttcgttttgtgtagcttttgcagcatggatcaaacattggcttactgtgctaatgtgtgaagagaaaaaattctctaaagcaggtgagctttaatgaacaaatgtgtattttatctgagtttgagtagggtgcgttgtggattttgttttttgggttttttttttttttttgtaattatatgaagaaagtccagttctcataaatattgatcacttaaaaaacttactctttcttgaaaaggtacacatgtaaaatttaggaaaataactaaagtaggggctggaaccataagaagaatgtttatcagcacgttcatttattattttggatttggaacttggctttgtttttcaatagtgacaagaatggttcagttctaggaatgttctggaagatgctgttaattttac

SEQ ID NO: 43384 - DNA, 721 bp, Homo Sapiens
  misc_feature (538)..(538): n is a, c, g, or t
  misc_feature (694)..(694): n is a, c, g, or t
cttgtgggagagcttatacagagcctctgggggaaaaaagagcccttatttgtggggtgagattgggggttggaccagagtgatgtcctctctcagctatcacatcacaagataatgctggctccaaacttcctttctgtgcctcatcatgcaaggatcttttttccctcttacaaaaacaggtaaaaagcctcacccagatgacccccatccctcataccatggagtcatgagctgtctgggaagaatggacgtgctgggaccaactcaagaccttgttttgctgtcttcatcatcttacctgtgcttggcccacagtctggctcatgatgtgggctcagtaatgtgcgagaaagtgaaaatgccactctctccaccccattttacagaggagaacaccaaggcccagaggaagttaagggagagtcaatgggcagagccagggctaggccctggtggtgtgtggagcacccaggcagacccagtcctggttgggatcacacccacgggtgctactgcacgtaacactcctccttangcctggaggccaaggtgtgggtccccacgcctgatctttgaaaacactacacagggctgctgtcacttcccagggcccaggcctcagcccaggcctcgggaccaactctttgtataacctacctgaatgtattaaaaactaattttggagaagcanaaaaaaaaaaaaaaaatcttgattctg

SEQ ID NO: 43385 - DNA, 694 bp, Homo Sapiens
ttttttttttttttttgaaaaatactgagggatcttttgataaagttagtaatgcatgttagattttagttttgcaagcatgttgtttttcaaatatatcaagtatagaaaaaggtaaaacagttaagaaggaaggcaattatattattcttctgtagttaagcaaacacttgttgagtgcctgctatgtgcacggcatgggcccatatgtgtgaggagcttgtctaattatgtaggaagcaatagatctcggtagttacgtattgggcagatacttactgtatgaatgaaagaacatcacagtaatcacaatatcagagctgaattatcctcagtgtagcttcttggaattcagtttctggaactagagatagagcatttattaaaaaaaactcctgttgagactgtgtcttatgaacctctgaaacgtacaagccttcacaagtttaactaaattgggattaatctttctgtagttatctgcataattcttgtttttctttccatctggctcctgggttgacaatttgtggaaacaactctattgctactatttaaaaaaaatcagaaatctttccctttaagctatgttaaattcaaactattcctgctattcctgttttgtcaaagaattatatttttcaaaatatgtttatttgtttgatgggtccaagaaacactaatataaccacag

SEQ ID NO: 43386 - DNA, 764 bp, Homo Sapiens
ccaagctctaatacgactcactatagggaaagctggtacgcctgcaggtaccggtccggaattcccgggtcgacccacgcgtccgcagccttgcatctgagagtgatactgctgatcaagaagacttggatgtagaagatgaccatgaggaacagccttcaaatcaaactgtccgaagacctcaggctgtcattgaagatgctgtggctacctcaggcgtgagcacgctcagttctactgtgtctcatgattcccagagtgctcaccggtcactgaatgtacagcttggaaggatgaaaatagaaaccaatagattactggaagaattggttcggaaagagaaagaattacaagcactccttcatcgagctattgaagaaaaagaccaagaaattaaacacctgaagcttaagtcccaacccatagaaattcctgaattgcctgtatttcatctaaattcttctggcacaaatactgaagattctgaacttaccgactggctgagagtgaatggagctgatgaagacactataagccggtttttggctgaagattatacactattggatgttctctactatgttacacgtgatgacttaaaatgcttgagactaaggggagggatgctgtgcacactgtggaaggctatcattgactttcgaaacaaacagacttgactgttgctcaatctaatcttcgatggaaattctaaaaattaatacagagctgatcttcttgggggtgggaaaatcgaaaggagagga

SEQ ID NO: 43387 - DNA, 921 bp, Homo Sapiens
  misc_feature (713)..(713): n is a, c, g, or t
tacgcccctcttcccccgacatctgggggcgctggtggcacttactctaggttggtctcagactatccctccccttggctggttttccctcctaggcctgtctggcagcccccagacagacgtagctcctgggagtctcggccctggcaaccttggaagagccaagctgacattgtttagctcttcaggccactgggttttggaggcagaagtccagagatactggctctgccaagctgtcgtactgggctgtggcacagccttcgagacaacacgggtgtatctctgatcctgccctacctaggcttcaaggggcttctgtctggagaaatgccctcaaagggtaaccagtaggtgtggcattgaattggccagtgttagcatctacagccatcaccgagatgagtccactgccgttgcctgcccgagggccccctaaggttatagacggtatcagcagggaggccgtcccgctggttttctaggagagcccacaggaggaagggagcctcttcaggggcactggaatcttttgtgccaggggcttcttttcatcagagccggggagtacattgcagtgacttcttaaacatttgtgtgggacagacgagcgtgagggaggttttaagccaggcacaaagttagtttccaatactagttaataaatctatttttcttcatttcctttttttgcacagaagctggtaatctangacctacgtgtgaacaactttatatgaatattttttgtacttggtttacttgggttggtatgatacattatatttaaagtccttgaacactgtggatcccctaatgggtatgaatgactgaggctttgtaaaataagggacctttgtgtgaataaagttatttgatggggtcaaagaagccatatgtgatttgaaaaaaaaaaaaaaa

SEQ ID NO: 43388 - DNA, 643 bp, Homo Sapiens
tttaaacctgttggttaagtcattcccattaatgtcattttgctgagggtgacttggtccttttgaattgctttggtgtacgggtatgttctgatttttcatgcaagctcctctgccattccaccgctctgaggagtaattgtagcacttcacatgtgctgtggttgtgatcacatggtgacatacatagcatgtgtgttcccagctgttgtgtgtttatgtgacatttgatgccaatacatatgtcttcaaggtatgcttgttccctcccagctcgtggaatatcaaaaaaattcattgctggaaaaattatttcatagacaaaaatgttaatgttctcttggggacttagagttgaaaatatttgtatagatttggttctcaagtccacagaatcgtatctgctgtggtctccctttggtgctcatctgggagccatgtgtatggaagattctgtcacaggcggctgggatgtgggcagatgctgttagcctccctctccacgtggtggtccatgcctgacgtgtcccctagttcaaggaagcgccatctttagcatgaaaacaattgcgttcccctaggaaatgaagaaaaaatgagctgaaatttccttatacatttgaatttgttcattttttaaaga

SEQ ID NO: 43389 - DNA, 574 bp, Homo Sapiens
ccacgagaaaaaaatcacctcaacagccctgtgaagtgacctcagtgagatatttggtaccatggtgtaagctgatagcacaagttctggcgacaggtagcacgtatctgagagacacctgcaagcacacactgtcccagctggtacccataatgctgctgttcctgctgctgctcctgctttcctctcttctcgctttaaatgattgttagcaagttagattttcctggagcttcggaagaaatgaaaatggaaacatgatgaagatatagtcactgaatcaatgagaaaaataatgaacatatgaataccacctaaaaatacactgaataaagtacaccatatagcattatttttataggaaatatttcatgtcccttaaatattctttgttagttatagggatggacagtttatgttaagcacttagcttaaacaatccgtttatattagcactgtatcccttgtgccatccaacattttgtatgtttttgtaaacagttcatatacagtacatttctgtactgctttctttaatgtatacatgccttgtttaacttggaatctattatta

SEQ ID NO: 43390 - DNA, 722 bp, Homo Sapiens
ccgccctttttttttttttaaatgtatctcctgttgaatactcgggaaattcaaagggaagtgtggtcagcacacactgagcgttcttttctggagaggccggttttagcctcgtacctttagcaggaccgacagcgggtggaagggcccgtgtgctggatgggggtgtcgcctcctggatggcacaccctcccgaggacatccagacaggctgtgtcaccctccagcactttatgtgcctgctctgaggtgtcctgaacacacagcaacggcctctccttcatcacaggccggggattccttttgtgtttctgtataacatcgatgacgagctgaagctgttgtcacttcactgccctctttggaatttcttcattgtgctgactgattctattaggggctaacaataaaggcagtctacccactactatcatgcttgggaaacaagcgtcagcttgtacatatgacaagagaggaccctgaatacaccctctcttcatcagcccaagccttactgaggtgggatgaagacctcattctctgttctttaaaacatgtttcgtgaactaatattggtccatgtattttttgtccttttgggactctaagtgggtcaagaagcaaaaacatccatgtgttgtttggggggaattggcaccattttttcctgactatgtttcaattaactaaagaataaatgatgaagaaattctccttgtagc

SEQ ID NO: 43391 - DNA, 631 bp, Homo Sapiens
atctgccattcccaactctgggaaaaccaactaatatacaaccatataaatgaaggccatcttgatggtctcaacactaatttttatgatgcaaatttatacactgatttttgtaaaggacaaagttttaaaagcgtatttaacttgatgttttctatcagcataaataaaatggtcatgaatagtcattaaaaacagttgccagtgataatctgcatgaaggaaaaagaaccctgcaaatggctattgagttggaagtattgtttttgatatgtaagagatattcagaatgctcacactgaaaatgcctcaactttttaaagtgtaagaaaccaccatgagtggtgtctagatttctaatgaagaatcatgatacagtttggattaagtatcttggactggttttaaacagtgctttgtaccggatctgctgaagcatctgtccagctggtatcctgtgaaagtttgttattttctgagtagacattcttatagagtattgtctttaaaatcagattgtctcttctatattgaaagcatttttatgttttctaatttaaaaattaatattttcttatagatattgtgcaataaagctgaagtagaatggtgtggtttttgcaaatgcttt

SEQ ID NO: 43392 - DNA, 417 bp, Homo Sapiens
tatatataaaatgaaatatatgtttcattttagagaaataactattactttagatctttccaaatctgagaaagggaggctagcatgtgttcaaggttagcacgcaacagaatttcctaaaatcagaagaattggaagatcctccccttttgaaatggccctgctgtgtcagtttccctgtggccttttgaactgtacatctcacatgttgggaaacgctggccactgggaaatcattagaaaggaggctgtagaatatttgccgagcctctactgtataccagggctaactcaccaagcacattctaggaattgggccctgctcatgaggagccttagtggagattccaggtgaatatttatgaaaaagtcaacattagaactgaaaatggaaataaactgcttgaaaagaaaaaa

SEQ ID NO: 43393 - DNA, 596 bp, Homo Sapiens
ttataaagacagctataaagacagcactttccgcacacaaagtgtattttacaaaccttttttatacaaattaatgagctctactttatttaagtgttcatggaatgatgtaaattttaggtccagttgaacaaatattgagtgcctatcatatgcaagactaactccttactaggaatgaaatcacacagtgtcttctgtttgcagtatgtgaactttatgtttgaaaagaaattattatatttaaatttttttgttgtcagagtttatcattgtatactgtaacccagtaaattttgcattcagttttaaaaaatgaagatgtaacttacctgagtctcatttttgaaaatgaaattctgcaaaaattatttaaaaattagttcttggggaaattgattttcaagattcaagtgtataaaaacttatattgaacttttcagcctcgtttttaattagctgatgttaatgataagatacataatacatgtatcttgttgctgaaaatattttttgcatttcaacacattgagttaaaataaagttgttactacttattcaagattaaaaaaaagaaagaaaaaaataaaaaaaga

SEQ ID NO: 43394 - DNA, 815 bp, Homo Sapiens
gaagccaccaggccaccactctcaaaagaaacaacactaactcctccaattcctctcacctctccagaaaccagagctttggcaggggagacaacccgccgcccgccccgcagagggtggactccatccaggtgcacagctcccagccatctggccaggccgtgactgtctcgaggcagcccagcctcaacgcctacaactcactgacaaggtcggggctgaagcgtacgccctcgctaaagccggacgtaccccccaaaccatcctttgctcccctttccacatccatgaagcccaatgatgcgtgtacataatcccagggggagggggtcaggtgtcgaaccagcaggcaaggcgaggtgcccgctcagctcagcaaggttctcaactgcctcgagtacccaccagaccaagaaggcctgcggcagagccgaggacgctgggtcctcctctctgggacacaggggtactcacgaaaactgggccgcgtggtttggtgaaggtttgcaacggcggggactcaccttcattctcttccttcactttcccccacaccctacaacaggtcggacccacaaaagacttcagttatcatcacaaacatgagccaaaagcacatacctaccccatcccccacccccacacacacacacacatgcacacaacacatacacacacacgcacagaggtgaacagaaactgaaacattttgtccacaacttcacgggacgtggccagactgggtttgcgttccaacctgcaaaacacaaatacattttttaaaatcaagaaaatttaaaaaaaaaaaaaaaaaa

SEQ ID NO: 43395 - DNA, 628 bp, Homo Sapiens
  misc_feature (554)..(554): n is a, c, g, or t
  misc_feature (610)..(610): n is a, c, g, or t
agcacaaccattctgaagttactggagcatgggctcagctcatcctccctctggccccttctcccatggggacatctcggcccagcacccctatcccatttccagagttcttccttccccatctgggccttcataaaatgcaggggaagccagactggtctcaggagcgctaaagcccttccgtggggggtcgtctttctgggactagccctgctgtttaggacctgggaccacaatggggtacctgccgagggggtccccaagagatccaggctgtcatgtgatttatggtggcatgtgttgtgtatttgttggctacttgtgtcttgaaatctagaattatttcacgcagaattgtcactgtttgtcaggaagagaaaatgggctagtggaagcccagtcttgagttcttgtcttgttaccatttaaaattgacatttaattttcaaatcactgttggtgcctaatcacttaagttattaatttattctgttgtattcttttttttaaattgtaacatatttatccggtgggtgggacaggagtgtgttcangtgggtcatgtttttgctgtggtgacacatggtacaggcttggagcttgcaggtcnctttctactgtggtgttg

SEQ ID NO: 43396 - DNA, 707 bp, Homo Sapiens
gacatcgctttgattgaaatgaaaaaagacggaaacaaaaaagattgtgagctgcctcgttccatccctgcctgtgtcccctggtctccttacctattccaacctaatgatacatgcatcgtttctggctggggacgagaaaaagataacgaaagagtcttttcacttcagtggggtgaagttaaactaataagcaactgctctaagttttacggaaatcgtttctatgaaaaagaaatggaatgtgcaggtacatatgatggttccatcgatgcctgtaaaggggactctggaggccccttagtctgtatggatgccaacaatgtgacttatgtctggggtgttgtgagttggggggaaaactgtggaaaaccagagttcccaggtgtttacaccaaagtggccaattattttgactggattagctaccatgtaggaaggccttttatttctcagtacaatgtataaaattgtgatctctctcttcattctattctttttctctcaagagttccatttaatggaaataaaacggtataattaataattctctaggggggaaaaatgaagcaaatctcattggatatttttaaaggtctccacagagtttatgccatattggaatttgttgtataattctcaaataaatatttcggtgaagcgaaaaaaaaaaaaaaaaaatttttggggcccttggccttaaaaat

SEQ ID NO: 43397 - DNA, 593 bp, Homo Sapiens
  misc_feature (554)..(554): n is a, c, g, or t
  misc_feature (585)..(585): n is a, c, g, or t
  misc_feature (593)..(593): n is a, c, g, or t
gtaaggatgatggcaaattggacctcagtgttgtggagaatggaggtttgaaagcaaaaacaataacaaagaagcgaaagaaagaaattgaagaaagcaaggaacctggtgttgaagatacggaatggtcaaacacacagacagaggaggccatacagacccgttcaagaaccagaaagagagtccagaagtaattcagatgctgtgaaccagatttccttttctttgttttcttttgacttttttctccttttctatttgaactgttttattttcctgtgagtcttgcgaggtggaagtaatgattaaatactcatgtgttcagaaaacataaactttttttataaaaatattttgtacaattcattaaaggctaatttatgaaatttgaaaatcttcaggttatactccttaagttatcccaaagccgtgtgtttgtgatgttttggagtacatatatatgaaaattattatgacacgcacttttctaatcattgtacatttctcagagtggataaaaatgtttgacaaagtcctcacttttaaggaatgcnaagcttaaataaaactctcttttgttgatgncaacacan

SEQ ID NO: 43398 - DNA, 537 bp, Homo Sapiens
  misc_feature (179)..(179): n is a, c, g, or t
  misc_feature (372)..(372): n is a, c, g, or t
  misc_feature (510)..(510): n is a, c, g, or t
ttttgaatagggcaaataatcgaatgaggaatggaagttttaacatagtatatctatatgcttttccccataggaagaaattgactcttgcagtttttggatgctctgacttgtgcaatttcaatacacaggagattatgtaatgtaatatttttcataagcggttactatcaattganagttcaagccatgctttaggcaagagcaggcagcctcacatctttatttttgttacatccaaggtgaagagggcaacacatctgtgtaagctgctttttagtgtgtttatctgaaggccgttttccattttgcttaatgtaactacagacattatccagaaaatgcaaaattttctatcaaatggagccacantcggggaattcgtggtatttttaagaattgagtggttcctgctgttttttatttgatccaaacaatgttttgttttgttcttctctgtatgckgttgacctaatgatttatgcaatctctgtaatttcttatgcagtnaaattactacacaaactagccaaaaaa

SEQ ID NO: 43399 - DNA, 666 bp, Homo Sapiens
  misc_feature (627)..(627): n is a, c, g, or t
ggtcgccactcctctgctacacagcacggctttttcaaggctgtattgagaagggaagttaggaagaagggtgtgctgggctaaccagcccacagagctcacattcctgtcccttgggtgaaaaatacatgtccatcctgatatctcctgaattaagaaattagcctccacatgtgcaatggctttaagagccagaagcagggttctgggaattttgcaagttatcctgtggccaggtgtggtctcggttaccaaatacggttacctgcagctttttagtcctttgtgctcccacgggtctgcagagtcccatctgcccaaaggtcttgaagcttgacaggatgttttcattactcagtctcccagggcactgctggtccgtagggattcattggtcggggtgggagagttaaacaacatttaaacagagttctctcaaaaatgtctaaagggattgtaggtagataacatccaatcactgtttgcacttatctgaaatcttccctcttggctgcccccaggtatttactgtggagaacattgcataggaatgtctggaaaaagcctctacaacttgttacagccttcacatttgtacaattcattgattctcttttccttccacantaaaatggtatacaagaaaaaaaaaaaaaaaaaaaggac

SEQ ID NO: 43400 - DNA, 549 bp, Homo Sapiens
ctggaaacaattttatgtaataagcaatgggcccaaaagtctaggagtttttttgtacttagtgaatttgtatgcaacagagatgctgcagctgatgcctttaaaaggtattcatcatggaagagctgaggcctgtgcttggtgttccagagcccagggttgagcatcctgaaggagccactgcagccgtcactgtccccagagcctgtggagatagagcctgtttgctgctttttcttcccgctcttaagacatggctggagctcagtcttcattgaatgaagtttgctgtggtattgcatagccttgctttcttgaactaaactgtttgcccttcacaagtagttcttctttcaggattagttcgttccaaggaggctcttcagtctcacagataagtagatctctcctgctgtctggacacatttcactcggaaattgaatacaatttgtattcaggctgggaacctgaacacacacttgtgtttttaagcttcccttttttacagtggacaaggacacaaataataaataaatcatccctaatgc

SEQ ID NO: 43401 - DNA, 649 bp, Homo Sapiens
  misc_feature (590)..(590): n is a, c, g, or t
  misc_feature (595)..(595): n is a, c, g, or t
actcagaggactgtccagtgtctttctcgagaagcaggtggaaacatgagcattcagtttcttggtacagtgtacaaggtgaatatcttaaccagacttgccgcagaattgaacaaatttatgctggaaaaagtgactgaggacacaagcagtgttctgcgttccccgatgcccggagtggtggtggccgtctctgtcaagcctggagacgcggtagcagaaggtcaagaaatttgtgtgattgaagccatgaaaatgcagaatagtatgacagctgggaaaactggcacggtgaaatctgtgcactgtcaagctggagacacagttggagaaggggatctgctcgtggagctggaatgaaggatttataacctttcagtcatcacccaatttaattagccatttgcatgatgctttcacacacaattgattcaagcattatacaggaacacccctgtgcagctacgtttacgtcgtcatttattccacagagtcaagaccaatattctgccaaaaaatcaccaatggaaattttcattgatataaatacttgtacatatgatttgtacttctgctgtgagattccctantgtcnaaattaaatcaataaaactgagcatttgtctaaaaaaaaaaaaaaaaaaaaaaa

SEQ ID NO: 43402 - DNA, 635 bp, Homo Sapiens
  misc_feature (635)..(635): n is a, c, g, or t
ggcaactgtttgtagtatcctataactttgttcatacttaagttgtatctctttcctttttgtacttcatggcaaaattaattttctaaaggattcagagaggcgtttatattttataacatttattagaaataatttgttccaccactagattactgtattttatggaatctaagctgtatatgtgtacatttgtatacatgtatgtgtaaatgtaagcctgacgtgggttcagattccagttttgtcatcagcaagaggcctcggacccatgacttactgcctctgagccttggctttctgtgtatctctgccactgggataatggtacacataacagtggagtggggaccaatttctaaaactcatggcacctagtctttggtccataaatggtgtttgttattttagacactgagaaaaatcttattcacagaagttgcagattatttctgctagtcacttttttatttcttgagagctgccactcatttaatatttctcatttatgagaagagacttgactgatttagataaaagacgaattaaggaaaacctttgaacgtgagtagacaagcttcatatatctgtaaagtgaatattgaatggtagcttgagtcattcgtacttatcan

SEQ ID NO: 43403 - DNA, 646 bp, Homo Sapiens
caagatggcaccactgtgctccagcctgggggacagagcgagactccatctcaaaaaaaaaaaggaatcggacgaagaaccacaggatgttgaagacaactgtctgaagtatttgtgagggacagcgatgtggccctctgtgttaagaataacgtgtcctgctttggcagagagaagaaaatagccactgcccgctttcaaggcaagatcgaccttttctgttttgttttgtttttctttctttttcctggccatgaggacaaaaattactgagtggcccttaaagagggaagtttgttttcagctgttctcttttgcccgtaggtgggagggtggggattgctgcgtcctagctagaggaatggctttgcttgaatgtgtagtgcacacgcacgggtgtttctgtgtgctagttgcttcttgctgctgcttcctgcttgtctgggactcacatacataacgtgatatatatatatatatataaatgtataaatatatattttatttttttttaaatccttggagcttctggttcctatcagttcctgttgttaatcgtagaaccgttgtcccttcccccattcccgtatccatcatgttctttttcttttaaatatcaatataaaggtaaaaaaaaaaaaaaaaa

SEQ ID NO: 43404 - DNA, 921 bp, Homo Sapiens
  misc_feature (585)..(585): n is a, c, g, or t
  misc_feature (860)..(860): n is a, c, g, or t
  misc_feature (921)..(921): n is a, c, g, or t
tgtatttataaggaagagtcggaaaaaacaatgaccttagtttttttttaagcctgatgatactatggtttactctaataagatagctatattgataattatatttttgttactgtgcccttgcacattttggtctttttgttaatatttttattaataacacataattagtaaccactctactgtttcaagttaatctagtaatagagcttacatatatttgtataactgctataccactgaactgaatttattttacaacagtgtagaattcttgaaaagttaacgtagaaaatatccaaaaagcagtatttctagaaagtgtccaaaaagcagtatttctttcccttggttgtgagagtaactaattatataaatattacctcaaaaatacatacactggtatcacacagtctttctacaatgtttctgtattctgaaagctaaatattaagtactatttttccattcaaatattcatttagaatttcctttagaagatggcagtgattataatattaatatgatttcatttgttccagtggttagacatgaaatcatcttccttgtctcatgaaaacctanatataaaaaaaaggaaaatactggagtttttatttctcttgtctttgttacctcctctggttattataattttagcaccaacttcacacctagctaatttttttcatcctaaaagtggatgaaatggaacaagtacctaaaaatatttatttcagaataaaagtcaaggaagttagtgggttaaaaaaacagaacatgttagggagaactttccagaccgggaggttatgaaaatgaaggaatttagaacccatatttggggcttgaaactaccnccctcttaaatttaacccaacgaaaaaaagggggaattgcgcctcaaacaggggggagttn

SEQ ID NO: 43405 - DNA, 663 bp, Homo Sapiens
cacgagggtgtgtccagtttacagcgtctctgccccctagcgtgttttgtgacaatctccctgggtgaggagtgggtgcacccagccccgaggccagtggttgctcggggccttccgtgtgagttctagtgttcacttgatgccggggaatagaattagagaaaactctgacctgccgggttccagggactggtggaggtggatggcaggtccgactcgaccatgacttagttgtaagggtgtgtcggctttttcagtctcatgtgaaaatcctcctgtctctggcagcactgtctgcactttcttgtttactgtttgaagggacgagtaccaagccacaagaacacttcttttggccacagcataagctgatggtatgtaaggaaccgatgggccattaaacatgaactgaacggttaaaagcacagtctatggaacgctaatggagtcagcccctaaagctgtttgctttttcaggctttggattacatgcttttaatttgattttagaatctggacactttctatgaatgtaattcggctgagaaacatgttgctgagatgcaatcctcagtgttctctgtatgtaaatctgtgtatacaccacacgttacaactgcatgagcttcctctcgcacaagaccagctggaactgagcatgag

SEQ ID NO: 43406 - DNA, 604 bp, Homo Sapiens
ggcacttgccttccctctcttcccccgtgttggtaagagagaggccagttgtgatagtggccaaggagaatctagggctgtattgttgtccactgcagtaggcaccggccacatgtgactgctggcatgaaatagaagtgcagttcctccatcgcactgggtaaggcctccagtattggacagcacacagaaaggttttcatcatcaagagagttctgctggtcagccctgctccaggggatgcctctgccttcgcatagcacactgcttgaggccctgccaggcaccaagcactgccctgggcccatgggatagagcggggaaggtgatggctcttccagaggattccctcagatggggaggcagcagtatgagctctgagcagaagtgggtattgttgatacagaggaagttctttgccacgagaactttcaagcagtgaaaggaattcccatcaggactcagaccccagtgccgagatcttgccctgaatgtaccctgcctctgctttctcctgcatcccatgctaagcagggtcatggtctgaactactcagattggatttccaaaccatccttgtataaactgctcagaactagcatct

SEQ ID NO: 43407 - DNA, 969 bp, Homo Sapiens
  misc_feature (590)..(590): n is a, c, g, or t
  misc_feature (628)..(628): n is a, c, g, or t
  misc_feature (650)..(650): n is a, c, g, or t
  misc_feature (855)..(855): n is a, c, g, or t
cttatatacttttgatatgcgtgcactggacactcctgtaatggtccatatggatcatgtatctgcagtgcttgatgtggattactctcccactgggaaggagtttgtgtctgctagtttcgataaatctattcgaatctttcctgtagacaaaagtcgaagcagggaggtatatcatacaaagagaatgcaacatgttatctgtgtaaaatggacttctgacagcaagtatattatgtgtggatctgatgaaatgaacattcgcctgtggaaagctaatgcttctgaaaaattgggtgtgcttacatcacgagaaaaagcagccaaggattataaccagaaattgaaggagaaatttcagcattatcctcatataaaacgtatagctcgtcatcgacatctaccaaaatctatctatagccagattcaggaacagcgcatcatgaaagaagctcgtcgacgaaaggaagtgaatcgtattaaacacagcaagcctggatctgtgccacttgtgtcagagaagaagaaacacgtagtggcagttgtaaaataattggtattcctaacaatcctgatgtataattatttgntacttttgatttgagaactctacaaataaaagtgctgngactagattaaatgcaacattntaggtttatgtgtagagctttattgttactccttttagctaccctgaaaatgatcccttaaggtggcctagttggtaagactgttttatccttaatctgcattcttccttcattgaagaatccagtatttgcaactcattttttcttggtttaattaccgatatacctactttctctttgaccattaatgggagcacctatcatncaaattgaccattaacacccaacacctctaatggtattcttaaatattaccttgaaaaagattgaaagggagtgtcttcctgggttccccataacatgtaggaattatgtggtc

SEQ ID NO: 43408 - DNA, 581 bp, Homo Sapiens
  misc_feature (522)..(522): n is a, c, g, or t
gccatgctagcctaggcctctatttccttgtctccaaaatgagaataataaaatttaggtcaggattactatataaactaagataatacagtgattctcaaagttgttcagactgtatagtaaggagaaagtctggttgcactttgaagagtttgaagatttgaaagattcccaaaaaagcattttaaagtttacatttaagggaccttggacctcaaccctctcaagtttacaagtctgaaactttagacatcaaaagtttgagcagtttttccaaggcaacattgatagttagattcagggccaggctgtaagtctagaatttagatatcctgatcccccagataccgctcttctggttatacacagaccagctataatttgctaaacataaaatattgcagtgtattagccagctgtggctccagagtctgtgccctttaccaccgtgcccaactgtttcacatgctgtgtttggtagtttttcctagtactctccttaataatggtggtgtttagcanattgtattacataaataaatatttatttcatggattgaaaaaaaaaaaaaaaaaaggac

SEQ ID NO: 43409 - DNA, 903 bp, Homo Sapiens
ggacaagttcaagtaaacttgctgactgaagaacagtaactgccatcaagatgagagaactggaggagttccttgatccttgtatatacaataacataatttgtacatatgtaaaataaaattatgccatagcaagattgcttaaaatagcaacactctatatttagattgttaaaataactagtgttgcttggactattataatttaatgcatgttaggaaaatttcacattaatatttgctgacagctgacctttgtcatctttcttctattttattccctttcacaaaattttattcctatatagtttattgacaataatttcaggtttgtaaagatgccgggttttatatttttatagacaaataataagcaaagggagcactgggttgactttcaggtactaaatacctcaacctatggtataatggttgactgggtttctctgtatagtactggcatggtacggagatgtttcacgaagtttgttcatcagactcctgtgcaactttcccaatgtggcctaaaaatgcaacttctttttatttttctttcgtaaatgtcttacggtagaaattgtgtaatacgtcaaaagtcgattaactttcctcgcgaatttacaaaaacatcacaaagcaaacacaagccaccaaaagcaaaaaaacgcagacaaaaacgacacccaaaacagcaaccacccacaagccaaaacagtcaaaaagaaaagaacaaaagcacagaacaaaaaacgacacagaagcggggcgccgccgagtgcagaagcaaataaggatatccgcacgagaccagcagcgacaaaacaaaacaggcaacgagcgaaagaaacaaagtaataaagtagatgctcgaagaaaggagcatccgcaacacaaagaagggaa

SEQ ID NO: 43410 - DNA, 698 bp, Homo Sapiens
  misc_feature (688)..(688): n is a, c, g, or t
  misc_feature (690)..(690): n is a, c, g, or t
  misc_feature (693)..(693): n is a, c, g, or t
  misc_feature (696)..(698): n is a, c, g, or t
gctggtccggtccggaatttccgggatctggcattgcccctatcaactctgacccaccttgtagtagcgggcagtgtcagggacggggccaaactcctgagtgacggcattgcgcacggagttggccttgccgttttcaatgttgatggcaccaatgagcaggttgttggagatgttatccaagtgcccacggaacttgagccaggggccagcagctgagatgtggtcagtggtacacttccctttgaccttgggtggtaagtagagaggacagaggtcagggcatggccctggaggggtggatgacaagccctccagaggcaggcagcaggccccggggcccaggaggggtgacagaggggtgagaggcaggcaagtcttcagacacgtgttctgtggtcctggtgcttccaccctaaggccacatgggctcaggccaggccttcatcccctcaaaggcctctggctgctcagtctcccttatggggcagaggccgcccaaagttgggacaggtcaatgttcgctcacccttcaggcctcagctgcaagatcagccacagacctcatgctggacacaggagcccaggacatgcctgggtcctggctgatgactgattagtctcttctgtcacaggggtgcctggagaccccttaataagcagcataaataaatatctgacacggaananaanaannn

SEQ ID NO: 43411 - DNA, 552 bp, Homo Sapiens
gaaaaaataaaaaatcgattttaatattttctgcctctttcccaaattacccttcccacttgctcgacaaatctatgtaaagcagtttgttttttcatgttttaactttaccttgccctgtgttatggtactggctgacatgtctaagactggatgtgtatatttattatggtgtctaaaaatcatgaagttcatcacttttcaggagtatagataaaatcaaattggtagtacatcagagttacttttcagtgcaccatgacatcactaaaatgagtgctgtaatgttacagggctttcaggtttgtaaaaacataaccataaattatattgacgtcagatatgagttgagtatctataaaatatcacgtgtatctcaaaatattggactgctgtttgactggatattgctgcataattttcttctattgtcccatatccttttggagagagatttaatgggatttgaaatgtgcaagctgtctaaataagatgcagtcaaataaagtatggttaagttgaaaaaaaaaaaaaaaaaaaaaaaaaaaggac

SEQ ID NO: 43412 - DNA, 696 bp, Homo Sapiens
cgacgatgcggagcaggtgtgggtgtgggagtacgagacggaggaaggagcacacgacctctacatggacaccggcgaggagatccgcttccgggtggtggacgagagctttgttgacacgtcccccacagggcccagctcagcagatgccaccacttccagtgaggagctgccaaagaaggaggctccgtacacgcttgtgggatccatcagtgagccaggcctgggccttctctcctggtggaccagcaactagccctggggctggacagtggaccctaccagcctgcgggaaggtggtatggccggctgtgaagacaacagcagctgaggccgatgctaaggagatagtgtctcgagctggacagtgaggcaaggccaggagtgcccaccagcttgccccgctcctccaccatctaggccctgctcctccttcactgcagtgatggatccatctgtggctgtggctgttgggcctccactgaccttgactgaaaagacccttcctggaccctggacttgacaacaaacggcacagacaccaatcactcacagaacagtcactggttttggattcttgttttccttgcaagaacataaggttctctagaatccttcagccaccaatgaaatgatcaggcaggagaaaaactctagatgggagtcttgtcatcaaaaataaatacagttgcatgg

SEQ ID NO: 43413 - DNA, 777 bp, Homo Sapiens
gaagcaaggctgcgactgtgagtgtctgggcggcgggcgcatctcccaccagagtcaggacaagaagattcacgtgtacggctattccatggtgagccgcagccccgtcccgccctgccggaggccccagtaccagcttcgaggcccacctgagcctgctgccctgacccgtggccccagctgagcacgcaggcttcctggggttctcccagggtcggcggcagagccctccctccaggcccattgtgttcctgcattcccccatggagcacacgccagacctgaggggtgggacggacacccccaggcatggccggctgtctcctctccctgccttgggaggccttgctgggctctagctgtcctccagcactttgggccctgggcccccagaggcagtcagtacctgggtggagctcagagtccccacctgtgctcttcacaaaaaccaccagcagatgagacccacgtgcgtccctctgggcgcctcaggccccaggatccaccatcaaggcctatggtcctgcccagcacgccatttcaactgagaaaatcaaagccaagtaccccgactacgaggtcacctgggctaacgacggctactgagcactcccagcccggggcctgctgcctccagcagccacttcagagcccccgcctttgcctgcactcctcttgcagggctggccctgcctgctcctgcggcagcctctggtgacgtgctgtccaccagggccttggagacaggctagcctggccacgaattacccgtgttgc

SEQ ID NO: 43414 - DNA, 535 bp, Homo Sapiens
gattgggccatttaaaatgtgcatattggagcagaacattaaatctgtttccattttagtcacagaaaagaaaagcagagtcagctactgagagctctggaaagaaggatgtcaagaaggtgaaatcctaaagcctagaaataaagttttaaatgggaaactgctattttcttgttcccatcttcaaatgctaattgccagttccagtgtattcatggtactctaagaaaaatctctttggttttgatttcttgcatattttatatattttacaatgctttctacctgaaatgtgtagctttatattttatggcattctagtatttttgtgtactgtattttgtgcatttcatgtcttcatcaaaatcctctcagtccttgttcttttgaagcttgtgctgaggttttagcttatctatgttttatatgccgctgctttgaaagagaacctagattctatagttgtattattgtggtttcaacttaaggttatatggctgtggaaaacgattaaaaggtttaggagaaaaaaaaa

SEQ ID NO: 43415 - DNA, 438 bp, Homo Sapiens
  misc_feature (438)..(438): n is a, c, g, or t
gggagagcgactgccggaagtgactgcggacgaatcggcgtttgccgaggctggcatagatttggctgtctccgctcatagctgcttttggcgcgaaagatgccgggtctggttgactcaaaccctgccccgcctgagtctcaggagaagaagccgctgaagccctgctgcgcttgcccggagaccaagaaggcgcgcgatgcgtgtatcatcgagaaaggagaagaacactgtggacatctaattgaggcccacaaggaatgcatgagagccctaggatttaaaatatgaaatggtggtctgctgtgtgaataaataattcctgaagaatgaagaagattaattttgggagttctttgacgaactttgatatgtggaaaaagtatttataatttattgtaagaagaaagtaaaatattactagtggaagaccaaaan

SEQ ID NO: 43416 - DNA, 496 bp, Homo Sapiens
tgacgctggaccttttctttacccaaggatttttaaaactcagatttaaaacaaggggttactttacatcctactaagaagtttaagtaagtaagtttcattctaaaatcggaggtaaatagagtgcataaataattttgttttaatctttttgtttttcttttagacacattagctctggagtgagtctgtcataatatttgaacaaaaattgagagctttattgctgcattttaagcataattaatttggacattatttcgtgttgtgttctttataaccaccaagtattaaactgtaaatcataatgtaactgaagcataaacatcacatggcatgttttgtcattgttttcaggtactgagttcttacttgagtatcataatatattgtgtttaaacaccaacactgtaacatttacgaattatttttttaaacttcagttttactgcattttcacaacatatcaaacttcaccaaatatatgccttactat

SEQ ID NO: 43417 - DNA, 564 bp, Homo Sapiens
aacaggaggattttttaaaatcacagaattgatatttatctcaagactatcttaagctaatgtacttctgttacataattaaactatttctgctattatttttaaagcagtattattttataaccaattctaaaattcagctttaaaaatattgaacataccttcctaccacttacgcttcaagtttcatttattgaataccagggtcatatcttagaattgtatataaaacaacatgtaacccattcatgaaaaacgtttttaagtattgctttttgctgctatgttctgcattgagcctagttttgccattgtcccctgaatgtagtattatctatagattatacataactacatctattgcttttggtggtaaatcaagatttagttgtaattttccagctgtgaaaatgttgccttgtatttaaaagggtttcatgaatggaaacctaagtaaaactaagctcattagtgacagacttgttttcttcttgttattcctccagcaactccctcaccaccacgcctccctgcctaccatccccggaagggtgcttattcttt

SEQ ID NO: 43418 - DNA, 865 bp, Homo Sapiens
  misc_feature (796)..(796): n is a, c, g, or t
  misc_feature (821)..(821): n is a, c, g, or t
tctgcacagacttagaccttcaggaaacataggttaagcccccttttacaaagaaaaagtaaacatacttcagcatcttggagggtagttttcaaaactcaagtttcatgtttcaatgccaagttcttattttaaaaaataaaatctacttataagagaaaggtgcattacttaaaaaaaaaaaaactttaaagaaatgaaagaagaaccctcttcagatacttacttgaagactgttttcccctgttaatgagatatagctagatatcggtgtgtgtatttctttattattctctggtttttgatctggccttgcctccagggccaaacactgatttagaaagagagccttctagctattttggcattgatggctttttataccagtgtgtccagttagatttactaggcttactgacatgctattggtaaatcgcattaaagttcatctgaaccttctgtctgttgacttcttagtcctcagacatgggcctttgtgttttagaatatttgaatttgagttattgggccccactccctgttttttattaaagaacgtgagcctgggatactttcagaagtatctgttcaatgaaaaaaagttggtttcccatcaaatatgaataaaattctctatatatttcattgtattttggttatcagcagtcatcaataatgtttttccctcccctctcccacctcttatttttaattatgccaaatattcctaaataatatacttaagcctccatttcctcatccctactaagaaaagggggtgattgtatgtgtgaantgtatgtgaatgtatgaatcccatnttacccccaccccccattttggaagtctttttaaatgaaaacaa

SEQ ID NO: 43419 - DNA, 667 bp, Homo Sapiens
aaaaaaatatattaaattttcatacatactttacttgaattattgctgttgtccatatttttgcctctgtgagttcatctgatgattgagcagtagcatttgccttttgggttttttgtttgttattatagaagagatgacttctgctgattttgctttagaatggttaccttagaagaatttgggtggctcatgttgaatttcacttctgcaatagctttcattttctcataggctttataagagatgggttcagtggtatgagcagaggaagagatcccagatagtagccagttaaccaagactcattcatatagcacgtagtttatgttcctgaggcagcacttttagatcctttgtgagcaagttctatttgttcattgcttgccagagatgaacacagaatgttctgtttcattttacaagaactatcctgagtttctgtggatggaaacattacatgtaatgcagatatagtgaacactggaaagatttattaaagaattatatttgtgtatactttataaattagtccctcattagatttttttttcttaagcataagactgaacttaaatgtgttaattttagtagaatcaggcactgctcgcagaaggaacacagattgtagagattaacataaattgtccttgttctaatatatata
